United States Patent Application Publication US 2011/0183924 A1 - sequence listing, part 226

SEQ ID NO: 591166 - DNA, 899 bp, Homo sapiens
  misc_feature (1)..(1): n is a, c, g, or t
  misc_feature (108)..(108): n is a, c, g, or t
  misc_feature (124)..(124): n is a, c, g, or t
  misc_feature (173)..(173): n is a, c, g, or t
  misc_feature (203)..(203): n is a, c, g, or t
  misc_feature (238)..(238): n is a, c, g, or t
  misc_feature (311)..(311): n is a, c, g, or t
  misc_feature (317)..(317): n is a, c, g, or t
  misc_feature (335)..(335): n is a, c, g, or t
  misc_feature (366)..(366): n is a, c, g, or t
  misc_feature (378)..(378): n is a, c, g, or t
  misc_feature (386)..(386): n is a, c, g, or t
  misc_feature (399)..(401): n is a, c, g, or t
  misc_feature (405)..(406): n is a, c, g, or t
  misc_feature (410)..(410): n is a, c, g, or t
  misc_feature (412)..(413): n is a, c, g, or t
  misc_feature (415)..(415): n is a, c, g, or t
  misc_feature (417)..(417): n is a, c, g, or t
  misc_feature (421)..(421): n is a, c, g, or t
  misc_feature (426)..(426): n is a, c, g, or t
  misc_feature (439)..(439): n is a, c, g, or t
  misc_feature (452)..(452): n is a, c, g, or t
  misc_feature (460)..(460): n is a, c, g, or t
  misc_feature (500)..(500): n is a, c, g, or t
  misc_feature (528)..(528): n is a, c, g, or t
  misc_feature (559)..(559): n is a, c, g, or t
  misc_feature (682)..(682): n is a, c, g, or t
  misc_feature (816)..(816): n is a, c, g, or t
  misc_feature (820)..(820): n is a, c, g, or t
  misc_feature (827)..(827): n is a, c, g, or t
  misc_feature (829)..(830): n is a, c, g, or t
  misc_feature (832)..(832): n is a, c, g, or t
  misc_feature (875)..(875): n is a, c, g, or t
nttattggcaaaaaagaaaagggaaacttttaaacaatttaacacagggcattgtagctgatcctgtcagaaaaaaaaagtaccattttaaaagtccatctaattgtncaaagatacacaatantgaatctgcatacgcgtttcctttatgaagtacagtgctcatgttttangcagtcttctaaacatacaaatacagaggnaattaaatcactcattaaaaactgtgtcaaatgangggtattttaaatataagtttgttgtttctggtaatagcacatgcccaaatgaaaaccaaaagatggaaaggnagatanacttcttacttgggtggncagttacaacatcaatcattttctgcaatgnccattatatttnccatttancatgacctactcnnncctnnctangnnangnggcnggggngggggggggggangtaggggcaagangcctttantgcaggaggttaactcctccagaatcagcatagggaatanacatcctgttgattctgggtggaaaganattgatgtagtcaatttcaactcgtgctganctgacttaattttttcagcgatgtgtttggtgtcattcttctaaatcaagtgtatttaattcttcttctagttcatccaaatcctctccagtgaaaagattttcatcaacagggacggcatcnatggctccattttccgttccctccctctcgttgtcctcttccaagtcacttctttcaccattttcagccctacctccagaagcttcacttaatttgttttcatctttatctgaagtatatgtgctgaatctttnaagnctggctncnntnatacctgtttcatctacatctcttgggatgtacaggcttaaanctatgtcatttacactcactgaat

SEQ ID NO: 591167 - DNA, 353 bp, Homo sapiens
  misc_feature (40)..(40): n is a, c, g, or t
  misc_feature (113)..(113): n is a, c, g, or t
  misc_feature (329)..(329): n is a, c, g, or t
  misc_feature (341)..(341): n is a, c, g, or t
cggctctgttgtgtgtaattagtaacagttgtagcaaatnatccttaaaaaatgttctaactaaacattagaggccaggcgcggtggctcaggcctgtagtcccagcactttntgaggccgaggcaggtggatcacaaggtcaggagattgagaccatcccggctaacatggtgaaacaccgtctctactaaaaatacaaaaaattagccaggtgtggtggcgtgcgcctgtagtctcagctactcaggaggctgaagcaggagaatcgcttgaacctgggaggcagaggttgcggtgagccaagattgcatcactgcactccagcctnggcgacagagtnaggttccgtttc

SEQ ID NO: 591168 - DNA, 939 bp, Homo sapiens
  misc_feature (11)..(11): n is a, c, g, or t
cggcatggacntagcggcctccgagttcttcaggtctgggaagtatgacctggacttcaagtctcccgatgaccccagcaggtacatctcgcctgaccagctggctgacctgtacaagtccttcatcaaggactacccagtggtgtctatcgaagatccctttgaccaggataactggggagcttggcagaagttcacagccagtgcaggaatccaggtagtgggggatgatctcacagtgaccaacccaaagaggatcgccaaggccgtgaacgagaagtcctgcaactgcctcctgctcaaagtcaaccagattggctccgtgaccgagtctcttcaggcgtgcaagctggcccaggccaatggttggggcgtcatggtgtctcatcgttcgggggagactgaagataccttcatcgctgacctggttgtggggctgtgcactgggcagatcaagactggtgccccttgccgatctgagcgcttggccaagtacaaccagctcctcagaattgaagaggagctgggcagcaaggctaagtttgccggcaggaacttcagaaaccccttggccaagtaagctgtgggcaggcaagcccttcggtcacctgttggctacacagacccctccccttgtgtcagctcaggcagcttgaggcccccgaccaacacttgcaggggtccctgctagttagcgccccaccgccgtggagttcgtaccgcttccttagaacttctacagaagccaagctccctggagccctgttggcagctctagctttgcagtcgtgtaattggcccaagtcattgtttttctcgcctcactttccaccaagtgtttagagtcatgtgagcctcgtgtcatttccggggtggccacaggctagatccccggtggttttgtgctcaaaataaaaagcctcagtgacccatgagaaa

SEQ ID NO: 591169 - DNA, 536 bp, Homo sapiens
gccctgcatgaaaaggggatcctggcatcccactgtctggcactggtctccagctagtgctacttactagcaatgtgaccctgcagcactcaagtcacacagcctctgtgtctcacgctcgcttctctcggtaaacctgcgtttcataactactatcattctgtcacaacggtcagttcgcgacgttttaaaaggaagtacgaaacactgagtgctgcagtctgttagaatctagcacacacgtaatcactcaagtacacagatcccgcctagtaacttaatttcctggtcacaccttttgaccttcagttgtgctgtagccacccctagtccgtcctgctgcctgcccttggaatcatttccatggggacactgttgggcacgggtactgtgtcccttccaactccggtgccaagcatgaggcctggcgcttagtggagcctcaagagtgtctactgagcaaatgtcaatgaatattaaactgaggctggaggagcgagggtgctgggggcaatgtcgcgacacttggggcagac

SEQ ID NO: 591170 - DNA, 1195 bp, Homo sapiens
gttgtgtgctgccgtcttgttctcggcttgggtggtgcgtctttgtcggtgctgttcgcccctgggtcgtgcgcctcttgtctgtcggtctgcgccgcagtgggtgtcttcgtggagtcgttgtgtttcgttgtgctgttggttctcgtctgcggttgggttgttggtcgttgggtctgttggtggccgtcgtgtggccggggtgtctttccctgtgtgtctggcttgtgatttcctcgtgctcgctttggtttggtcggtgtggttgtatggtctgccggtagcttttggctgcgttatgggcgtgtctgtgggatcctctgtcgttctgtcgcggtacttttgatcttggtgtgtgaggtcgccgttgtgtgtgtgggttccccattgtgtgccccgtcccttaacgttggtgtgcgtgtatcgcgggcctatggccctgggattttggtttctaacggtcgtcgatgtgcttcatgtccctgtgctgttatgtctcctgttactgtctggagtgtcattcaatgaggattatgccctgtatccgaaggcgcttgtttggatcaggttggttgttgtgttgctcctttggtgatgtggcgtgtctctgtgttacagtcgcgtccagtcacttggctatattggcttatgttgtctttgggtttaggtatggtcctaggtatgacggagcggttatggatctggatagtgacaagtcatcactggtcttatggtccggaggtgcatttagtgacgggctggacgagtgtcccctgttatggggttcatgggtctgggttgttactatactgataggcatcccatcgcgttccgcccacgcgtcctggcaagcccttcggtcacctgttggctacacagacccctccccttgtgtcagctcaggcagcttgaggcccccgaccaacacttgcaggggtccctgctagttagcgccccaccgccgtggagttcgtaccgcttccttagaacttctacagaagccaagctccctggagccctgttggcagctctagctttgcagtcgtgtaattggcccaagtcattgtttttctcgcctcactttccaccaagtgtttagagtcatgtgagcctcgtgtcatttccggggtggccacaggctagatccccggtggttttgtgctcaaaataaaaagcctcagtgacccatgagaaa

SEQ ID NO: 591171 - DNA, 1412 bp, Homo sapiens
  misc_feature (11)..(11): n is a, c, g, or t
cggcatggacntagcggcctccgagttcttcaggtctgggaagtatgacctggacttcaagtctcccgatgaccccagcaggtacatctcgcctgaccagctggctgacctgtacaagtccttcatcaaggactacccagtggtgtctatcgaagatccctttgaccaggataactggggagcttggcagaagttcacagccagtgcaggaatccaggtagtgggggatgatctcacagtgaccaacccaaagaggatcgccaaggccgtgaacgagaagtcctgcaactgcctcctgctcaaagtcaaccagattggctccgtgaccgagtctcttcaggcgtgcaagctggcccaggccaatggttggggcgtcatggtgtctcatcgttcgggggagactgaagataccttcatcgctgacctggttgtggggctgtgcactgggcagatcaagactggtgccccttgccgatctgagcgcttggccaagtacaaccagctcctcagaattgaagaggagctgggcagcaaggctaagtttgccggcaggaacttcagaaaccccttggccaagtaagctgtgggcaggcaagcccttcggtcacctgttggctacacagacccctccccttgtgtcagctcaggcagcttgaggcccccgaccaacacttgcaggggtccctgctagttagcgccccaccgccgtggagttcgtaccgcttccttagaacttctacagaagccaagctccctggagccctgttggcagctctagctttgcagtcgtgtaattggcccaagtcattgtttttctcgcctcactttccaccaagtgtttagagtcatgtgagcctcgtgtcatttccggggtggccacaggctagatccccggtggttttgtgctcaaaataaaaagcctcagtgacccatgagaaaaaaaaaaaaaaaaaaaaaaaaaaaagagagccacaaaaaaaacaaaaaaaaaccaaaaacaacaatgtgtgtgggcgcggcgcatcggcgcccttgagagagaaggttttagaaaccacccgtggtgggggcgcgcgcggcggccccgaagcgatgagaggcaacacggggacaaaaagaggggtcccaagaggaaccactcgggggcaagagacaaaaagggggggggctccccacaataaaaacaccgcgccgggggaggggaccacgagggcgctcctcggagagcacactcccaagagaggacacaagagggggaacgcacaacaaaggggaggttaaaaacacaggaggggcgcacaacgaggaggcgcgaagatcacaaaaaaacaccccccctcaggcgtggtgggggggaacaacaaagaaaagaaaaaaaaaagacaaaacagagaaacaaagaaacagagaac

SEQ ID NO: 591172 - DNA, 118 bp, Homo sapiens
atgtgctccatcttaacgatatttggagtgtcagcactggtgctcacgtgtcgacggaactatgtacagtgaaggcatgcacctgcagtggtgaatacacgtctgaccatggctccat

SEQ ID NO: 591173 - DNA, 612 bp, Homo sapiens
  misc_feature (14)..(14): n is a, c, g, or t
  misc_feature (387)..(387): n is a, c, g, or t
  misc_feature (390)..(391): n is a, c, g, or t
  misc_feature (454)..(454): n is a, c, g, or t
  misc_feature (566)..(567): n is a, c, g, or t
aactaagatgtaantaggcctgatgtggaagagtgtttggagcaatgtcctacaccattttgctggtacagtctaccaagaggtcagaaggaagaacttatagttaactaactaatctgtttattgaattcatagaaggtgttagtaaaatgtgtgaagaacttctgaaaggaatgactgctatcgagtccgtatatcacatatgacatgattcaggtgcataatgttatagatgatctgggggacctcatctgcgtggtttaccgagctgatacctcgacataccagccttattacatagggctggcttaaagaggagatccaagtgctccttgatctgtaagggcacaggctgggaataattgttttggtagcagtctctggctncgnnaatttttttttaatccgacttttttggtttgaggctattttcctaggccagtttaccgtaacntcaatagggggggctcatcaggctttcttttcttaaaggagtttttggaaagccaaaattttagaaggggggctttattcaatggggttattttaaaaagaacctttgaagnntttgggaaaaggcagaaaggcataaccccccaaaataaaaaacac

SEQ ID NO: 591174 - DNA, 182 bp, Homo sapiens
gggttcttgagttttcccccccctagttccccctgaattttgtaacttccggtgttggcatcctctgttcctattcggcccttgctttgggtcatctcagtcatttgacttaaaaagggcccttcaaaaggcccctgttccctgcggcccttttcaatgaattaaaatttatttttgtttta

SEQ ID NO: 591175 - DNA, 172 bp, Homo sapiens
caatagaaagatgggatgtttgcgaggctgctatgtttcccctttcccccagtctctgagagcattggtaatttggacacctttattagtttgagataataattgggactcactgactgaggctggactgaagatttaaaacatggtgggtgcctagaacttcttgtcaatt

SEQ ID NO: 591176 - DNA, 487 bp, Homo sapiens
ggatcctccaactagtcaaggtatgttgcacatgacaatgtgacacatcatgaattacgagtaagcttaacaaatgcagtgacagcaaggtttctgaataataggatttattggaacccattaataattctaataatcctcataataaataacaacaataatgctacgttaatacatgagacaccatgtcacagacgatccactgagcgtgaggccatcgaagaatgtctgaatcaaagataaattccaagggctctcatgccaagagaatgattttatatttcagtgctctctacttcaatgctaccactcaaaacacttggaaaatacctcctgtgttcagggacagattattttgttacaaactcagtgatggcaaatctttggtaggtatcttggttctggattttggaaaacaataaaaggacttcattgtcctgtatggtgaataatataggcccccaaattggataacaccaatttggtt

SEQ ID NO: 591177 - DNA, 747 bp, Homo sapiens
  misc_feature (295)..(295): n is a, c, g, or t
  misc_feature (398)..(398): n is a, c, g, or t
tggaaatggcgggggtctcttttggtcccccagaatctagaagtgcaggtggcttatttcaaagggcgccgtcatagcgcacttacaacctttaaacctcctgtgggcctcaagcaatttctctccgtgccctcagcctttgggagttagcgtgggatttacaagttgcccgccaccacgccgtggctcgtgccaattactttctcatatctcagctcgtgctcagtgtttatacgtggtccttttctccctcccatattaacgagaagagttctgttctcctctctcctcgagngtgtgggtctcaaagtctccatgtgtgcaccttttctcgtgtttcacgaagctgtggagtttttgtggtgtctccacccacgtatatgaaaagagtggtggcncccgtgtctctcatcaacttctctctgtgacacgagctttactcagagcgctccagagctctcaaatatagcaagttctcttctcttattatttctccaaactcccagggtgcccccgaggatagctgtgccgttgggaatttacaactgtgcccccgaaaccccttcttcacagcccccagtggttaagagcctctgggccccgtgggagagctccccagggaccactccccggactgtggggacgctgctttgggtgtcacagcccccgggcttaaaagcctcttctccaagcctcttgtaggtaacctgaagggggttacagcccgggaatagcactccgggattc

SEQ ID NO: 591178 - DNA, 289 bp, Homo sapiens
cttttccctcactgatgcccatggtgctagaccccatatgaacattcagtttcttgaacacattattttattttatgactttgtttcttgcttatgtattcccctttctggcattttaaaaacagatgtgccctcttgtactaattattatttcatttctgtttaatatactcatcaaactatcacccttctgctaatttagagccactgctagactatgagctctttcatgggaggaactagatatggtagatatggtagtcagctactatataaggaaattgggaaa

SEQ ID NO: 591179 - DNA, 137 bp, Homo sapiens
agatctgagatcccgtactgtggtgtaccgtgacttgtgacctctggggcaggagctatttggatggagctgaaggatcaatgtctagttttcccctcagatcccacggtcaaactgcctccccttctgttttttgg

SEQ ID NO: 591180 - DNA, 356 bp, Homo sapiens
aggtcaaggcagctggatggcttgaggacaggatgttaacactagcctggccaacacggtgaaactgggtgttttctaaaaatacaaaaattacctgtgcatggtggtaggcgcctgtaatcccagttactcatgaggctgaggcagaaaaatcagttgaacctgggaggcaaaggttgtagtgagcccagatcgtgcctctgcaatccagcctgggcgacaaaccgaaacttcgtctccagaaatagagacagatagggtcccactctgtcacccaggctggagtgcagaggcccaaccacagctcactgcagcctcaaaatcccacacacaggcgatcctcccatcttacactc

SEQ ID NO: 591181 - DNA, 984 bp, Homo sapiens
gaaagtggccaatataatgttgagctacaagtgcagaaatgaagatgctcagtacagctttatcagagagtctgtagccgaaaaactatgtaaactagctgatggtgaaaagaccaccacagaagaatggctatgttctcttagaagaaggtacggaggaaacagcaatttcagcaacaagaaaataccagaggttaaacagaaatcaagcagccaatagaacataaaatagggagcatcatcagacagacaacacaaataaaacaatgctagaaactagaaccatatagaatatgccagaagcgtgcatgattgggtgcagttcattagttcacagccaactccacgaactaccacccagcagaggtgaaatcccttatccagtacttcagcccagtcattcaagaccacttaaggctggcttctgagaacttgccctcagtgcccacctccaaaatggacagcgatcaagtctgcaataagtgcccccaggaacttcaaggaagcaaacaagagatgagcgatttatttgaacattctgctccaatgctcagaggagccagactcctggcactggcttctggttgaagcagtgaaaacaacaggcccctatcctcagtgttctggctcatgtctccaggtggcagtgcatttcttgtctctgtgttggatccatcacttctgtggaggacaaatgtgcacctgaagccaagggacacaattcagacctccacagaaggacatacctggaaaacctgaggatcctaggcacgggggaacttcttaccaagacaaaagagcaaatccacaaaaggtacaagctcttagagatcccccgcacggggcggagtgcgcacaggaggcccacgaaaaaaaaggagcacctggagatcaagcgagacacaacccaagcacgtacgcggagagaggtcaacagacgggccacgggagccaagactccaacagacgaaaccagcccaaaag

SEQ ID NO: 591182 - DNA, 730 bp, Homo sapiens
ggagttcaagctccgggaagcagtttgttcgctatataaacatgtggataaacgacacgacgtttggctcgatgcaaagtctggagtctctgaagcgaatccatgaagtggcaggaagagatgagagaacaatagaatcaggggtggcaccagtgagccccgggatcagcagacagtgctcgtcagtctcagctgtgctcaggatgagcgtgtgtcccgtgtcttacctgcgcccctggttgcaccgagaaccagtggagctatgttccacattcctgcacgaagtcagggtccagaaagcccttcctccagaaccggagtttgtgtgacccccgagtatggctgcgagtgcttgtaagctgtctacagtcttcagacaacttttgtggggccccaaagtgtccgtgacctgaagaggtggaaaaacctcgtgtagaaatacgggcttgtgaacccaaagaaaggactgtagcgagccaatctgacggatatgctacttaccaggctggacctgtgctccggtacgggaaagcacattgttggaggaacagcagtatccttagaagtaaggaatggtctgaagaagttatgcaaagatggcggaaggagggatcaaatccaccaattagcattaagaaaaatataagctgctcccgagaaaggtgaagggagataggtggcacgaccgcaggcgcaagaaattcgacttaaaggaggctcttgatgagtc

SEQ ID NO: 591183 - DNA, 107 bp, Homo sapiens
agcagtgtccacaaacaggatggcttgctgatctaaaaagcttgaaatcatcgcacgtttttccactttgccacaaggcacacctacaccctcttatcccctatact

SEQ ID NO: 591184 - DNA, 127 bp, Homo sapiens
aattacaaaacaatcaaagctgatcatatgtttacatgtacttataacatgtcaccttcacttaagaatataaaatggtccccactacaacgtatattattaacttaacaacataacacttaatctc

SEQ ID NO: 591185 - DNA, 222 bp, Homo sapiens
gatgcaggagaagtcagagctctatgtataccatagtaactctagtgcattaggtttgttttttaattttaagttccaggcacatgtggaggatgtgcaggttgttacataggtagacatgtgctgtgatgttttgctgcacttatcaacctatcgcgtaggtattaagcccagcatgcattagccatttttcctgatgctattgaaacttctaaaactagg

SEQ ID NO: 591186 - DNA, 797 bp, Homo sapiens
  misc_feature (25)..(25): n is a, c, g, or t
  misc_feature (30)..(30): n is a, c, g, or t
  misc_feature (35)..(35): n is a, c, g, or t
  misc_feature (54)..(54): n is a, c, g, or t
  misc_feature (57)..(57): n is a, c, g, or t
  misc_feature (62)..(62): n is a, c, g, or t
  misc_feature (69)..(69): n is a, c, g, or t
  misc_feature (71)..(71): n is a, c, g, or t
  misc_feature (81)..(81): n is a, c, g, or t
  misc_feature (127)..(127): n is a, c, g, or t
  misc_feature (143)..(144): n is a, c, g, or t
  misc_feature (157)..(157): n is a, c, g, or t
  misc_feature (167)..(167): n is a, c, g, or t
  misc_feature (175)..(175): n is a, c, g, or t
  misc_feature (183)..(183): n is a, c, g, or t
  misc_feature (185)..(185): n is a, c, g, or t
  misc_feature (243)..(243): n is a, c, g, or t
  misc_feature (259)..(259): n is a, c, g, or t
  misc_feature (264)..(264): n is a, c, g, or t
  misc_feature (268)..(268): n is a, c, g, or t
  misc_feature (283)..(283): n is a, c, g, or t
  misc_feature (288)..(288): n is a, c, g, or t
  misc_feature (296)..(296): n is a, c, g, or t
  misc_feature (304)..(304): n is a, c, g, or t
  misc_feature (308)..(308): n is a, c, g, or t
  misc_feature (320)..(320): n is a, c, g, or t
  misc_feature (322)..(322): n is a, c, g, or t
  misc_feature (369)..(369): n is a, c, g, or t
  misc_feature (380)..(380): n is a, c, g, or t
  misc_feature (383)..(383): n is a, c, g, or t
  misc_feature (466)..(466): n is a, c, g, or t
  misc_feature (489)..(489): n is a, c, g, or t
  misc_feature (497)..(497): n is a, c, g, or t
  misc_feature (526)..(526): n is a, c, g, or t
  misc_feature (549)..(549): n is a, c, g, or t
  misc_feature (553)..(553): n is a, c, g, or t
  misc_feature (557)..(557): n is a, c, g, or t
  misc_feature (572)..(572): n is a, c, g, or t
  misc_feature (581)..(581): n is a, c, g, or t
  misc_feature (585)..(585): n is a, c, g, or t
  misc_feature (587)..(587): n is a, c, g, or t
  misc_feature (608)..(608): n is a, c, g, or t
  misc_feature (614)..(615): n is a, c, g, or t
  misc_feature (618)..(618): n is a, c, g, or t
  misc_feature (627)..(627): n is a, c, g, or t
  misc_feature (640)..(640): n is a, c, g, or t
  misc_feature (645)..(645): n is a, c, g, or t
  misc_feature (660)..(660): n is a, c, g, or t
  misc_feature (668)..(668): n is a, c, g, or t
  misc_feature (672)..(672): n is a, c, g, or t
  misc_feature (675)..(675): n is a, c, g, or t
  misc_feature (684)..(684): n is a, c, g, or t
  misc_feature (693)..(693): n is a, c, g, or t
  misc_feature (711)..(711): n is a, c, g, or t
  misc_feature (714)..(714): n is a, c, g, or t
  misc_feature (727)..(727): n is a, c, g, or t
  misc_feature (732)..(732): n is a, c, g, or t
  misc_feature (736)..(736): n is a, c, g, or t
  misc_feature (760)..(760): n is a, c, g, or t
taaggggggcggcttttattcaacngggcncaagncagggtacagggaagcccnggnggccnccacccncncccagggggnccaaaagccttcatacatctcaagggggggggcaaaaaaggggggnggggggggacgaaggnncaccattcaaaanaaaacaaaanaaaaaagnattaaggngnagattaaaaaaattttgcattacataatttacacgaaagcgatgctatcacccccccngggggggcttgggggngggcngggncattctccttagagngaagngggggggnttttaggntggnaaggggcttccngngacaacgcatctcaaatttgggatgactattaaaaaaacaacaatgngcaatcaaagnccncgcgccacattgtgaactttgggggatgctcgctccaaccgactgctgttaccttcaccgttccagtttttaaatcctgagtnaagccaaaaaaaaaaaaaaaccnaaacaaancaaaaaaaacaaataaagccatgccaatntcatcttgttttctgcgcaagtnaggntttntcaagaaagggggtnacgcaactnagtnanagtccgcctagaagcatttgngggggnnganggggggggngggctcgtcatantcctncttgctgatccacanctgctggnaggnggncagcgaggncagggtggngccgccgatccacacggngtncttgcgctcaggnggggnaatnatcttgatcttcattgtgctgggngcaggggagttatctccttctgcatcctgtcggcaat

SEQ ID NO: 591187 - DNA, 177 bp, Homo sapiens
ggttcccggggggggaaccggatttttccattttaaaatttcttttgaggggggcccccccccccggttaaaaccggttcaacttaattttttgggtccaggccccgaaagggaggtttacggtgggggccccttaaggtttatttttgggtttcctttaaaaaaatttggctttca

SEQ ID NO: 591188 - DNA, 184 bp, Homo sapiens
ggcataggactctgggtcacacgcctctggggacgtacgttcccatgtcgggagagccgtcataacgtccccgggattacagagaagagtggggggcagggcgcagcagctcaccccataaatctcagcactttggaaggccaaggcaggaggatcgcttgaacccgggagttcaagaccagcc

SEQ ID NO: 591189 - DNA, 112 bp, Homo sapiens
gagtcagacagtgccccgcatttcactgccaaaagtataaacgtcgggactcattcgtcacaggagagtacaccctgagcagtgaatcatgcatgccgtgacaggcctgatt

SEQ ID NO: 591190 - DNA, 443 bp, Homo sapiens
  misc_feature (231)..(231): n is a, c, g, or t
  misc_feature (244)..(244): n is a, c, g, or t
  misc_feature (257)..(257): n is a, c, g, or t
  misc_feature (269)..(269): n is a, c, g, or t
  misc_feature (285)..(285): n is a, c, g, or t
  misc_feature (324)..(324): n is a, c, g, or t
  misc_feature (344)..(344): n is a, c, g, or t
  misc_feature (369)..(369): n is a, c, g, or t
  misc_feature (389)..(389): n is a, c, g, or t
gagggagactccgtttcaaacaaacaaaacaaacaacaacaaaaaataaaaaatctttcagattaagctactcagttaaaaatgtaaagctggaaatgctcttccatcgacaatttctaaccgaagcatccttattctgtagtaattttcactgtgtcttgtcataacggaaacatcaaatattttatgtaatgattaacaaaaaatcataatatatgttaataactaaantatgtaaaaatangtattttcactcngatcagaaatanttgaactattaatcangatccagttatacctaaatgacttcttttgaaatgtcanttgatttcatacgaactaantttattctcatacatgttaagtccngtgaataacataattatggnctatatgatgaatagcacagtacagcagcttaaccatccttatagctttttatt

SEQ ID NO: 591191 - DNA, 136 bp, Homo sapiens
cgatacgggagaaacaacaaaggaaggaagaaagagaacagatgccctgcctgtaaacatgagtaaacagaagattcaaagctatattaagacaatactaatctgcttggacaacgcaaaactccttatccccccc

SEQ ID NO: 591192 - DNA, 200 bp, Homo sapiens
gactctaagcgatcccgtgtggttcttgcagaacagacacgcaggaccatcagaaactctgttactctgcctcatcctggcatggtcttctccatgggagaggagtgcctatgcacactatgttcctactgaacatcgtcgaggatgggctggccttggacaccacagagcagctggcggacctctggaaggaaaccacg

SEQ ID NO: 591193 - DNA, 906 bp, Homo sapiens
ggagtgtgtttaagagtagtgcttgtaccaacatgtcccgtggttccaggcgccggtttgaccgtcagatgaccattttttcacccgagggtcgggtctaccaagtagaatatgcttatagaaggctattaatcccagggatggccttacactcaggtagctgtcacgagggaaagactgtgcacgatatatttgtcatcacagaacgtaaagttaccttgacaagattattggactaccagcagcacgtgagctcacgttaatttcaagaatagactgacagaacagttggttgtggtgactgacgccggaagtgacagctgaacaggcagagttccctaagggtacacgtagggcatcgcataatgacggcggctaactggaaatacaagtatgggtatgagattccggtgggtgatgcggtgtaaaaagaattgggatatttctcagggtctacaacagcagaatgctgaagatgaggcctcgttggttgtagtaatgatggtaaatgggtatagatgaagagcaaggccctcaggtatatactgtgtgatccttggaggttactacttgtgggtttaaaaggcactgcagcgagggagttaagacaaagtgaggcaaccaggttcctgaaacgccacggtgaacgaagaaaatgggatgggcagttgagcgacaggggatactgcaattgaatgctgtgtaacggtccatcaatgaaccaaaaccgtcagaaaataacacgtggggggggccaggggaaatcctaggcgagatcggcaggaggccacgtgggggcaacctgtgctatcaggagcagaaaatggcgggtccacatcgggccctccggcgtggaccaccaaatcggggccgtggagagccccaccccagggggagcgaatacag

SEQ ID NO: 591194 - DNA, 136 bp, Homo sapiens
ccgtatccataatgtgtgccactaaatataggctttatgaagaaacataactgtgaaaatgtgtactcataaactgcagatcagtgaattattataagcagacacgatcctaaagctaacatcatccatttggttt

SEQ ID NO: 591195 - DNA, 603 bp, Homo sapiens
tgatctttttcaagcaataaataaaaccagacatattgacttctaaaaaaaaaaaaaaaaaaaaaaaaaaaaaaaaaaaaaaaaaaaaaaaaaaaaaaaaaaaaaaaagggggggggcaaaatccccccggggggccccatcccccccgttttttgttaacaggggggcccccactaagaggagatcgaattaaaatagaacagacaccagggcgcgccgatttataaaacaagccgtgctgcgtgcaaaacaacctgccctaatcgtggggaactactctttttgtgagaaaagccccaccaaacaactcgttggggggggagcgagagcacccatatcgtgtccgaagccccaaccctaccacctacagaacagaagattattaaacgccgcctcacggagcggcggaccaatatatataacactttctcagaacgtagtaaactacgtgcgggtacaacacacagcgccactattatccgcctcgggacgtaagagaagaatattccgggatcaccagggacgatatattatttaagaaacatattttcatctcacgggcggcgctttttgaatacaaacaggtcacaccaacgagcaca

SEQ ID NO: 591196 - DNA, 191 bp, Homo sapiens
tggactagcgagctgggtactagacctagaaggctctagacgcacttgtaaattacagccgctcagctatggctatacagttgttgctatcaatcatatcgtagacttaaaggaaaagaaacaggaaattgaaaaaccagtagctagtatctagaactcttcacaacattgccaatagtacagggttaagg

SEQ ID NO: 591197 - DNA, 510 bp, Homo sapiens
  misc_feature (474)..(474): n is a, c, g, or t
  misc_feature (481)..(481): n is a, c, g, or t
gttttttgggggggagaaaaaaccccccccaaaaaaaaagcctttttttagaaaaaaaagaaataaatcccccccccccccctttttttttttaaaaaaagaagcccccccccccccctggtggggagaaaaaaaaaaccccccccccctcctcaaaaaaaaaaaaaaaaaaaagaaggggggcaaaaaaaaaaaataagaagggccccctttcaaaaaaagaggcgccacacatttttttcccccccttttttaaaaaaaaaaaaaaccggcggtcccccccccggggaaaaaaacccccccccccaaaggggggggaaaaatttttttttacacaccccccttgtggggaaattttttttccaaaattgtgggaaaaagggccccccccccaaaattccagggggggggggccccaaacaccccccccccccccccccatttccccaaaattgggggggggcagccgggatncatagtntaagcgacgccaccgcgggagcccagttg

SEQ ID NO: 591198 - DNA, 1705 bp, Homo sapiens
gctctgttaaagctcgttcatcgctgtagataatatactctactcgctggcgtattctcgctagtttctctcaggctccctttctctcagtattcgcttttctcatgcgcgcctatatcgtgtatccagatcccgggttgatcatcatggcgaactgtaaaggctatacttctttctcgaagcagactactatctggggaaagatactcgagcgtctatattggagctcgccccgctttataaagggatgccaccattatacttctcttactgcggttgtgatctccaatccttctatcatcatcgcgaatagcccacataacgtctgcttgttggtgtatctcgtattacctgttctacaatggtctagaggtgcctagtggggttgcttccgcccggtagtatcccccggcggcatatttttttccgccccgggtggaattatgattctgaggttctcggtaggtcccttctatctgggatcatgctcctccccgggtcaaaggtgtgccccgttaacttccaatgttacgatataagggttagaatcatatgcgctccataggtgctgcaccattttggatcgctctgctgctttataatgccaggggggggggcccccctcttttccttccaacggtcccctgcttgccgccctgtacagttgggagtccgctttcgtccgggggcctccttaatgtccccacactggttgggagttcgtttcagcgcgtgttctcccaagcctttcccagctttaaatctcggggctttcgcgcgttctaaattaatgcgataaaggggccaccttgatccgttatgaactccctgatatctaatccatggcgttaaaaccgccaatgtaatttaacgcctatactttggactttgtggcccgtgccgtaagttgttataattcaatcctgtatgtagtaaatgtgcgatccaagttattcgccatatggggcgccacccctattcaaccatactcatctccttggttcctcatgtataaatggacgccttttccgaaattatcggggggaggtaaatgtctcctaatgtctagatgtaacgcgttcaggagaactgtgtttttttcgctatcggcaaaggatgttatgttgcacttgaggccctgttatttaccctagcgttcccaagtcgcttaaggctcgctcgtagcccctccccctaatttaataggtaagaggtcacccttgggctcacgcgctaatctatagggctattgcagcctcgcgggcttagagagtgcgccgctatgtatagttccctagcttcgcgtatagagcagctagtcgcggtagtgtacgtgcggcattcaggggaggtagtcaagtgcagccgtgaggcgtcagccattagttcgtgagactagagaagagcaagccgaaatccagaatgaattcaagcactgcttattagcaatttgtagctgggtcgtctatttttacacctccgtagcaagcgctgcagagtagcttgcgagtgctccgcttcagccattgtccgacggcatgctaacggctgcaagcatttgtttgtagccacaggcttgccacggacttgcacgtcacttattggctcaactttcctcactatctgcttcagtccgccaacgtaatatcttcagctttacatccaaacatcactttggcttcgaagccgcatcctgactactgga

SEQ ID NO: 591199 - DNA, 1384 bp, Homo sapiens
cttgtgcaaaggacttgcagattaaaaaaaaaaaaaaaaaaaaaaaaaaaaaaaaaaaaaaaaaaaccgtctttctttctccccagggcctctataacacccaaatttttattttgtggtatagaaagcccctttttacccaggggcagagattatatcagtttttatatcgcggggtgtggaaagggcttcccaagtaggggacacccatgcttctcgtaggggagcccgcagaaatgtcgctacacggggcggccttttttgatatccgacaaaagggggaaaaaacgtcatgagcccaattacctatttataaaaacaggtcgtcatttgaggatattgttgctccaatacgcttcacataatcacttctagaagctataaatataagcgcccgcgggagagagcaaacaaaaagagccgccatggggcgggggccaccaattatacatagtaggcaaaaggtgaggcgctccacagcaccactaaccagcatcgagagagaaacgcactcaccaccgaataaaaaaggcgccacagggagggccccccttcgaggcaacaaatcgacgagcacgaacggggagctactacacaaggggaagaaataaataggcgccagggcacaacaaggcaccataagggggggagagcatccctcccaaagagggaggcgctcccccatgtgatgaagcgcgcgggggacgaacaagacacaaagagagagaccaagggaggcctacaccatacgataggaacacttaggtgcgtcctacgcataaaagaggagagaaacacaaccaaaaaggtaatatggaaggtagccgcgccaaaagaaaaaaccatatgtggtgcgaactacagaaatctcccccccgcccgggtaggtaataaaactatagaacagacaaaccgcccctagtaagggagacacaacgttatatttacacaaagacaaccctcgtagtcagtaagtcggagcagaaacaacccacaaccgtaagaactcccatataacaaagagacacggggtaggagggggtggccataacgatccccccccacccagcctgagggaagaaaaatatacgcaaagaagacgaggaatccagacgagggagaccagcacaacaagacaagacaggagacttgacaaacaaaagacgactaggcagagagacggattcctcccccaaacaactgtagttggacagcgacagaacaacaccccggattaggggacaaaaaacaacacctttcaaccaaccaaataattattgagagacacgtaacaggtggccggacaaacaatacactgaaccaaagccacgagggacacagacaagacacttcgcgtgggagagagaaagacagaggtgcagac

SEQ ID NO: 591200 - DNA, 138 bp, Homo sapiens
attgtgatggtcctggagactctctgtaggcaggagggtgatgcatggcagaggcagctacagggcccggaggtgggaatgacactgacttggcctatgtgtagaaatgggctaacaaagtgtggctggagtggagcc

SEQ ID NO: 591201 - DNA, 114 bp, Homo sapiens
catagatatgcgcatctattgtccaaatagaattctgattcatctcgggggtgcacaccttcaattttaagaggagctccctgctccctttggttccggagaccccgcttatag

SEQ ID NO: 591202 - DNA, 234 bp, Homo sapiens
tagagagaaggcagattagtcgttgcttaggctgaaggtttcgggaggacaaaggggtgactcctaattagtatgggccttctgatttggcgtgatgtaaacgttgtaaagttgattgtggtaatcctggcacaactctgagtctactaaacaccactgaattgtatactgtgaatgtctgaactgtgtggtatgtagactttatctcaagttgttataaaaagctcagttcca

SEQ ID NO: 591203 - DNA, 239 bp, Homo sapiens
  misc_feature (230)..(231): n is a, c, g, or t
gacaggccagcactccaattcaggaaatacagagatcaccacaaacatgctccccgagaagagcaaccccaagacatgtaatcgtcagatttaccaaggctgaaatgaaggaaaatatattaagggcagccagagaggtcgggttacccacgaaagggaagcccatcccgtgttagtcttaccatggcggatctactctcagaacaccctgcaagtgccagaagagagtnngggggcct

SEQ ID NO: 591204 - DNA, 396 bp, Homo sapiens
  misc_feature (263)..(263): n is a, c, g, or t
  misc_feature (359)..(359): n is a, c, g, or t
tgaatcagagtaccagattacgggcatctcaaagggcctatgtcttattttcctttctgataggataactcttccatcccctgaagtctataagcaacttattcgcatgtccaatggacagggtgggtaattacttttcttccccattgaaaataaagatgggtattttgagttcaattgtagaaaactaatacccctacactgaatttttttaaatgcagatcttttttcctgacaaaaaactagggtcaacagtcaagacnactccactaactcttcagagtattagagttcatcatcagtgaatcttctgtggaatttttcatcagttggagtgcagtatcagaactattactacnaatgtactgaactgtgtcagtatcgttcgaccgcgac

SEQ ID NO: 591205 - DNA, 302 bp, Homo sapiens
  misc_feature (3)..(3): n is a, c, g, or t
ggntgaaaaactggcttttcctttctcgctgcctattttcactctcagagagaggcaggcaactggagctccactgggtcactctgagagggctgtggctctggttcttattaaaccagggccaggtgcagggctcacacctgtaatcccagcactttgggaaggtcacttgagctcaggagttcaagaccagcctgggcaacatagtgagaccttgtctctggaaaacaattagctgggcatgggggacacacctgtagtcccagctacttgggaggctgaggcgggaggatggctttagc

SEQ ID NO: 591206 - DNA, 154 bp, Homo sapiens
agggcattgagcaacggatataatcagataaatgtagtgtcacgtgatgtaaacagaagaattttaagaaaatttcccttaatttaacaattaagcaaaataataattatgcatttagagttcatatggtaatatttcaaggtaatgtgtgttt

SEQ ID NO: 591207 - DNA, 131 bp, Homo sapiens
tctaacagttcatagagcaagaaaataacaagccaggactagacacctatgttctcttggctgctggtccagtattcttggtactatgttccatatactgtcaacttagccagcttcccattcttaaacct

SEQ ID NO: 591208 - DNA, 191 bp, Homo sapiens
  misc_feature (13)..(13): n is a, c, g, or t
  misc_feature (22)..(24): n is a, c, g, or t
cggagttccagantccccaaannnatcttccacaacttcatggagaggctctgggcatacctgactatccagcagctgcgaggcaaaactgtctccgcatccgatgctgatcagcaggccctccggaaccaagcgctgaatttatcacttgcctaaagctttgtcacgcctctcacatctatgggtagtaa

SEQ ID NO: 591209 - DNA, 226 bp, Homo sapiens
ctaattggttcttcgatgacgctaattggttctcccctctactgtctgagtaaacaaaacttcatgtacaaataatggacgtgaaataattctcatagtctttttaaatgtagtaaacttcccacttaacacaaaggccaatctaatgtgatttaaacccctcatgatgccgcagcaggtgtttcagggaagggaggccctagatcgtcatcgaagaaccaattag

SEQ ID NO: 591210 - DNA, 710 bp, Homo sapiens
gctgcttactgcaactcgctccggccgctgggcgtagctgcgactcggcggatcccggcggcgcgtccttgttctaacccggcgcgcatgaccgtcgcgcggccgagcgtgcccgcggtcgctgcccctcctcggggagctgccccggtgctgctgctggtgctgttgtgcctgccggccgtgtggggtgacttgtggcccttcccccagatgtacctaatgccccagccaagcttgggaaaggccgtacaagttttcccgaggatactgtataacgtacaactgtgaagaaagctttgtgaaaatccctggcgagaaggactcaggtgatctgccttaagggcagtcaactggtcagatatggaacgcagttctgcaatcgtaagctgcgaaggttgccaacaaggctaaattctgcatccctcaaacagccttatatcactcagaattatttcccagtcgggtactgtgtggggaatatgagttgccgtccaggttacagaaagagaacccttcgtctatcaccaaaataccttgcccttcaggaatttacaaatggtcccacagccagttcgaactttgtacacgcgacagtcatgccctaatccggggagaaatacgaaatggtcagattgatgtccaggtggcatattatttgggtggacaccatctccttcttcagttccccagggtacacattaatgggctcc

SEQ ID NO: 591211 - DNA, 100 bp, Homo sapiens
cacgtaggttcagatataggacatggatatcttgtgggggggaacaagtattcagactaccacagatgcatactcatctctctctctgtatctgaggaga

SEQ ID NO: 591212 - DNA, 303 bp, Homo sapiens
taaaacacaagaagatgcaaatgtgatagtctcagtgcaacttggagttagctgttgatatgaggcttagtggttgtgagaaagtaggacgttctgtgggatgagaaaaatatgagaagatacacccattttactcaacgtgcctggcaaggttccctagataagtagtgtacaatcaaatgcatattggaacgaactctggaacgtaatctacggcagcttagactcttaagcatccaagatgtgtgactggtggggcaacacgttgacgtttaaagcaacctgattatcaagcagaactct

SEQ ID NO: 591213 - DNA, 802 bp, Homo sapiens
taacagtcttgaaaatgctttattggaaatgtgtgacttatggtgcagatgtgtgtttggaaagaccacagcttgaaaactggatttttggaaacttctcaacaaccaaatgaaaaaaaatgaaaatccctaatggggcttgacttctagtgtaaccagaagcctgggtgtaaagtttccctttaaacattatccattacagaactaaagaaaacaaagctattggtgatttgggaaatcggtgggagtttggaagtttcagaggaagaagcaacagttttctcaaacattgtagggtggacttctttttggggttacatttgggatgaacatgggacttcacagttctcggaaagaacaccgggaggggtgtccaagtctggtatgcttgtcatgttgaaaaaacggagatacacggacaggaaaggaacaaggttgacaggagaaagagaggagacttggaaaagggctcagagaaaagagaacgggaccgagacatgattaggttaagtctagttataaatttatcagaagctgtgcgcacctttttaaaagtcctaaatttactttccaaaaagggggggtcccagaccccgaaacccggtgtccctgcctttggagctatggtgaaagtctatgcacaaaaactgaaacgggacactaacaattaaccgggccttccaaacccaaaacaaaccaaaaaagcttgacattttttttaccataggattactacatataggcataatgggtgcatgattcattaagaggcttaattttaagccagaaaaataacacacaa

SEQ ID NO: 591214 - DNA, 273 bp, Homo sapiens
atctagaggatcctcctgctgctccctcttcacagtaaaattctgtagataaaaactagcatttaaaaccatactccagggcaggttcagtggctcacacctgtaatcccagcattttgggaggctgaggtgggcggatcacctggggtcaggagttcgagaccagcctggccagtatggtgaaacctcgtctctactaaaaataatgaaaaatagctgagcatggtggcacatgcctgtaatcccagctgctcaggaggctgaggcaggggt

SEQ ID NO: 591215 - DNA, 496 bp, Homo sapiens
aggcggaccacagaggcgtgattggcatgaagacggtggattatgcggagataattccaaaaaggaatgacctgaggctggtttgtgcaggtctacccaagaacagcccaggatgtcgttaaaggctgatgctctctgttagttggtaaacagctctcatggtgccctctcccccactgtacccctccctgtccacgcaccagcaattcaatagttaacccctggatccctgtgccaccagtgggggcccaggacatcagccaccccaaagctcacttatctgggtctggcttgcaggcagcccactttggccttttacagttattgttacactttactttttcctacaattttctaatctagagtgaaatggccaccagagagtataaacgccagagtgtgatgagaaaaagaggatgtcggctcctcatcctagtgcagcatggcctccagagcttattaaggccatgggaatctgcagacccattcagcctct

SEQ ID NO: 591216 - DNA, 246 bp, Homo sapiens
atgggggcccctggggggtttggaaactccccccaaccctaggacccggaccgggggccgggggggcctttggccccctccccgggtttaaacaggcccgtgggggggggttttggggggttaccaaggggggcggtaaggggccaaactgccccccggggtagggcccccccccgcccccccccagggggggcgggccaggccggccccccccccccccttttaataaaggggggccccttttta

SEQ ID NO: 591217 - DNA, 270 bp, Homo sapiens
  misc_feature (67)..(67): n is a, c, g, or t
  misc_feature (101)..(101): n is a, c, g, or t
  misc_feature (136)..(136): n is a, c, g, or t
  misc_feature (225)..(225): n is a, c, g, or t
  misc_feature (246)..(246): n is a, c, g, or t
cagaccttcaactgagataggaatctggtgctggatataggcgtctatggcaccccagctgcatgtnaacagcagcagcaagccctccttgaagggtgaanggcattcacagtctccagttttctctacaattttnataaatgttgtccgtgattcaaccagagtttccagcagaggccaagctgggtggatcacttgaggtcaggagtttgagaccagcctggncaacatggtgaaacacatctntactaaagatacaaaaaattagcg

SEQ ID NO: 591218 - DNA, 964 bp, Homo sapiens
gaccagcttccatacctccccggctaccgctcggttcctaggacaccccgcagcccctgcccaggtgccatggccgcattgtacacgccctggactgcggctataactaggcatagggctagagcccctatgggctggccatacatgccgtagacatccagaccctgacgagtgcttagctggagatctagggctcagctatcccactaggcatatcgagaattctgctagagcacagtagcccgcctagtagccaaccagagggcatccacatctagtgataggaactagaggctagagaatactagccacactagaccctgctgcgagcagcagggcctcataccgaaagctaccccaagtacaataactgctggctggcccgcacagaccccaaggatagtggcacgagtagagagcaagacggagatatgaaactccttctcagcgggacacggtaccactacccgcctggatggggcccgtagcgccagctgggcaactggcaagtaccaccagcctgataatccagcgagctgtggatagagaggtaaaccaggctgcatagcagggccgaaacatgtaatgagcatccattcagcatgggtcctagtagcgctccccactgtacccgccatcgagctgcagctacactgactcagacatatgtcgctccaacagcatgcgtattactggaccacgactgcggaacaccctgcgctacagagccccagggcaaatggtcacatttggaaaagaggacttgacacaccgagagcccaaggcccctggcacccgcgaccaggggacagccccgctcacgcaaagtagaacggcgccaacccagaacgcacaccccgaaatggccaaggaaaacccgaacaaacagggaagaacagaaccaacaggaagcgacaacggcgggaaactccagagaggacaaagagcttgcgccaaggcatgc

SEQ ID NO: 591219 - DNA, 136 bp, Homo sapiens
ctgttatcctttcattcattggatttatttgaggtaggataacgggtaataattttgtttgttatctttggtaacactgtgaaaactttgccagttgatgtgaagctgtgcagttataaactaacgttctatatgc

SEQ ID NO: 591220 - DNA, 342 bp, Homo sapiens
  misc_feature (160)..(160): n is a, c, g, or t
ctcaattggacgaaggaaagccacccaagctgtccttatgccaggagtgccgacaggtcaggaggttgggccagcggacaggagcatttcacactcactaacctaacttgtgaagctgtatgggaccatcttcaactggccttatgaggagaaccagatngcttatgggagaatccacaggacggagaggagcgatagggaacgtggctggggaggaggctatagccccttcctttctgggctccggtataggcagccagggctccaggtcctggtcgtgacctcacaatgacagcacagtttttgcagcttaaagatcacccatctgcccctacctagcta

SEQ ID NO: 591221 - DNA, 350 bp, Homo sapiens
gtaaggttaagtgacctgtcctatcagggccacaaagccagttaaacttttttattaactgagtcacttaaaaatcatttatttaaaaacctattttgttccaggaactattctgggtactggaaataaaacagtggagacagagagaggggaaataaaaaacaagacaaaaatgattgctttggtggagtttatatattccactggaagaaggtagataataaataaaagtgaaaaagtacattataaggtgggaggaaggcttgagcctaggaggttgaggttgcagtgggccgagattgtgccactgcactctagactgggcaacagggcaagacgttgtctcaaaa

SEQ ID NO: 591222 - DNA, 570 bp, Homo sapiens
  misc_feature (316)..(316): n is a, c, g, or t
  misc_feature (323)..(323): n is a, c, g, or t
  misc_feature (377)..(377): n is a, c, g, or t
  misc_feature (381)..(381): n is a, c, g, or t
ggccggccggtggctgcaccacactgggtcccacgctggatccagcggcctgctaaggaaccgggggccggacgggagcacagaggcaagccaatcactaaacatatcaacacagacccaagacagctcagaatataaaataacaatccactttataaaccagaatggtgaaacattaacaaccaaaggaaaaatgggtaattctctgctaaatgttaaggttaaaaataatctagatattgatggctttggtgcatgtaagggaaccctgacttgttcaacctatcacctcatctttaaatatcacatatatganaaattanatacaatcactgataaggaaaatgacatactcaatctggcatatagactaacanacanatcacagttggactaccaaatctatttaacaaaatctatagacaatatgactgttcaaatgcctaaaacaatggctaataccaaacaatccattgatatagacaatacctgctaaactataacaaataggaatattgtcatagaaatttacctatgtttataattattatgtcttaaaaggattaaatt

SEQ ID NO: 591223 - DNA, 186 bp, Homo sapiens
cccgacgggtgctccaatttcatgtggggatcagtggtttgtgagattccctcaaccagaagatggaggtgcatcgccggccctggttagtgaagctcgcgggatcagcgttggatcacgattgccggcgttcgtgaactgcagttctcgccacatctgcctcttctcacagatcacgaggggtac

SEQ ID NO: 591224 - DNA, 163 bp, Homo sapiens
tatctgtggtgtcgtgtacgagtatgtatttacacttcactgttgcttgactaactgcccagatgtgagagttgaaccttgttgagagctcccatgtggtttagttctcctgcggtaatatttgagtttctgaccctacaaacctcaactcacttaggcacaa

SEQ ID NO: 591225 - DNA, 628 bp, Homo sapiens
acgtcccaaccgtcccaacccggtgtgtgccagtgtcgaatctccgatcccagcaccagcaggaaggatcaccgggtgaccaaaatgtgtgcctcctcctgtgacttcgttaaacgacactttttctcagacaatttgatggggtttattaactttgggatcttaaaggtccacgtggactcctgcaaaaaggatttttgcaatggggcggcaggggcagggcacagcccctgggccctggccggggggttcctgttcagcctggggcctgccctcctttggggtgggccctgatgtttcctccttcccacgggggttttgagcttgttcccctgagcctgtgggtgccctttccccagcctggggtggttgggggtgggggcacccttggcccagctccgtggctgtggcctgtggttttcactcctcccccgaggtgaagcctccctgtttttccgccagttttgagtcccaggcaggtggacatttccaggaaaccaggccatttgggcaggaggcctggggatgagggtggggggggacccccaggtcccggaggggaagtgaagcaacagcccagctggaagggggttttttgcggaaaaaaaaagtcccttttgagtcctga

SEQ ID NO: 591226 - DNA, 841 bp, Homo sapiens
ggttggtgccaagatgtgctggccgccgaggtgacctggtgtggctgacggcgagcgtgtggcatgacctgtgcttccgtaaccactgtcgtgttcgttgcgtgctcctggtgagggactcgaaagaaccatgagtccaacctgaagctgagaaaccgagcttcttctgtcgttgccttctgtctgcctgcctgccgctagttgcgtgacgagaaacgtggtcttgtggcctcgtgctggagatgcttttccttgtgggactggaggaagacatgctccttcttgagtcgttcgccttcggggccccagctggcgtgctggcgaagagcccgcccgtgtcccagtaccagaggattcgctttgcataaagtccacgcccttgtttgaaagtctagtcaaggtcttgttaaggcccaacacagacggtcatgtagcacttataggaactaaaaggacttatggtacttagaattacctaagaggattgggggcaatgatgtctggacttgtgaggggctgcgacggagtgggagcagtgtagtacttgtaggtaggcaggtccaggtatgcggggggcgggtgtagtgaggccagggtcggaggtcggtgggagtggttggcgcggtgcgtggagtggtagtccggggtgagagtccgtgtgagtcgccgggcggtagggcgggctggtggggcgggtcggggagtatggttgtggttcaagaaagttgaacgtccaggtacggtgagagcccggggtgacggcgcagggttgccgtggcatagggtacttgcagcaaggccgaccgcaggggcgaggtctgggacatcggatcaggtatgg

SEQ ID NO: 591227 - DNA, 800 bp, Homo sapiens
atgcccataaatcaagcagtagtttttggctttcatatcttattatttaagacatatatttcataaggttatagctgtcataaattgcaattcttctgatggatctgggcaaagtaaattgaaaacctttggaaaaggattcaccattctagatgccattagtaacaattgtgatttagggaagaaggtcaaagtgtcaaccttaacagaagttttgacaagttgattccagctctcctggatgacttttagaggttcaagacatcagtggagcaagtcactgcagatgtggtaaaaacagcgcaagaattagaatgagaagtggagcctgaagatgggactgaactgcttcatctcataataaacctcgaacttataaaaaattgtttcttatggatgagccaagaaagtggtttcttgagatagaatctacccctggtaaagatgctgtgaacactgttgaaatgacaaccaaagatttagaatatggtttctgcttagccagttgagcagtggcaagatttgagagaaccgactccaattttcaaagaagttctactatgagtaaaatgctatcaaatagcatcacatgctatagagaaatcttgttaaaggaaaagtcaatgatgtgacaaatttcattcgtgtcttactttaaaaagtcgcacagcaccttaactttagcaaccacaagtttatcagtcatcagcatcaaatcgaggcagatattccccagaattactgaaggtcagatgaccttacagttttagcaatacatttaaattagatttttttgacct

SEQ ID NO: 591228 - DNA, 1345 bp, Homo sapiens
gaactgcatatgataccttcagcttgaagcttgctggtctcgctttctggtgctgagactaattatatgcaaagaaagatgcaatatggggagattactcctagcagatgaaacactgttaacactagaagtgctacatgaagtctagattgaatgtatgttgatcatagatgctcattggactctttccataggcacattgactgctcaaacagtctcagtagcagggtcgagtgctcatagagaactcgagtgtatataagcctagcgtagcctgcttcaccatttacggcttttccgtatcctatgtacaccagatgctcgtttcctgcgaatccacaggacgctgaaccatcttcctgtctgtgcctctgcttagggagtcacctcaatgcgaactttcttccgacgaccccacgatggcagactcctgcttgcgggctcaaggagcactaggctatacacgtcgcgccacaacggcacccatctgagtgccacattcagccgatttcgacgccgatgacctttccggatctacacgcaatatcgttcagggtccttccccaacttcatctgcgaacggcacttgttgaccgacatccaactcgggcactcacacgattggacttacattatgagaatttcatgcagctctggtgtcgcaatacccacgttgtagaccgtaacacaacattattcagggcgtaggtgaaagcaaacaggggggtcaattttgaaccaatgtacagaggcttcggcgcttttacacgagaggtgagcaagttctgtgggtagcggagttccgtgtccccgcagtgaggcataggcgatatgttcatcgctcccagggaattggttggactatcgcaaacttccgacagtcgagcgcggaaaacagggcattgcgatcctcgggcgcatgaaatccagttggtccgaatctttcttcactttttccccctgttgcccagcacgagaacgcgcattctccacgcgcaaggaggactttttgcgactggcataggcggtgccaaattgtttcagaaaggacagattttacggcatgtcccccacggcaggcccagtgccgttaaccagcgattcattgtatcccccacaagacaatcctttgtgagacgcctgcttgcaaccgcggcctgacaagtgtcatacgaactccctctagagctgccacaccgccggttaaggaaaacatcctggactcaagcggtcttcctttggcagtcccacagactcgctctcgtgcccacttgtttaccatcagcggtacgtggtgtccccccagtctgcacgcggcgagtctctgcttcctgacgtcagtggc

SEQ ID NO: 591229 - DNA, 126 bp, Homo sapiens
aagactgtggatcaggcgaagacgtggcagttcgtccctttccctctttacagtgaatggctgcccacagtcacaagcagtttatagttgacatattcttctagatccggtgtgtagccacagtcg

SEQ ID NO: 591230 - DNA, 248 bp, Homo sapiens
ccagtcatattaaattagggccccctctacccttaattacctctttaaagggtctatttccatatagcctgaggtgtaatgggagttagggctgtagcatataaattgcaggggaacaaaattcaattcataacgctttgtttgaattttttaatccccatgatacctctccctccctttgtccccatgtaacttgtttttggggctttaccagatgggtgaagagtaaatcctttttccctttggca

SEQ ID NO: 591231 - DNA, 244 bp, Homo sapiens
cactgcgaaacacgttcggtcggaagccgttgcttttccctgtgacggcatcatcaatacctgatacctgtctggtgcagccccggcggccaggaagaaaacatgcagccctatagcgacttcgggcatcaccagcgccagcggtgtcctgaacatggggatcaaggtaaactcttccacgacatgcagcacctggttcttggtgtagtccccgtcactgacaatcgcattgtctgcgtccgaa

SEQ ID NO: 591232 - DNA, 707 bp, Homo sapiens
cacagcggctcacgaggtcaggagatggagaccatcctggccaacatggtgaaaccccttctactaaaaacagaaaaattagccgagtgtggtggcgcgggcctgtagtcccagctaatcggcaggctgaggcaggacaatcgattgaacccgggaggcagaggttgcagggagatcgtaccattgccagcccgggcaacaagatcaagactccatctcaaaaaaaaaaaaaagaggggaaaaatgtgggcctaggggggggagaaatcggtttaaaccgcgggagagtttgaggggcgcgaactggaattggggttcttggccatggggtttccaggccaggggtgacaggggaggggtggtcttaaaaaaaaaaaaaaaaaaaaaaaattttgggggcgcgcgcctgggcgcccccgaaaaacgttctcaaacacaatccggttggggcgcgcgggggcgcccaatgggtgtagggaaccaggggccaaaacgggaggcccaagagaaacccggggcaaagaaaaaggggcggggagttctccccccaatatgaaaaaagcgcccgggggggagaaaccgcagggggtttctgtggaacaaacttccaagagggggaggctcaggaggcgccatacaggggggccttataacgaagggaggccaagggaagccgagtgtcaaattaccggggcgatgcgcgggct

SEQ ID NO: 591233 - DNA, 139 bp, Homo sapiens
tggagttttgccgtgactcgccacccagctgggctccgcctggtctctgccctggcaacccaccccgcacccaccaaggggcagctgccttttccagtaagtttggcgtggcagcgcctatgtcgctcccatcctgcgc

SEQ ID NO: 591234 - DNA, 569 bp, Homo sapiens
aaatccgaatccaaggttcccaaatcggcccgcacatccaaacaacccgaagaaacttggggcgaatacgcgagtacttcccgcagccttaccgtttaaaataaactcttcggcgtctcgaactataactaaggcgaagcgaagtagtctggggcgcgcatgccgttaactatggggcgatgtagacccgagctagcactagggtccctcgtagaccggccttgactgcggaatgaaagattctagaaaggaccacatactcctcgaagagagactatttgaattttccagtctttttactcgaaaaccgggcgctaggaacgcatgctacccggcccgctagacacctagaaccgttccctccttttccacgtacctcctacctcctaaactgttcctctccgcccgaggaactaaaggtcccgactagttccctagcgaagaccagcttcgcgcgcgaatagctctcgaacgttaactcgtattttcgaccgaaagtgggccgtcccttcttaaaactttggatccctaaaagactttccctatgaatctcctaaatattagagagc

SEQ ID NO: 591235 - DNA, 186 bp, Homo sapiens
catagaaaaggtgtagtaaaaatgtaatatgacaatcttatatggaactgccgccgtatatgtggttctcgttgcctaaaatgtcatcctgcagcacaggactgtacttctgtgggtcagctttactctgaaatgtctgtgtcttaacctgtaatattcaacctggacagtgaagaacttagtaca

SEQ ID NO: 591236 - DNA, 892 bp, Homo sapiens
cggccgatctctgtttattaagatcagacatgcgaacggtcatacttactgctgaaaggcagacactgaaatgggccatgaaaggggggggaaaggctctgactatcagttcgagggattgaacctcacatcaaacctatatacaagcgtgtgtgtagctagcattaaaaagcaaaggactatttcatgtcatgactgcttgacggctccctcttcatatgcattccctgtgccattctgtacataggatgaaccagaaccaaggccatacaaatgaccacaatatttggcatcatcaatatgatcttcaaagaacatttctctcattttgaaaaaggccattcctgtgagcaatgaatcagatcctgcctgatgttgtggtcctatccgttccagctctaactgttctgccacctcctgtaatccacctttgagatttttgcagctctttctgaggtacttcacatcataaatgacaggaaaaaacaatcgaaggatctcaaagaagtcaagttctttttcaggcaagttagagttggttaggattttgataaagaaccaaagtcgtaaccgcttttaaatgacaaccttttgacccttaccaaaggacactccagagtcataaaaagtctgcaaggactgggttcaattccctcctcccaatgttttaaaccggaaaccgatgtggtagtagccccaaaaatcccggggcaacatggcctcctgtgagcggggggtaataaagaaagcacctgcgcttaagttccaaacgtggggtaagaaccctgactcgtttgcaattaaccgggaaaggcctttgggcaaaaaatcactggattatcccctgggatatctccaaggcttcaaaagaacattgagggcttaagccagg

SEQ ID NO: 591237 - DNA, 844 bp, Homo sapiens
cggttgtttctcttccttcgcctaattgcctcccggctctcgtcagcctcccgccggcgtctccttaacagcgaacaccatgccttcaattaagttgcgagagtgtctgatggcatgagatatttgaagtggatgtgtgaacattgccaacacagactctgtgcacctattaagcacgcatgtggacagatttgggaatggatgatgaaggagatgatgacccagttcctctatcaaatgtgaatgcagcaatattaaaaaaggtcattcagtggtgcacccaccacaaggatgagcctcctcctcctgaagatgatgagaacagagaaaagcgaagagatgatatccctgttgggaccaagaattcctgaaagttgaccagaggaacactgtttttgaactgcattctggctgaatagtaacttagacatcaaaggtttgcttgagtgttacatgcaagacggttgcaatatgatcaaggggaaaactcctgaggagattcgcaagacttcaatatcaaaaatgagttgactggaagaggaggaagcccaggtacgcctgagagaaaccagtggtgtgacgagcaggtgacctggttgtggctggacactggtaaccactggtacggatggtccccctactagttgactggtctggttctcaatggcattctttgacacaccgtgtaacatggcgcgggcacgtccttggttatgggaaaatggtccatggggtgtttttggcccgatcccacgcttgggccattcctcaatgggggaacagcttggggggcaaaaaacaggggcccaagagagggggccccctgagaaggggacatcgcaag

SEQ ID NO: 591238 - DNA, 327 bp, Homo sapiens
  misc_feature (7)..(7): n is a, c, g, or t
  misc_feature (65)..(65): n is a, c, g, or t
  misc_feature (73)..(73): n is a, c, g, or t
gtggggnggtacttttgatagccttgtagtctgatcattgtggaactgagggtaagattgagagngcaagccncagacctggaaaggcatgatattgctatcaattatcctttccactgggagtctcattatacggatgagagaatgttttgatggtggcagctagcttgcttaaagattgaccaggattatgtggtggttctgccagagtacctggactataatgaatatttaagaaaatgtttcttgctgggcatggtggcttgtgcctgtaatcccagctacttgggacactgaagtgggagaatcacttgaggccaggagttt

SEQ ID NO: 591239 - DNA, 809 bp, Homo sapiens
gagccccgtccctcacctcgagttgtctcgccttcctggaccaaaccaatgtacatcttacacatattgattgatgtctcatgtctccctaaaatgtataaaaccaagctgtgccctgaccaccttggacacatgtggtcaggacttcctgaggctgtgtcacgggcgtgtgtcctcaaccttggcaaaataaactttctaaattggttgagacctgtctcggatactttgggttcacataaggaaacaggaagcagagatctggtgtctatttctttttccaagcacaatgtaagcacagttctaggctgtgtttgtcttgtgagtccttcctggctcccctcaggcactggctttctctcctctctcctgccttctctttctggatccaccctccaaatgttggagttccttagggtttgattcttggaactcttctgtgtttatgtgttctccctagatagcatcatccgtaagtgacttaaatagcactcataatgcttaaaaaaaaaaaatttccatttctagcctggacgtctctgaatttcagaataaggtaaatgaagaattcacctttatacaccttaagtttgaaatgccggtgatttatccaacagcctccttggttttgggttttagccggatcaccggcatctcatttaactcaacgtatgcacatctgaattctactggactcttcctaaacttgcactctgctccatctcagccaatgggaccacccagtttcctgagctaagtgccttctttgacacctttcttttcaacacccaccttacctgtctggcacc

SEQ ID NO: 591240 - DNA, 884 bp, Homo sapiens
agcgggagtggctggtagtgcccgtgtttgctctggttcgacggtggccgtgtagttgactccgcggctgttcatctccctggtatttcccgtcctaacgtcgctcgtcctttcagtcaggatgtctagcccgtggcccggctatcggcatcgacctgggcaccacctattctgtgcgtcggggtcttccaacatggcaacggtggagatcatctgccaaggaccatggacaatcgcaccacccccagctacgtggccttcacggtactaccagagcgcctcatcggcgacgccgccaagtaaccaggtggccatgaatccccgatactagactatcatcattcgactgccaagcaggctgattggacggacatattcgaggatgccacagtgcatctcggatatgaaacactggcccgttccgggatggctgagcgaggcgaggcaaagcccaaagctgcaagtagagctacaagggggcagaccacagaccttcttcccaagaagagatatcctccatggtcctcacgaagattgaaggagatcgcggaagcctacctggggcggcaaggctgcaccagcgcggtccataacggtcccggcctatcttcacacgactcgaagccgccaaggccaccacaggacgacaggcaccaatcacccgcgcctcactgtgcctgcgccatcactcacacgacccccacggccggaccagccaatcgacccttacgcgcactggaaccaccgacagcgcgcatgacacctccgccgcgcgaacaacaaaccgtatcatccctccttcgacccctgcacaagtcacgccccttctcaaccgctgctcacaataccctcacccacacccaagcactggcacaatccaccca

SEQ ID NO: 591241 - DNA, 364 bp, Homo sapiens
  misc_feature (237)..(238): n is a, c, g, or t
catcggcaccactcatcgccagtcgcctccacatcactatcactgtcatcaccttcacatcaccattaccaccattacattcatcaccattgtcatcacatcaccttcatcactatcatcaccatcatcagcaccttgatcaccatcatcaccaccaccaccattatcactatcaccttcatcatcaccaccatcatatcacattatcatcaccatcttcaccatctcatcatcacnntcacttcatcaccatcatcatctcatcacctccaccatcattatcaccatcatcaccatcacaaccatcatcaccattttcaccatgaccatcatgatcatcaccttcattatcaccatcatcttc

SEQ ID NO: 591242 - DNA, 518 bp, Homo sapiens
gagccccgtccctcacctcgagttgtctcgccttcctggaccaaaccaatgtacatcttacacatattgattgatgtctcatgtctccctaaaatgtataaaaccaagctgtgccctgaccaccttggacacatgtggtcaggacttcctgaggctgtgtcacgggcgtgtgtcctcaaccttggcaaaataaactttctaaattggttgagacctgtctcggatactttgggttcacataaggaaacaggaagcagagatctggtgtctatttctttttccaagcacaatgtaagcacagttctaggctgtgtttgtcttgtgagtccttcctggctcccctcaggcactggctttctctcctctctcctgccttctctttctggatccaccctccaaatgttggagttccttagggtttgattcttggaactcttctgtgtttatgtgttctccctagatagcattatgagtgctatttaagtcacttacggatgatgctatctagggagaacgtc

SEQ ID NO: 591243 - DNA, 438 bp, Homo sapiens
ttagagatcccccggagccttaccctgaggctgggagttgagaccagcctggcaaaatggcgaaaccctatctctactaaaaagacaaaaattagctgggcatgatggcgggtgctgtggtcccggctactcgggaggctgaggcgggagaatcgcttgagcctgggaagtggaggttgcggtgagccgggatcgcgccactgcactccagcctcagcctgggcaagaaggcaagaagagcagaactccatcttaaaaaaaaaaaaaaaagggaaaaggaaaaggaaaaggaaccaaggaaatggcttgaggcttgaagggaggagaactggcaaccacttctgtggtgatcgggtgggaatagctgtctcataaggggaatggggatagcatttcggatatggatagagattgattgtatatgggacctaggacggt

SEQ ID NO: 591244 - DNA, 273 bp, Homo sapiens
cctgagctattcagcagaaaggaccttggaagcacggaggatggggatggcacttatgactttttgacagacaaaaaggatgaaaaggcagagcccccaaaaaaaaaggccccttatgagggcaggaaaaaaacgaccgtgtaccgagggctggtccaaaagcgcgggaaaaagcagttgggctcgttgaaaaaaaagttcaagagtcatccccgcaaacccaaaagcttcagctcctgtaaacagtcaggttaataaaagcccatgccgtga

SEQ ID NO: 591245 - DNA, 955 bp, Homo sapiens
cgtacgcggaggcgtgggtcgtggatgccgtggtgcttgtacctgaccctcgttcacgtgacatgccttctgagtcgatctctcacgagaaagcgctgacatcaggcatctccatgtaacagtaggtgatcccatcttgaagtgccagtgtcctacgtgatcagcaggcacctaacctatgggcactacgaagcggacctggtcagatagagatcatcaccttctgtatactcagactaagacgcccagattcaccatgagacgctccgagacttcacagccttgaacgagagacacattacaacttgagcggagttggataaggcgtctgagtgtgattgagaaccatatcatagatcttcagtgagcagtgcaacatcctagtaggcattgagtcccagtcgcgatcacatacggtagcgaccacagcctaccgtcatgaggcgaggagcctcccgcccagctccgccaggggtccgaggttcccggaggcaacacctctgtgctagacgacagacctagcccccactccagggagcttggcactgccggaccagctccgacgcccgcaactcgggacatgcggcccaaataacacgcgtacgcgacccaacccaccacctcacccccgaacactcccgagccacacgctccacgcccccgttacaaagagaaacacccgaacacgtagcacacatcgcgtaatcggcacgcaccgccatagcacctcagcgcacacgagaatagcagatccgggcacacgaggaaacaggaccagcggaagtcgagcacgcagcccgaacacacgcaccatcaccgccgcgggccaccagacgactccccgccaccctgcacacacaggagcccaccggtcgcccgaattggcacgacgcgcacaacgcggccctacatccgacgcgcgacaccggctccacacgccctccggcatacgctg

SEQ ID NO: 591246 - DNA, 133 bp, Homo sapiens
ggagggtaatgacaaactctctggtgtggctctacctggaaacaggtatggacacaatgacctcccttgactatgcgtggctgaggtcctaatcggagacttccttactccctcatcctcctctgtgctgtcc

SEQ ID NO: 591247 - DNA, 114 bp, Homo sapiens
ggcacaaacccactttattcagcattgagccagcccacacgctgggcagttcaaactcacagacatcgcaccacaggtcgggtacttatttgggctgaaaggcttcatttggaa

SEQ ID NO: 591248 - DNA, 170 bp, Homo sapiens
tggcacctaagatcccggacactacgtatgttgcatagaactatacgtgagtcagctcatctcaccttatagatatctactctctttgatcagacgtagagatagacgtgcacacacgatggataactgagcacggaatacgtctcggccatttgacgaaaacactagta

SEQ ID NO: 591249 - DNA, 2333 bp, Homo sapiens
  misc_feature (1391)..(1391): n is a, c, g, or t
gggaccaccttcttttggcttcaacctctcccactcttgacatctgagtagctcagggaagctcttccaggtccgactgttcatatgtaaaggagactggccgctgggctcaggaccgggattatccgagctctgcagaagtgcaccgctattgctttgggagggaaaaaaaaaaaatcacacggtttccagtgaaaaagtgacagagggtggtggcctttggaaccgtcgtcccgtctctccctgaacccgaaacttgcatgctatggaacacccgctctttggctgcctgcgcagccctcacgccacggcgcaaggcttgcacccgttctcccaatcctctctcgccctccatggaagatctgaccatatgtcttaccccgagctctctacttcttcctcatcttgcataatcgcgggataccccaacgaagagggcatgtttgccagccagcatcacagggggcaccaccaccaccaccaccaccaccatcaccaccatcagcagcagcagcaccaggctctgcaaaccaactggcacctcccgcagatgtcttccccaccgagtgcggctcggcacagcctctgcctccagcccgactctggagggcccccagagttggggagcagcccgcccgtcctgtgctccaactcttccagcttgggctccagcaccccgactggggccgcgtgcgcgccgggggactacggccgccaggcactgtcacctgcggaggcggagaagcgaagcggcggcaagaggaaaagcgacagctcagactcccaggaaggaaattacaagtcagaagtcaacagcaaacccaggaaagaaaggacagcatttaccaaagagcaaatcagagaacttgaagcagaatttgcccatcataattatctcaccagactgaggcgatacgagatagcagtgaatctggatctcactgaaagacaggtgaaagtctggttccaaaacaggcggatgaagtggaagagggtaaagggtggacagcaaggagctgcggctcgggaaaaggaactggtgaatgtgaaaaagggaacacttctcccatcagagctgtcgggaattggtgcagccaccctccagcaaacaggggactctatagcaaatgaagacagtcacgacagtgaccacagctcagagcatgcgcacttatgatataaacagaggaccagctccattctcaggaaagaaatgttgtggatggcaagcctttacccaaatatcgtttacacagagagatgactatggcagtgatgtttaatattattaaatccaggcatttcgaatctgtttttcattgatttattagagggtttacacaaagagcttccacagtgaagatggagaaggtgaacttgctttgaatatnccagatttgtttggtcatgcgtatggcagtgagcaggtatgtgttttcttttcttcacgaaaattaaattgctatcaagagcaaactatgaacattatattcaagatgtctccagagtgaagatgccgaggatgaacttgcattgaacattccagatgtgtgagatcatgtgtattgcagtgggcaggtatttgcttttgcttgcactgaaaattaaattgctatcaagaataaaccatgaaacattttatcctgaacagccacagtgcctgaattcactcaagtggataaaaaagtgtattttaactctgtatattacccttaagtcattttcctgtcttcactaatttagcaatgcattcatattagctgatgaaataggcactcacaatgacaaccagagccagtttcttgtctttttatacattttgtcatcccagagactcggtatttgcttactgtgtttcaagtagaggaaatcgtggtcttgaactattctgtaccacagcaaacaatctatgttgctttactatcaactgctgtaatcgtttataaaacttacctagctccttcccttcttctatcatagctttaaacattagaattcataggcaaatcagttaaaacattaggatcataggcaaatcagttaccttgcagaaagagctttgtatgacagacattgtcttattttatttctgtaaaatattagctgtatgaatatgatttaattaacaagaaaacatttcttcctgattgacaacagtgttagcaaggtgcaaagcgaaactggttgctcaagttgatagaaaacaaaattctgaatatcttcaaattaattcggtaaaaacacattattttttcatatgtgatgtattcatgcagaacaactatcttgtattttgtttttaaaatgtgtttaataaatgatcctttgtaaat

SEQ ID NO: 591250 - DNA, 939 bp, Homo sapiens
  misc_feature (390)..(390): n is a, c, g, or t
ctgtattccatcctgggcaacagagccagaccctgcctcaaaaaaaaaaaaaaaaaaaaaaagggccgggcccgggggttcacccttgttatccccagcctttgggggggttggggggggaaaaacactttggagggtcaggactttttggagaccaggcctggtgccaagcatttggtagaaacccccggtcttcttaccaaaatataacaaattaaaaatttatccaggggcggtggtggcgcattgtcgccatattagcggccccagcgttactcagggaaggctaaaaggcagcagaaggaattattgttgtcgcattccgctggggaggttgataagggtgtgtgccgggtgagagccccagagaaatcacaccaccacatctcncacatctcccacatggttgtctgggaacccaaccagagagtgtggagacacccactctgtgtgttccacaacacaaacacaacagacgaagacacaagacaagagaagatgagagagaacagcattgtgctctttttgtgggggctcccacagtgtggcagcggtggtctctccaccccttcttttattcctctgagacccattggggggggggagcgtacgagagcggccggagagaggactatggtcgtgtgagggcgcccacgaagattgttttcccaaatcacgggccgggggggccccaccctgtgtgccggagagcccccctatctctcttcccaacatcacgtcgacaaattatttcggcgccgggaagacgacggaggagacggttgtcgccccgtttgagtgtccccccggattatctaccgcgagcgaacgcggggcgggggcgggacacatcccgttggaccccggcggcgaggatcgaagagcgagaagcgaagcggcgtggttttattccccggctggtggcttcccgcgccgtta

SEQ ID NO: 591251 - DNA, 113 bp, Homo sapiens
ggtgctgtctagaggatcccgtgctggtgtataggtttggtcctagcctttctattagctctaagtaagagacagctgaaccctcgtggagctttaatttattaatgcaaact

SEQ ID NO: 591252 - DNA, 803 bp, Homo sapiens
  misc_feature (1)..(1): n is a, c, g, or t
  misc_feature (32)..(32): n is a, c, g, or t
  misc_feature (203)..(203): n is a, c, g, or t
  misc_feature (265)..(265): n is a, c, g, or t
  misc_feature (271)..(272): n is a, c, g, or t
  misc_feature (316)..(316): n is a, c, g, or t
  misc_feature (331)..(331): n is a, c, g, or t
  misc_feature (333)..(333): n is a, c, g, or t
  misc_feature (386)..(386): n is a, c, g, or t
  misc_feature (395)..(395): n is a, c, g, or t
  misc_feature (402)..(402): n is a, c, g, or t
  misc_feature (412)..(412): n is a, c, g, or t
  misc_feature (420)..(420): n is a, c, g, or t
  misc_feature (455)..(455): n is a, c, g, or t
  misc_feature (459)..(459): n is a, c, g, or t
  misc_feature (487)..(487): n is a, c, g, or t
  misc_feature (516)..(516): n is a, c, g, or t
  misc_feature (527)..(527): n is a, c, g, or t
  misc_feature (530)..(530): n is a, c, g, or t
  misc_feature (563)..(563): n is a, c, g, or t
  misc_feature (574)..(574): n is a, c, g, or t
  misc_feature (622)..(622): n is a, c, g, or t
  misc_feature (636)..(636): n is a, c, g, or t
  misc_feature (699)..(699): n is a, c, g, or t
  misc_feature (713)..(713): n is a, c, g, or t
  misc_feature (798)..(798): n is a, c, g, or t
ncccctaaaagcccaaatggggtaggataagnctcatatcgacattgtcgtcattggcacgacgtagattcgggcatagtccaccactactggccatctgatctatatatgcggtggcatcgacagagaagaaccattgaaaaatttgtgtaggaggctgctgagatgggaaagggctccttcacgtatgcctgggtcttggntaaacatgaagctgagcgtgaacgtggtatcaccattgatatctccttgtggggatttgagnccagcnngtactatgtgcctatcattgttgccccaggacacagagactttntcaaaaacatgattncngggacatctcagcgctgccctgtgctgtcctgattgttgctgctggtgttggngaatttgangctggtntctccaagantgggcggncccgggagcatgcccttctggcttacacactgggngtgnaacaactaattgtcggtgttaacaaaanggtttccactgagccaccctacagccagnggagagtatgnggngattgttaaggagagtcagcacttacattaagnaaattggctanaaccccgacacagtagcatttgtgccaatttctggttggaatggtganaacatgctggagcnaagtgctaacatgccttggttcaagggatggaaagtcacccgtaagatggcaatgccagtggnaccacgctgcttgnggctctggactgcatcctaccaccaactcgtccaactgacaagcccttgcgcctgcctctccaggatgtctacaaaattggtggnattgg

SEQ ID NO: 591253 - DNA, 1448 bp, Homo sapiens
  misc_feature (448)..(448): n is a, c, g, or t
  misc_feature (461)..(461): n is a, c, g, or t
cgatgaaggaaatgatggtaaagcttgaactaccttctcattgtgtctaaattagactcacttataaacacgcttggcagtgctattgtgaagtggctaactcgcatatgcactaacggcgtatgggaacaggaaaaatagaggacacagggtgatggggaccaatggacctcattcaactgatggttgactttagacgagaaagagtgcccacagttcattgagctgccgagtgtcaactcagaattatcactagaattctccctctatagggcgatcgacgtatcagcgggacatcatggttagtcagcaagaattagtcttcagacgagaataagaataagcgaaccgaatgcgaaggtgaacgaagatatcaaagtagatcacacgagcagcgaaagtaaggcacattcgcagatcccttccacgcggcaaggggagacccacnaagatgtcccctntcccacaagggacatagtaaagggtcgttatcgtggtggtttctatatccgcttatctagattctattacaggactcaaggctctgtgcgctagtacctgtcttaaacatcctgaaggagtgttggagtacagcggccgcagcattaccccaggtgagtattactcgtgtagacgtggacagttcaggggccactggtggtattgtaccacgtaagactggtgatatttcctagcttgggtatattagctaaataggagacactggaagttgttaacacgaagacctttagtccatggcgttcgtatggagagtgaatggtggagatcactgttgaccatgaaacgtaccacggaccattaaaactttcctaaacgtgttggaagcacacacgtgggtctcgtactcttttcatccaagtctcaattgggcacaaaacattcaaatttgtaacaaccacactttaaggatggcctttttaaggttggtggccaacgtcctcccttgatgcacgggtccttgggttctttgggtgagccaggaaggcttaaagccacctttgggtatctggtgactgggtcgaggtattggtgccacatctatgtgtgcggaaaccgatctacaattgggaccgcagaaaccacagaattaaagggatccggaattggagcccctaatatttactccacccgacaagtttgaacaaattatattcctgtccccatattgggagtaaactatggaccggcacaaacgactacttgggcgggtgtaatcggtccacgcgaaaacgggggatctttccaagcagccccttccgggatagcagaacaggtggtttatcgcacaatctgctcaccacgacacgcgtcagaaacaagtagttattagcaaccggggtagacagacactaaccatgatatcacgcgccacgaatatatacgccacaatgagagggtcataggtagtcacacaatcagcgatgcga

SEQ ID NO: 591254 - DNA, 1200 bp, Homo sapiens
gaaagcaagtgcgagtgtggctggcgcgggaaagttcgggaacgcgcgcgtgccgtgtctcggagcagcgccagtgacacgtgtcctggggttttgctgcgtgtggtcactggctcccagtatctgtctgagtgccctgtgtggctggacgcacgcactggtacatgagcacccgtcaccgagtgcgcttattgttcgacggggcgatcacagacatctcatgggtgtcagctaggcgtgatcccccactaaggttacctatgtgagatttgctacaagcacacggactttcatccaaggaacctcttcacttgcgtggaccaaggctgtgaagcctatatgtaccattgttgcgtccagtccctgtagagaagacgatccatcctgccgaggaccccatttccgaggcccgccagatgattgggctcaacccagaggtactttgcctccgtttcttgccttggagcaagcaatcccttcatgcttcgtggggaccttcaaggacagctgggtgtcatggccctgatgtttcacccgaaagtggggccagtatatacattgacaacgacatgtgactatattacttacttatattgaggatacacgccacggattccgggcgccttcacgacaagcagttaaagtgccattgcacccggacacgggtggcactgctgcgacgaacgccgtgtccggtgccagggtgcatgtgtccccccatggttgaatttgggaattggctagcgcatagtgcataggggggggaccgcgcgttgtaaaaacgcacagttaccgggaggaaggcctaggtcgatacggaaaagggccccgatcttgaccctcggtcttccaattgacgtggacacctgaaaatgtcgttacccctggtcgcggtgtctatatatgttgggcttgtggtacccctggcaccgttttcggcgtaggcacaaaaccactgtgtggaagttcgggcgcacggaacatcttgatagaaagagccaccaggaagggttggcgcccctggtggagagggaaggaaaacgagccctatgcgaaagagcttttgcgccggagacgtcattttatggctctacgagtgagcaacagccccttttgcactatgagctgagcagaaagtgcagcggaacacgtttgaaaagtggagtcaggcacaacaagccggcagtggcgtcatttgtc

SEQ ID NO: 591255 - DNA, 894 bp, Homo sapiens
  misc_feature (21)..(21): n is a, c, g, or t
  misc_feature (82)..(82): n is a, c, g, or t
  misc_feature (117)..(117): n is a, c, g, or t
  misc_feature (125)..(125): n is a, c, g, or t
  misc_feature (136)..(136): n is a, c, g, or t
  misc_feature (159)..(159): n is a, c, g, or t
  misc_feature (210)..(210): n is a, c, g, or t
  misc_feature (227)..(228): n is a, c, g, or t
  misc_feature (230)..(230): n is a, c, g, or t
  misc_feature (247)..(247): n is a, c, g, or t
  misc_feature (285)..(285): n is a, c, g, or t
  misc_feature (302)..(302): n is a, c, g, or t
  misc_feature (411)..(411): n is a, c, g, or t
  misc_feature (421)..(421): n is a, c, g, or t
  misc_feature (435)..(435): n is a, c, g, or t
  misc_feature (459)..(459): n is a, c, g, or t
  misc_feature (509)..(509): n is a, c, g, or t
  misc_feature (512)..(512): n is a, c, g, or t
  misc_feature (593)..(593): n is a, c, g, or t
  misc_feature (616)..(616): n is a, c, g, or t
  misc_feature (630)..(630): n is a, c, g, or t
  misc_feature (756)..(756): n is a, c, g, or t
  misc_feature (798)..(798): n is a, c, g, or t
  misc_feature (810)..(810): n is a, c, g, or t
  misc_feature (841)..(841): n is a, c, g, or t
  misc_feature (848)..(848): n is a, c, g, or t
  misc_feature (886)..(886): n is a, c, g, or t
tgcccaataccaaatcgccgnttccccaaaagcccttttccctgtatcaagaatgtgctttagagtatgtgagcaacctgtnttcagtgtagtacaaaggcagagtgagggggcttnttttcctnccaaccccacnccccgttcagcacagccgccatntgcaaggaaggcctaatcatgttacaatcactgcccactgaccctctcccngcgggcctcccccttcnnantcaggcacccccaaaantctgccaacagactcagtcttattacagctttgaccantggttggaacccatttntagagctttgctaataattagtgtggtcaagagccgtctgagcctaatgagtcccggctgcattaggttaagagactcttccagagccagcgccaggtcttgaatggcncccccccccnggatacacaccccncaggtccccaggacctggatgacnccccccccactgtggcagtgtattgcctgttaattgctgctaattctaantcngatgatgactcctactccattgtttaccccaaagcatcagctaggctggagtgatttgttacaaatgagcaaaagatgagnccttgcttccctcagaaataaangagctcagctgccncgttgcattggcttttgcctccaactttccactccagaatcagagtagcttcatttcccttctggagaacaattgtcagaggagtatgagacccctccccttccatccttcactctagcagtcctngcttttctcatcactcccttacatgcctgtgacagtgctacntgaggacacaanctttttagactttcttgcttgatattacagngtctatngtgcataggtgaggtttgccggaatagtaatttatagnataattct

SEQ ID NO: 591256 - DNA, 197 bp, Homo sapiens
gggggggggggttttttttttttaaaaaggggtttttttggggcccgggggggggtttttttttccccccccccccgggggcccggggaggggccccccctttccctggggggcccctttttttttttcccccccggggcccttttagggggcccccttttttttttcccccaaaaaaaccctttgcccccggggga

SEQ ID NO: 591257 - DNA, 410 bp, Homo sapiens
acgtttatctcaagaaaataatcagcaaatctgcaaactggatccaacagtacattaaaaagattatataccatagaccaacatttatcccaggacatgcaagagtggttcaacataaggaaatcaatcaatgtgatacaccacattatcatctcaacagacacggaaaagatatttgaaaaaattcaatacccttttaagattaaaaaaaaaaaaaaaaaaaaaaaaaaattgtaatcccctccctgggctaaattttccatttttggaaaaacatgggtgctaaaccattggtgtgtgtcgtcgtgtgtgtgtatatagatgtgtgtctggtatcgtgtgtgtgtatccttggaccaatactgtgtgcaggtgttaaacacttcaactcaattaaaattgtttggaaa

SEQ ID NO: 591258 - DNA, 1239 bp, Homo sapiens
ccccaggcacactgcatcgcgcgcggacgctccggccccggcgaggctggctgcaaactcgcgggcacgcacgggcgcccgggcagagccgacgggacctcgagggcgaggggactgctgcgcgcaacgcgcccagccttccatcccgaaccgacacctggcacagcccagcgcacgcccgagctgtctcggacgggcgccccaggaggaccccaagacctgagcccaagaagacccgcagctggccggcgagcaggccggcgcggctctcccctctttactaccacacgagaccgaaggccaccgagatgccagtgagacgagagtgaacccagtgcccgcttaaaaaccagacggcgctggggacaaatcctttgttaattacacccgggacccaggcttggaaatcacgcaaaggctccggactacagacgcccatacaggacacttcggagaacccggataccagcgtttctcttccccggcaccttccctgagtctagctcacaagggtggataacccctagagacagcaaccaatcacgccccactccgcgcgaacaagaaacctccgaccggagccgccacaccggacggggctcgaccaaccggctaaccccggtccttggcactccatccacacgcgccaggaactagaaaaccccggagccacaccccaacaggccgcacaccccgtaacacaaacttacaccaggacacactcctcttcctcacataattcttgcactacagacccacccctcttccaggcttgaattgactccctagacttctcgggcagacccagaacccctaaccccaccctttggtgaccacccccgacaaccaacgccacttccctcagatgggcgcctaccctccccatgtcattcccatgcaacttatgtcaccgcaacggcccacacaccagaacgaaacgccccctgagcaaaaggaaaggcaaagcgcggacgcaacacaccacacccactgagacaccccaaaaacccgtgcaatcaccacgacgccagcaacccgccgcacccggggccaatgaacgacacccagcagacactgcaatcgcacaaggcgatagaaccacacaccccgtcgccaccgcaccttgctcgtccatcactgacctcactgccggccacccactactgccacgccgccgcgtccgcagacacaccgcacacagcaccacaccgacccaaaccgcgcctacgcactaccccc

SEQ ID NO: 591259 - DNA, 285 bp, Homo sapiens
  misc_feature (118)..(118): n is a, c, g, or t
  misc_feature (132)..(132): n is a, c, g, or t
  misc_feature (284)..(285): n is a, c, g, or t
ctagaggaccccggtgtacgagtaagggagaagaataagaaaaacaggactttggtataaaataattaagtatagactaaagagatattaagaatctcaatttggctctaagatggtnctcagtaattatanaaatcctgtgagtctttctgggaaatcctgttgccatattaacctgtggtcctttcagagggtagttggtggatctattctttactggtatttttggcattatttcatgggggaaatgtgggagtggcttactctgtacacacggtgtaccnn

SEQ ID NO: 591260 - DNA, 302 bp, Homo sapiens
gccgaggtcacatggcagagagtcaccatgtggctcctcgcatattcgtggccatctacaacccatccatgggcgtgtccgtgctggctccctaccgcgagcgtgtggaattcctgcggacctccttcaccgatagcactatccgcctctcccgccatgagctggaggatgagggtgtctacatctgcgagtttgctaccttccctacggacaatcgagaaagccagctcaatctcacggtgatagccaaacccaccaattggatagagggtacccaggcagtgcgtcgagccaagaagggg

SEQ ID NO: 591261 - DNA, 1053 bp, Homo sapiens
gggctcggaagaggccaaggtgccagttccgtatcggtcgtcccgcaatccttggttcatccgcacagcacgccggcttcctaccatgccgacgaaagcttcgaccccaaccgagagtcaagatggtcgtactagccgtgacgcgtgcaaccgggacggtgacacgtctgcgtgccaacttctgccctggcccctcatagatcggcctccctgtgtgttctgtctccgatatctaggttggttgagtgactaagttgcgcaacgggcgaaacgagtctgagctgtgacatgtggctctaggatgtgaatttagcaggtgaacaacttgcaccagtatcgaagataccaagatcaagtgacccatgaagttagatggctagggttgcggctttcctagccgtacttggctccttgtagtctagtctagaatggccctctagatggaagccaaccaaagtagtacagataaaagaacaccagaaaaaacattaaacacagtgggaatatcacttttgatgcagattggtcaagcagttggctctgacagatgcggctacctgatccttagccagatgaactctctggaacctattaaacgagatcctggggacgtgcccagtcatgtgggctgtaatgttgagtggccgccatcctcagtgacatcatcgagtgacagtcaacagtggtgctgtgtgaatgcccagccagttaagcacataaggaaaaccatttcaatacaaggattcattttgacaaacctcgggtgcacatcccacagcagcaagcacatatcacaagagagcaacctgtcacggggcgctgcatagtgaggcgggtgcgggaaccaacaggtggttttcatggtgcgctgtgggcaaaaagtgattgcggggacccccagatttcacgtgtgggaaccacaaggcggtgccaatcgcgacagggtgcaccataaaggggggaggcgacaaaaagccgcgaaagcgcgaggaaacgcggattaggacacgccgcacaaactggcacaaaaggcacacaggagccacagtagaa

SEQ ID NO: 591262 - DNA, 245 bp, Homo sapiens
aactatgtgtagccatgcgcccagccctgtgagcccccacttatatttattttttttagagaaatagaagtctcgcatggtggcccaggctgaagtgcaagggaacgatctcggctacactgaaacctccgcctccgtgggattcaagcgattctcctgccattaccctcccgagttagctggaatttacatggtgcccacctatttgcccaggctaatttttttggtatttttataattaagaa

SEQ ID NO: 591263 - DNA, 371 bp, Homo sapiens
ggtcgacctgggcaaagacatctgtaccaggacaccagaagatcagctctctccttctggatgtggttatactgcacacaacacagagaactcctgtggctatctttctgagtcagaggatgaagtggaggatgtcagagctcagaaatgggaataacctgagtccttgctgacatcattgagctgctttatcaaccaaccctggagctcacccttcctttgaacttcctgttatgtgagataatgaggttcgttattatttaagccaatatgagtcaggttttctgttacttgtagccaaaagcatcctggctgatacactccattagaccataattacctcaagggcaagggaatacagatactatcac

SEQ ID NO: 591264 - DNA, 167 bp, Homo sapiens
cggaccaactatgcgtggggaagacacaggagaagctctcatagtcctcggattgctgcactccccgccgtttctgcaggagctgggggcacacggggccagcaccacctcacacgtggcacctgtgtagggcagcaggcagttgcacttgtaccctggcaacgtcg

SEQ ID NO: 591265 - DNA, 397 bp, Homo sapiens
gagcatggagattatagagaggcagtgactacaccctgacacacgctagcacactcgttgacgtggactcctatcaggaaggtcacaatctgagtcaacacctttacgaggtctgaagcggtggaagcaaacttactctgcccgtacaaatccttgtagtcaatgttaatcgcaaagagtatggagtccggacctgctgccagtggtaggaagcatacgggacctctcttcatccatcacaaaagaccagtcttcataacaagtactgcagactgaaagagaaaaggaaatcgttcttagcagtggttctctgatgtccattaaccaggaaattccattagacggctccctggaagatctgcacctggtcaccccaggagggatatgatttgtctga

SEQ ID NO: 591266 - DNA, 722 bp, Homo sapiens
ccgattattcttccggagaggagttctcggttagaagagtcaccgcaacatatttgggccgtttcccacgtagcataccgcttttggtggctctccgctgggagaacgcgttagaaggtggagatgaagctctatggggaccccacgaagttgggagagagataattatctctatatataaaatgggggcacctcgctctggttatttggcgcagtgtatatactcgaaataccagagaagccaacatttttctagttgtgatggaagaaagctgtattctttataggggagaatattattgttgaggatggccaagcgctacccctcgcctccccaggtatttttgggcctccggggcccaatgcttgttggatgtagaaacatcttgggaggagtcccccaagaatagtctagaagaattatgggagttgtacaccccttatgcgccacgactgcacactagagccaccccctccccacggaatgggtccgacatacctggagaattaccgcacccaaccctctctttatgcgcgtggagtattttgtgaacccctgaggaacacaaatggttaaaattggggggggaaaaagcccccacacccaatttggagcaggaccaaaaccaacacatgatttttgtaactcctggttaatttagatattttgacctggtttttgaattaaatattttttttggagttggaaaaaaaataattaa

SEQ ID NO: 591267 - DNA, 958 bp, Homo sapiens
gagtggcggcagcggcggcgacggcagtaacagcggcagttacagcggggacgcgagccgggcggtgacggtgtgggaggtggtctcactcttggggaaaaactgctggcccaccgtcgtcgcgctgaaggttggttctgtaccctgctcccgagtgtgcttagcgatggcctggaaatccggcggccgcccacgcccactcggaggctaaatccacaatctccgcaaaaattggcactcatcaaagcaccagattaaaggttatctgaaagtgattgctggataacagaacccgctccccacatttatgcaaatattgttaaccccaatactattggtattcctcccacaaatccaatagggttccccaagcaacaaatcaggtgcttccaacaagaagtgctattggcaatatcgcgctaggaaacttctctatttggactccagtttgcatggaacggagctaaaacgctcctgtggatgtcaggaccccgaaatgtgggaaatcccttaacgtgcattgtgtggcacggtattgggtccggagatgtcacctgcacaaagtcatagggacttggactccaccttttaaagagctaggtaagagtgactccaggtaaaatacgttgtccagggacggacgactccaacactttcctgtccttcaggggaagaggtaccaggctttgttgtgcgcggattgacacgactgggatatgctgaaagaagcccctttattgatgccattccatgtgggaagcctgcgcccctgtttgtaccccagggcgctaattggcatcagtaaagcccgaggaaagatgggtatggctggtggccctgcggggaaaccacatgttcgcggcgcttacagctccaggaggcgggctaaaagaagcccccaaggggggaaaccgggccttaacatataaaagcgcgccggggagaaatactcggccat

SEQ ID NO: 591268 - DNA, 891 bp, Homo sapiens
aactcatcaaaggatagaagagaggaatgagaaaagatacaggaggaagaaataagcgccgggtggccgccgtgctcaccagagtgtgcagcagaagtggggatgggaaggaccccggcggcccattggcaacttgggggaaaacgccttctcgtgtagcgagtctttaagcttgggaagcccccacaccctggggtgccgcccaccccggaaagggcgccgatttacaaaggaccggtgtgccaacgcagcagtccgccgcgtgggttaaacaaaacaagcggccacacaaggctaagaaaaaagaaggcccgggccaaattgagcatatttccacaaaaagggtttaggctatctttttcgtggcgaaacacgctgccccctttaccgcccgcctgtctagtaacaggtcttttgttggaccccgacaacttaggaggcttcgagacctatccgaaacatagaggggtctttttaagcaaaattgtcacagagagagtcaagtgtgtgcgtagcacaacgtcgttcagatcctcccgtctttggtgcaaaattggaccatcgtgcctggagggctccaacacgcggcaggaaatttcaaagggtacatgattgtcataagacccagagggagagattatttgtttcctttttcaattaataggtgaactcccccccgccgatggctcgcattccttgtatgccgacccactttgtgcgcttagtttggtggcccgggagcggggacacggctaggggtcttttatgcgcccagagcacattaagtccagcgccaccgataccacgataggttccacaagtcccaaacaatcccctatggaaacacattgtcgccccaaccccacttttaaataccccccccaaataaca

SEQ ID NO: 591269 - DNA, 558 bp, Homo sapiens
  misc_feature (58)..(58): n is a, c, g, or t
ggactattatgcattttccactgcacccagccccatttaagagagttttatatttagnatctcatacgccctacaccatgattttaatatactgcgaatcttaggattccagctcaatcataatgccaggagctaaggcctttcacgtcaacattctccctattatatcaaaccacctgactgcagtcccctgtttacgtataagcctctcctccctccctctctccctcttcatcctcctcctttctctacccctccatccctctataccccacactcctccattctccttccttactttcttcattcccccctcttatcatactcctccttcctccatctacttcctcccctccccactcactctcaccctccttctttcccatctccccatctcaactcccactcacccttctccaacctcatcccttcctttctctcctctcatcactctctgtacttcatcactctcccctccttcttctctactaatctctcttcttacctcattttctcttcttcctcctctcccccctctccctcgcccctcttttcccg

SEQ ID NO: 591270 - DNA, 433 bp, Homo sapiens
  misc_feature (289)..(289): n is a, c, g, or t
  misc_feature (373)..(373): n is a, c, g, or t
  misc_feature (388)..(388): n is a, c, g, or t
agtttgctgatccctcaccttgcctctttcttcaaaatctccagtgttgagtattctccagtttccaagagacctgctttggaccactcatttagaaagttcttacgttctaaaaaaaataaaatttggttttccgtagactgctcctgctggtacttgttcaacttgagtatgttgagtaactaaaaataaatcaaatcgctcttccacatattgggcggccctttatatcttaggaacaacactatgatcatgactccagggcaggaatcttgcaggaatcctgggngtggattaaacttttcacgggggcctttcatttgtcaccaggaagggggaggcattaacactttttggcacagcttaaattgtngggcccacctagggnttttctggggggcgcccaaggaggcaataaggagggaagttttta

SEQ ID NO: 591271 - DNA, 194 bp, Homo sapiens
ggagtatatttagtagagacagatttcaccatgttggccaggctggctctgaactctttacctcaggtgatccagcccactctgcctcccaaagtgctgggattacaggcgtgagccaccacgctggcctaagctgggattgtgagcacatgggaatgtaaagctgtgggtggattgctgtgcgtggcagaaat

SEQ ID NO: 591272 - DNA, 531 bp, Homo sapiens
  misc_feature (452)..(452): n is a, c, g, or t
  misc_feature (492)..(492): n is a, c, g, or t
  misc_feature (511)..(511): n is a, c, g, or t
cgtgagtcagggtgggggtgcggaattggctgctagcggtgactttgacacagggttacggaggaatcctcactcagatgcatttggacgtctttgtggggaaatgacgtggcgcctgggatgtactttacgattctaataaagaggagaaagacacaacagtattggctgaatgttgacagctgttgaagccgggaggttggtgtgcttgaaagttccccaaatcttttatttgcagcatgagtatgagtttcttcgtgctcacggaagattgtagagagcagctgtcggtcatggagtcacagggctgccttaccaggacaccaccggcagccccacagacaacacaggtttattctctccagctctgcaggctggaagtccgaggtagaggtgccaacagggtccgtttccggcgagcgcctcctggttcagaggcatcctcatgtcangagggggctttggtgtcaccttttcccttgtgaagggccngaatcccatgacccctatnaccccattgaagccaaaatc

SEQ ID NO: 591273 - DNA, 284 bp, Homo sapiens
tgtactaaacattctactactcactctcactgaccaagaactatcaaagctcctgagccaacaactctaagtatgactagctgacacaatagctttgatagtagaagatacctctttacgtgatctccactatatgactcccgtaaagcccatgtcgaaggcccatcatcgctggggtcaatagtacttgccgcaggccgtcttaaaatctatggcggctatgagtatagatacgcccatcacacgtcagttactcaagcccctctggacgaaagatcacgata

SEQ ID NO: 591274 - DNA, 148 bp, Homo sapiens
gagcagccaggcactagccaggctctccatgaagtatattataagctagtctgccatgcggctctgggactggccactagtgtggcactgtaggcgggctgtgatacaggtacttgagacacctttctgtcctgatgctagctgatac

SEQ ID NO: 591275 - DNA, 1008 bp, Homo sapiens
gctactgcacatgggtacttagctagcaggctacctttagattctgagaattccagttaactgctgtaagaagtgtatcaatgctatttgcacccgaggaaggatgtggatggattgagctatggcatcaatgctgggagacttgctacgagagtgacctcacttgactgtttcattgccttgtacgcctaacgggatagctctggcaactcatcaaagagacagtggagtgccgatatgccgtagaggcatgctgtgcttaggttgtgtgcgacagtacaaatagttcgtgggaccccggatgcatgacgtgtggcatatctgtgggaaacaatgccatcagtgaccacctgttcctactcacgaaggatctgcaccatactgggatgaccggagagtacatagtacacaccggttgaccaatccctggtgctgtgtatcgcaaattctggatcaatgtcgcttcgaataatgcgctataaatagagagcgaggtgcgatacgagaatgcatgggagggcacataagtctattcggaattgctgggacattccaaaattactgatcccaagtaatagactttaaaaatagaccctgacaatgtgggcccatcgaagaggaaggcactacgtagtgaggtagaactcgtttgaggcagaatttacgtcactccctaagaaccgcataaaagaacatacgtagggcgaagaaggacattccaaatacgacgtttccctttggtggctcctcggcttgatggtagcataatggaggcgtttccgcaccttagaagcgccgcgctcaagggggcaattagttcggcccattaaattcgaaccggacgacggtttcgaaaggcgaaatcattcgcaaggttggcccataacagcgtggattagacacccaaagaagaagggaacaatgtgtgttaaaacatcgcgacaagggaaacattacgactccgtgtcattagaagtttcacatactcggtcatcaggcaaagacacg

SEQ ID NO: 591276 - DNA, 884 bp, Homo sapiens
gggggtcgtatgacgcacttttccagctcgagccctcacgaggccgtgggtacgaccggaagccgcagatgctgatcccattttcaatgaagaatgcttccagttacttgtaactgccaggtcccagcagctggctttaaaaaaccagtaaaaaatgggctcattttacagtcaatttccaatgatgtctatcaaaatctggctgtggaagactggatccattgaccatatgaatctagaaggcaaaccaattctattcttttggcagaattctccctctgtttgtaatttggtaggcatcaaaatccttggcagggaatgtaacctgaatctaatgagagaagaaggtataaacatggtcggagaacgaagtggaggaggaacagtcttaccatgatatgggtaatatcaatttgactttcttttacaagcaagaaaaaagtatgatagagtggaaactctgaaattaattgtgagagttctgaatgctgtccaaaccccagtggatgtggagggtaccaaaagatttggccttttacttgatggacagtttaaaatcttcaggaaccagttctaaagatcggcgagtagtgctatcaaccattgcacttattatgtagtactgatgggacgtcctgtcttctttgtaaagagccttaccaggtatcggagcatgcactgtaggatacttcttagtgaaatcttgggaacggtcccattggctgggaggcaagaagcggcgcacagtccgtgctatctaatgaaccatcccataaccacgtgaaccgctggaatacgaccaagattgggcgtcggacccataaatcttggttagccgacattctacaggacttcacctgcgacacaatgggcaaaccacgagg

SEQ ID NO: 591277 - DNA, 522 bp, Homo sapiens
  misc_feature (1)..(1): n is a, c, g, or t
  misc_feature (98)..(98): n is a, c, g, or t
  misc_feature (100)..(100): n is a, c, g, or t
  misc_feature (105)..(105): n is a, c, g, or t
  misc_feature (107)..(107): n is a, c, g, or t
  misc_feature (140)..(140): n is a, c, g, or t
  misc_feature (143)..(143): n is a, c, g, or t
  misc_feature (149)..(149): n is a, c, g, or t
  misc_feature (152)..(153): n is a, c, g, or t
  misc_feature (155)..(155): n is a, c, g, or t
  misc_feature (157)..(157): n is a, c, g, or t
  misc_feature (161)..(161): n is a, c, g, or t
  misc_feature (190)..(190): n is a, c, g, or t
  misc_feature (262)..(262): n is a, c, g, or t
  misc_feature (271)..(271): n is a, c, g, or t
  misc_feature (273)..(276): n is a, c, g, or t
  misc_feature (301)..(301): n is a, c, g, or t
  misc_feature (303)..(303): n is a, c, g, or t
  misc_feature (313)..(313): n is a, c, g, or t
  misc_feature (315)..(315): n is a, c, g, or t
  misc_feature (321)..(321): n is a, c, g, or t
  misc_feature (328)..(329): n is a, c, g, or t
  misc_feature (362)..(362): n is a, c, g, or t
  misc_feature (365)..(365): n is a, c, g, or t
  misc_feature (380)..(380): n is a, c, g, or t
  misc_feature (417)..(417): n is a, c, g, or t
  misc_feature (420)..(420): n is a, c, g, or t
  misc_feature (502)..(502): n is a, c, g, or t
ntgtggggtgggtggggcaggcaggcccctatctccacacgtccagggagtagcggcccttggtcatcagtttcttgatgtagtccaccgcctgttcntnttccntngccccgagctcagccacgatgtcgtagaaggtnttnttttcnttnntngncatnttccgtgcatccccacagacgtagatgtnggctccgccttcgatcaacttccacaggtgctctcggtcttgctttagcaggtgctggacgtagaccttgtnggattgctntnnnntgttggccacgttgtgctgggtgancnctccgccccngnggaacngcgccanncctcccggtacaggtagtcctcatccgagcggnggnagctaagatacagcngcgtctcccccacctccttgctctgctgtcgcagccnggnccgctcctgggatgaagcctatgaagggtgccaccccggtgccggggcccaccatgatgacaggggtggtggccttgaaggncaggcggaactgggacttgc

SEQ ID NO: 591278 - DNA, 112 bp, Homo sapiens
atacgaggattgtagatggatctggcgaaatcagtcacattaattcccatgaggtgggcaactttctgagcagctgctgtcatctgggcatggagcgccctggtcccgtgct

SEQ ID NO: 591279 - DNA, 166 bp, Homo sapiens
ccggacctctactcattccacttcactccactccactcaattccattccactcgattccattccattcctttgtttccacaggatctctctctatcacacaggcgggagttcaggatctcgacaagaacagtttcagggctgtgtggggataacacatgactagag

SEQ ID NO: 591280 - DNA, 127 bp, Homo sapiens
ttttcccgggggggggggggccccaggatttgggggtttattcccccgcggccggtttttcgggcctttttttttcccccttggtttggccccctgggcccaattaggttggttttttcccccccca

SEQ ID NO: 591281 - DNA, 549 bp, Homo sapiens
actacatacttccgcatgttgcccaggctggtctcaaactcctcggttcaagagatcctctcgcctcagcctcctaaagtgccgggattacaggcatgagccactgtatccggccccactttttctgtaaaggatcagatccgtagctatttacacatcgtgggctatccagtctctgtgcaactactcagatctgtcactgtaacgagaaagcaattatagacagtacataaacgagtgaatgcggccgttttctggtaaaactttattcataaaaacaggtagcaggctggatttggtctgcagtttgtagtttgttaacccctgtccaactcattgaatgacagtagtacaccggaagagacatagtgagcctgggagccttaatgagagagctagctgtcttctaaggatttttgtatgacatctgtgtatttggttcacccatttgccaaataagtactatcatttctctcttcttgatcaagaaataacaggtttcacatgatgctttagaaaagaatatagttgtgcatatatgagttgtat

SEQ ID NO: 591282 - DNA, 745 bp, Homo sapiens
atgctggtcatggacgccccgaaccgtcctcctgctgctctcgagcggccctggaccctgaccgagacctgggccggctcccactccatgcaggtatttcagacaaccagcgcatgtcccggcccggccgcgggagagcccacgcattcatcatcagatgggctacagtggacgacacgcagtacagtgaggttcgacagcagacgccgcgagtccgagagaggagccgcgggcgccgtggatagagcaggcggggccggcgtatcgggaccggaacacacagatcttcaagaccaaacacacagactgaccgagagagcctgcggaacctgctgcggctactacaaccagagcgaggccgggctcatcacacacctccagagcatgtacggctgcgacgatggggccggacgggcagcctcctccgcgggcatcaccagtacgcctacgacggcacaggcttacatcgaccctgaaccgaggacctgacgctccatggaccgcggccggacaccgacgagctcagatcagccagcgcaacgtggacaaggcgagcccgtggtgcgcggacgcaatgcgaacacgacagcccctacccaggcgaaggagaccccgagcagtctgcacagcctggcctacagccaaaactacacatgagcacgacaccggaaaagccgccaccacctgaacgccgcgccgcgaaccccacacaacagaacacacacgtgaccccacccaccaccca

SEQ ID NO: 591283 - DNA, 1185 bp, Homo sapiens
  misc_feature (151)..(151): n is a, c, g, or t
  misc_feature (162)..(162): n is a, c, g, or t
  misc_feature (165)..(165): n is a, c, g, or t
  misc_feature (174)..(174): n is a, c, g, or t
  misc_feature (177)..(177): n is a, c, g, or t
  misc_feature (180)..(180): n is a, c, g, or t
  misc_feature (211)..(211): n is a, c, g, or t
  misc_feature (232)..(232): n is a, c, g, or t
  misc_feature (236)..(236): n is a, c, g, or t
  misc_feature (240)..(240): n is a, c, g, or t
  misc_feature (273)..(273): n is a, c, g, or t
  misc_feature (275)..(275): n is a, c, g, or t
  misc_feature (277)..(277): n is a, c, g, or t
taacattctgccctctgaagggtaaaaatttgatttttgaggaatttcttactgcccattttcaaacacagtcacataagaaagcacaaacgctcttctcccctcatcctaaaaataaataacaaggacataaattgttttttgttttaantcatgacactnggnggtttagcnccngcntccaaaatgaacaaaaacggaaaaaaaagcntttactatatatttcagattncttnggtnggggttctccccatgtggtattaatatttcgtngntnaatatatatattaccaaaacagtaaaaaccaggaaaaaaaatagaaacctagcggtggctgaaactggagaggctactctctggtcttccgtgcaggaattcccaggttctcagcttgctggcaaaaattggtggacatttccttttggtagatgtttcttaaagaataacagtaaacattccaatgtccaaatctgggttagtcttccacttaatggctgggatgtaccttgggtgtgggttaaggttgtggcctgctttaggcttaatttctgaatggtcattaattcttaaggtcacctgccgatggctgacaggtgcctgaggagcctggtgtaactcagaactgctctgctgggtggctggaccagggttctccagtgggtgcttcacctgccttggcctcttggccatcttgtgaaggagcgtacggaggacgcgggctcaacgccggacatcgtaggcaccgccgatatccacggcgcacaccagacggatcggttgggaccactggggtggacttgcagataccctctaatctacagcctctccaactgctgaggcagctcgtggaccaggaagtccctgtaacggactctgagcggataagatggaatacgcaagaaccgcgctcccagaaagatgtgcacaccactgagggacttccaacacataatctctgtgcaacaatcaccagccggaatatacggcagcgcaacggagaacacaccaccgttaacccacagccacaacgcccgtcccacgacgagaacgggcgcaccccccacccagaatacagcacaaacacagagaggcgaactagacacgcacccaacaaaatactcacagcacacacacaaaactacaccacgacaccacaatccacacaccccaaaaaccgcaccaca

SEQ ID NO: 591284 - DNA, 390 bp, Homo sapiens
tcaatcctagtgggttcatgtcgatacttatgagtacacttctccacagaaacaatactatgaatcggtgctcgagttcccaggccagcctccctcaacaggttcaactctaatatacctaacctgtgatactgaaggtgcctgcctgagttatgggtctctgagacagggtagtgtgagtagtttggaggaaggacagtgcaactttccaccccttttcctaagaacaatgtctttctccttttaatttttccactcattttcacctcctaatgcccttgagatccaggtacactcctgggagtatagttcacctctcccaactgagaaccttcccactgggctccatcctccctcctgaggttcttcatattccagagtcacccaacc

SEQ ID NO: 591285 - DNA, 150 bp, Homo sapiens
gcactcaatatcatctcacagctctgagtgccctgggccagattacttcctccacccctccctatctcacctgcccatgccgtgtgctgtggccctgcaacttggaactgttggtcagattttctgccaataaacatcttgtgtgtttgc

SEQ ID NO: 591286 - DNA, 398 bp, Homo sapiens
  misc_feature (30)..(30): n is a, c, g, or t
gaatacccagtaagccagcgggcagcaacnctggacgctgatgctgtatggccagcaaacccagaaggtagtgtaagtctggaccgcagcataatggctctgactcagcacacatcactgccaacagggaggtaagctgtgcactgtccacaggtggccaagagggatggccacaccacatgagctagtccctgcgtcctacagaaacacacacctaaaagggtggcctttagggctttgataaacagcacctctacataaaaccaaaaactctataatagagttccacatgtggccagaggtaacattgaagaacttgtaattatgccttagggaatcggaagggaaatactcacaggtataaggaggacatttttgtctctaattagcagcaagaa

SEQ ID NO: 591287 - DNA, 748 bp, Homo sapiens
gagagagagagactagttcgagtttattattatgattttttgggagctaagggttatacacagctattattttataattctattacaccttaaacctcccggagggccgggtggacaggtggcttgggcaataatacctctaatcaaccaacaggtgcaactggcaggtaaggtggacaaagatgtaagatattccagggcatatctaaaggggtataggtatctagaggagtataggagagagccccgcacaccacaccttctatatcagagagacacacagaggagctggcggggcgccaagctggtgagagtggtgcgtcccacacctggtgaaatacccgagcacacttaggcggagagggcccgaggaaaggcggaaactccaacttggggaggggttacagagggagagttgtggagagacacgcgagccggtggggagagaacgtagtggggcacacaccgctatatctctcgacactatacaaaacactcacaaaagagtatacagcggtggaggtgcgagggaggagagagtgagtagccgtaggatccacctcacccagagacacttcaccgtgcggggagagagcggccgtgagagggcagaagaggaaaaaatagtggccggtgacacacccacagagggagagggaccacagaagagggatagtgcaaagaggggggcccggaaagaaattcaacggcccaagtggggacaccccccacagccccgtgggggtga

SEQ ID NO: 591288 - DNA, 1331 bp, Homo sapiens
cagtgtccccatgcaccccggtggatggcactgcggacttcctgtgccagccctgctcacagattgtcttgtgcacgagatgtgccgcctatgacccccgactcgtggaccagccccgtgcctgcctctggtctgaagctgtgctgtgccctggaggccgggcctggacgggactgctggcctggtgtggacaataacctgcgtggagctggagtgcagcgcggaggggtgcgagaaggaggcgctagcccgtgctgcgggagccaggcggcccgggatggggactcaggtggaggaggcggctgaagaggcgtcctccgggccctgcttggccccaagaagcagggagtgtgctggaggcagctacgagcccccacgttggaggctgccgaaaaagctgctcgggaggaggtttggcggagctttgaggggaccgggacgcaaggttggccagggtccgtggaggccggcactttcggccccgccggggtacgttcaagccttggggggcggagatggccggaagattccttctccccgtggcacagggggccagaatacagcaaagagggcgaggaatacaaggccaagtcttggcagtggattgacccccccttggtgacaacacagggaccccgggacaccccctttgactgtgattacacacaggaagttctgggaagcatacacaatcgactggggaatcccgttggaaacaacgaaacgacttggccacaaccatttcctttacggagccttggtcccatttctgaaggagaagccaatgcacaaggccgccccaagcaaaagggcatgcgtcggaggaacacacagaccgggtagacgtgggatacccccaaaagggggacgagtgaagggaaagaatgccaaggaaggccctgagaagggaagggacttacaaggccgaaaaagacttggagaaaaaacacggggcatggtaaatatatcagagcccccacaaagggcccggaaaaaatttggggccccaaaacagcgccaaagaaaggcggtgaaacaagacgcgcagaaagaaccccccgagagaaaaagctgggggagcgccccaaacccgctgtttcgacggcaacgaaacaggtggtgacctagaaacgcccccagacagagagcgagagggaggggggcgcccagcagccccaaccaagagggggaggtgtagcagccagccaaccagacaagaagaaaacgaccacaaggacggagagggcgagactaagaaacccacggggaggacaagaaacaggacaccggagacagcgaaacaaacgaggcagacaggtcgagcacacagg

SEQ ID NO: 591289 - DNA, 120 bp, Homo sapiens
  misc_feature (17)..(17): n is a, c, g, or t
  misc_feature (55)..(55): n is a, c, g, or t
  misc_feature (116)..(116): n is a, c, g, or t
gcggcaggcggccggtntggtgtgtcccgggtgtggggaggcgacagagccctgncacttgagggttgagggggcctcccaagcgcgggcgaaccgtctagcctccggagccaagnccgt

SEQ ID NO: 591290 - DNA, 107 bp, Homo sapiens
tccaggggcgtctcctcactccagcggctactcactccagcggttactcctcactccacgcggctactcactccaggcggctactcctctactggtcgcgtctcgga

SEQ ID NO: 591291 - DNA, 461 bp, Homo sapiens
atcttagaggatccccttcaaatgcgcacagaaagttcacggttacctcgcctattctgaggctggcaaaaggctcatattgagcacgtatagacatcactatgccccaggagttgtgtattaaaagtacagctttggtcagtgcagcttctaacccttatagctcttgaataggtctattctcaaactacaaaaagatctcagctgacttataaggtcatggtcacaggacaccgagacaaccatcgtgcactggtggctgagactgtggactgggtctttctcgcaatttctgtgcccttttctgaaatgggcacagcaaattcgttattaatattgatgcgacaatactcttcgtttctgacatcttttgagctcagaagtttgtttaagtctgtatcattcaaccctttcgtttgactataaagaaataggaagccattgagagtgtgatgctctga

SEQ ID NO: 591292 - DNA, 364 bp, Homo sapiens
ctcttttaaggaagtccctaatttagaaacaccccccaacttcccaatcataattagcaaaccattggaaggaagttgcttgaatgttggggggaggaaaatctattggctctcgtgggtctcttcatctcagaaatgccaatcaggtcaaggttggcaccattttgtatgtgtgtgatgcttctcccaaaggtatattaactatataagagagttgtgccaaaccgaaataataaagttcggacccggggcccccgttcatagttctagctgcttggaaggttgaggagggaggatggcttgaacacaggtgttcaaggccagcctgggcaacataacaagatcctgtctctcaaaaaaaaaa

SEQ ID NO: 591293 - DNA, 238 bp, Homo sapiens
ctcctctgacagctgattcttgaggacagcaaacattctcctggaaagccaggttcaatgagggctcctagaaacctgcggtgtctgagccacatcagcagcctcattggcctccaaggaggggccacaggctttcacccgtgcctccattttgtgtatgcggctttcaaagtcagactctggagatgcaaaggttccaatctggaaagtgaccttttctaaggaaggtttctcccgg

SEQ ID NO: 591294 - DNA, 123 bp, Homo sapiens
cggcgcgctgagctggagtcctaggcacagctctaagcttccttattccgagccgatgctggagcagccaggtcgaccttctaggtatctgatccacatctactgcgttatcgtccgagcgga

SEQ ID NO: 591295 - DNA, 425 bp, Homo sapiens
gagtgtgtttgattatctgaggcagggggatgagtgtatttgattttctgaggcaggggcatgactgtaagtgattttctgaggtagggggctgactctgagtgattttctgatttcatgtctgctctgatgccctagacacatgcagttggaaagccatctcagaattacctgagggcaaagaatcgaccctgctagtcatggaaggggacacaaaatactcagattatgaagtgaataggaaggtggaaataattagtattgattaaatttaatttgtccatactaaaattcatgtaatagatcaaaatgtaaaatacagcatttaatttgttataagtaatatcttgtgcccatcttatattttcaaagcatccacaccagtttaagatatatttgaggttcagatttcaaaatgtcgacgc

SEQ ID NO: 591296 - DNA, 513 bp, Homo sapiens
agtcggtacacctgcctatgtagtactcacactgtgtgtagattttgtttcttttgttaagcagcacttatagtagactgcatttccaaatgtgttgagcactcagagtgtagtccacaggagttcttttaatgaatatcagttttaatttatagactggcatgggctttaaaatattctgtacaatatactgcactgtgttgcacagacactaattgcttttctccattcatatttttatgagtagaatctgggcttttaaatttctcttcttattctttgaagcatgttgcatactaccctggtgggatggctggttctgtcaacatgaaggggatatttcaaacttgctactagttgttcaacacccattaatggtcagtgtgaacccttaccaagaatgtgggaacttgcttgtgcctaaaaggaggaattggcactagaatgtgtgactctttggggactgcataggttcgttaattgacctatagctaaaccttaatgtgtatgtgt

SEQ ID NO: 591297 - DNA, 234 bp, Homo sapiens
agacagattgattttaacaacatgttccgtaagtcctaacttaatggcactggaaaatctttctgttaagaaaaggaaaactatttggaccttcaacaggctctttataagcaaaggcattttcgtgccccagcagaacagtcttgttataagggagatttataacgggacttccagagaagcaatgagttcagttaaatttctaaacactagaagcaaacgcaacggtgaact

SEQ ID NO: 591298 - DNA, 337 bp, Homo sapiens
  misc_feature (14)..(14): n is a, c, g, or t
agcgcccgatcaanggggggcttgcgccgggaacaattgatgccccaggcttttaaggacctgccaaagggggtggaccctgcccgcagggagttttttttctcagactttgacttccaaaatatttttgggaaatccaaggaggaattttccagcatggccccgtggaggcagcggcaggaaaaaaaacagttgggttttttttgaacccaagcccttttgactgcccctatcccctggaccccaacatacctacaatgttgggggggccctgcttcccctcccctcaaaggcttttggtcatcctttgggtgtcagtaaaagcaggcagcccata

SEQ ID NO: 591299 - DNA, 416 bp, Homo sapiens
ggattgtcatagcagcgttatagataatagcccaggagtagaaacaatccagacatacatcaattgacgaatggataacaaaatgtggcatatcatacaatgaaatattattcagctctaaaaaggaataagtactgatacatgctataacctggatgaatcttgaaatcacattatgctaagtgaaagaagcattataaaagaccatatattctatgattctattcatattaaatgtcccaaataggcaaatttatagggacaaaaaataaattagaggttgccagggccaggggagaagaggagggagtttggattctgactgattatgggtatggtgtttctttatggggtgatacaactgttctcaaagttgttgtgctagtttcacactctttgaatatacaaaaaaaaaa

SEQ ID NO: 591300 - DNA, 497 bp, Homo sapiens
gagcggtgccccccacccaccctgcacccctcgccctccccccaccacagaatctaagacctttcagcttcgagccagggggcgggggatcccgagcaaaagccttccgtggacatcaggccccgtggcctcaagggctcccagggcaaacctaattccccccaaaacgtgaagtcggggaagctgcggctacacattccacaaagtgctggcacttacacccacaacccggaaggctgtggaccgattcctctagggtggtgacctcccattagcaaacggtgtcatggtttggaatgttcattatcgccaagaacctggttagaggcataaagaccttttttcaccgttacctaattttttcccctttcaagaattttttttttttttggtgtgttgtacagcagtataatttttcacttatttattccatcagtagatatggtttgtacaatgtacaattgtttcatttcagaaaataaaaatttcaaatcatg

SEQ ID NO: 591301 - DNA, 552 bp, Homo sapiens
gagcggtgccccccacccaccctgcacccctcgccctccccccaccacagaatctaagacctttcagcttcgagccagggggcgggggatcccgagcaaaagccttccgtggacatcaggccccgtggcctcaagggctcccagggcaaacctaattccccccaaaacgtgaagtcggggaagctgcggctacacattccacaaagtgctggcacttacacccacaacccggaaggctgtggaccgattcctctagggtggtgacctcccattagcaaacggtgtcatggtttggaatgttcattatcgccaagaacctggttagaggcataaagaccttttttcaccgttacctaattttttcccctttcaagaattttttttttttttggtgtgttgtacagcagtataatttttcacttatttattccatcagtagatatggtttgtacaatgtacaattgtttcatttcagaaaataaaaatttcaaatcatgtccccgtacatcgttagaagcttgaattcgagcagtagtagtagtaggcggccgc

SEQ ID NO: 591302 - DNA, 1029 bp, Homo sapiens
  misc_feature (691)..(691): n is a, c, g, or t
ggttgttctggggtcctctggggtcctctccgagcttgatggacactctggggtcctctccgagcttgatctgagaggacccagagtgtccatcactgttgttctgacgtcggtgcaggagcagacagagaagactctgactccgagtgagctgaccaagctgaggcgctgctgtgcaatggctattgggcctttgagtgcctcacgtgtaccgagactacaattgacatgatctgtggcatctgtgcgtgtggcaccccaaagtggaaatggctcagagcgagtgacgagaatgtcgctagcactgaagagcagtggaggtcgacctgggccctgagcttcctgggagtcaagatgagcgtaaaagtgcgagggaaaccagagtgcacacagatagcgagacaagaagttcacaacagaagcaacggctgcggcacaacataacatagcgcaagaacatcccggaatcaaacacagaagacagaagtagccggaaagaacagcagagaccccacaagaactaagacacaacgaagcaaatgaagccggacgcacgcagggcagagaggccactagagacgcaacaacaccacaccgcacgggcctaaggcgcacaagacacgaggaacccaggcaacaacatgagaaaacgccaaagagacgaaacaaaaagcacaacaccgaacgggcnacgcaagacaacacagagattgacaagaaggcagacccagccggagaaagcacgcaccaggcaaccaacagagcagctgcggcaggggaggcgcaaccacacataacaccgcacgcacaagaagaacgaagcaacgggaagcaaagcacaaagtcagaccaagcccgatgacagcgcagccactaacagacgcacactgagacaacagatgagcagaacaacaaaacacaagagcacaccgagtcgacgagcccaaacggcgcaacaaccgagagaaccagagggagcactacagacagcacaggagagaacacaaaccaggggacagcagcaccccg

SEQ ID NO: 591303 - DNA, 399 bp, Homo sapiens
gttaaatcctttccccaaattaatccattatattcctaaattaagttaagtggttccagaatattccttggcctccttatcagctcctaaggattcaggtaaatctataaaaaaatcatttctgggcccaggcacggtggctcacacctgtaatcccagcactttgggaggccgaggtgggcggatcacaaggtcaggagttcgagaccagtctggccaatatggtgaaaccccatctctactagaaatacaaaaattagctgggcgtggtggtgtgtggctgtaatcacagctacttgggaggctgaggcagaagaatcgcttgaacccaggaggcggggttgcagtgagccgagatcatgccattgctctagcctgggtgacagagtgagattccat

SEQ ID NO: 591304 - DNA, 107 bp, Homo sapiens
tggcagtatcagcaagaaacagaagaggcagttaagggcccacaaatttatactgggaagaaattgccaaagagtaccagaatgaagaagattccttgggcgggtct

SEQ ID NO: 591305 - DNA, 353 bp, Homo sapiens
  misc_feature (245)..(245): n is a, c, g, or t
aagtcctcctgcttttgggggctgcttcccagagtcccccgggtgctcacctgccgaggtcaggagctgacaagccttgtgccggtgacacctgcatgcctcactcctgtcatcccaggacacttgaggcccaagaggtggagtggtgactgtgtttggtcactatggagcctcccagtgtgcgtcaggatctgtgggcaggggacagggcgttggttggggccgaggctggcacgcccctctgncctcaccgtcttggtgacctggcctcgggccctcccccaagtctcttctgtgcaagggccgcctcggcctcggcagctggttcctgtcctgttttctgtgtctgacag

SEQ ID NO: 591306 - DNA, 274 bp, Homo sapiens
tacacgttctagtaacacctagaagtctagtatagggtctcatacacactaaaatcatgtagtcagctcgttttcacggaggttccaggacagacccatttcattttatgcttggataggttaggcaagggaattcataattctatgtaggtaagactagagatccacgatttcattgctaggtattacagctagagaggtatgtttccaaggttctaagaagactctacacataccctattaggttcctaggtacctacttactatacatact

SEQ ID NO: 591307 - DNA, 190 bp, Homo sapiens
  misc_feature (6)..(6): n is a, c, g, or t
  misc_feature (50)..(50): n is a, c, g, or t
  misc_feature (99)..(99): n is a, c, g, or t
  misc_feature (150)..(150): n is a, c, g, or t
  misc_feature (183)..(183): n is a, c, g, or t
  misc_feature (185)..(185): n is a, c, g, or t
gcagtnccctgctctgttggtggttggggacagctcgcctgcagtggatnccgtggtggagtgcactaaaaattggacccaacaaagaccactctcctnaagatggcggactgtggcggcctcccgcagatctcccagccggccaagctngctgaggccttcaagtacttcgtgcagggcatngnataca

SEQ ID NO: 591308 - DNA, 593 bp, Homo sapiens
  misc_feature (541)..(541): n is a, c, g, or t
tcccccgggctgcaggttttttgtttgtttgtttttaatacagaccaggttttaccatgctggccacgttggtctcgaactcctgacctcaagtaatctgcctgcttcggcctcccaaagtgctgggattacaggtgtgagccaccgtgcccagccttccagtttgcatatcttgctgataggtttaattagctgaatgagcccaatttgataatgcagctgggcaatattgctttcctgctgcagagagggtcatagatgtgacatctatcctcggtatccaaggcagctggatacgttctggtttggaattttgactgatctggtaagaggtgggggctgaggaatctctccagattttaggtttagtgttttgtttcgtttcttttcgagactgagtctcgctctgtcgcccggctggagtgcagtggcgcaatctcagctcactgcaacctccgcctcccgggttcaagcgattctcctgcctcagcctcccaagtagctgggattacaggcagctgccaccacacctggctaattnttgtattttagtagagacgggtttcaccatgatggtcaggctggtctcgctc

SEQ ID NO: 591309 - DNA, 102 bp, Homo sapiens
tgccaacgtcactgagggccctgccccagcggccctggccccagtctctattaacctaaaatgtagctccctagcggtgcctaggaaccgccgctgcctgct

SEQ ID NO: 591310 - DNA, 777 bp, Homo sapiens
  misc_feature (526)..(526): n is a, c, g, or t
  misc_feature (588)..(588): n is a, c, g, or t
  misc_feature (607)..(607): n is a, c, g, or t
  misc_feature (623)..(624): n is a, c, g, or t
  misc_feature (626)..(627): n is a, c, g, or t
  misc_feature (632)..(632): n is a, c, g, or t
  misc_feature (634)..(634): n is a, c, g, or t
  misc_feature (636)..(636): n is a, c, g, or t
  misc_feature (644)..(644): n is a, c, g, or t
  misc_feature (651)..(651): n is a, c, g, or t
  misc_feature (670)..(670): n is a, c, g, or t
gtagcttactcggaagacctatatctccaggtcttccagcatctccagggcttccagcatctgctcgtcttccaacatctccacgtcttccagcatctctgtgtcttccagcatcttcatgtcttccaacaactacccagtcttccatcaactggctcaatatccatgtcttccaacgtctccagtgtgctgatcttctgacattcaggtcttccagtgtctgcaatatccagggtttccgatggcacctgtgtcaaggtcttccaacaactccgggtcttccagcgacttcaagtcttccaataatctcaaggtcttccagataatcctgagcttccagaaaatccacatcttccagacaatccatgtcttccggacaatccatgtcttccaagaagctccaagtcttccagtaaatcaagtcttccagcaaatccagtcttccagcaattactggtcttccaccaaatccagatcttccaggaaaatccacgtcttccaggaaatccatgtcttccaataattncaaggtcttccatcaaatacagatcttccagctaatccatgtcttccagaaaaatctgtgtnttccaccaaatccaagtcnttccagtaaagctagnncnnccagnanantctagatnttccagncaatcagtgtcttccaganagaaatccaggtcttccagcatctctgtgtcttccagcatcttcatgtcttccaacaactacccagtcttccatcacactggctcaatatccatgtcgtccaaccca

SEQ ID NO: 591311 - DNA, 392 bp, Homo sapiens
gcgtcgacctgcaacctgcaactggtagatgccgtaagaaaatgcataaaaaattagtgctagattttgaaatcgttattaaaaggatcataaaaatcaaagcatccctgtctcagttctgtccatttgatttataaggaggctaaaaatggaaatgtaggtttcaacgggaccaggtgtggtagctcatacctgtaatcttagcactttgggaggccaaggccggggaatcacttgggcccaagagtttgaggctaacctgggcaacatagtgagaccccgtctccaaaaaaagaaaaattaaaaaattagctggccatggtagtgtgcacctgtggttccagctactcggaggctgaggtgggaggatcactggagcccagtaggttgag

SEQ ID NO: 591312 - DNA, 677 bp, Homo sapiens
  misc_feature (526)..(526): n is a, c, g, or t
gtagcttactcggaagacctatatctccaggtcttccagcatctccagggcttccagcatctgctcgtcttccaacatctccacgtcttccagcatctctgtgtcttccagcatcttcatgtcttccaacaactacccagtcttccatcaactggctcaatatccatgtcttccaacgtctccagtgtgctgatcttctgacattcaggtcttccagtgtctgcaatatccagggtttccgatggcacctgtgtcaaggtcttccaacaactccgggtcttccagcgacttcaagtcttccaataatctcaaggtcttccagataatcctgagcttccagaaaatccacatcttccagacaatccatgtcttccggacaatccatgtcttccaagaagctccaagtcttccagtaaatcaagtcttccagcaaatccagtcttccagcaattactggtcttccaccaaatccagatcttccaggaaaatccacgtcttccaggaaatccatgtcttccaataattncaaggtcttccatcaaatacagatcttccagctaatccatgtcttccagcgacttcaagtcttccaataatctcaaggtcttccagataatcctgagcttccagaaaatccacatcttccagaaaatccttgtcttccctcaaatccatag

SEQ ID NO: 591313 - DNA, 439 bp, Homo sapiens
agtgactgtttcttctcttactaacagcagctcctgactgcgatgctcatgtacatttatcttcaaaagtacacgcaagtgcacaaaatcatttaaaacaatttctgactttccatcttctctgtgttattcatcttaataacatcattttgtactttttttgtttgaaacaatttgagaatttatagaaaaagttgcaacaaatactagatgaactttatgtcgtttcatccagatttcctcaacattgttaaatactttgtaatctcaatcgttccttttacatagtatttgtttgccatccaatatgctgtttttcttctacttctggaggcatttaaggagtaacttggcagacatgaatgtccctttatgcctaagagactatgctactagcattttctaaggaacaaagacattctcttatctattcacacaa

SEQ ID NO: 591314 - DNA, 262 bp, Homo sapiens
  misc_feature (113)..(113): n is a, c, g, or t
  misc_feature (252)..(252): n is a, c, g, or t
ccactgcccagggtctctccagccatccacatcacagctgccccgatcccaaggtggagattgtcaggtacatatcggccaaagaagactgggcgtggggagagcctggcctnccaacgaccagatgggcagcacagggtgtaaccggacccagcttgtatggccaactgccatcagcccctacctgcctggcatccagatcgtcaccccagggcctctgggcatttgaaaaaaagaagccagatcccctgnagcttgggta

SEQ ID NO: 591315 - DNA, 272 bp, Homo sapiens
atttgatcaatcaacctaaagggttcccttaagtccaaggaaagactatcacgatgtctacaactgaagaagagaaggggaaagggcattctaatcattgccttgtttacattgatgctgttgctgcattcttgccattgaaactactcttgcagtctggtaactgattaacctttgccaccaggatgccctttctgttttagatccctcaaacttcaatgttgatccattaacaaggctttccacaattactactattgttttttattctc

SEQ ID NO: 591316 - DNA, 557 bp, Homo sapiens
  misc_feature (210)..(210): n is a, c, g, or t
  misc_feature (372)..(372): n is a, c, g, or t
  misc_feature (412)..(412): n is a, c, g, or t
gtagtctggtgcatcattatgttgacaatacaagaaaaacatcaaaacatatctatgtaccaactagaattgtcctggaatgatatcgagtcgagtatactgtagtagtgtatagttgtcttgaatctgtactagttagtgtatacaggctgcatcgtacaatcgctatgatgacgagtattgcgcaagtattcagcatgttatcgcatntgactttgacttggctagggcgcgtttaataaggataagggcgcgtaggaatatatcacgagatatggtggtatatgatttcttgtcgatcgcggtgtattctagttatctcttacgtgtaccgtgcgcattttatacgccgctttttcattagaggtcganccaatagtggatgtggataaatttctgagatagggctganttagagagggcgtggtttcagagaaataacgtggtaaggctgagtttaaatgattggtgcgatatgggggcgcggaaatttgagtaggttaattttaaatgggaggtacttagtaaggggtcgatatttagttatcttgtggcgt

SEQ ID NO: 591317 - DNA, 148 bp, Homo sapiens
cacagttgaagatcccatttggcccaggtgttcaacccggggtgggcccttttggaggagtttggcggagcaaggtcaaaaatgtcgggcacaccaagtgctcagtggcgggacgtgagaatatcacaccccggggggaaaatgtcgc

SEQ ID NO: 591318 - DNA, 187 bp, Homo sapiens
tttgaaaagaagaacaagtcaattgtgtgtgtggaccctcaagctgaatggatacacagaatgatggaagtcttgagacagtcagtcagcgcataacaaggggtttcagattccaacctgctctgaagagttcccctttctgagcagtcaccataggactagctgaattatgagagctcctagacaa

SEQ ID NO: 591319 - DNA, 108 bp, Homo sapiens
tccgggaaccggttttaccgggcgtcgggtttccacgggcaaacgtttaaaaccggggaacgggttaacccggggacacggtttccccggcgacccgttttacccggg

SEQ ID NO: 591320 - DNA, 100 bp, Homo sapiens
gttacttctgcacccacagcataatttaaacattcaacgtacctgggccggtgcactcaactttatctttactagacgaagagcttggcatattcctact

SEQ ID NO: 591321 - DNA, 105 bp, Homo sapiens
agaacatttactgaagtcaaagtggtgccgccctacatctactcaatgctggttcgaataattacatcagcagctctatcgcatcactggtagcatatcctcgtt

SEQ ID NO: 591322 - DNA, 804 bp, Homo sapiens
gaggacattccctgttgagggcgtcgcgacgtgaggcgactgtgtggagacggaatttcccaacgcgctacaatactctgttctggagaagtggatctttctcttacgtgcatctatacgaggcatgggcaagtgcagcagtatgccggcattgttatgcatgagcacaatacaacatcgcttgaatgaaggaagatgggagtaaagaacaatgctaccatatggatgcattctgtgcatggaagttggcatcagtgtaattaggccaggcagtgagctatacaattctagtatcattgagatgagatctgaggatgtatactcatgctggacgtctgttatagcggacacagcacgtggatacgtatgcaagtattcctcgcctgagtgagccccatgacaaactgacgtctcattatctatgaagggtcctgtctacagatgctgctatgaactactattagcgtgtggtttacagatacatgcaagcctctgatggttgtgtctatattccaattcactagcttgccttgctcttttaataattgcatatgcctcatacaccttacacctttatgccacaacaatgtacgggcctataaatatatgttaacattggaccattgattctttctttattaattctagctttggcgggcttggctccaatgcttgtttgtactctgcgccaggttttttccacagtgtggcccttaggcggggcctcatctgcgttacatgttggcccatcaaggggaaccgctctttacaccaacaatggccaccgttgttaggcccccaatc

SEQ ID NO: 591323 - DNA, 314 bp, Homo sapiens
tcgcttagagtgcatgctgagataagcaatcatatttgttattgcggcgggcatgtggctccagcctataatcccagcactttggtcaggagttcaaggccagcctggccaatatagtgaaactccatctctactaaaatacaagaaattacctgggcatggtggcagttgctggtgatcctcagcctcctgagtagctgggattacaggcatgcaccaccacgcccggctaattttgtatttttcgtagagatggggtttctccacattggttcaggctgttctcgaactcccaacctcaggtgatccacccg

SEQ ID NO: 591324 - DNA, 804 bp, Homo sapiens
tctgcgcgctcaccgacttcatagggtgccgaattcttttatccccaggcttgccatggctagtcgaggggctcggcagcgcctgaagggcagcgtgggccagcagtggggatacgagccccggctgctggacaagtctgcgggagctgctgggcagcctgagaggcgggcggcgcggagcaccggaccgacgttatctggggaacaacagcagagacaagtcgtgtggcaccgtgaaggatctattgctttcgaagtgtctgctttcagacaaggttatgtgctgctctcctggagcaacgatctctggactgttgatgaaacattcaacgtactgggagccgaacacactacctcatctatggggaagggttacagacttgggaatattccccagtcatatggccatatcgtctacctatgcttacctgtagcttcatgcgctggccatgctgcgttttcattgcataggaattctacatagactaataagattcttgtgttagactttgtgcgatgtcttctggcgtttcgtgagcttgtatttgtgaacctttacttgaacaaggctgtgtgcgagaagtttgggttgcacgtgagctcgagatgatgctatgccttcttggttctcagaactggcatgtctagcgtcatcatcagcgtgccttcctagtagcttctgtatgtacactacgttgatagccatgactggatggtctatggacaagacttccattgctgtgctgggagtagcagctggggctatctaaggctgggcattcagtgcagctcttggttaaccca

SEQ ID NO: 591325 - DNA, 217 bp, Homo sapiens
agtattagcaggatctaagaggcacaagggagggccattgcgaggtatcgggagtaggaagccaggtaccgctccacgaagggttgcccgaagccccctgcacgggtcgagcgggctgtggctgggtgctggtgggcagacacgcatcagagcactgtccgtgcccgtggtagcgcaggtgcacggaagctctcagtgctgagctctgggaccgtgc

SEQ ID NO: 591326 - DNA, 424 bp, Homo sapiens
agactgagccctggctctcttacactttcgcaggaattgattccgagatacctagttaaagagtgctgagggtccagatgtgagaggactcccacttgctccctggttggtagccattttggcaggttgtgaaaactgaggggcaggctttagctagggtcttgagggatcgagtcttaactctgtgccagcagggtcctttgtttctccatctgaggagatgcgagcagactttgcctcaggtttctgcctccaggaaggtcccttgtttcttctgtcgggcttttgatcacagtaaggaaagttaatataaataaacagtgatcatccttcaaaggggatgtcatggtcgtgccatagaatcaacttgataattaacatacagtatttgcattaaaaccaaatgacattcattttgacaaaa

SEQ ID NO: 591327 - DNA, 757 bp, Homo sapiens
agcggagcacctggagggcatgaggaggcggcagcggggtgtcctgtcctctccatgaagccgcagcaggcgccggtgtccggaaaggtgttcattctagcgagactagctagtcatgtgtgcacacgctgccagttccacgaccagatgttccctggcggagctgcgagaaccggattgatatggcagcagtttgaatgaaacagttcgaactctaagttaacctttatgcagaagcagagaagctcggcggccagtcatatctcgaaggcttgtataggggtctgtcgtaactagcatagtaccattcttccgtatgcatggaaaacgtcattagtgagaacggttctgaagaaaggtctccaatgtacattcaagagcagaatgagaagatctatgctccactaaggcctcctcctgtacagaccgctattgagcgacggactgcgagttacttgatcacttaccatttatgaagacagaggcatgagcagtggaacgataaaccgaagaattgaagatcccacttccagccgggcgccgtcatgtatcgagtggccgaccgtagagtgtccctaccttcactctccagagcatcattcctttctatcatgctggcagagccacggtgcctatttacttccaaggactcactttctaaaattccacaactggagtgacctctagtcgctcagatccactttgtgtctccaaattgtgtaaggactctgtaatctttagattagtttgctgagaa

SEQ ID NO: 591328 - DNA, 288 bp, Homo sapiens
cacgaggttttttaaattttttgtagagatgaggtctcactgtgttgcccacggtgatctcgaactcctatcctcaagcgatcctcctgcttcggtctcccaaagtgttgggattacaggcatgagccaccactcctggccaggagtttatatgtatactgtggatactagatcctcatgtgatttgcaaaaactttatttatttatttatttatttttgaaatggaatcttgctctgtcgccaggctggagtgcaatggcgtgatctcgggtcactgcaactaccac

SEQ ID NO: 591329 - DNA, 357 bp, Homo sapiens
cgccaatgtgtgtagcgccggggcccgaagtcgttgcctgtgaataccacctgtgcatgctcatggaatgggaagatgccaagtgccttccagtaagatttggtgtctatttccacttggtatatcccttccccagaggcaaatggctcccaggtgtcatcagcagcctttctgaacacatgcacggccacattaatgccaggactgcctcggacagcatctagacctttgaccatcagagcacactgtggattcaccggtgcctgtagggacagcctcagacacaaatcacagtacagcgagacagaggaggagcagactatgagaagccatcctgacgagctcgtgccgattcct

SEQ ID NO: 591330 - DNA, 355 bp, Homo sapiens
  misc_feature (168)..(168): n is a, c, g, or t
ggcaccgcctcttcagaatcccacgtgttcttttccaggctccaacttaagagcctggtttccagtgacttggccctgagaacaaacagtgctgagatgaagcctgtggctccatgagcaagctgaacgtggccagaaggcaatcacaacattcttttctgtcttggnttttttttttttcctttttttttttttaaaatttaagcttggaggacaaaaacattgctgggggagggggagacccccaggttgaccccccggggcccagttttgccgataaagctccgggcggccaggtaacctcacacatagagaagggggaaaaagaccagaaaggcgggaaccaaaaccaaaa

SEQ ID NO: 591331 - DNA, 184 bp, Homo sapiens
agtgaccaggcgcagatgagatctgtctcaaacgcaacaggaaaaaccgctctcctttaaatggatgtagtggtacacacctgtagtcccagttactcaggctgagaggaggattcagtgcgcctgggaggtccaggctgaagtgagtcatgatggcaccactgcactccagcctgggtgaccg

SEQ ID NO: 591332 - DNA, 308 bp, Homo sapiens
gtgtgaactcccttgaatcctaggattacattgcaaataatgaaatcttacatcagtccagtatgtgttagataactatgtaatttgcagcccctatttagaagaatttttggcaacaagataatggttaatattaaatcaaaatcaaaacaaaaaaaagtttaacctacccattcaatcacaataaatatacccacaaaattgaagtacattctcaagtaatgtaagtatttttaatggactaatctatattcaacatctaccagcccctaagaaaaacttggatatatgtgtaatataaataacac

SEQ ID NO: 591333 - DNA, 368 bp, Homo sapiens
  misc_feature (185)..(185): n is a, c, g, or t
  misc_feature (203)..(203): n is a, c, g, or t
  misc_feature (227)..(227): n is a, c, g, or t
  misc_feature (256)..(256): n is a, c, g, or t
  misc_feature (276)..(276): n is a, c, g, or t
  misc_feature (342)..(342): n is a, c, g, or t
tggtacagcgtacctggagggatgcaagacttcaattaccttagcagcaactgttttgagatcaccgtggagcttagctgtgagaagttcccacctgagagactctgaagacctactgggaggataacactccctcattagctaccttgagcagatacaccgaggagttaaaggatttgcccganacctttaaggtaacccanttgcgaatgccaccatcttcgtgnaaggaatagaccacgatgttaccattccnaaaggatggtgattactggnagaatgcttatcctggaaactattaacttacaggcttagcttcaggctatcttggcaataccggtngcaggttcttacgcctgctgctgggg

SEQ ID NO: 591334 - DNA, 277 bp, Homo sapiens
cagaagaagtggatgggataccgagattaggatgatgtgattgaagaatgttataacacatggaggagttattcatatttatgttgactacacaattcacgctcagggcaatgtgtatgtgtaagtgcccatcaattgctgcagctattgctgctgtcaatgcattgcatggtcaagtggtttgctggtacaatgataacagcagcatatgttacctcttccaacttaccacaacctggtttcctgattctatgacagctggccgtttcacttccga

SEQ ID NO: 591335 - DNA, 953 bp, Homo sapiens
agtaatagatgtataagcacgagcatattgcattctccggtagcatactcatcgctatccccatcggtgtctcggtattgatgctgagtcgccagactccacggaagcgaggatggaatgactgtgctgcagttgttcctgaggacataggatacattgctttgttttcactctgtagggtggtcctgatctggaatagtagttaatcaaaagttctagtctagctagaatattatgtgatctaaacagatgttgtattcgtaccggttgggtgaagcttgaaattcacaattaatgttgcgtaattgaaatatggagggtggtatttggccaactaatggtgaggggcattccatgacagcttgagttgcgccctttatttctctaggtgtgaacaccctctttatgaacaataaagctatgccaatacacatgggttgtcacaggtaaatcgactaatgcgatctgccgataggaacttctagaggtgatcgtttcccagaaaatgacgttgccctcgggcaataataccgggaagtgccgccgaccgggtataactcgggcacatacccccgtattgcaaatattgcccacatgtgaaacattcgtagtcattcgggtggggcttcgattcactgtatcgttcgtgacacatgcagtagttacttcagggtaactttgacaatagccttgtgggggacaaggtctttacgttaacgaaatgcgaaaaagggtcctatatagggtagatgtgaaacccttcgataaacctgtgtgagtgactggttgtggattggccctccatcacgtagccatgaccatttcaacgaacccgttttacgttgcatccttcgaccagcgaagggatgggatcgaaggcccaccaaaagctggttccccagacaccctcggggctcctaggagatttccaacaacctgatgaacaaaggcct

SEQ ID NO: 591336 - DNA, 1119 bp, Homo sapiens
gccatctcctactcctcagtagtacccattctgaatcgccaatggacatacctaatgctataccgaacgaaaaattctaggctatatacaagctacgcagataggccccaacggttgtaggcccctacgggactactacaacccgttcgctgacgccataaaactcttcaccaaagagcccctaaagacccgccacatctaccatcaccctctacatcaccgccccgagccttagctctcaccatcgactcttctactatgaacccccctccccatacccaaccccctggatcaacctcaacctaggacctcctatttattctagccacctctagcctagacacagtatactcaatcctctgatcagaggtgagcatcaaactacaaactacgcacctagatcggcgcactagcagagcagtcagcaccaaaacaatactcatatgaagtcaccctagccatcattactactatcaaacattactacactacacgtggctcctttaagcctctccacccttatcacaacacacagaaccaacctctgattactcctgccatcatgacccttggccataatatgatttatcatacacactagcagagaccaacagaaccccttcgaccttgccgaaggggagtccgaactagatctccaggcttcaagcatcgaatacgccgcagggcccattcggcctattcatccatagccgaattacaccaaaatctatcatcctacaacacccttccacatcacaatcttacctaagaaacacctatgacgaactataccctgaacctctacacacaaattatgtcaccagaccctactcctacctcctgttcttatgacactacacagataaccccacatccagtacaacaatcacacaactacactggcaaactcttccacaaaacctcacaaatacatgcaagtcaccgaaccttaaatacggattcccctaatcacaacaaaaacacagcttcaaggcgggcacatcaacacacactcagtgcgcaccctcgcactgagaggcaagagggctacgcgaccatacgcaaacaaaccaagaagagcatcacagagcattagacaaaagaatcgagaacgaacac

SEQ ID NO: 591337 - DNA, 1040 bp, Homo sapiens
gctgatggacagctgggtccgagaggactgtgcaggtctcaattacgcagtcttggtcagatggggcaggccccttcgtcagagcggcgctgatggagtcacaagtcccctggggtactggaccagtggacagactttcttcgatgccatattaacccacagctcaaaatgccaagtctccgtggttcctctcggccgagggatcggagaggctgtctgccagtggtgcgtcagatctgtggccgcatggctgcggggccctgcacccacatgccctgcctgcccttgtgcgtgtgaagcggcgtgtgccctcaagaatgctggcccgctgctcgtgggagttgccatgtgctgtggcgctgcattggagggcgcggcactacgtgggtggcacggcatggagctggtcgcaccagtggtgattagcttaacgccaaggaagagcacagccaggtttccggcttggtggaggaaatatgggctcctggttgggcggggtccgtctctgcctaccgtctaggatctggtggagggttggtgatgggtgaaggatgcctgcgatgttcgtgggcgtccgtgccctctctcctcggtagtggggtacacggacctcagtggtgttgtccttctggcgtgtgtaacgtggtatcgaatcgggttctatggaggctacgtgtgtgtcgcgggagtctatgctgctgtgctgattgactgatggaggtggacggggtcgacccctgtgcggaccgtcggataagagagccagtcctgagtggtggatgtggaaggccagtggagtgaattacctggagcaacgtccggcatgtttgtcgtgcggaatagacgtgaactccaggggaatgtgacaagggagcccaggcataaattttcgcaagcgcgtggcaacacgtgtccgggcaaacacacatagtctaacggaaagaccacagacgcgtagaggccacgcccggtacacactttcgggtggacggaactcgcacaaacacccagctacacactggggggggccccacacagag

SEQ ID NO: 591338 - DNA, 352 bp, Homo sapiens
tagagttcgcagctgctgccatggcggaggccctgtcgaatacctccagcgggtttaagtgggaagacttccagcgcatcgcaaacaagcccggtgttcattacgcattggccggattctccgcggactcaaccggcgacaacggtgtaggggttgtacaggcagtcattaggcgctgaacaatccccagtccaccaccagcccctgcaacgagtgtcacggcgctggcttctgcatgtcgatcgtgcaggaagaaatgcgctgtccatgcaatgcacctattcagctcagcaagggaacgccatgaataacctctgtagcggatacctgtcgcgagaaaccctaaccgggt

SEQ ID NO: 591339 - DNA, 108 bp, Homo sapiens
tcttttgcaagttgatcaacaagctcaattcaccaccatggcaatacgggagctcaaagtgtgccttctcagaggaacggggactaataacgatggtgtagagtaccg

SEQ ID NO: 591340 - DNA, 421 bp, Homo sapiens
ccgtaacctttcagggaactgacctggacaagttgtggaaattgggccttaaatttaaaaattaccgtttttccttaaccggagggaaattagggaattggaattccggcggggaaggggggtccttgaaaggggcccaagggaaccctgaattcatacccacgtcaaatttgcacatttcctggggtggttccactttggtggatttgccttagtttggtttttcatttaccttaagggggcccggtggggtatgtttttgtgctgtggtttggtatttatacaggtacaaatttaaggccttaagttaacaatttgcattggttacaatttgggtatttcctttcctcctgtagccctactttggttttgctttaaaaaggtttttggatccttttaaaaattttttttccttaaatta

SEQ ID NO: 591341 - DNA, 407 bp, Homo sapiens
gtggtgttgggtcaagtgagtatccacacgaaaaaaatttttacctgaagtcttttatcattgcatttgccaacaaacaaacaaacaaatccaagtggattatagctctaaatgtgaataaaacgttaagacaattacatacaagaatgtcttcatacattagggtaagcaaagatttcataaatggggcacagaaatttctactcataaagaaaatgactaagaactacattaaaattaagaacttatgtacatcaaaaggtatcaccaagaaagtacaaaagcaagtcacagagtgagagaagatacttgaagcatatagcattgacaatggcttgtatacagaacatataaaaaagttctacaaatcaagtttttaaaaagagaactcaatttaaaaaaaaaaa

SEQ ID NO: 591342 - DNA, 297 bp, Homo sapiens
cgatcgcggcgatctcggcctccttgagggcgatgcggaagtcgccgtaggccgcgaagatcgcgcgttcccgctcaacctgcgtcgccgcatccttcatcaccgccttgtaggtcgcggagatccggtcgaaccggtcggagatgtcgccgcgggtgaccttcatgatcatcagcgcgatgcgctcggaaagatcgatccagcagtcggcgagatgctcggtgagcatcttgagatcgtcgatgacggaatcgaagtcgcccgcgatcccgccgaaccgctcgccgacagtctctc

SEQ ID NO: 591343 - DNA, 179 bp, Homo sapiens
ctcctgaactcaatgagttcatgtataccaaacgctgagcaagcgagatatagtcaaagttgtcataagcatctattgatgttcgccagagccatgataatcttcttcatgtaatacacaagcattgttcaatgcattcattcaccagcatttgttagttcatggtatctgaactcgaa

SEQ ID NO: 591344 - DNA, 556 bp, Homo sapiens
agcaggccgcactaaaaaaaagagggggaatgtgacacgaggagaggtaaaaagagttaagaaaagtgggaaaaaaagaaaggttcctggtgtggaaaacaataaaaaaatctgggtggttgggggaaaagcatgaagtgtgtcggtgggaaaacattaaaaaggactagagagaaaatcatttcaaggattcaggggtggtggtgggagaggtaaaaaatggataggacagaaaggtggggagaggagggagccgcaatgtgcaatcaggagagaatacagaaatttaacggaaacctagagaaagaaatttggaagtttcaccatggaaattcggaatatataccggaatctcaaaggaataacatatggggtagaaatgtgaggtaagaacatacaaaaaggaagagtttaatgttataggaataaatagagaaggagagaaatagctctaaagaaatcactcagtctctctctctctctctctctctctctctctctctctctctctctctctctctctctctctctctctctctctctcactctctctccg

SEQ ID NO: 591345 - DNA, 229 bp, Homo sapiens
actcgagctctgtaccggtaagattcgtgtcatctagatgggtttacgacctccatgttggagtcacgacatgccgattgtgttgcgagcctctcattaactggttcgttgtgttcaatgagttcctgttgtacgtgatctgagttcagaccggagtagtccagggtcggtgtctatctagttcaaattcctccctgttctgaaaggactctacggaaacgaatgttca

SEQ ID NO: 591346 - DNA, 270 bp, Homo sapiens
  misc_feature (15)..(15): n is a, c, g, or t
tgggggggccctttnaaaaggggtttaacccatttttgtaggtaaaaaaccccctctaaacccccaaaggggttcgggggggcccaaccgggaaggggggacgggcccccttgggctttaaaaaggcaggtgttttttttttaccggctttttctttttaacccttcccggggggggggggggcgggggttttttttttttttttttttttttcccccccccggggaaggggttggggtttttttcggggaaaaaaaaaaggtttcccca

SEQ ID NO: 591347 - DNA, 218 bp, Homo sapiens
aaatgggaagacaccagtcattcacaaaagtcgggagcaccacacaaacctgactaaggcccaggaaccatataggagcctgaaacaggtcccctgcacattcatcattaaactatacaggatcaagctgtacatgagttcattacaaaagagtcaactttacaaaattctgtacacacatttgaaaaactcacaacattcccatcaatatatcacaa

SEQ ID NO: 591348 - DNA, 166 bp, Homo sapiens
  misc_feature (34)..(34): n is a, c, g, or t
ggtgtggcctcggggggcagcggcacccatcccnctccacatcccacagccccaggcatccatttggtccacccatcctcaccaacaggcacctcaacccaccagggggttttttttttttttttttttttttttttttttttttttttttttttttttttttttt

SEQ ID NO: 591349 - DNA, 780 bp, Homo sapiens
tgagctgtggcctcctggctgggagctggcggctgtgtgaccccagcgggggcggagtgggaagaggggatgcagtgtgcgtgggagcaacggagcctgggaggagggctgtgtgggcgtggcctgtctctttaagtgtgccctgagtgttcgctgtgcgctgcgctgagtgggacggccgtggagtgctgcggcctgtgcctcgcactcaaagcctgcgcagcgcgcccctgggctctggcctgaccctggcggggatctagtgggtgggcgacttcgcggtgaccgtggctgcatgtatcctgggagttacttgatcatcttctatgaacgaaacatgaagttacgactatgtaagcttgtagcttactctagaccatcctgatgttcctgacatggcttccagaatcactgagctgtaacaaaagcactcagtgctagtgatgtgagcaaatgcctcattcagtgagctctgcccagtgccggacgggagacggcaattgctacctggtgtacatgcagttgcatgctggtcgtctatggggcccttatgggaacagtgtgctagtgactgtgtaggtactgtgtacatactacgaacatatacgtgacacacgctccaacattcagagagcgccagtggaggatgctgaattgaaccagaatcccttctctcttaccggggcactcacagcaaggcagattcctcagtatgcagtttggaaaccatcgtacctagtccccttgttgcacatcgaaaattattcacatcactgacga

SEQ ID NO: 591350 - DNA, 105 bp, Homo sapiens
gcccaaacccacttccacctttacttaccagacaacccttgagccacaccatttacccaaattaaaggattaggccgattaggaaatttgaaaccttgcgcgcaa

SEQ ID NO: 591351 - DNA, 232 bp, Homo sapiens
ggaccgacacatacttccggactacatacttccgaatcgtgagctgggttaaacccgtcgtgagacaggttagtattaccctactgatgatgtgttgtattgccaatgggtaatcctgctcacgtacgagaggaaccagcaggttcagcacatttggtcgtagtgtgcttgtgctgcaggagccaaatgggagcgacagctaccatactgtggggattattgactgaagcgc

SEQ ID NO: 591352 - DNA, 436 bp, Homo sapiens
  misc_feature (423)..(423): n is a, c, g, or t
aggtgagaaacggtattttgatatatggcagagctccctttttttttgagacagtcttgctctgtcgcccaggggagagagatcagactgttactgtgtctgtgtagaaagaagtagacataagagactccattttgttctgtactaagaaaaattattctgccttgagatgctgttaatctgtaaccctacccccaaccctgtgctcactgaaacatgtgctgtgtcaactcagggttaaatggattaagggctgtgctggatgtgctttgttaaacaaatgcttgaaggcagcatgctccttaagagtcatcaccactccctaatctcaagtacctagagacacaacacactacagaaggccgcagggacctctgcctaggaaagccaggtattgtccaaggtttctccccatgtgatagnctgaaatatggcc

SEQ ID NO: 591353 - DNA, 921 bp, Homo sapiens
gcaaggatgatcatatgatgggtgccaatgactctcaagattagggatcagggagtaatgggaccgattgatatgtataataagatcatgaaaataatgccggtatgataaaagggggattgatcactgtagccagttgaatagtaatgcagtaacacggtgagcaatctcatggagtgaacgtgggattgtcacagaagtctattactcaccgcatacctgaggtctcggatcctagtatgtgatagtagtctagtcttcagttgttcattctggatgaaatatagtgcctgaccaatatggcccgaatggagatatatttcactccactgctgcataactgggggggatctttccgggctggggtcactacctgtccccttctattttggctctctcatttctaatcaagtttatgggtggaagaaatacagaggagtgtcactccttgagtgggggccttgtgcgactgcctcggtcccacgccttcactaatacaggtataccggagaaggcacaagtggtaagcgtacgtatccagttatcgctgtcctgtcagttgaaggaaaccagagaacttggagaaaaggtaaggtagactcgaggttctactaaccatgtgaggggtctgtataagcacaggagaatgaggtgagtttagtaacaggctatttggaacaattaggtgcgagggtgtaagttgggactgacacttttgtccgaattcggaggatttacatgaaagatggccaaaggatggtgctagctaggtctatccaggacgtgataattgtggaggcagatgagggagctgctttgaagttcagttgagtaaataggtcgagaagaaagtgtgatttacgggaaaatgcattggggaaggataaaaggaaggttaagggggaagacaaagcttaagaa

SEQ ID NO: 591354 - DNA, 208 bp, Homo sapiens
gaagtaattgtgtgtgttccaccaccgaccggtgaatacctgtccacagcacgttgatacaccaccgacctgttctcctgtgcaacagcaggaattgtgttgtacagcaccgacctgtgcacgccttgcaacagcgttgaattttaacaccacccaccttgggcggctgcagctcttcagcattgcgggggattcttcttaaagctca

SEQ ID NO: 591355 - DNA, 1012 bp, Homo sapiens
ctgcggtgacctcctagtgtgcgcgcgtgtgccgctttggggtcgcataagggcgggcgctagtcgtgtggtgcggcttcgttgggacacgttgaattctcggtggttccgtcagcggggttcgcgcctccgcggggtgcacacccggctagtggtgcatacgttcgtcgtctaggtgagggtgtcccgctcgttgtggccccgctctatctgtgggctagtttgctgcccgcaccggtgggccttgctctgtacgctgcccactggtcgggtggatgttttactggttttcgtcgtctccgggcctgagatctcctgcttgttggttatgcggcagccgcccgatcaggtggttggggtgcacgccgcccttcggtgtccggattcctttgttccgtactccggccgggcgctttcggccgctctccctgctcgtctaccatctctcgtggcccccccctggggcgcgggaactcgtctgttgtctcccccatattaggtggcgtacgatgttttctcgacttacgcaacgaacgtcgccgccgccgtatctgcttgggacccagcggggacatttggatatctcctccgtgtgcatgtagcacaccgctcgaggggtatgtcattcccgcggtgtgtgacgccccgcctcttgtgataaagcaaaatggtacacgttcccccaaagcgttcgtgtcaacgccacatgaggactggctcgccccaccacataggggtgtttccagcacaagactcatatgtctccgtgaagctgtctgcacgccacactacgttttcgcgctcggatctcaccggcgcgggggattgacctcaccgcggcgccatcgttggtaaaaatcttgcgaggcaggcaacgcgacccaagttgtaatgccccgcagtcgtcgtgagaagtaaagtcccgccgctaaaacttctggtgaagtaggtgaggcccggatcgtcgccctactatcagcccccccttctaccccccttaagaccaacaaac

SEQ ID NO: 591356 - DNA, 642 bp, Homo sapiens
  misc_feature (1)..(1): n is a, c, g, or t
  misc_feature (14)..(14): n is a, c, g, or t
  misc_feature (16)..(17): n is a, c, g, or t
  misc_feature (68)..(68): n is a, c, g, or t
  misc_feature (74)..(74): n is a, c, g, or t
  misc_feature (203)..(203): n is a, c, g, or t
  misc_feature (345)..(345): n is a, c, g, or t
  misc_feature (512)..(512): n is a, c, g, or t
  misc_feature (541)..(542): n is a, c, g, or t
  misc_feature (544)..(545): n is a, c, g, or t
  misc_feature (557)..(557): n is a, c, g, or t
  misc_feature (580)..(580): n is a, c, g, or t
  misc_feature (592)..(592): n is a, c, g, or t
  misc_feature (607)..(608): n is a, c, g, or t
nctgccgaaagtancnngtccgccatcacaggccgggactatgaacggtatctctgccgtgaccaccntaatgncaaagacaccaggggtagattttgtcagagaccaggtgggctacccaagcctgctcagaagtgacttgagcccgtctaagagaaactggtaaggaactggttaacaagccatgttttactagaaatggnagcaccaagattcttcacttcatgctcccccacacctgaacaaaaccatattgctgctacctgtggatgcttattgattctgtcactgccctcttgggccatgttcctgaaaggctctctgaagtcaagtatatgacaccgntggatgtaacctaaggaagggtattttccatgtcagatgagaactgggcgggcatagattctgcaacatcccattcctctggcacctgaaggcatgatgagcaaatgctgggtaaaggaagaaggccaggcagggcatgatcaggggaaaaggacaagtgaaagggnggatcaagtcacaatgttggcctgggccnngnnttggggttgagntcaaggttgggtcaaaggtgggngtttgttccttncccagggcccacttnnccctggggggcaaggcctccttgggactcaaccc

SEQ ID NO: 591357 - DNA, 850 bp, Homo sapiens
  misc_feature (34)..(34): n is a, c, g, or t
  misc_feature (62)..(62): n is a, c, g, or t
  misc_feature (65)..(65): n is a, c, g, or t
  misc_feature (69)..(69): n is a, c, g, or t
  misc_feature (91)..(91): n is a, c, g, or t
  misc_feature (115)..(115): n is a, c, g, or t
  misc_feature (132)..(132): n is a, c, g, or t
  misc_feature (153)..(153): n is a, c, g, or t
  misc_feature (156)..(156): n is a, c, g, or t
  misc_feature (192)..(192): n is a, c, g, or t
  misc_feature (234)..(234): n is a, c, g, or t
  misc_feature (301)..(301): n is a, c, g, or t
  misc_feature (445)..(445): n is a, c, g, or t
  misc_feature (508)..(508): n is a, c, g, or t
  misc_feature (520)..(520): n is a, c, g, or t
  misc_feature (538)..(538): n is a, c, g, or t
  misc_feature (540)..(540): n is a, c, g, or t
  misc_feature (542)..(542): n is a, c, g, or t
  misc_feature (547)..(547): n is a, c, g, or t
  misc_feature (550)..(551): n is a, c, g, or t
  misc_feature (554)..(554): n is a, c, g, or t
  misc_feature (557)..(557): n is a, c, g, or t
  misc_feature (559)..(561): n is a, c, g, or t
  misc_feature (563)..(563): n is a, c, g, or t
  misc_feature (566)..(566): n is a, c, g, or t
  misc_feature (568)..(568): n is a, c, g, or t
  misc_feature (577)..(577): n is a, c, g, or t
  misc_feature (606)..(606): n is a, c, g, or t
  misc_feature (614)..(614): n is a, c, g, or t
  misc_feature (635)..(635): n is a, c, g, or t
  misc_feature (653)..(653): n is a, c, g, or t
  misc_feature (663)..(663): n is a, c, g, or t
  misc_feature (667)..(667): n is a, c, g, or t
  misc_feature (674)..(674): n is a, c, g, or t
  misc_feature (683)..(683): n is a, c, g, or t
  misc_feature (687)..(687): n is a, c, g, or t
  misc_feature (689)..(690): n is a, c, g, or t
  misc_feature (696)..(696): n is a, c, g, or t
  misc_feature (700)..(700): n is a, c, g, or t
  misc_feature (704)..(704): n is a, c, g, or t
  misc_feature (706)..(706): n is a, c, g, or t
  misc_feature (709)..(711): n is a, c, g, or t
  misc_feature (714)..(714): n is a, c, g, or t
  misc_feature (729)..(729): n is a, c, g, or t
  misc_feature (732)..(732): n is a, c, g, or t
  misc_feature (737)..(737): n is a, c, g, or t
  misc_feature (746)..(746): n is a, c, g, or t
  misc_feature (751)..(751): n is a, c, g, or t
  misc_feature (764)..(764): n is a, c, g, or t
  misc_feature (767)..(767): n is a, c, g, or t
  misc_feature (829)..(829): n is a, c, g, or t
tggccaatcatgtgtgaaaccctgtctcttctgntatatacaaaatactattcttggttttnttnttcnttcctttttttccagctacttnttatgcttatgcattataatctgncttatcccgggaggtgnaggttgcagttagctgagatngtnttactgcacttcagtctctgtgtgacatagcaaganccctgttttcaataccaacaattcagggtgcagtataacgtnactatgaagaagagttgttctggagccataccgcatgatgcttcaatcctgtgctttgtcacctaanagttaatctaaattttttgtgtttctttttctatcatctgttaaatatataaccatttactgaacaactattcattgtgttccctaatcattccacctcagatgttgttctctgatagtgctgtctttgcttttggtttaattntgtcacatttgtatgctgtatgatcaccaagaggcttagagtgtttaaaaaatgaaaggcttnaaatcactctanttagggaaaagccccccnantnagttnggnnttnttngnnnanaancnggggaaacntgggatggggtagtcaaacaaaccaagcnaagggccncaaaaaaccggagggaggaangagggccccacacaaaanggcggggaanggcngaacacngaaaaaaanaccnanncctctncccngccngnggnnnccnaaaagacaagggctngcnctgangcccaggcnggagngcaatggcatgangantgctcactgcagcctcaaactcctgagctcaatcaatcctcccaccctcagtctcctgagtngctacgactacaggtgcatgc

SEQ ID NO: 591358 - DNA, 108 bp, Homo sapiens
cactacttacataaactgtgtgctctgcagcctgccaacgagttgttgaaaagaaccgtcactctgcatatcttcaatgcctacatgtcaagttttctcttggggaca

SEQ ID NO: 591359 - DNA, 1284 bp, Homo sapiens
gaggcgctgtacctgcattgctgcatcggtagcctagactctaggagactatcgcgaggctccactacgcctcataagatattcgaaggaacggagagaaccgggatcgccctgcggggacccggaactgagtctgacagtgaatggcatctgatgacctatgtacactaggtgaattgaggtcaatgctatggaatcgtcgctatagaagaagagaaggaggactgatgctaactgataggaataggaaacgtcagaagagaggagttaatcctgtagcgaaataccaccagacaggactcagacagcagctggcaatggagcaccacggggaagccgagcaaccaatcagggggagtacgagagtcaagtgcgctaaggtctggaggatccggagatccgtggtgattagacggtagcaaaatagtcggagcctgcaagttccaaggtcggcaagattgtcagtgcaacctgttagacctgtagctttgggaatcagtctgagaagtagggtaagtagaggtctgtcagaaggtacggggaagcccattgcggttcgtgcacggactacgctgtgaccaatgtacgatggaaggtccctccacagcatgtgctcagcttgagtttactcatgcgttatgggagcaaaggttaaaggaggtgcactgcgatgtgtcgagaaggatggaaaggaggccctcgatttctaaggggagacagcagggtcgaacgtaaaagtctttgacgatacccctgtacggaacgccggtgaattgacccgcccactaaggtttggtttcgtgggtaaatgccggggtacctaaggctttgatccctgaagatttaacggagggctctccggacggacttcttcgcgacgggaaccttgttctatccttcttggcctgatacgggcaaaggggttgttctgccgaactcgttaacgatagttcaatcctatcaacaatttcgggaaacccgtccaccgttgggtttcttaaaggggggggagttctcgagcccttaagcgatgggaacatttccttagggtgaaacagttcccccatgatactgggtgcgccccatgagtgggatccaaatatgtggccttggcacgtgggcgcaagacggagtttgggtggcgcgcacgttgagcctattcaaattggcgtacaggggctttcaaccacgcaaggaggaaatcccaaccggactgggcacccaatggggccacaatgctgcaataatgcgtgatgggttccccaacgcgccctctctattgtg

SEQ ID NO: 591360 - DNA, 266 bp, Homo sapiens
tgggccagtttggggactttcccaaaaaacccccatgactagggggttttaggtttttaactgatggaatgaaggattcaaaattaacccctccaaggggggattgaaggaaaaaccccttttaatggacaaaaaaaaaaaaaggggagggagtaacagggatatgagctttagccgcccaagctagcaatggcaacccttttgggtccccttccagcatgtggaagctttcctttcgcttcattcaataaacagctgctgctcca

SEQ ID NO: 591361 - DNA, 141 bp, Homo sapiens
taagtaaacaggcggtggggttctccatatgggtctggcgggtctcgaatcccgatctcaggtgatccacctgcctgtgcctcccaaagtgtgggaattacaggcttgagccaccacattgtgccccttcccatctttccg

SEQ ID NO: 591362 - DNA, 381 bp, Homo sapiens
gtgacttaaggatccctcaccgacggggtgctccacccgacggtgtgctcacccgaggggtgctcacccgacggggtgctcacccgacgggtgctcacccgacggggtgctccacccgacgaggtgctccacccgacggggtgctccacccagacggggtgtgtgggaactctctgtactatctttccaatttttctgtacattaaaactgtcctaaagaataatgtctacttacgaaaatcaatgacaaactaccaacccaggacaaagccttcatctttcccaccaagccccaggcagccccaaggggaccttccccaggacagttgctggaaccagtctcattcccaggggcctgtatccatggtgacacctgtatgt

SEQ ID NO: 591363 - DNA, 384 bp, Homo sapiens
  misc_feature (19)..(19): n is a, c, g, or t
gttactttcctctggtgangtcaaaacccctcaaagtcatccatgatgattgagtcaacttttttcaaactcctctaaatgttgacatattgacctcttctcaatgaatcactaatgttcctaatggcatctaggatggttaatcctttccaaaaggttttcagtttactttattcagatctatctgaagaattactttttgtagaagctacagccttgcaaaaagtatttctgaaataataaaacttgaaagtcagttgggcatggtggccacacctgtaatcaaagcagtttgggaagccgagatgagcagatcacttgagtccaggaggtggagactagcccgggcaacatagcaagttccattctctacaaaaaaaaaga

SEQ ID NO: 591364 - DNA, 148 bp, Homo sapiens
  misc_feature (131)..(131): n is a, c, g, or t
tagacagcatggtctgtctgggtattgcaaggtctctttaaaagataaaaaacaattagtccacagaattccttaacagaaaattggagggcaggcaggaggactatgggccttatggacaggcagtcagncatcacgcccagcgttt

SEQ ID NO: 591365 - DNA, 137 bp, Homo sapiens
cgattgccatgccgcgagagtagtgagggcgctgcgaagatgagccttgaagcctagtggcgcgtgcacgggatggagcctgccgcagatgcagatcttggtggtagatagcaaatattcaaaccgagaactttgaa

SEQ ID NO: 591366 - DNA, 191 bp, Homo sapiens
  misc_feature (18)..(18): n is a, c, g, or t
  misc_feature (20)..(20): n is a, c, g, or t
gggtttttttgggccctngntgttcccctcccctttttgggggttggggggggtcaaggggtccccgtgttccctgtttcccttgtacccaaagtttccccgccccctttcccccctgggtgatttcccttttttttaccggttcctgtaaaaactcccttttcccaaaaaaacttggggggtgttttcca

SEQ ID NO: 591367 - DNA, 214 bp, Homo sapiens
agagtgaaagtatggtaagagccaggtcatatcaggaagcactcttatctcattccaacattccgaagcggttgcagcgcacaatttcctccctgcttgaggtctgccgccggttaacattgtagctactgaactgaagagtgtcttcgtgaacggaagtggggttgtacaattgttttgtccattccgtgaacctcacaccctcctctttcga

SEQ ID NO: 591368 - DNA, 679 bp, Homo sapiens
gagcggacttttctgatgttgaggccagctccccacccgcaagaggccccacattccggtgtcatcagcccagaaagtacctccccgcaggcggagacagccccaagaagtcgacgccctcggtccctgccgccctggccacttaccctagatgggctgccgcctgctctccaagttcttgtgtgcccctcgcgggtgcggagtatgggtgcgctgagtgtgccatggacgggctactggctgcttcctggcagtctgctggggtcggctctgctcgatcggcttcctgtcggtgatctttcgccctcggtctggagtcctcacaataccgagaggggcttggctgggatgggagcgcacatagagtttaactggcacccagtgctcatggtcacccgggttcgtccttcatccgagggcatcggccattcatcgtcttacagactgactgtggaccttggaaatgcagcaagtctcctgatgaaatccatccatgcagggttaaatgcaggttgctgccattcttgcaataatctctgtggtggccgtgtaatgagaaccacaatgttaacaatatagccacatatgtacagtctgcacaggtgggttggagtgatagctgtcatatgctatttgtacagcttcttcaggttacagtctttctgcttccatggggcac

SEQ ID NO: 591369 - DNA, 821 bp, Homo sapiens
  misc_feature (553)..(553): n is a, c, g, or t
  misc_feature (695)..(695): n is a, c, g, or t
tagaggcatggcgttgtgacgccgctcttgcatgtaaggtgagttggatagcgagtgcgtcactagactagatgatccttatgagcattcctggctcgtgactatatgcttgccagttctacacgcatagtaagagaacgtgcgagcgggaaatcgcagcgtccatagcatctactcgcaagaatgggcatgcttcatgagggatctttcaagttgcgcactttaatacacaccatgggaggtcgccgacacggtatagtaccctactatcagattgatacgtcgccccgacccattgacagatcgattcggaacgaagctcccagagcctcctcggcatttccagcctgcaattgctcctttagttgcaaatttgaaacaacacatttttttatattttacagcccttttttaagcaaaagcttcagtcgtcccgcattaaagaggcagaatacaacgtgctggttgaacgagcataggaagcacacagacaatggcggaacaaaagaatgaaagtaacatgaacagaatttttccaattgggcggacctancaaagaaggaaagaaaaaggcacaaaggaaagtgactttacagagattgtgaaaaaagacacatgatccatttttgatccagaaagtagttcagattaaaggctggcaaaagcagaacattgacagacgaactatctgcatnttattgaacagaaagcaagctgaaatcaatgaaaacaacgtcggggaattttgcaatgttatttgcttggtacatcacgaaaatagtttgtggcaagaactgatgcgaattttttaccccttaccc

SEQ ID NO: 591370 - DNA, 133 bp, Homo sapiens
gggggggacccccctttttgcccacccctttttttttccccgggtttttttcccccccgggggtttttttttcccgggttttttaggggggggttttttccccccccctttgccgggttcccccccccgaaga

SEQ ID NO: 591371 - DNA, 139 bp, Homo sapiens
  misc_feature (115)..(115): n is a, c, g, or t
tatagtcatactgctggtggtgctggctcagaccaggcctgccgctgtcccccggcgctacctgggtactcacacatgtgcagatgtgcgctggccgctgctgtcaccagcactnagcacaacgtcagtctttctgata

SEQ ID NO: 591372 - DNA, 238 bp, Homo sapiens
ggagtgtggatcagtacacgggcgcgtgacgtcataacaggttggttaatcatagcagacgcgtgcttcctcacaggtccagtgtttatacaccgcagtgagagtctacgggccaggaaggtggcaggctgagcagagatcactaccttctcgcaggatcgagccttcacgttgccggtgtcgccagccgggcatgcagtgctggcgatcctcgcagcacacagcttgagacacgcga

SEQ ID NO: 591373 - DNA, 777 bp, Homo sapiens
  misc_feature (115)..(115): n is a, c, g, or t
gtgcgatgtgctgacgtgtctgcagcaaatccagctgctgctgcggcggctgtggctggctgtgcagctggcggtgactgaggatacgagaagcccacaagtcaatcggaagggnaagccttggcccccaggggggggcccctttggggaacccaaggtcccaagtgattggtgctgcccatgaactagcgaagaacctgtggcgagatgtggtggcgatggaaactgctcccactagcaggagcctgtgcagaaaagctagggttcccttgtaggaagaagcactaggaggtataaagaccactgttggggcgaactgctcggcccaagattttaaaccactggtttttgagcccaaatcggcggcggcaaagggcggtcggtgaaactcccaatgtgcacactttccaagttcacaccctttcacacgttgtggcttgcgattcaagcaaaatagcccaccaactccatttcaaacattgaacgactacacaccttgcgctgccgtcaagggcacgggtgaacttgcgcttggaacgagcgacggcacttcattcgttgcttcgcgtccacatgcaggctagcgtctagagaatatagcctagaggtcgaacagcgcttagcgctttcactttgggggtccattaagacaacaggcgaattagggcacaatagcagcaaaccaattgtagagagccgcaaacggggttcaattacggagagcgatgcacccaagcgaataccaagcacagggggtccgaaacggcttggttaccc

SEQ ID NO: 591374 - DNA, 543 bp, Homo sapiens
tagaggatccctgcatgtgaatgatgagaacttttaggttttttaatcttgggaatgttgtttatttgtagcaagtaatttatactaatttcacagactggcaaacaggtcttctaaattcaagaaattagttctctgacatcctttaatcctacataatgtggagaagggagtggaaatgaaatatatttccatacatgtatcttgcataaaataacatttttctgttcctgaaatagtatggttacacttgcaagcatgccttgaaagggcaaatataacttggctcccacagaggaaaagaaggtatagaaatggaagctcagggccaggcatagcggctcacacctgtaatcccagcactttgggaggccgaagtgggaggattgcttgagctcaggagttcaagaccagcctggacaacatggtgaaaccccgtcactatgaaaatacaaaaattagccagtcatggtgatgtgtgcctgtaatctcagctacttgggaggctgagttgggaggatatcttgagcccaggaggcggag

SEQ ID NO: 591375 - DNA, 157 bp, Homo sapiens
  misc_feature (149)..(149): n is a, c, g, or t
gctcgtctctagcagggatcccccttgggcgactgctccccgcttcttccttgagtgtttggcttgtctaccgttcctcctgactgagagtcaccgttatactttttgttttttcaatgaatgactgcagagaaccctgcttgcctcanggggttcc

SEQ ID NO: 591376 - DNA, 719 bp, Homo sapiens
cacgcgtcgctcctactcctcattgtacccattctaatcgcaatggcattcctaagtgcttaccgaacgaaaaattctaggctatatacaactacgcaagaggccccaacgttgtaggcccctacgggctactacaacccttcgctgacgccataaaactcttcaccaatagagccccttaaaacccgccatcgatctaccgatcaccctctacatcgaccgccccgaccttagctctcgaccactcgcgtcttctactatgaagcccccctccccagtacccaaccccctggttaatcctcaacctaggctctcctatgttattctagccagctctagccgtagccgtttacttcaatcctctgagtcaggagtgagcagtcaagctcgaacacgtacgccctatatgcggcgccatctggctgagcaggtagtcgccagaaatcaatctccctgtgagaggtcatcctctagtccatctattctactatcaaacagttactaataagtgggtcctttaacctctcgcacccttatcacagataccaagtaacagcctctgtattgactcctgccatcgatgacccttagcccatacatatgatttatgctccacggctagcggagaccatacgcgaacccccttcgaccttgtccgaacggggatgtccgagactagctctcaggcgttcaacatcgaatacgccgcgaggcccctc

SEQ ID NO: 591377 - DNA, 371 bp, Homo sapiens
aaagagtgagcagcagcaagatttatggtgaagaccgatagaacaaagcttccacagtgtggaagggggacccggaaatggttattgaggaacatggcgttgctggtgcgagtccttaggaaccagactagcatttccggagtttcttctttccagtgggttcgtggtctcgctgacttcaagaatgaagccgcagaccttcacagcaagtgttaccagctcttaaaggtggtgcggacccaaagagtgagcagcagcaagatttatggtgaagaccgaaagaacaaagcttccacagtgtggaagggggacctgagcgggttgccactgctggctagggtggccagcatttattcccttatttgtccctg

SEQ ID NO: 591378 - DNA, 551 bp, Homo sapiens
cgtgaggcgagagtcgtgggcggggactgcatctaggtaaaaagttgtggcgatgcttgggatgcttcggtcgtccagtaacatctgtgccacacagatcataacggccagtgcttcgagtacgcggaatctccttgggttactagtagctggtgccatatctcctcatcaacccaaatcccgcttcccagatggacctggccattgtctaggatatacttgtccatgacaggcgcaggagcggggtaataggacgacgtatttgcatcctcactgaaagtgctccgtaactccggctcgggctcgagacattctgactttactttttccagatcaatggcgggaccgctgccaagcctcaggagcagcacgtccgggagcctccggttaaggtcacggagctccttcatttcagacacaagtgccccgtactccttgagcttctgggcctgttgtaccagctgcctccgagtccactccagctcctgctggaggtggcgcatctcttcctgttgctgctggtagttgcgcagcagctcctcatacagagc

SEQ ID NO: 591379 - DNA, 207 bp, Homo sapiens
aattttcccattaaaaatggggtttttttaatttttggcccaaaattttttggggccttattttttcgggggggttggtggtttaaaaaaagggattccccaaaaaaggggttttggttcccccctttttaatgggggtccggaaaacaggggtttttttttttggtttaaagggaacttgggaaaaaaaaaaggggccccccccca

SEQ ID NO: 591380 - DNA, 166 bp, Homo sapiens
ctatactgtggtgtacctgtgattccaggactcccctctcttccggcttacttccatcaaacttttctttaaagcctgggacaagggaacagatgacttctttaacagtgacaataacagagtcagctatgttcccagatgctgcactcaccatatacctgtctct

SEQ ID NO: 591381 - DNA, 123 bp, Homo sapiens
tgctgaggtgatctagaggatccttatgatttgtagatcacatataagcaggtatagctataagaagaattttatggcgaagggacgcggcggggggatatagggtcgaagccgcactcgtaa

SEQ ID NO: 591382 - DNA, 959 bp, Homo sapiens
  misc_feature (796)..(796): n is a, c, g, or t
ctagttctagatcgcgagcgggcgccctttttttttttggttggaaatagagtctggctcgggggcacaggctgggatgtggcagtggacgtgtggatctcgggctcactggcaacctccgcctggctgggtgttcaacgcgactctactggtgctcagcctcctggagtagctggggactacaggcactgtgccaccacgcctgggctaattttgggtattttggagtgtaagacgatgggggttccaccattgttgggccagggctgggtcttagaactcctggacctcggtgatccacccggcctcggcctcccaaagtggctgggagattacagggtgtgtggacgccattgggacccaggccaagaaagaaaacaatcttttaaaccactatggatcttgtggccttatcaggggttctcaccaagacaaatccttttgtggaagagatactatttcccaacaattctacattattttccaaagggtggtctggtgtttgtggtgaacgttgagaggtttataaattttggagattggcgagagatattattttcttggcgttagacaatggtgctatgtgtagacaaactctaattttatttcaaacaatggtggtattcatggcgtggccaaagggaatttggaggccaattaaaatggctctggggactaatgtaaaaaggaaaaaagaaaaatttaaaattaccaggtgagaacttcctacttggcttgagaagaatttcaaaatccctaagatagggacttccccggatacgcatggtcctatcangaccggatcaccgggcattctacggggaaattttccaagcttacattcggctggtaccccaatgggcacggtaaagtcattcccatttgaaacacagcggtcaccgcgcacgtgttccaacgggtggtccgcgatcgtggacaactttctttcaaccgcattt

SEQ ID NO: 591383 - DNA, 773 bp, Homo sapiens
caacacttatgacttatttctagttagcaatgcacttaaatagtatttctttaaataaaacttcttggttctaatttttaaattgtttaaactgatctaccccgaagaaaagaaggaattaaaaagcaaatatgactataccaacaaatatacatatagttacatattcactttcaatgaacgctgacatttaaaaaacaccatacggcacaaacataaatatgtgtgtgtgtataggtgtgcttaacagtggtacaaatttccagtcaccccagtcaaaacatctgatttaaatttgttccttctgctgaatgccagatatgcaggttaggatcacagtgaaatgagcccatttcaataaagtctagaactaaccagtgccctcatatttgtggtacacattaatttttttaacgtgaagcatagtagagaatcaagaatgacgtttttctttgttccttcactttatgtagtagatttgatggtactctcatacatgtacagggtaacaaacagacgaataacaaaacaacaaaagtgttgcgcaacacatgagaccaccagaaacgatctatccaagcagccatcaattagtgacgaccgacacaccacatgagaagagtgacacatggacacaacagaagccaaaggaacaaccgacaaagcgagagccagagacctacccaaaaaaaacagccggggaccagacgttcgaaacactacaggatactgagcgcacagggcattaaagcaccaccaaagcaatcaaagcc

SEQ ID NO: 591384 - DNA, 475 bp, Homo sapiens
tttttttggtttcagaaacttggtggttggttgaggcaaatagagaaagattccttctgtgggctcaaatggaaggtttacatgagccattcctctgaagttcaccttctcaacattttgatgtatgtctccctgtgtctttgagttaagttttcagctaggatctactgtttcaaggaggaacaagttaggacctatatcactaggctgcttttctggtttctgagtcctactgtaaatcaagcatatctggaaaccacaccatactgctgtcatgggttttattgttatatccaactgggacctgcctcttcctcatgtgggtgatatttactaaacactatatgcagttggcatttgtcaagtactctgtgtgtttagttgatgaagttttttcccatcactggtgttacaaaaggcccttgcttagtgagcttcctttcatggaaggatgacaactaacaaactgacagga

SEQ ID NO: 591385 - DNA, 839 bp, Homo sapiens
gatgttcctcctctgactccccttcccctcctctcccctccttttcctgtccttccttccttatcctggagcactgagcaccattaggaagcttgagagaaagccaaaagttaaagatgagaaagagagagcgtgcaagaaaaaaaaaggaagataaaagataatgaaaaaaaaaaaaaagaaaaaaggacacgatcgggaccagctacatctcgccccgaaacctccgtaccacacgactccaacgaagtgcgggcgaccagcggccacgccaagcacatcgtcctccacacacgagccggccgaagacctacgcccgcatcgcacacgccacgggccacaaccaccacaaaaagcaccgcgcgtactacacaaccccacacaacaccacagaccccacaccccctcccgtatcaggaaaccaacaccaaccccacgcccaatcgacaccacacgtagacgtgggaccacaagaagcggcacgcaacaaccgaaggggggcccccatacgcgcacgcacgcaggacaaaacggagagaaacgcgccagaacaaacgaatacaatcgcggcccccaaccagcacacgacgagccgggcccgccaaccacaaccgcgacacacccccccgcacgacccccccaccccaccgagcacgcaaacacaccatccacccgcgacactacgtgacccaacacaacacaactgtagagagccaaacctgaaacaggcgtcaaccacacccacaacaggatccgggcacccccaacgcaagctaacacaaaaagaccaaaggcgccccgggccaccaggccactcaccccgcggaaacaccaaccgg

SEQ ID NO: 591386 - DNA, 375 bp, Homo sapiens
cggttcgacgagactctcatatcgatctcaatgacgcgaagtatttgtgggcagatcaagtctcgcgtgagcgggacgctggagcttggagccaaagccaatggaattcaccaatgtttactatcacaaactttggctaataggtggatgatgagattctgaaagagctattcagtcagtttggtaagaccctaggtgttcacgctagtaaacatccctctgggaaatccaaaggctttggctttgtgagttacgataacacacgaggatgcccataaggctgtggaatcacgcatgaattggaagagatatacgtggtataatcatatttgtaggccgtgcacacgacgaaagtacaacggttggcagagttaa

SEQ ID NO: 591387 - DNA, 180 bp, Homo sapiens
gccgccgtagttgctggtgcccaggctgttgggcgagtcgagcgaggcgacccacagctggaacagcgccgaggcttcgcccgtttccgccggccagccgcccatcgagaagctgaactcgcgcttggcgcgcttggggaagtagatcgaggcggtcatggcgtcgacgttggtcttgct

SEQ ID NO: 591388 - DNA, 585 bp, Homo sapiens
tactttccacaggggatctaaggtgattaatcaaggtggccacacaaaacaacagatgttcagtgtacacaaaacagccttctattggaagaagatgccatgtaggacttctgtggctacagaggagaagtcgatacctggcttcaaagcttcaaggtacaggacagactgactctcttgttacggttaaatgcagctggtgactgtaagttgaagccggtactcatttgccattccaaaaatcctaggctcttaagaattatgctaaatctactctgcctttgccctagaaatggaaaaacaaagcctaagtgacagccacatctgtttacagcatggcttgctgaatattttaagcccactattgagaactactgctcaggaaaaaaagttcctttcgtaatattactgctcattgacaatgcatcaagtcactcaagagctctgatgaagatatacaaggaggttaatgttgttttcatgcctgctacaccccttatgcatgccatggatcaaggagtagtaatttcaacttttaagtcttaccatttaagaaatacattcatgggctatagctgctgtaga

SEQ ID NO: 591389 - DNA, 135 bp, Homo sapiens
caagcctgccgggcggatctaaaagatcccctaacccacagtcccacttgatttttacgacgcactactgactggctactatgcggacggtccaatatcacagggaatgattgcactgaaggactcggggatatc

SEQ ID NO: 591390 - DNA, 500 bp, Homo sapiens
cgaggtccgtatggtgagggtcagggctccatatgtgatcagggtcagaggtcagtgtgtggccaggctccatagtcaggcttggggcatcctcagtcatgacaggcattagggcaaagcccgcctgccgcactcgatggagccattccgggtcccagctctggtctctgtattggagcctccgctttccccaccagccaccccgcccaggcctgtgccagtgtttccagaagcctctccaggccccattgcttggtgaggaggcctcttgctgtagatgaaggatctgggccgggctcagcataatggggacagagaccctgcacaccaggatgaggaggatgctttggtggtggtgcatcccccaggactgcaccgattgctctcagaggatgaaatgtgcccgagcagtctcttcagaaagccctgcctgggctcccttggcagccaggctacaagacagtgctggtgccctgggtgggcaggacgtggcattgtac

SEQ ID NO: 591391 - DNA, 165 bp, Homo sapiens
atgagactctatctctagtaaacattaaataaaataaaaaattagtcaggcatggaggcatgttccaggagtcccaagcacttggcacttgggaggctgtggtaggaggattgcttgagcccaagaggtcgaggccgcagtgagcgattacgccactgcactcag

SEQ ID NO: 591392 - DNA, 124 bp, Homo sapiens
tttattgtgcagctgtcaattcagtgcgcatgcagtcaggggcaagggcagcctcctcaggatgtcaggcatcaggcaagtcatgtgacctgcgttccaggcgattctaggctcggttgccctc

SEQ ID NO: 591393 - DNA, 103 bp, Homo sapiens
aggcagttatctgcaagcaaagagagaggcttcagaagaaacaaaatcaccagcaccttgatctttgacttctaatctccagaatagtgagaaataaatttct

SEQ ID NO: 591394 - DNA, 656 bp, Homo sapiens
  misc_feature (13)..(13): n is a, c, g, or t
  misc_feature (65)..(65): n is a, c, g, or t
  misc_feature (79)..(79): n is a, c, g, or t
  misc_feature (89)..(89): n is a, c, g, or t
  misc_feature (112)..(112): n is a, c, g, or t
  misc_feature (115)..(115): n is a, c, g, or t
  misc_feature (123)..(123): n is a, c, g, or t
  misc_feature (135)..(135): n is a, c, g, or t
  misc_feature (157)..(157): n is a, c, g, or t
  misc_feature (160)..(160): n is a, c, g, or t
  misc_feature (162)..(162): n is a, c, g, or t
  misc_feature (164)..(164): n is a, c, g, or t
  misc_feature (169)..(169): n is a, c, g, or t
  misc_feature (191)..(191): n is a, c, g, or t
  misc_feature (194)..(194): n is a, c, g, or t
  misc_feature (200)..(200): n is a, c, g, or t
  misc_feature (214)..(215): n is a, c, g, or t
  misc_feature (218)..(218): n is a, c, g, or t
  misc_feature (221)..(221): n is a, c, g, or t
  misc_feature (226)..(226): n is a, c, g, or t
  misc_feature (231)..(231): n is a, c, g, or t
  misc_feature (236)..(236): n is a, c, g, or t
  misc_feature (241)..(241): n is a, c, g, or t
  misc_feature (248)..(248): n is a, c, g, or t
  misc_feature (250)..(250): n is a, c, g, or t
  misc_feature (258)..(258): n is a, c, g, or t
  misc_feature (282)..(282): n is a, c, g, or t
  misc_feature (298)..(298): n is a, c, g, or t
  misc_feature (401)..(401): n is a, c, g, or t
  misc_feature (416)..(419): n is a, c, g, or t
  misc_feature (648)..(648): n is a, c, g, or t
tttttgaaaaaangaaggccacgtcatatgaggtctcagcttcaagtacaggagttgcagcccantgtagggagcaggngctcccaggngttcacgcactcacatggggtanttntgcacaanatcctgtttggnaagttccagcaacataggtttnttntngnttttnttgttgttcacatttttattgnggncctttntatggggggttttnnttntgnttttncgggncaggngtggngttgggngngggtccanggggggggtgaaaatgctcttgtncaggggattaccaggnacaatttgccagtggtggaagacagacagagaaaaggcttgtccctgggtgtgagtccggagatcagtctcaaagccaaaagagtcgatggccgggataaaanctttgatggtgtacnnnngggagcctgggatgggtgcatcctgagtcacgtgccccctgcgcctggccaggacggtataaactgcagagacgcaatctgcaggggcctggacctctacaaagtagtaaggctccatcagacgaggagtagccatgaggaaggcagagtagacgactctcctggctgtggggatgatctggcccccgccccggtgcaggggctcctgggcaacaccgcatccaggatnttaaactt

SEQ ID NO: 591395 - DNA, 455 bp, Homo sapiens
cacgaggtgaagcagtgtaacttggtgaggaacgtcttattttatctctttaccacatcaacagaaacacttccccttccaaatgaaaacattggcatattctgaactaaaaactgaatcccaaatgcttcgacatattttgcagcaaacgctgtttaagcagaaacaccaggaaatatctctcagggacacccttgcaaagctctcggggtgtcagggcctgaccctgggaagtggggaggcctggagaagtggtggaagccatgcacagccttccctcctccccaccctcaaatccaagccaaggaggccttgcccccaagtgccgaggaagctcagaaccccagggtatgagaggggtagctatcagcagggaagccgccaggaaagacctcaagatgatctgaccgagcctcatctccaggccccttttcataaacaggggaacgccggta

SEQ ID NO: 591396 - DNA, 339 bp, Homo sapiens
  misc_feature (37)..(37): n is a, c, g, or t
taaatggcagtgtaagtgccacaccttttgtcagtgntctgggagaaattgaccctcagagccgggtgcggtggctcacgcctgtaatcccagcactttgggaggctgaggcgggtggatcacaaggtcaggagttcaagaccagcctgaccaacatggtgaaaccccgtctctacgaaacatacaaaaattagctgggcatggtagcgcatgcctgtaatcccagctactcagggggctgaggcaagagaatcccttgaacctgggaggtgaatgttgcaatgagccgagatcgcgccattgcactccagcctggcgacagagcgagactccatctca

SEQ ID NO: 591397 - DNA, 1338 bp, Homo sapiens
gtacccctaaaagccaaaatgggaaaggacaagactcatatcaacatagtctgtccttggacacgtagattcgtggcaagtccaccactactggccatctgatctatacaatgcggctggcatcgacccaaagacaccacttgaaacacattcgacgacggaggcatgctgagcactgggaaacgggactccttcaatgtatgcctggagtctaggactaaacctgacacagctgacgcgctgaaccgtggtactcacgcatggcatatctccttgatggaccatcggagaccagcacagtactatgctgactatcacttgagtgccccagtgacaccagcgaccttaatcacaaaagcatgcagttacagggaccatctcaggcatgacctgtgactgtaccatgattgtcagcttgcatggctgtctggatcgcaaatctgaacgactgtgtatactccacatgacaatggcgcacgaaccccgaagaggccatgacactatacctggcttacccaccaaccgaccgaaggcgcaacacaaaaactacactggcacagagcagacacacaccacaacactgcgcactcccacctggaagcccaccccatacagcacagaacacggcgaacaatcgaaggaacaacgcgcaaacggcaaacgccagcgcgcagaacaacaccaggaacaaacccgcggaactacaaaacccgcgcagaacaagccagaccacacgatgccacaaacacacagggaacgagcaacaggggaacaaccaaggcctgggcaacccaagcgggccaaacagagccacagggccgcacactgacacatgcgacacgacaacgccgacaagcgcatgcgacaaagcgcacaaggggagaaaccacgacgcgactggcaagaaccccccgacaccaagccctccaatgcagccaaaacatggcacccagcgagaccaaccaccatgaccgcactagcacgccccaaggaccgacaccaacccaaggaggcacaaaggaacgcaaccaaaaggacagacaccacaaccggggacacacacgaacagagcccagccggcgacccccgggcaccccgcaaccgagcacacagcggctaacaccgggccgacgggacacggggcaaacgcgaacaacaccgggggagcaaggcggcccaagcccaccacagctcccagcccaaagcagacagcagaggacaacaaagcagacaagacacaggcaaaaacagagtaagagcacccaagccagcacgacaacgccacaccacctgagacagcaagagcatacagccacgccacgacccagaagagcgacc

SEQ ID NO: 591398 - DNA, 313 bp, Homo sapiens
  misc_feature (3)..(3): n is a, c, g, or t
  misc_feature (5)..(5): n is a, c, g, or t
  misc_feature (24)..(24): n is a, c, g, or t
  misc_feature (57)..(57): n is a, c, g, or t
  misc_feature (65)..(65): n is a, c, g, or t
  misc_feature (78)..(78): n is a, c, g, or t
  misc_feature (82)..(82): n is a, c, g, or t
  misc_feature (109)..(109): n is a, c, g, or t
  misc_feature (125)..(125): n is a, c, g, or t
  misc_feature (136)..(136): n is a, c, g, or t
  misc_feature (148)..(148): n is a, c, g, or t
  misc_feature (175)..(175): n is a, c, g, or t
  misc_feature (204)..(204): n is a, c, g, or t
  misc_feature (248)..(248): n is a, c, g, or t
  misc_feature (259)..(259): n is a, c, g, or t
  misc_feature (305)..(305): n is a, c, g, or t
ccngnctgtaagatgttgttttangggcgaaaggggagaaacggaaagtgttttacncgttttcnaaagtgttggtcnttcnaatgtagctatttttcgtgttgcatcntttctacgtcagtacncgtggtgtacngggttaatggcnagtactgtattggctctgtgaaaacgnatttgtgaaaagagtatgtagtggcgtcntttgaactgttagatgctgaatatctgttcacttttcaatcccnattctgtcccnatcttaccggatgctactggacgtgaatggttaataaaactgcacngtgctgtt

SEQ ID NO: 591399 - DNA, 1277 bp, Homo sapiens
ggtcccagagccaagagtgccaaggtgtcatggggccacacgggagccacgagtcccaagggtccacggcagtacgaggagacacccaggtgcccatgcccagcccatccgtggctgcgtcccaggaggcaggcagtggcatatgacagtgaggactgcgagggtctcctggggacagaggcaccacccaggtaagcagggctgctgctgcacgcctgtttgccagtgtggccgtgtaggggccctcacacctcctctgtggtcaaggatggaggccaaccagaaggccaagaacgacagacggcgaggcaggggatgctaggggcctgacagactgatccagccctgagagtgaggtcacgatcacgaggcggacggtgcaggcccaaggtgggcaccaccctggagcgggccccagggcaaaggcacaccaggtgcgctgggcacagaggcacgccaagggcaaggccacgggcagacatgcgggcacagccaagagaaacaaccccaagaagcagggaacgagccctcgtacaaccccctactcgggagacacacgggcacgtggccacgacgcagcgacgaggcaagaccacagcataggacaagagagcggcctacagaagggcccacacgcaaagcgcaacaggaggcctgcccgccaccggcggcatggagcgggagcacagaaacgggaggccccctgactgccaacccacggccctgggccacgacggccagcgcccacggagccatccatgggggaaaggggcccggacacgccgcagcacagggccaccgcgaccgagaccggtgcacccgcccagccggaacaagcccatccgaccggtgggaagggccacgacctaaggaggcaccgaacgaaacagcagacgcgcacatcggacaacagccaggcaacgccgaagagcagacaacgccgcacgaaggcacgaggccccccagcacgcggcggcaagagccagccacaagcccccgagggcgccccaccaaccgaaggcgccgagaagccgacaccgggggcgccgccacggtacacgcagcagacgcaagaaacaaaccaagacaacgcaaaactaagacaacagaagacaagtaggaccgccgaaaagaacagaacccgtaggcggaaataacgaaaaaggcagccagaacaggagcacggataggaagaacagagcaaagaacaggcgaacaacgcggaaagcaggcagggggaagacaccgaaagcgaaaaacgaacaagagacgcagaa

SEQ ID NO: 591400 - DNA, 121 bp, Homo sapiens
aattcaagcttctaacgatgtacggggacatggagaccaaagaccttccagtctatggtctccatgccccttatttatgggaaccatttcattctaacagaataaaccgagaaggaaacca

SEQ ID NO: 591401 - DNA, 168 bp, Homo sapiens
tctagagtatccccccgaatggaatcctgttgcagaaatttgtcagttctctttcagagattttcccaatgctctatttttagaggaaaagtgtattacaaatacactaatacaagttaacttttttcttgcattgtgttttcctattcatttctccatttgattgat

SEQ ID NO: 591402 - DNA, 389 bp, Homo sapiens
acgtgacatgagcaaaacatggctcacaagcagataccccagatagccaagacacatgtgacaactgtgcaacatcactaatcatcagagaaatacaaattaaaaccacaatgagatacaaacttaccccagacagaatggccattattacaaagtcaaaaaacaatagatgttggtgtggctatggcgaaaaaggaacacttatatgctgctggtgggaatgtaaattagtacaacctctataaaaacagtacggagatttaccaaagtgatctatttctttttttaacaatgtatttatcttaagaaaaacagcctgggcaacatggcgaaaccccatctctacaaaaaaatacaaaatttagccacatgtggtagtgcgcgcacca

SEQ ID NO: 591403 - DNA, 502 bp, Homo sapiens
  misc_feature (453)..(453): n is a, c, g, or t
aaagatgtttttattgttgaatagacactacggcattaagatttccactatgatgggtgctcacaaatgataggcctcttaggtaagaagctttaattgacaacattaaatatgcggggcggggggagtgggtgcagagtctctctttcctttgttagggcatcccagtgacagaaacaatgcctgacacatggtacgctctcgataaatattcgttgattacataaccccctctaccacccaataacttctcatcattcattcaaagttactgaacgtaccatattagcgaatctgcaatggaaacagtggaggctgttttctcaaaggattttctaataaagcaacaaatctttttttaaaaaaatgaatggtgtgccccaagtcaatgctgggcttcggatttctgcggtagtttggcctggggtcctcactgggatgctggctggggangtgctccctgcccttgaatctccttcctttgtagtttttggcggccgca

SEQ ID NO: 591404 - DNA, 101 bp, Homo sapiens
tgctcaggtaggcgctgctgcagatgctccaggaagctcagcaggcctgctggccccacaacctgcctgtggttcaggcggctcagcagcgagaactagag

SEQ ID NO: 591405 - DNA, 139 bp, Homo sapiens
gttatagcatggcgtgtggaagtgcagcagggcaaagaagtaaaaataactccaaacatgtgggcctgagcaaattgcaacaggatagcaactgctcattccttgcagagggggcaagcactgcataccagtagatgca

SEQ ID NO: 591406 - DNA, 420 bp, Homo sapiens
atagcattctagtacatataagtcagttaatagttgactccttgaacatgtataggttggacttacaccgatggtatgctgatccgctgaaagctcaggatatttctcaggcttgtctatctcggtgagactcattgtccgaatttggtcaaccatgtaagaattaattggggccttccagagctagtcttagcctgggtctagagtaggcgtgatattagagcatggtcctggttccacagacctatctcttgtgttatgtcagctacataactgaagtcagcaaggatatatccaagtggactgggttgaaactccagattccgcacggctctatctgtaatattacaattccactctcgttccgtagcatctaatctctggtaagcgttgcgcagtctcatacagtgtacacgtagc

SEQ ID NO: 591407 - DNA, 268 bp, Homo sapiens
aggattcgatgcaggatgccatatgacatttagaagttatgtctccttagctaccttggatctgtgataatttgttcagactttatttttgaagacctgaatagttttgagaagccctgttcaggcactttgtagaatgtaccttttgggattgtctgatgttcttctcataggtaggctggagtcataggatgtcaacttaaaaatcacacagtttataagtttagaaaagatattttatttattataaagtgctacaacttgcagg

SEQ ID NO: 591408 - DNA, 303 bp, Homo sapiens
tggtggtcctaggacagacagtgaccagaaaagctaacacaatccaggtggctctgactaagagaaaattgactaaatgaatcttgtgtccaagaacttaccccttttcagctgagccctggggactgtccaaaagccagtgaaatgtgaaggaaagtggggtccttcggggcgatgctccctcaggctcagaagagctctaacctgctccctggtttggcttgagggggctgggaaaaaaacttggcactttttcgtgtggatctcgccacatttctgatcagaggtgtacactaacatttc

SEQ ID NO: 591409 - DNA, 116 bp, Homo sapiens
caaagcgctggagggcacgcaggaagccgacctggatacgttgcgcttgaactacaaccccaccgacatgaagcggatgaacagcgacacccgggccttcctcgacacgttcgcag

SEQ ID NO: 591410 - DNA, 190 bp, Homo sapiens
  misc_feature (1)..(1): n is a, c, g, or t
ntcgacgggattggtgcaacggcaggtaccgcaccttgccgctttgccgtgaatcttcaggtgttggatcccacggcgttcctgaatgtcgcttacctgcagcagcgccgcttcttcacggtgcaggccgtgatagagaaggacagccaatatcgcccgatcgcgcattcctttcaaagtggtttcatcg

SEQ ID NO: 591411 - DNA, 139 bp, Homo sapiens
agctgtctgcaggacgatgagcagatctgtttcgtcagctctaaaaggctctccttcgcctggtgcagggtccgggtgatggccacgtagagccactctctcactgtctgggagttgccctggtagaagaggtccgtgg

SEQ ID NO: 591412 - DNA, 106 bp, Homo sapiens
tgcctcgtggtactcctccactctggtactgcagagactggcactgcttggaaacttacctggacacctccactcagtgaatttgggtacctgcagctcgaattcg

SEQ ID NO: 591413 - DNA, 482 bp, Homo sapiens
aaattcggccatattggccggccattcgaattaggcttaatggggattttacctttaataaatggtggcagttccctaaggtaaatcctttaccattaaggtaccaggccttattcttcccttaaaggggaccccaggttcccatatgggttggaaaaatgggcctgggggggtttggtttaatccttaaaatttggttccaataagttttgtgggaatgggaatcctggtttaataagcttggggggggtccttttccccaaaaccccttttgggtgaaaccatccctttgccagttgcagccttttgacctcggttaccattagaagagttaatctaattttaacttttgaccgttggccttacaatcaaaggtaagtattatatattggacctgatgaaaattaataaccggttttaccaaaattaaaggtccatggtagaaaaaaaaaaaccataattaaatattaccataaaaaaaa

SEQ ID NO: 591414 - DNA, 119 bp, Homo sapiens
ccttagaacgggctgaactggtgcagtggtcaaaactgtcttggtgcacttccccatacacttatgctgctatgaggcctcttctgctctcgggctcatcatttacccaccactatgtc

SEQ ID NO: 591415 - DNA, 550 bp, Homo sapiens
gcggcgccctttttttggtgttcaatattagtccaggtatgagttaaataatgacaagtctgggcaacataatgggaccctgtctctacaaaaattaaaaaaattactcaggtgtggccgggcggtgtctcacgcctgtaatcccagcactttcggaggccgaggcaggcggatcatgaggtcaggagatcgagaccatcctggctaacaaggtgaaaccccatctctactaaaaatacaaaaattagccaggtgtggtggcgggcgcctgtagtcccagctactcgggaggctgaggcaggagaatcgcttgaacccaggaggcagaggttgcggtgagcagagatcgcaccactgcgctccagcctaggcaacagagcaagattctgtctcaaaaatgaatcactcacaaataaatcactcaatcaaaatacaattggaaagcaatcacatagcttacagaatccgtggaaaggctggagcgtcttgacacatggagaacaacaacagaagccaagtgacctaagacacaggctaatcactctaccgt

SEQ ID NO: 591416 - DNA, 747 bp, Homo sapiens
  misc_feature (312)..(312): n is a, c, g, or t
tactatggtatctgtgtaccatattcctaagtatccattattaaatggggacttcttaaaaccataacctggcttgccttttagtgttaagaaaactacaacagtgtgtatagttagagatttcttctttaatgaagaagagctgactgtagttaatgagcagtgatctgagaaagacattaaataagtggtctgagagtgatacatttgtcaaacatgaagagtgacaaccatcaatttatgaaatggaaacaatcagactgggaattgtatacgaatttcattggtatatgtgcctggtatggcctctgngaataacttagaggaaatgtgttctacctatatgtcctcagttacttcatctacaagtgtgggaaaaacattttgcctcttaaaatgtgtgaagaggattatatatgatatgatatatgcgtatatatcaatatatttaattggcttagagtttctagcaatataagcaataataataaagtatacgtgtattagtataaacataagggttgaaaggttcttgggattggatgcatatagactaaagtgttgtattgtgggggcaaaggtaaggcggtaattgtcgagtgccagggataacaagcaaattgatgagaaagtctaatagtaatggttggtcccttttgaaatctatgctaacaaggtacttagatagcctaagataaattaacttgggggggaagacaaatggtaaatgggaaccttaaaatggcc

SEQ ID NO: 591417 - DNA, 238 bp, Homo sapiens
  misc_feature (224)..(225): n is a, c, g, or t
agtctttaattttgtgtaatgtgttaagtgctgttcatttaagttattgaaaatgagaataaaatgttgagcttctttaaaagtaacacactatgcaagcatgtgtactttttatatctctcatgtttagtttttataacaccatatccaggttgctatctcacatagtagtcctttaacatatgtgtattagcagtgccaatggtggactgaagctgcttcannctgttccctttgc

SEQ ID NO: 591418 - DNA, 373 bp, Homo sapiens
  misc_feature (373)..(373): n is a, c, g, or t
cggccgcggaggtcatgcctggtattccagcactttggaaggcccaggcaggcggatcacctggggtcaggagttcgagatcaggctgggcaacatgacgaaaccctgtctctactgaaaatacaaaaattagccaggcatggtggtgggcgcctgttatcccagctactcgggagaactgagcaggagaattgcttgaacacgggaggtgaaagttgcagtgaaccgagattgcaccactgcactccagccaggcgacagagcaagacttagactcaaaaagtacataattaaagtaagaaaacttgcaatagtcattaagacttactaagacacactgttcctaacagagcaatgtacagtctgctacatn

SEQ ID NO: 591419 - DNA, 120 bp, Homo sapiens
aatttaactgttagtcaaagaggacagcttttggacactaggagaaaaccttgtagagagagtaaaaaattttacaccctagtaggctaaaagcagcaccattagaagcgttcagctcaa

SEQ ID NO: 591420 - DNA, 868 bp, Homo sapiens
  misc_feature (68)..(68): n is a, c, g, or t
ggggtcgaagggtcaggggccgaagcaccggccacaacttgaagccggaccggcctcttcgccccagnggctcgcggacgtagatgcatccagcgtgcgactatcccagcgcctaacggcagctggacttcgctcccgggacctccaatgggctaccaccttcgcccgcagaccccagcccccgccacgcccacacgtcgcactaggttggcccgcgcctcactggttacggggtcgacccccctagggggcggagctagagaggccacggccaatgaacgccgggggtaagcgggttagtacgacgagaagagtgacagacaggctccataaccagtagacgtagaaggcagaactgagtggcgggtacggcacccgatggctattcgagctctcgatctcggagactggagcgggccattcagaggcgcggggccgggcccggcggacgcttgttgttgtccggccgggggaggcggaggtcgctcgctcgctcgctcggctcgctgactcgccggagcgctctgtggcggtcggcggcaggtcggtcgcgagagcgggctctgtggaagggggcgaggctatgtcgcggtggcagcccggatgggccggcagggccgggagtaacgggacgtcgccgcggagcttcttcccccggatacagtgcggcccgagcggaggccgcggcgccgccctccgatcttgaagagcccgcgctgcgcggagcccgcccccgcctgcgcaccggcaccgacgcggagcgaccagcccagccagacccggcccggcgcggcctgatctaacccagccaggcaggtgggtgtccgccctgcgtcccgcgccgtctgcgtacccggaaccacccgct

SEQ ID NO: 591421 - DNA, 246 bp, Homo sapiens
gtggttatacatgagtattgctgtctgccttctgacacatagcttgtaggacatacttctggtgggcactgtgaggaaacttgaggatgaaatcagtgagactgcatgcacatatgacaggcatggcctgtctcctcacttgaagtgcacaggtcccatcgaccaaagccctgtttctgatcactactcactgtacagaccaggggagatacctctacgagtacgaacttgcacaggccatttcaa

SEQ ID NO: 591422 - DNA, 198 bp, Homo sapiens
ataatgcgtacaccacctgagtccaccacctgtatcaccacctgagtcacaccacctgagtcacaccacctgagtcacaccacctgagtctaaattgcttgattatgtcagaaaggtcctttgacttcaactctactcatttgaggatctacctagagtggaagtgtcaagtcaaaggacctttctgacataatcaag

SEQ ID NO: 591423 - DNA, 2350 bp, Homo sapiens
  misc_feature (68)..(68): n is a, c, g, or t
  misc_feature (2159)..(2159): n is a, c, g, or t
  misc_feature (2165)..(2165): n is a, c, g, or t
  misc_feature (2178)..(2181): n is a, c, g, or t
  misc_feature (2350)..(2350): n is a, c, g, or t
ggggtcgaagggtcaggggccgaagcaccggccacaacttgaagccggaccggcctcttcgccccagnggctcgcggacgtagatgcatccagcgtgcgactatcccagcgcctaacggcagctggacttcgctcccgggacctccaatgggctaccaccttcgcccgcagaccccagcccccgccacgcccacacgtcgcactaggttggcccgcgcctcactggttacggggtcgacccccctagggggcggagctagagaggccacggccaatgaacgccgggggtaagcgggttagtacgacgagaagagtgacagacaggctccataaccagtagacgtagaaggcagaactgagtggcgggtacggcacccgatggctattcgagctctcgatctcggagactggagcgggccattcagaggcgcggggccgggcccggcggacgcttgttgttgtccggccgggggaggcggaggtcgctcgctcgctcgctcggctcgctgactcgccggagcgctctgtggcggtcggcggcaggtcggtcgcgagagcgggctctgtggaagggggcgaggctatgtcgcggtggcagcccggatgggccggcagggccgggagtaacgggacgtcgccgcggagcttcttcccccggatacagtgcggcccgagcggaggccgcggcgccgccctccgatcttgaagagcccgcgctgcgcggagcccgcccccgcctgcgcaccggcaccgacgcggagcgaccagcccagccagacccggcccggcgcggcctgatctaacccagccaggcaggcaatactagcccctctggagcacggagctccttccccaaagacatgaagctattggagaactcgagctttgaagccatcaactcacagctgactgtggagaccggagatgcccacatcattggcaggattgagagctactcatgtaagatggcaggagacgacaaacacatgttcaagcagttctgccaggagggccagccccacgtgctggaggcactttctccaccccagacttcaggactgagccccagcagactcagcaaaagccaaggcggtgaggaggagggccccctcagtgacaagtgcagccgcaagaccctcttctacctgattgccacgctcaatgagtccttcaggcctgactatgacttcagcacagcccgcagccatgagttcagccgggagcccagccttagctgggtggtgaatgcagtcaactgcagtctgttctcagctgtgcgggaggacttcaaggatctgaaaccacagctgtggaacgcggtggacgaggagatctgcctggctgaatgtgacatctacagctataacccagacttggactcagatcccttcggggaggatggtagcctctggtccttcaactacttcttctacaacaagcggctcaagcgaatcgtcttctttagctgccgttccatcagtggctccacctacacaccctcagaggcaggcaacgagctggacatggagctgggggaggaggaggtggaggaagaaagcagaagcaggggcagtggggccgaggagaccagcaccatggaggaggacagggtcccagtgatctgtatttgatgaggaggagccgaggccccagcttcatccagcttcaaccaatgcctggacctgtccacctgagaggcccctggggcctccccagctgctggccagaccctggcgctgccacagtcctggcactgcccaaggccatacctgcctagccctttggctccatcctgtggatgcccactcacccctcagactcctgctgcccatgctgtggccggacttgtcagcagggggcctggtgggaggagcgactgccctgcccaaatgaactgccacagcagggacagctggaccgcagagtttatttttgtatttctactgggcctgcacactccagcccaaagggtctgtggccggaggccccacgagcaggccccagcagtcaccggctctggtcttgggccggccccggtgcccacctgtacccccacctcgcccatttggccgcgtgcactgagtgtcactttgctgcagctcgtttctttccaataaaagtttctgtgacttaaaaaaaaaaaaaacaaaaaaaaaaanaaaaancccgggggccctnnnntgcgggggggggaaaaaagggtgattgcacatgggccatcgggtcaaaagggggttcctcgagcccacagttttctgtccacaacgggggaagacttgcgcggggtccccctatataggaggggcggcgataatttgccagaaagcccgggtaacccggattatgaggn

SEQ ID NO: 591424 - DNA, 2564 bp, Homo sapiens
  misc_feature (68)..(68): n is a, c, g, or t
  misc_feature (1786)..(1786): n is a, c, g, or t
  misc_feature (2373)..(2373): n is a, c, g, or t
  misc_feature (2379)..(2379): n is a, c, g, or t
  misc_feature (2392)..(2395): n is a, c, g, or t
  misc_feature (2564)..(2564): n is a, c, g, or t
ggggtcgaagggtcaggggccgaagcaccggccacaacttgaagccggaccggcctcttcgccccagnggctcgcggacgtagatgcatccagcgtgcgactatcccagcgcctaacggcagctggacttcgctcccgggacctccaatgggctaccaccttcgcccgcagaccccagcccccgccacgcccacacgtcgcactaggttggcccgcgcctcactggttacggggtcgacccccctagggggcggagctagagaggccacggccaatgaacgccgggggtaagcgggttagtacgacgagaagagtgacagacaggctccataaccagtagacgtagaaggcagaactgagtggcgggtacggcacccgatggctattcgagctctcgatctcggagactggagcgggccattcagaggcgcggggccgggcccggcggacgcttgttgttgtccggccgggggaggcggaggtcgctcgctcgctcgctcggctcgctgactcgccggagcgctctgtggcggtcggcggcaggtcggtcgcgagagcgggctctgtggaagggggcgaggctatgtcgcggtggcagcccggatgggccggcagggccgggagtaacgggacgtcgccgcggagcttcttcccccggatacagtgcggcccgagcggaggccgcggcgccgccctccgatcttgaagagcccgcgctgcgcggagcccgcccccgcctgcgcaccggcaccgacgcggagcgaccagcccagccagacccggcccggcgcggcctgatctaacccagccaggcaggcaatactagcccctctggagcacggagctccttccccaaagacatgaagctattggagaactcgagctttgaagccatcaactcacagctgactgtggagaccggagatgcccacatcattggcaggattgagagctactcatgtaagatggcaggagacgacaaacacatgttcaagcagttctgccaggagggccagccccacgtgctggaggcactttctccaccccagacttcaggactgagccccagcagactcagcaaaagccaaggcggtgaggaggagggccccctcagtgacaagtgcagccgcaagaccctcttctacctgattgccacgctcaatgagtccttcaggcctgactatgacttcagcacagcccgcagccatgagttcagccgggagcccagccttagctgggtggtgaatgcagtcaactgcagtctgttctcagctgtgcgggaggacttcaaggatctgaaaccacagctgtggaacgcggtggacgaggagatctgcctggctgaatgtgacatctacaggtgggccggcatccctgcagatggcctccaggcctccaggtttgtggggcacttggcgcctcacaccacctgtcaccctatactccccagctataacccagacttggactcagatcccttcggggaggatggtagcctctggtccttcaactacttcttctacaacaagcggctcaagcgaatcgtcttctttagctgccgttccatcagtggctccacctacacaccctcagaggcaggcaacgagctggacatggagctgggggaggaggaggtggaggaagaaagcagaagcaggggcagtggggccgaggagaccagcaccatggaggaggacaggtgtgtgatgggggccatgacccgggtccctgaagcctggagtgggtacaacagggtgggggcctcctctacttggtctaagtggtngctcctgaaggcccactgtgtgccaacctccgcccagggtcccagtgatctgtatttgatgaggaggagccgaggccccagcttcatccagcttcaaccaatgcctggacctgtccacctgagaggcccctggggcctccccagctgctggccagaccctggcgctgccacagtcctggcactgcccaaggccatacctgcctagccctttggctccatcctgtggatgcccactcacccctcagactcctgctgcccatgctgtggccggacttgtcagcagggggcctggtgggaggagcgactgccctgcccaaatgaactgccacagcagggacagctggaccgcagagtttatttttgtatttctactgggcctgcacactccagcccaaagggtctgtggccggaggccccacgagcaggccccagcagtcaccggctctggtcttgggccggccccggtgcccacctgtacccccacctcgcccatttggccgcgtgcactgagtgtcactttgctgcagctcgtttctttccaataaaagtttctgtgacttaaaaaaaaaaaaaacaaaaaaaaaaanaaaaancccgggggccctnnnntgcgggggggggaaaaaagggtgattgcacatgggccatcgggtcaaaagggggttcctcgagcccacagttttctgtccacaacgggggaagacttgcgcggggtccccctatataggaggggcggcgataatttgccagaaagcccgggtaacccggattatgaggn

SEQ ID NO: 591425 - DNA, 411 bp, Homo sapiens
tgttgtgtagaaaggaatagacataccgcaatccttttgttctgtactaagaaaatttcttctgcctcgcgatgatgttaatttataaccttacccccaaccccgtgctcactgaaacatatgctgtgtcaactcagggttatatggattaagggcggtgctagatgtgctttgttaaacagatgcttgaaggcagcatgctcgtttaagagtcattaccactccctaatctcacgtacccagggacacaaacactgcggaaggccgcagggtcctctgcctaggaaaaccagagacctttgttcatatgtttatctgctgaccttctctccgctattgtcctatgaccctgccaaatctccctctcggagaaacacccaagaatgatcaataaatactaacaaaattaaa

SEQ ID NO: 591426 - DNA, 2208 bp, Homo sapiens
  misc_feature (68)..(68): n is a, c, g, or t
  misc_feature (2017)..(2017): n is a, c, g, or t
  misc_feature (2023)..(2023): n is a, c, g, or t
  misc_feature (2036)..(2039): n is a, c, g, or t
  misc_feature (2208)..(2208): n is a, c, g, or t
ggggtcgaagggtcaggggccgaagcaccggccacaacttgaagccggaccggcctcttcgccccagnggctcgcggacgtagatgcatccagcgtgcgactatcccagcgcctaacggcagctggacttcgctcccgggacctccaatgggctaccaccttcgcccgcagaccccagcccccgccacgcccacacgtcgcactaggttggcccgcgcctcactggttacggggtcgacccccctagggggcggagctagagaggccacggccaatgaacgccgggggtaagcgggttagtacgacgagaagagtgacagacaggctccataaccagtagacgtagaaggcagaactgagtggcgggtacggcacccgatggctattcgagctctcgatctcggagactggagcgggccattcagaggcgcggggccgggcccggcggacgcttgttgttgtccggccgggggaggcggaggtcgctcgctcgctcgctcggctcgctgactcgccggagcgctctgtggcggtcggcggcaggtcggtcgcgagagcgggctctgtggaagggggcgaggctatgtcgcggtggcagcccggatgggccggcagggccgggagtaacgggacgtcgccgcggagcttcttcccccggatacagtgcggcccgagcggaggccgcggcgccgccctccgatcttgaagagcccgcgctgcgcggagcccgcccccgcctgcgcaccggcaccgacgcggagcgaccagcccagccagacccggcccggcgcggcctgatctaacccagccaggcaggcaatactagcccctctggagcacggagctccttccccaaagacatgaagctattggagaactcgagctttgaagccatcaactcacagctgactgtggagaccggagatgcccacatcattggcaggattgagagctactcatgtaagatggcaggagacgacaaacacatgttcaagcagttctgccaggagggccagccccacgtgctggaggcactttctccaccccagacttcaggactgagccccagcagactcagcaaaagccaaggcggtgaggaggagggccccctcagtgacaagtgcagccgcaagaccctcttctacctgattgccacgctcaatgagtccttcaggcctgactatgacttcagcacagcccgcagccatgagttcagccgggagcccagccttagctgggtggtgaatgcagtcaactgcagtctgttctcagctgtgcgggaggacttcaaggatctgaaaccacagctgtggaacgcggtggacgaggagatctgcctggctgaatgtgacatctacagctataacccagacttggactcagatcccttcggggaggatggtagcctctggtccttcaactacttcttctacaacaagcggctcaagcgaatcgtcttctttagctgccgttccatcagtggctccacctacacaccctcagaggcagagcttcatccagcttcaaccaatgcctggacctgtccacctgagaggcccctggggcctccccagctgctggccagaccctggcgctgccacagtcctggcactgcccaaggccatacctgcctagccctttggctccatcctgtggatgcccactcacccctcagactcctgctgcccatgctgtggccggacttgtcagcagggggcctggtgggaggagcgactgccctgcccaaatgaactgccacagcagggacagctggaccgcagagtttatttttgtatttctactgggcctgcacactccagcccaaagggtctgtggccggaggccccacgagcaggccccagcagtcaccggctctggtcttgggccggccccggtgcccacctgtacccccacctcgcccatttggccgcgtgcactgagtgtcactttgctgcagctcgtttctttccaataaaagtttctgtgacttaaaaaaaaaaaaaacaaaaaaaaaaanaaaaancccgggggccctnnnntgcgggggggggaaaaaagggtgattgcacatgggccatcgggtcaaaagggggttcctcgagcccacagttttctgtccacaacgggggaagacttgcgcggggtccccctatataggaggggcggcgataatttgccagaaagcccgggtaacccggattatgaggn

SEQ ID NO: 591427 - DNA, 2137 bp, Homo sapiens
  misc_feature (68)..(68): n is a, c, g, or t
  misc_feature (1946)..(1946): n is a, c, g, or t
  misc_feature (1952)..(1952): n is a, c, g, or t
  misc_feature (1965)..(1968): n is a, c, g, or t
  misc_feature (2137)..(2137): n is a, c, g, or t
ggggtcgaagggtcaggggccgaagcaccggccacaacttgaagccggaccggcctcttcgccccagnggctcgcggacgtagatgcatccagcgtgcgactatcccagcgcctaacggcagctggacttcgctcccgggacctccaatgggctaccaccttcgcccgcagaccccagcccccgccacgcccacacgtcgcactaggttggcccgcgcctcactggttacggggtcgacccccctagggggcggagctagagaggccacggccaatgaacgccgggggtaagcgggttagtacgacgagaagagtgacagacaggctccataaccagtagacgtagaaggcagaactgagtggcgggtacggcacccgatggctattcgagctctcgatctcggagactggagcgggccattcagaggcgcggggccgggcccggcggacgcttgttgttgtccggccgggggaggcggaggtcgctcgctcgctcgctcggctcgctgactcgccgcccccgcctgcgcaccggcaccgacgcggagcgaccagcccagccagacccggcccggcgcggcctgatctaacccagccaggcaggcaatactagcccctctggagcacggagctccttccccaaagacatgaagctattggagaactcgagctttgaagccatcaactcacagctgactgtggagaccggagatgcccacatcattggcaggattgagagctactcatgtaagatggcaggagacgacaaacacatgttcaagcagttctgccaggagggccagccccacgtgctggaggcactttctccaccccagacttcaggactgagccccagcagactcagcaaaagccaaggcggtgaggaggagggccccctcagtgacaagtgcagccgcaagaccctcttctacctgattgccacgctcaatgagtccttcaggcctgactatgacttcagcacagcccgcagccatgagttcagccgggagcccagccttagctgggtggtgaatgcagtcaactgcagtctgttctcagctgtgcgggaggacttcaaggatctgaaaccacagctgtggaacgcggtggacgaggagatctgcctggctgaatgtgacatctacagctataacccagacttggactcagatcccttcggggaggatggtagcctctggtccttcaactacttcttctacaacaagcggctcaagcgaatcgtcttctttagctgccgttccatcagtggctccacctacacaccctcagaggcaggcaacgagctggacatggagctgggggaggaggaggtggaggaagaaagcagaagcaggggcagtggggccgaggagaccagcaccatggaggaggacagggtcccagtgatctgtatttgatgaggaggagccgaggccccagcttcatccagcttcaaccaatgcctggacctgtccacctgagaggcccctggggcctccccagctgctggccagaccctggcgctgccacagtcctggcactgcccaaggccatacctgcctagccctttggctccatcctgtggatgcccactcacccctcagactcctgctgcccatgctgtggccggacttgtcagcagggggcctggtgggaggagcgactgccctgcccaaatgaactgccacagcagggacagctggaccgcagagtttatttttgtatttctactgggcctgcacactccagcccaaagggtctgtggccggaggccccacgagcaggccccagcagtcaccggctctggtcttgggccggccccggtgcccacctgtacccccacctcgcccatttggccgcgtgcactgagtgtcactttgctgcagctcgtttctttccaataaaagtttctgtgacttaaaaaaaaaaaaaacaaaaaaaaaaanaaaaancccgggggccctnnnntgcgggggggggaaaaaagggtgattgcacatgggccatcgggtcaaaagggggttcctcgagcccacagttttctgtccacaacgggggaagacttgcgcggggtccccctatataggaggggcggcgataatttgccagaaagcccgggtaacccggattatgaggn

SEQ ID NO: 591428 - DNA, 800 bp, Homo sapiens
ggctcagcatgggggacgctctcagtctcggcgcacggcccagttccttcaaaatgtctagtgtcacgaaatcctgtgcaagctcagctgggagggtgatcagtctacacccccaagtgcatatggggctgtcaaagcttatactaactttgatgctgagcgggatgcttggaacatgaaacggccatcaagacaaaggtgtggatgaggtcaccattgtcagcatttggaccaaccgcagtaatgctcagaggaacaggatatggcctgtcggctaccagagaaggcagcaaaagggaagttgcatcaggtcctgaagtcagccttatctggcacgctggagacgtgatcttgggctatgaaggacacctgctcgagtatgacgcttctgagctaaaggcttcccatgatggggctgtgaaccgatgagcactctctcatcggcatcatctgctccagaaccaaccaggagctgcggaaccttagcacgagtctacaggattgtacaagactgatcctgagacaggacgtccattgcggacacatctggtgacttcggcacagctggtggttgccctgcaaccgggtgaaccagcagaggatggtcctgcagtggttactgacgggatggccaggaggccgggactcatgacgcggagtgccgaggaggcctggtttcccaggtggtcagattctgaccggggggtcccactcaaaagtttgacggaccaatgagcgtaaatggggacccggacagttgggccgcactctgacacggggaaaaaccgttggggggagca

SEQ ID NO: 591429 - DNA, 941 bp, Homo sapiens
  misc_feature (917)..(917): n is a, c, g, or t
ttttgtggtttttttaaaacaacaacataggcattaattctttcaataagcttcttagttcttagtatcaccaagggaatgatgaaaaaacaacaaaaagcgtgagtcttggcaaatctctgacaaacgagcagagatctcaagggcaatgggggcgggggaggcttgacagaagtgccaaggagcagttccaacgtcacatctctcctgggcgggaagggtagagaacgggggcacggtcgagagctgtcctgtggcaacttctgcccacatgagccagtgcgcctggctcggcatggagccaccccgcgggattccctgggtgcctccatagataccgggccacacacccctcagacgtgtgatccaagtgcccggggagcaccgtccagggcctcagggtggacccagaagaccagcctcgtgcaggggcaggggcacaatgtggaggagaggcagaggcaggcagcgtcgattgacgggtgggagaagccaaggaggtggtgacccaagggaacagacgcgagaggaaccacatctggcggtcggcaaggaacagaggaatcgagaaacagtggaaacaaacaaaaaaaaacactagaaaaaccaaagaaagacacaacacgcacacaaaactacacacaacatcaccagggaggacagagccaaggcagaacggacaaggatagcagacaacaagacgcacacggctagcacgaacgaaacgtgcaccaacacagggaacgtaagtgagctcacaggactagccgaacattcgacaaagaagcgcgacacaacatacgatgatgaacaacaccaacccacagtgcagcagaacatcagagaaacgcgcatcagagtcgacacacagacagtcagaagagcaaagagatataaagacagtcaaacagaaggantggagtctgctcgtgctcgccctg

SEQ ID NO: 591430 - DNA, 2226 bp, Homo sapiens
  misc_feature (68)..(68): n is a, c, g, or t
  misc_feature (2035)..(2035): n is a, c, g, or t
  misc_feature (2041)..(2041): n is a, c, g, or t
  misc_feature (2054)..(2057): n is a, c, g, or t
  misc_feature (2226)..(2226): n is a, c, g, or t
ggggtcgaagggtcaggggccgaagcaccggccacaacttgaagccggaccggcctcttcgccccagnggctcgcggacgtagatgcatccagcgtgcgactatcccagcgcctaacggcagctggacttcgctcccgggacctccaatgggctaccaccttcgcccgcagaccccagcccccgccacgcccacacgtcgcactaggttggcccgcgcctcactggttacggggtcgacccccctagggggcggagctagagaggccacggccaatgaacgccgggggtaagcgggttagtacgacgagaagagtgacagacaggctccataaccagtagacgtagaaggcagaactgagtggcgggtacggcacccgatggctattcgagctctcgatctcggagactggagcgggccattcagaggcgcggggccgggcccggcggacgcttgttgttgtccggccgggggaggcggaggtcgctcgctcgctcgctcggctcgctgactcgccggagcgctctgtggcggtcggcggcaggtcggtcgcgagagcgggctctgtggaagggggcgaggctatgtcgcggtggcagcccggatgggccggcagggccgggagtaacgggacgtcgccgcggagcttcttcccccggatacagtgcggcctgatctaacccagccaggcaggcaatactagcccctctggagcacggagctccttccccaaagacatgaagctattggagaactcgagctttgaagccatcaactcacagctgactgtggagaccggagatgcccacatcattggcaggattgagagctactcatgtaagatggcaggagacgacaaacacatgttcaagcagttctgccaggagggccagccccacgtgctggaggcactttctccaccccagacttcaggactgagccccagcagactcagcaaaagccaaggcggtgaggaggagggccccctcagtgacaagtgcagccgcaagaccctcttctacctgattgccacgctcaatgagtccttcaggcctgactatgacttcagcacagcccgcagccatgagttcagccgggagcccagccttagctgggtggtgaatgcagtcaactgcagtctgttctcagctgtgcgggaggacttcaaggatctgaaaccacagctgtggaacgcggtggacgaggagatctgcctggctgaatgtgacatctacagctataacccagacttggactcagatcccttcggggaggatggtagcctctggtccttcaactacttcttctacaacaagcggctcaagcgaatcgtcttctttagctgccgttccatcagtggctccacctacacaccctcagaggcaggcaacgagctggacatggagctgggggaggaggaggtggaggaagaaagcagaagcaggggcagtggggccgaggagaccagcaccatggaggaggacagggtcccagtgatctgtatttgatgaggaggagccgaggccccagcttcatccagcttcaaccaatgcctggacctgtccacctgagaggcccctggggcctccccagctgctggccagaccctggcgctgccacagtcctggcactgcccaaggccatacctgcctagccctttggctccatcctgtggatgcccactcacccctcagactcctgctgcccatgctgtggccggacttgtcagcagggggcctggtgggaggagcgactgccctgcccaaatgaactgccacagcagggacagctggaccgcagagtttatttttgtatttctactgggcctgcacactccagcccaaagggtctgtggccggaggccccacgagcaggccccagcagtcaccggctctggtcttgggccggccccggtgcccacctgtacccccacctcgcccatttggccgcgtgcactgagtgtcactttgctgcagctcgtttctttccaataaaagtttctgtgacttaaaaaaaaaaaaaacaaaaaaaaaaanaaaaancccgggggccctnnnntgcgggggggggaaaaaagggtgattgcacatgggccatcgggtcaaaagggggttcctcgagcccacagttttctgtccacaacgggggaagacttgcgcggggtccccctatataggaggggcggcgataatttgccagaaagcccgggtaacccggattatgaggn

SEQ ID NO: 591431 - DNA, 2450 bp, Homo sapiens
  misc_feature (68)..(68): n is a, c, g, or t
  misc_feature (1239)..(1239): n is a, c, g, or t
  misc_feature (2259)..(2259): n is a, c, g, or t
  misc_feature (2265)..(2265): n is a, c, g, or t
  misc_feature (2278)..(2281): n is a, c, g, or t
  misc_feature (2450)..(2450): n is a, c, g, or t
ggggtcgaagggtcaggggccgaagcaccggccacaacttgaagccggaccggcctcttcgccccagnggctcgcggacgtagatgcatccagcgtgcgactatcccagcgcctaacggcagctggacttcgctcccgggacctccaatgggctaccaccttcgcccgcagaccccagcccccgccacgcccacacgtcgcactaggttggcccgcgcctcactggttacggggtcgacccccctagggggcggagctagagaggccacggccaatgaacgccgggggtaagcgggttagtacgacgagaagagtgacagacaggctccataaccagtagacgtagaaggcagaactgagtggcgggtacggcacccgatggctattcgagctctcgatctcggagactggagcgggccattcagaggcgcggggccgggcccggcggacgcttgttgttgtccggccgggggaggcggaggtcgctcgctcgctcgctcggctcgctgactcgccggagcgctctgtggcggtcggcggcaggtcggtcgcgagagcgggctctgtggaagggggcgaggctatgtcgcggtggcagcccggatgggccggcagggccgggagtaacgggacgtcgccgcggagcttcttcccccggatacagtgcggcccgagcggaggccgcggcgccgccctccgatcttgaagagcccgcgctgcgcggagcccgcccccgcctgcgcaccggcaccgacgcggagcgaccagcccagccagacccggcccggcgcggcctgatctaacccagccaggcaggcaatactagcccctctggagcacggagctccttccccaaagacatgaagctattggagaactcgagctttgaagccatcaactcacagctgactgtggagaccggagatgcccacatcattggcaggattgagagctactcatgtaagatggcaggagacgacaaacacatgttcaagcagttctgccaggagggccagccccacgtgctggaggcactttctccaccccagacttcaggactgagccccagcagactcagcaaaagccaaggcggtgaggaggagggccccctcagtgacaagtgcagccgcaagaccctcttctacctgattgccacgctcaatgagtccttcaggcctgactatgacttcagcacagcccgcagccatgagttcagccgggagcccagccttagctggntgagggtcaggtggagggaagggacccacagccaccccactgtccttccccactttgggtagccctggctcctgtcaccctgactgtgacctgccctaggtggtgaatgcagtcaactgcagtctgttctcagctgtgcgggaggacttcaaggatctgaaaccacagctgtggaacgcggtggacgaggagatctgcctggctgaatgtgacatctacagctataacccagacttggactcagatcccttcggggaggatggtagcctctggtccttcaactacttcttctacaacaagcggctcaagcgaatcgtcttctttagctgccgttccatcagtggctccacctacacaccctcagaggcaggcaacgagctggacatggagctgggggaggaggaggtggaggaagaaagcagaagcaggggcagtggggccgaggagaccagcaccatggaggaggacagggtcccagtgatctgtatttgatgaggaggagccgaggccccagcttcatccagcttcaaccaatgcctggacctgtccacctgagaggcccctggggcctccccagctgctggccagaccctggcgctgccacagtcctggcactgcccaaggccatacctgcctagccctttggctccatcctgtggatgcccactcacccctcagactcctgctgcccatgctgtggccggacttgtcagcagggggcctggtgggaggagcgactgccctgcccaaatgaactgccacagcagggacagctggaccgcagagtttatttttgtatttctactgggcctgcacactccagcccaaagggtctgtggccggaggccccacgagcaggccccagcagtcaccggctctggtcttgggccggccccggtgcccacctgtacccccacctcgcccatttggccgcgtgcactgagtgtcactttgctgcagctcgtttctttccaataaaagtttctgtgacttaaaaaaaaaaaaaacaaaaaaaaaaanaaaaancccgggggccctnnnntgcgggggggggaaaaaagggtgattgcacatgggccatcgggtcaaaagggggttcctcgagcccacagttttctgtccacaacgggggaagacttgcgcggggtccccctatataggaggggcggcgataatttgccagaaagcccgggtaacccggattatgaggn

SEQ ID NO: 591432 - DNA, 1660 bp, Homo sapiens
  misc_feature (32)..(32): n is a, c, g, or t
  misc_feature (48)..(48): n is a, c, g, or t
  misc_feature (127)..(127): n is a, c, g, or t
  misc_feature (1469)..(1469): n is a, c, g, or t
  misc_feature (1475)..(1475): n is a, c, g, or t
  misc_feature (1488)..(1491): n is a, c, g, or t
  misc_feature (1660)..(1660): n is a, c, g, or t
ggtcagtagccgccctcctaggcgtctggagnaaactaggcaattttnccgggtagagtggaggaacctgtagttttcctctccccgggccagaaagtagccaaaacgaaagagcgcccgcccaggncaatactagcccctctggagcacggagctccttccccaaagacatgaagctattggagaactcgagctttgaagccatcaactcacagctgactgtggagaccggagatgcccacatcattggcaggattgagagctactcatgtaagatggcaggagacgacaaacacatgttcaagcagttctgccaggagggccagccccacgtgctggaggcactttctccaccccagacttcaggactgagccccagcagactcagcaaaagccaaggcggtgaggaggagggccccctcagtgacaagtgcagccgcaagaccctcttctacctgattgccacgctcaatgagtccttcaggcctgactatgacttcagcacagcccgcagccatgagttcagccgggagcccagccttagctgggtggtgaatgcagtcaactgcagtctgttctcagctgtgcgggaggacttcaaggatctgaaaccacagctgtggaacgcggtggacgaggagatctgcctggctgaatgtgacatctacagctataacccagacttggactcagatcccttcggggaggatggtagcctctggtccttcaactacttcttctacaacaagcggctcaagcgaatcgtcttctttagctgccgttccatcagtggctccacctacacaccctcagaggcaggcaacgagctggacatggagctgggggaggaggaggtggaggaagaaagcagaagcaggggcagtggggccgaggagaccagcaccatggaggaggacagggtcccagtgatctgtatttgatgaggaggagccgaggccccagcttcatccagcttcaaccaatgcctggacctgtccacctgagaggcccctggggcctccccagctgctggccagaccctggcgctgccacagtcctggcactgcccaaggccatacctgcctagccctttggctccatcctgtggatgcccactcacccctcagactcctgctgcccatgctgtggccggacttgtcagcagggggcctggtgggaggagcgactgccctgcccaaatgaactgccacagcagggacagctggaccgcagagtttatttttgtatttctactgggcctgcacactccagcccaaagggtctgtggccggaggccccacgagcaggccccagcagtcaccggctctggtcttgggccggccccggtgcccacctgtacccccacctcgcccatttggccgcgtgcactgagtgtcactttgctgcagctcgtttctttccaataaaagtttctgtgacttaaaaaaaaaaaaaacaaaaaaaaaaanaaaaancccgggggccctnnnntgcgggggggggaaaaaagggtgattgcacatgggccatcgggtcaaaagggggttcctcgagcccacagttttctgtccacaacgggggaagacttgcgcggggtccccctatataggaggggcggcgataatttgccagaaagcccgggtaacccggattatgaggn

SEQ ID NO: 591433 - DNA, 1549 bp, Homo sapiens
  misc_feature (1358)..(1358): n is a, c, g, or t
  misc_feature (1364)..(1364): n is a, c, g, or t
  misc_feature (1377)..(1380): n is a, c, g, or t
  misc_feature (1549)..(1549): n is a, c, g, or t
aggaggaggtggaggaagaaagcagaagcaggggcagtggggccgaggagaccagcaccatgaagctattggagaactcgagctttgaagccatcaactcacagctgactgtggagaccggagatgcccacatcattggcaggattgagagctactcatgtaagatggcaggagacgacaaacacatgttcaagcagttctgccaggagggccagccccacgtgctggaggcactttctccaccccagacttcaggactgagccccagcagactcagcaaaagccaaggcggtgaggaggagggccccctcagtgacaagtgcagccgcaagaccctcttctacctgattgccacgctcaatgagtccttcaggcctgactatgacttcagcacagcccgcagccatgagttcagccgggagcccagccttagctgggtggtgaatgcagtcaactgcagtctgttctcagctgtgcgggaggacttcaaggatctgaaaccacagctgtggaacgcggtggacgaggagatctgcctggctgaatgtgacatctacagctataacccagacttggactcagatcccttcggggaggatggtagcctctggtccttcaactacttcttctacaacaagcggctcaagcgaatcgtcttctttagctgccgttccatcagtggctccacctacacaccctcagaggcaggcaacgagctggacatggagctgggggaggaggaggtggaggaagaaagcagaagcaggggcagtggggccgaggagaccagcaccatggaggaggacagggtcccagtgatctgtatttgatgaggaggagccgaggccccagcttcatccagcttcaaccaatgcctggacctgtccacctgagaggcccctggggcctccccagctgctggccagaccctggcgctgccacagtcctggcactgcccaaggccatacctgcctagccctttggctccatcctgtggatgcccactcacccctcagactcctgctgcccatgctgtggccggacttgtcagcagggggcctggtgggaggagcgactgccctgcccaaatgaactgccacagcagggacagctggaccgcagagtttatttttgtatttctactgggcctgcacactccagcccaaagggtctgtggccggaggccccacgagcaggccccagcagtcaccggctctggtcttgggccggccccggtgcccacctgtacccccacctcgcccatttggccgcgtgcactgagtgtcactttgctgcagctcgtttctttccaataaaagtttctgtgacttaaaaaaaaaaaaaacaaaaaaaaaaanaaaaancccgggggccctnnnntgcgggggggggaaaaaagggtgattgcacatgggccatcgggtcaaaagggggttcctcgagcccacagttttctgtccacaacgggggaagacttgcgcggggtccccctatataggaggggcggcgataatttgccagaaagcccgggtaacccggattatgaggn

SEQ ID NO: 591434 - DNA, 663 bp, Homo sapiens
caacctcaacaccaccttcttcgaccgccgtgcggaggaggagacccgcagttctataccaacgacctattctgattttgcggtcaccctgaagtttatattcttatcctaccaggcttcggagataatcgtcccatatgtaacttactgactccggtaataaaggagaaccattgggatacgtaggtgatggtctagagcgtatgatatcaataggcttcctagggtttagtcgggtgagcacaccagtatatttacgagtaggaatagacgtagacgcacgagcatatgtcgcactccgttaccgataatcatcgttatccctcatccggcgtctaagtattatatgcttgactcgcactaaactccgacggaagcaatatgaaatgatctgcgtgcagtgctctgagcacctaggattcatcttacttggcaccgtaggtggcctgactggcattggattagcaaactcatcactagacatcgaagtacacgaacacgtactacggtgtagcgtcactttccactatgtcctatcgaatgatggagctgtgatgtagccatcataggaggcgttcattcactgattttcccctattctctaggctacatcctagagcaaagctagccaaaatgccatttcactatcatatgcatcggcag

SEQ ID NO: 591435 - DNA, 2293 bp, Homo sapiens
  misc_feature (68)..(68): n is a, c, g, or t
  misc_feature (2102)..(2102): n is a, c, g, or t
  misc_feature (2108)..(2108): n is a, c, g, or t
  misc_feature (2121)..(2124): n is a, c, g, or t
  misc_feature (2293)..(2293): n is a, c, g, or t
ggggtcgaagggtcaggggccgaagcaccggccacaacttgaagccggaccggcctcttcgccccagnggctcgcggacgtagatgcatccagcgtgcgactatcccagcgcctaacggcagctggacttcgctcccgggacctccaatgggctaccaccttcgcccgcagaccccagcccccgccacgcccacacgtcgcactaggttggcccgcgcctcactggttacggggtcgacccccctagggggcggagctagagaggccacggccaatgaacgccgggggtaagcgggttagtacgacgagaagagtgacagacaggctccataaccagtagacgtagaaggcagaactgagtggcgggtacggcacccgatggctattcgagctctcgatctcggagactggagcgggccattcagaggcgcggggccgggcccggcggacgcttgttgttgtccggccgggggaggcggaggtcgctcgctcgctcgctcggctcgctgactcgccggagcgctctgtggcggtcggcggcaggtcggtcgcgagagcgggctctgtggaagggggcgaggctatgtcgcggtggcagcccggatgggccggcagggccgggagtaacgggacgtcgccgcggagcttcttcccccggatacagtgcggcccgagcggaggccgcggcgccgccctccgatcttgaagagcccgcgctgcgcggagcccgcccccgcctgcgcaccggcaccgacgcggagcgaccagcccagccagacccggcccggcgcggcctgatctaacccagccaggcaggcaatactagcccctctggagcacggagctccttccccaaagacatgaagctattggagaactcgagctttgaagccatcaactcacagctgactgtggagaccggagatgcccacatcattggcaggattgagagctactcatgtaagatggcaggagacgacaaacacatgttcaagcagttctgccaggagggccagccccacgtgctggaggcactttctccaccccagacttcaggactgagccccagcagactcagcaaaagccaaggcggtgaggaggagggccccctcagtgacaagtgcagccgcaagaccctcttctacctgattgccacgctcaatgagtccttcaggcctgactatgacttcagcacagcccgcagccatgagttcagccgggagcccagccttagctgggtggtgaatgcagtcaactgcagtctgttctcagctgtgcgggaggacttcaaggatctgaaaccacagctgtggaacgcggtggacgaggagatctgcctggctgaatgtgacatctacagctataacccagacttggactcagatcccttcggggaggatggtagcctctggtccttcaactacttcttctacaacaagcggctcaagcgaatcgtcttctttagctgccgttccatcagtggctccacctacacaccctcagaggcaggcaacgagctggacatggagctgggggaggaggaggtggaggaagaaagcagaagcaggggcagtggggccgaggagaccagcaccatggaggaggacagggtcccagtgatctgtatttgatgaggaggagccgaggccccagcttcatccagcttcaaccaatgcctggacctgtccacctgagaggcccctggggcctccccagctgctggccagaccctggcgctgccacagtcctggcactgcccaaggccatacctgcctagccctttggctccatcctgtggatgcccactcacccctcagactcctgctgcccaaatgaactgccacagcagggacagctggaccgcagagtttatttttgtatttctactgggcctgcacactccagcccaaagggtctgtggccggaggccccacgagcaggccccagcagtcaccggctctggtcttgggccggccccggtgcccacctgtacccccacctcgcccatttggccgcgtgcactgagtgtcactttgctgcagctcgtttctttccaataaaagtttctgtgacttaaaaaaaaaaaaaacaaaaaaaaaaanaaaaancccgggggccctnnnntgcgggggggggaaaaaagggtgattgcacatgggccatcgggtcaaaagggggttcctcgagcccacagttttctgtccacaacgggggaagacttgcgcggggtccccctatataggaggggcggcgataatttgccagaaagcccgggtaacccggattatgaggn

SEQ ID NO: 591436 - DNA, 518 bp, Homo sapiens
tccttccgaatggtatacgggctgggctgtgttgagttaggctggtggcctgtggcatacggtggtcccctgggtgtgcatactgacctggatatgtgagaggctgatcatcatcatttggattaacatttgcatgctttatgaacatcccggaggtggaggattttctccatggggatactattgttgagtatgaactcttgtgctctgttgttggccaacccctgatccaggcctgtccttgaagatctgatgtttctcgtactgtactttgtatagtgattcatgtcttgctataggtgtctccttgtgctctacgttgtctgtcacgaagctgcatgatatttggctggttggtgttgtcaggaagaaaagccaagagaactcctacagtactagtgtccatggcttgagtgagttgcacagcttttcgcaggatgacaactttctcaatcagatcctgaagtgacaaagggtggcttccatcttgagctttagtccaacatgcaactaatttc

SEQ ID NO: 591437 - DNA, 191 bp, Homo sapiens
ggggggggccccccccctttttgggggttttccccccccaaaggggggggggaaaaggggggggttcccttttttgtaaaaaggtccctttgggggggggaaagcaaatttttgggtttccccccaaaattttttccccccccgggggggtttttttggaaaaaaaaaaaaaaaagtttttttttggggga

SEQ ID NO: 591438 - DNA, 117 bp, Homo sapiens
  misc_feature (79)..(79): n is a, c, g, or t
tatctaagatcaatttattggaggttgtgagagctatttctgtcttgacaggagattgagtaatagaacgactgatatncgtctgactcagatagtagacttaatgtcgatgagaga

SEQ ID NO: 591439 - DNA, 196 bp, Homo sapiens
cagatccaaaacatgcagaacagagtgagccaagggccacacccgaaatcccagggtgatgacatcccagagggaggcgcatcgctgggcatgcaaagccaggttcaacaccccagtcgcagaccctcagctcctcctgcccacctctaataaacaaagcagacactcagaagcaaactctatatggctacacgag

SEQ ID NO: 591440 - DNA, 460 bp, Homo sapiens
caggcacagacgatttggacagatcatagcactataatcacaggcgtcctggcaaaagcttagaatgcttccctgtgctactttaggtctttgatgatggtgatgtacagatgggtgttcatgtgtagatgtcctttctggttgttagtatgccttctaacagacaggatcctcagctgtaggtctgtgggaataccctgccgtgtgaggtgtcagtgtggccctgtctgcggggtgcctcccagttaagctgcttgagggtcaggggtcaggtacccacttgaggaggcaggctgcccgtcctcagatctccagctgcgtgctgggagaaccactgctctcttcaaagctgtcagacagggacacttaagtctgcagaggttactgctgtctttttgtttgtctgtgccctgcccccagaggtggagcctacagaggcaggcaggcctccttgagctgt

SEQ ID NO: 591441 - DNA, 907 bp, Homo sapiens
ctcatgggccccattccaggacatttctgagtacatcattgcatgtcatccgctgtaggacactgatgaagaacccttacaggtcagggttcctggagcttctaccagtggcactctgacaggcctcaccaaaggtgccactctagaacagtcatagtggaggcactagaaagatcaagcgagcaggcgataaggttcggggaagaggttgtttcctgtgggcaacatcgtgtcgaacgaaggtttgaattgaatctacgggatgactcgtgctttgaccctatacaagtttggcccgattatggaccgggtggaagatgagtgggaactgaatgtctgaatctgggcgtttaaacttggttgtgcctagggcttatggttttggaagtggtcgatttcatgatgtgagtgtcgatctaaatggtggtcgattgacaatggtggtgagagctaccaacgatgtggagagaagtgggaccgtcgggggagaaaatggctggatgatgatctggaaatgtcttgggaacggcaaagggtgaattcaagttgtgaccctcagtgaggcaagcgtgtgacgattgatgggatagaggataccaggtagcgagaaaggagtgtcctcgaaggcatatcttgcggtggcatattgcttcctgaggatgcttgggatggcagcggggctggtgcctgtgacaacttggcggttgaactgtgtggtgaaacccacgtcccggaggcactaatggccagttcttaccaaagcagtattctccgagataccactctagagccaaccgtcaacgtttgattggccatggcagttgtcttgcctttgatcttaaaggctgcggaaaaatccgagaacacttttcaaccaaggaacagcgtgtcttcaaaaactgttatg

SEQ ID NO: 591442 - DNA, 269 bp, Homo sapiens
  misc_feature (78)..(78): n is a, c, g, or t
taggtaaagcaaaattccagtcaaagggggtcgctctcccctccctgggggcgggggcccggccctgtgttaatgttnccatgtttttaaaagcccaaaaaaaaaaaccccccaaagtttttttaaaggggggggaaaaccccccagccctttaattcccatggccccggggaactggcggggcccaaaagttttcctttcccccccccgccaaacccggaattttgtattttgttttgtaaaaatttaataaaagtccaaaaccttta

SEQ ID NO: 591443 - DNA, 370 bp, Homo sapiens
ataatttcacggacatttggaaataacattggggattatacagacaagaataaactcacttcaagctggtctgttttaataaattttcaacgaaattgtctatttttttccctcccatctgcaacagaatacatttttttcagtctttatctaaatgaggtaaagggaatcattcttatggagctcttggagagtttcaggcctgtgcatgtgtgtacagcatgaggtaatatgctataatgtctgctgtaataatttgttaaggatatgctatggatcattttagcttagggtcagactttttctttttccaaaaatttgtgttacgtttttaccttctaacaattgacactttatcttattttaagga

SEQ ID NO: 591444 - DNA, 449 bp, Homo sapiens
gccaaccacaccagcatctcctcgctctttgaaagttcctgccagcagtttgacaagctgcggaagcgggatgccttcctcgagcagttccgtaaggaggacatgttcaaggacaactttgatgagatggacaggtctagggaggttgttcaggagctcattgatgagtaccatgcggccacccagccagactacatttcctggggcacccaggagcagtgatttccctccccactactccttctccttctatgatggtaacagacgagcctagtaccatgtcgctgctgccctggtgacgccagtcttccactatcagtggcacagtcccttccttggttcttctgcagcccgtgagatggtcatgcttcctccggtgtcatgccctatcttttaatatgcttgctcagctccaataaagtaatatagttcggcagtcagtataaaaa

SEQ ID NO: 591445 - DNA, 127 bp, Homo sapiens
  misc_feature (8)..(8): n is a, c, g, or t
  misc_feature (10)..(10): n is a, c, g, or t
  misc_feature (17)..(18): n is a, c, g, or t
  misc_feature (28)..(28): n is a, c, g, or t
  misc_feature (30)..(30): n is a, c, g, or t
  misc_feature (50)..(50): n is a, c, g, or t
  misc_feature (59)..(59): n is a, c, g, or t
  misc_feature (74)..(74): n is a, c, g, or t
agggtggntntaagttnncctaccttgnanttttttttaaatatatttgntgacataanttttgtgtagtttanttatcttgtacatatgtattttgaaatcttttaaacctgaaaaataaatagtc

SEQ ID NO: 591446 - DNA, 356 bp, Homo sapiens
cccatccacatcttttgttgtgaagtgatattatactagagtactagtatgcattcgtacaaatgcttatgaaggtagcactggcatattagtctatatctcatcacctaatttaaaaacccagcacttgataatataactgacagaaatgattgtacccactgatgaagtaaatgcaaatgcagacaaaggaaaatattccttccttcaatggcgtcagtttattttttacttaagtggcatctatgtaagttagacaaactatatattaaaattggtaaactttgaatgtttctcctgttttgattcttagattatgaggaggatcagacagaataagactccacacttttgaa

SEQ ID NO: 591447 - DNA, 336 bp, Homo sapiens
gggagaaagtggtggtggggattgtggtatggaagatgtttaagggaatgggaataggaaggaagatgattaaggagggtgaggaggatgaagatgtgaatgaagtagggaaagtattgaagattgatgaagagtgaagggggagagtggaattgggaaagggagtggagggggtgagaggaggtggaatgggtaaaggaggatttttttattgaggagagtttgtgtgtgtatgagtgtgaatgatgaagtggtttgtgaatattttgaagtatgtaggtaaattgttaatgttgagatagtgaaataaattgtgattgttgtaaaaaaaaaaaa

SEQ ID NO: 591448 - DNA, 406 bp, Homo sapiens
gcttggtgatctctacaggatccccatcatgggtctggaaagaacataaggcggttatagaggtgctggggctaaaagcaaagcctaggggttagatggacatgcgaggcctggattgtttctggggcatccaggtaaaggagttgcaagcagaaagaggaccctgtgattctgcacacagcagtgccccatcttggagatgccatgagcacagacagaaggtttactaggtgggcggcacagtgacttctccccagcactccacccgtttgtcagtagtgtacacgtggaggggtcaccaagatataacggcacaggcaattaagacacagtttcaaggacggcaaccagccctgcagctcatgggaaggaaagaatccttcaggtcatgattccccaccatttg

SEQ ID NO: 591449 - DNA, 867 bp, Homo sapiens
gactacgtgccgcttcttttgcgtagccagtcgacgtgcacatcgctcaaagcaccatggggaaggtgacggtccgcagtctaccggatttggctcgtattgggtgcctggatcagcaggactaagcttttaagtactggtgaagtggatattgtagacatcaatgaccctttcattgacctcaatatctggtaacatgtccaatatgcattccatgccattggcaagattaccatggtcacgcgtactagaggcatgcagaacgggcaagcgttgtcatcgactcggaaatcccatcaccatcgtaccgaggagcgagatccctctcaaaatcaagtggggcgatgctggcgctgagtacgtcgtggagtccacatggcgtcttcacgcaccatggaataaggctggggctcatttgcaggggggaagccaaaagggtcatcatctctgccccctctgctgatgcccccactgtgcgtcatgggtgtgacaccatgacgaagtatgacaacagacctcaagatcatcacgcaataggctccgtgcacgaccaactgcttagacccctggcaaggtcatccatgacaactttggtatccgttggaaggactcatgaccacagtccatgccatcacttgcagccagaagactgtggattggcccctcccggggaaacctgtgggttgatggccggggggctctcccagaaacattattccctgcctctacatgggggccttgccaaggctgtttggcccaagggcatccctgaagcttgaaccgggaacatacctggagaagaggcattccgcgtccccactgcccaccgagtctctgggtgggacccacccctccgtgttttaaaac

SEQ ID NO: 591450 - DNA, 560 bp, Homo sapiens
gcccagaatcccgatttctaagaagtccccaaaaccccgtctccgttaatgtcacatcccctgccagatgtcagcccccgtataatgggcaaaagagctggggacattactcagttttgaaaaataggttgcagaaccctatttctaaatgagtatctatgtaataaatgcctatatacatggcaaaattggctctcactctgatcacagtgttgtaggggagcagctaacgattcctcaaagttcctcatggaggtttctgccataaagagcgtaagagccgggtgcggtggctcacgccggtaatcccagctctttgggaggctgagacaggcggatcacgaggtcaggagatcgagaccatcctggccaacacagtgaaaccccgtctctactaaaaatgcaaagaattacccgggcgtggtggcgggcacctgtagtcccagctacttgggaggctgaggcaggagaatggcgtgaacccggtaggcgaagcttgcagtgacccgagatcgtgccgctgcactctagcctgggcgacagagcgagactccgtctca

SEQ ID NO: 591451 - DNA, 132 bp, Homo sapiens
gtcacatgcatctacagagacagagaagaatagcggagtacgtggtggcgtgactatgcatgtagctgggactgctgtccacagagaacaggaggatccactagttacacagctgccaaaggtgtgggtcga

SEQ ID NO: 591452 - DNA, 683 bp, Homo sapiens
tccctctactatttgtttaaccaaatcaacaacaacctatttagctgttccccaagccttttcctccgacccccataatcaatcctccctcctaatactaagctaccgtgactcctacccctcatcagatcatggcaagccaaggccacttatccagtgaagcattatcaggaaagaaaacgtctacctctctatactagtctccctacaaatctccttgattataacattcatagtcacagaactaatcatatttgatatcctcttcgaaacacacttatccccaccttggtatcatcacccgatgaggcaaccaggtcagaagcccgaacgcaggcacatacttcctattctacacggcctagtaggctcgcttcccctactcatcgtcactaatttacactcacaagaagcctaggcgtcacgttaaacattctactactcactctcactgcccaagaactatcaaacatcctgagccaacaacttaatatgactagcttacgcaatagcttttatagtgaaagatacctctttaggagactccacttatgagatccctaaagaccatgtgaagccccatcgtgggtcaatagtaattgccgagactcttgaaataggggtatggtataatacgctcaactcattttaaccctgacaaaaagatagctaaccctgcttga

SEQ ID NO: 591453 - DNA, 261 bp, Homo sapiens
tgtctctacaggatcccccatcactcgatcgcggagaagatgtggttaggggattcgggctggggcttgtgtgccctctgtatctgcgctctttcacgttcgctgctttgtgtgttctacattgccgggccctgtcttcgcggccagcatttctactccgtggagagcatggcatattgcgagggctgctacctggccaccctggagaaatgtgccacgtgctcccagcccatcctgtaccggatcctgcgggctatgggg

SEQ ID NO: 591454 - DNA, 331 bp, Homo sapiens
ttatgtgtgcatgtatgcatatagatccatgaagcaggcgtaacacagtacaatcctttggttgatgcgtgtgatacttgcctctctattctatttatatagccaatggtgactaaattgattttacagctcactaacagatcttgacctacagtttgaaacacagagtactgaagagtctggtaacctattatttagaacagtgcaaggaatagtatcatgggtagagttgtgcgttgtacactacctttgatagtcatatcgttaaaccaaaaacaatttctgtagtgacattgaaacacataaagacttgatatatcctgacagcata

SEQ ID NO: 591455 - DNA, 140 bp, Homo sapiens
atccgggagtgttgagagagagtgcgcgcgcagagagagagatcagagaacgggcatgccagctgcccgggggcttcacttgcagtcatcacctgtacaactcttcatattgacctggccatctccatcgatgtcagcct

SEQ ID NO: 591456 - DNA, 83 bp, Homo sapiens
cctttttctttggggggacctttttaagaaaccaaaagggcccgggggattttttcttggaaaaaaagtttgaaggtttttta

SEQ ID NO: 591457 - DNA, 607 bp, Homo sapiens
  misc_feature (355)..(355): n is a, c, g, or t
  misc_feature (362)..(362): n is a, c, g, or t
caccctatttaatacccgaataatgattattgcacatatgtcccatgtatatgtagccagtctccaggacgtgacttggagctcactataatcatgtagagtcattgatatcaagtcagaaaaattgctatggatttagaaacagaatagtcttatttacatattccctcgacttatcacaaaatagtttaaagttgtttctaacaattgtgcgtacaacacaatattataaacacatgagtagccaggagcagtgaaagtgaggcgccagtcctgcgacagagattaagcagatgaaggggctgggatggtggtggcaggaggcttaaggaacagaatccccaagtgatgtctntcatagnccattgccacggcaggccatgcaggctcttttcaactcactcttagcggtcttatacttcttgggtcagctggtatttaaagactcaccttggacttcattctcacctgactgtgcactttttttggctatacatagggagatggactatataggtagagaaatatatttcttacaattggaactacttccttggctgggtggatatagccatgcttgtgtgtctattcccggtgtgtgcgggtg

SEQ ID NO: 591458 - DNA, 693 bp, Homo sapiens
  misc_feature (693)..(693): n is a, c, g, or t
ttgcggtcgcggtccggactttcggcggagggtccggccccaggacagttttaccgcattccgtccactcccgattccttcatggatccggcgtctgcactttacagaggtccaatcacgctgacccagaaccctatggtgaccgggaccttagtcctcggagttcagttccagggcggagtggtgattgcctcagacatgctgggatcctacggctccttggctcgtttgcggaccatctctcgcattatgcgagttaacatcagtaccatgctgggtgcctctggcaaatactctgatgctcagtatcagaagcatgtgatcggacagaaggtgattgatgacgagcttctgcgtgatggacacagctatagacctagagctcttcattcctggatgaccatggccatgtatagccgacgctctaagatcaaccctatgcggaacaccatggtcatcagacgctatgctgatcgacagagctctcttggccatgtagacatgcatggcgacatctatgaagccccttccttggacactggttatggtgcatacttgggtcagcctctgctgcgagaagttctggagaagcatccagtgctgagccagacctaagtccgccacttagtagaacgctgcatgcgaatgctgcactaccgacgcgcggtcttacgaccagttttccgacctgtn

SEQ ID NO: 591459 - DNA, 542 bp, Homo sapiens
acccaaaagtcttggaacatttgtccatacctccctcattgtttgaatagggtacatatattaatgattcctgataactaggaaaagttatttttatcaggggtaagaggaggggtagaaaatttactttctagtatatcacttttgggatctatggctgttaaaaattgttttcattgttatttattccattttattttattgaggctatttggaagttactagaaattatggcataattccagcactttgggaggccaaggcaagaggattgcttgagcccaagagtttgagaccagcctggacaacagagtgagaccctgtctctacaaaagaattttgtaaattagcctggcttggtggcacatgcctgtagtcccacctgcttgggaggctgaagtgggaagattgcttgagcctgggaagtcaaggctgcagtgagttgttgagccatgattgcaccattgccctgcagcctaggcaacattgtgaaacctatcaaaagaaagaaaagaaaaaagaaaagggaaaaagaaagaaag

SEQ ID NO: 591460 - DNA, 788 bp, Homo sapiens
  misc_feature (191)..(191): n is a, c, g, or t
  misc_feature (193)..(193): n is a, c, g, or t
  misc_feature (698)..(698): n is a, c, g, or t
  misc_feature (704)..(704): n is a, c, g, or t
gtttacttgtcgcgttgagctgtatccgctatagctcaaattcagtcaatttctacttataatcttagctgatagatgctgttcagatatgggttccatggatatatgtgattacgactgtcctacttcgatgaggtggagtacttttgcatagtgagtggatacgctatcttgatttatttgagaagagntnatgcatatttaaaatgttgtttgcttccagaattagctctttgtttgacatatacttcttatcaatgtacttgcttagcatcatgttagtaactctctgtattcgtattagagatgtggccggtttgtggcatctgagttgggagtgatcaatttaagagccttcgcttagtaattgtgctgggaaggatttctgtatatgaagaatggcgcaactgtccctatcatgctaatagattaaattactctgctttcacgcctgtattgatagggaagtttgatttggggctatgacattgcctaaaagacggcaacatgttgcgcgaaacggactgacttaatattgttatatgcatggaggtattttataacaggtaggggtttcgataaatcttcgaataattattgggttgagattggttaccgacatcatccccgtgaataggtgagtattattctccgatattaaagtgtcttgtcccgatagggtctaagcaaattaaggnaccccnggggtctcataactgctgagaaccacggtttttttggggtatatacactgggaacacatttctattgttgtttcagggcgtttc

SEQ ID NO: 591461 - DNA, 846 bp, Homo sapiens
cacacgcctctgggctgttgtgcgcgtgtgtcttttgcgccgacacggttaaggaccgcgcgcctccaagttccccgtaatatgcccattccgctggaagatgatgagttctcgcctggataatgtcgctaagcttcgggttagggtgtcccgccccattttcgcggggactggcccaagtgtgaggttgccgccatgttggcaactgtttgcaaaaccagaatatggggcacctgcactcccttttatgacgccttgttttatgccagccccacccggtggtaggctcgtccgcgcccccagatggggcagccccggcctgaccaggagatcctcccggcccgtagtctctcaagggagccgagaggcctccaccaaggtagcgagaaagtggaagaccccaccacagctagaaaaagagatttgtacaaaaaagagtttcacccagggggatctctttcgttaagttcaataaagcgtgagtgactgggtaactcaagcaaagtattgtggtgaaatagccccccctgacccctggtaccaccagtagcacccttcaaccctctgacatgataacgcttacaccaataccaatcaacacacaccctttccactaagattgtaatttcattctcaatccatgatcaaatatgagagttattcccgcatatcgcaactctcgcttcacaccaatccaaaaaagaattcaggcccgatcacgcgtggctgcccgccctgttcaccctacgccttcgggagcgctcgaaatcggaggatccccctgaacacccagagttcccctgaaacccaaacccgcccgggccaccccataaaacccggctttcc

SEQ ID NO: 591462 - DNA, 323 bp, Homo sapiens
  misc_feature (19)..(19): n is a, c, g, or t
  misc_feature (122)..(122): n is a, c, g, or t
  misc_feature (125)..(125): n is a, c, g, or t
  misc_feature (201)..(201): n is a, c, g, or t
  misc_feature (274)..(274): n is a, c, g, or t
cagctctgcaggggcccgngagggtcctggcaactcctagctgcaggatctcaagagacattatcagctcctcctgtgaccggaggggaccgtggtgtttcaacaaaaaggaaacccctgcnganggctttttttacttcagctgtgaaacacggtccaggagcctaccagaggacttggtttcccttttccttccttgcncctggagacagtccgtccagaacaggggccctggggtggcccaggggcggttgacctgccacagctggagcanaagtcgcttccaggttcagggcttctcctctgtcctgactcccaccatt

SEQ ID NO: 591463 - DNA, 130 bp, Homo sapiens
  misc_feature (11)..(11): n is a, c, g, or t
  misc_feature (19)..(19): n is a, c, g, or t
  misc_feature (21)..(21): n is a, c, g, or t
  misc_feature (37)..(37): n is a, c, g, or t
  misc_feature (39)..(39): n is a, c, g, or t
  misc_feature (44)..(44): n is a, c, g, or t
  misc_feature (48)..(48): n is a, c, g, or t
  misc_feature (61)..(61): n is a, c, g, or t
  misc_feature (79)..(80): n is a, c, g, or t
  misc_feature (83)..(83): n is a, c, g, or t
  misc_feature (90)..(91): n is a, c, g, or t
  misc_feature (96)..(96): n is a, c, g, or t
  misc_feature (113)..(113): n is a, c, g, or t
  misc_feature (121)..(121): n is a, c, g, or t
  misc_feature (124)..(124): n is a, c, g, or t
caaattggccnaaatgggncncaaccataaaccctgngngatanctcncgcgaggatggtncgatttgcgccgctgctnnctntgatttnngaagnttgatggttgaagattnactaaaanacnaattaa

SEQ ID NO: 591464 - DNA, 137 bp, Homo sapiens
tgtctgagacccgatgatttcacagtttaacagttttttattaaagccatttaattttctatttcattttcctttaagttctgggatacatgtgctgaacgtgcaggttagttacataggtacacagggcccgagag

SEQ ID NO: 591465 - DNA, 183 bp, Homo sapiens
ttaattagcaggtacaattttataacttgctttcactcctaaataatagtacaagtgtaatcctaaaactgaactctgtcaagttacattataaccttgagcagttttcatctctttaggcctcagataccccatctgttaaatgcacatgacacttacaagattataatgacaattaaatga

SEQ ID NO: 591466 - DNA, 173 bp, Homo sapiens
gtcgtcccgccaggtcccctgattccggcccttattccgtgacactcagtccctgtatcccaggtcggccctgctctctaagcatcacttgctttatcccattcaaaactcacactaccttgatgcgggtcaggtcaccgcccagctgcatccaccgttgcctgctgcctaga

SEQ ID NO: 591467 - DNA, 192 bp, Homo sapiens
gctcctaagacctcaagcgtagtgggtacgatgagtagatgtgctgtggtgaagagtatatgggtgtggtgtggaactttatagtgtagagctgatattatgagaaggggcggtgatcgggaggactattgggcggggctttgtatgattatgggcgttgattagtagtagttactggctaaacgcctctca

SEQ ID NO: 591468 - DNA, 2356 bp, Homo sapiens
ccacgcgtccgggaggcgcccgcggctgcagagctgcagagcggggtctcccggccctcggcgtcccagccctttgcacatagctgggccagacaacaactcattctctcggcgcggccgtcagggccccagcggtcggcaagctggctccccgagtagccaccgggacccccgagcccaatggcgggggcggcaacaaaatcgacagcaccgtggagatcgcccccggcgccaatggacaggtcgggagcctcggagatgcggtcccccccgagcagctgcagggtgagcgggagcgccggcgggagggggagggcgacgcgctgggcagcagcctgtcgctggccgcgcccccgggccccctcagcttcgaggctctactggcccaggtgggggccctgggtggcggccagcagctgcagctcggcctgtgctgcctgcccgtgctcttcgtggcgctgggcatggcctcagaccccatcttcacgctggcgcccccgctgcactgccactacggcgccttgccccccaacgcttcgggctgggagcagccccccaactccagcggcgtcagcgtcgccggcgcagccctagcagccagcgccgccagcagagtcgtcaccagtacggacccctcgtgcagtggcttcgccccaccggatttcaaccactgcctgaaggactgggactacaacggactgcccgtgctcaccaccaatgccatcggccagtgggatctggtgtgtgacctgggctggcaggtgatcctggagcagatcctcttcatcttgggctttgcctccggctacctgttcctcggttaccccgcggacaggtttggccgtcgtgggattgtactgctgaccttggggctcgtgggcccctgtggagtgggaggagctgctgcgggctcctccacgggcataatgactcttcgattcctcctgggcttcctgctggctggcgttgaccttggtgtctacctgatgcgcctggagctgtgcgacccaacccagaggcttcgggtggccctggcaggggagttggtaggggtgggagggcacttcctgttcctgggcctggcccttgtctctaaggactggcggttcctgcagcgaatgatcaccgctccttgcatcctcttcctgttttatggctggcccggtctgtttctggagtccgcacggtggctgatagtgaaacggcagattgaggaagcccagtctgtgctgaggatcctggctgagcgaaaccggccccatggccagatgctgggagaagaggcccaggaagccctgcaggagctggagaatacctgtcctctccccacaacgtccaccttttccttcgcctccctcctcaactaccgaaacatctggaaaaatctgcttatcctgggcttcaccaactttatcgcccatgccattcgccactgctaccagcctgtgggaggaggagggagcccatcagacttctacttgtgctctcttctggccagcggcacagcagccctggcctgcgtcttcctgggggtgaccgtggaccgttttggccgtcggggcatcctgcttctctcaatgactctcacggggattgcatccctggtcttgctgggcctgtgggattatctgaacgatgctgccatcacaaccttctcggtcctcggactcttctcctcccaagcttctgctatcctcagtaccctccttgctgctgaagtcatccccaccactgtccggggccgtggcctgggccttatcatggcacttggggcgcttggagggctgagctgtccagctcagcgcctccacatgggccatggagctttcctgcagcatgtggtactggcggcctgtgccctcctctgcatccttagcatcatgctgctgccagagaccaagcgcaagcttctgccagaggtactccgggatggggaactgtgccgtcggccttccctgctgaggcagccacctcctaaccgctgtgaccatgtccccctgctagccacttcctaatcctgccctctaagcagcctctgagcctggtgggaggctggccatttagaaaggtgacggagggctggctagcaagatagacggagaggcaaggccaccctgtacatacaaaaggctccaaggcgcctcacgccatctaggagagctcagagtgccattcccaaccccctctcctccccgctgctttctgttcacttcatcagcaagagtcaggacggggatagcatctcgctataaccgttaggtctgggatccatcctatgcccaaagacattttcccagaccttgctctttctcgctcttcattctgtttcaataaaagacattttgaataaatgagc

SEQ ID NO: 591469 - DNA, 259 bp, Homo sapiens
aacaagctgttgctgttggcaaaatgtctggcccagcaggctttggacctggtcctgaacctggcaaaaaccctggcaattttgcactgtgtggctcagcccctgctcctcgccctattttgccagcagggcacccgcaaccttttgccctttttgcccctccctgaaggatggttttttcatttggacacccctggaagcaaatcctaggtttttttcccccaggcaacctgaattaaagtttacccagcctttgtgg

SEQ ID NO: 591470 - DNA, 292 bp, Homo sapiens
tttttatacccgttgggggggggggggcccccccccccccagggggggttttggggttaataaaatgggggaccccccccccgggcccccccaaggtttttaccccccttacgggatggggggggggggggggggggcatggaaaaagccgggggggtttttgttaaatggaaaaaggcccccggggtttttttttttggttaatttgttttggtttttggggttgttttttaggggacgggaatgacccaagggcgggaaaccccaggcccaaaaaaaaggggggttttta

SEQ ID NO: 591471 - DNA, 1165 bp, Homo sapiens
gacgtggctggtcaccaccacgccgacgagctcacagttcctctaccccaatggtgtgctggccagcgaggagcagtgagtttcgccgaggtgcttcgtcaatggccctgcgaggatttacacaagcatgaaccacgctctgtgctgcggtgctgcggcctgctgcccgaaaggctgcctgtcgtaacgctgaagcctgaatgcatgctactgctgtgtgctgtgcgcctgtgtggtgcagctgtggtgtgtgctgcctgcaggactgttgtctgcccatatctgcgttgctctggaccacccttgttgccacatttaccacgagacactggacacatggcccaagcacactccacaaaggggacggacatggttcttgcagtcgcgccccatggcctagacatggcaacattgtggcatttgcgtggcaatccaaaaggtggaaccagatagccccaccatgaactgtgatgcacccccgaacccggttgacccagaagtgcatctccggtgtcagaaggaacggccctcggcgccgagaaggcacgcggcggcccaaatatcggaaccaacgttgggcaccagagcggcaccgacgaggaacgccgggcaatcgatcacaacgcgggcagctgcacgcatcagcgcccaagaggacctggggcactttggcacggcctcaagagcccccgggcaacattcaaaggcacccaggagaccgattccccgacgaaagtgtatgggcccagggacacgaagcaggcccggcccacagacgggcccgtctggggaacacgcccagccccacagttcaccttccgaggccgaggcccaccctatcggcggcacagaacgcgcacgcgcagccacgactcgctcgacgcaccccggaaccgcgcccatttccaaccaccgcaaacgcgttcaccgccggcataactcgctccccggagggcacctgccacatcgggtgcccggggattccccacccgccgcgtggcctggcaacaggtccccctttggcacatcttggccacgtccgcgcgaacaggcccactacctgtaatttagcgcacatggcccatacagcctcgctcccaaaagtcgccctactgtcaaaaaacgaggtgggtgtccccgcattccacactgggagcccccccaa

SEQ ID NO: 591472 - DNA, 173 bp, Homo sapiens
ggtgagccgccagcatggatgacaatcttacaagggcttgcgggtagagcagcttgacaagaagagcaggaaaaatgaggttcaaggcagccttcgacaatcttcgtgctgggcgctgaggatggcttcattcgaccaaggggctgggcaaggtaatgagggtcttggccaga

SEQ ID NO: 591473 - DNA, 507 bp, Homo sapiens
  misc_feature (488)..(488): n is a, c, g, or t
  misc_feature (505)..(505): n is a, c, g, or t
attcggcacagttcaagaaggagttccctagtataactgggattttgaacatttccaatgaggagtgggttgtaagggatgatgatacaacatcacaaataaccatataaatcttagcttccaaaagatctttttaaatctggtttttcattatattagatgtgtgtcctcaggaaagtcactcatcttccccgagtcatacttttcttctctgtaaaacttggataatacataaaatagagtttgtattagtccattcttacattgctataaagaaatacttgagactgggtgatttataaagaaaagaggtttaattggttcatggttctgtaggctgtacaggaagcatgatgctgcctctgcggcgacttctgtgggaggcctcagggaaacgtattatcctgggtggaaaggcaaagtggggagccagcacttcacacatctgggagtaggaaaggggagggggtggaaggggagggaggtgnccccatacttttaaacntt

SEQ ID NO: 591474 - DNA, 239 bp, Homo sapiens
gtcctggttattcacaaacactgatacggctctcctaaacttccgactgtgtcccagtctgtggtttccatggagtgtgaacacgaagttaagagtgatggctgcttcagagcccctgtgcccatgtgtccatccagactccaagtggagtgtagggctcccatgggcagagacggggtggtgatggggcatgaccctgacccaggcatgtcctcaccattggaacagggacatcatga

SEQ ID NO: 591475 - DNA, 495 bp, Homo sapiens
atatgcagtatctttaattgaacctcacagaaaggttgcttggttgaacaagaaacaagtgtgatttttaatgggggttgtgtagacacccttatcatggcgaacacatatgaatcgtcagctgacctacaagccaagaaccttgttcctggacggattgggagactttaatagcgccatctatacgctgaggatgctctgtgtagcatcacctgttttgctcatcttcgcaggagaaagagacgtcatcaccatggactattgcatgtttaatacaaaagtggagtaatactctataacaccggttcaccgctgtggtgttgtctagaggtaatgttaccagaagctttacaagtgcggatggcagatcagtttgccagttctggtcagaaagagtgcataccgtccatccagaggatgttcgtcatggcatccaactgtgtgtgaacttctgtcataaagagttgcaaaacgcaggatagttgacaagatcat

SEQ ID NO: 591476 - DNA, 126 bp, Homo sapiens
acccgggcctttctgcctgtgtgatctggctcgtcacctgcttggtgtttgtttttaattttattggactgtggttgacttacagtgttgtagtagtttcaggctacagcacagtgattcagttat

SEQ ID NO: 591477 - DNA, 86 bp, Homo sapiens
  misc_feature (20)..(20): n is a, c, g, or t
  misc_feature (86)..(86): n is a, c, g, or t
tttttgagaggccgggcggnaccacctgcatctggtttattgttctgttttctccaaacttagcagagcagaatgtgccgcaccgn

SEQ ID NO: 591478 - DNA, 186 bp, Homo sapiens
tcgctgccacggtcgacctctcagagcgatcccccgactaaacccatggcgcatcatcacggcccaattcgcccagcgccatctacccccgcacaaggataccgagcagcaaacgccagcgaactaagcaaagcccagcctatccagactaaccttgcctgctgcaccttcctactgcatcgtgcc

SEQ ID NO: 591479 - DNA, 126 bp, Homo sapiens
attgtcactctcatttctctttggtgcctttgtcgctaaacaattgaagaacataaaacaaggacagctggattggaccattaggaggaagtattaaagaggtcttgtaagggcaaaaaggggaat

SEQ ID NO: 591480 - DNA, 290 bp, Homo sapiens
tttcaattccactgtattccattcctttcctttcctcgccactctactccattccattccactccattccatttcactcttcctttcctctccattcggtgccattccattccactccattccattccattccattccactccattccactccactctattccactgcattccactccattctaccccaatccactcccctcctttactttctattccactacattccgtcccattcgattccattccactccactccattccgtacaattccactccgatctgtcgacg

SEQ ID NO: 591481 - DNA, 215 bp, Homo sapiens
acggtactctagacggactccccctaggtggaaccgcgactgtctacgtgtggacacacgacgtctactgtggacaacgcgaccgtctacgtgtggaacacgcgaccgtctacggtgggacggtgtgttggtacgttcatgcttgtaacttccaaccaccttgtgaagacttgacggtgggacggcttggctccacgctcaagcgtttgacggct

SEQ ID NO: 591482 - DNA, 881 bp, Homo sapiens
  misc_feature (1)..(1): n is a, c, g, or t
  misc_feature (652)..(652): n is a, c, g, or t
  misc_feature (881)..(881): n is a, c, g, or t
ntcagggaaaagtgaaatgactcctcactgcatcagtgtgaaacctttggtaccacataactactatgataacgccggcctgctctcgtgaaaaacctgataccacaacactgatggtccacattgtgcccccgctgtactccctggctgttcacctgtggccctcttggcgcaatgaggcggtgccgatgatcctcataaaatacaagacgctccaaattatgaccaacatctacctgctcaacctgtccagtttccgacctgctattcctccacacaccttccattctgcatccactatgtcagaggggcataactgcgtttgcgcacatggcatgtgtaagctcctcttcagggtttatactcacactggattgtacagatagatctttttcgtaatcctgctgacaataaacaggtacctgcccattgtccatgctgtgtccataccttccagcccggactgtcacttttggtgtaatcaccatcatggccaactggggcctgccagtgctgacaactatgactgcattcatcttctattagactgaacatttggcgcaatagactctctacactgctctttaccgagaagatacactatatatctcgttgcatatgcacactctgtatatgaccatcatccgtctangtctccatctgctgcgtatggccatctgccacacatgaactatcagcacgactgctgggtgccccagtacaaaaaagactatgccatacggctcattttagtactatggcggagatactactttctgcaccgctacatgagcgttactttgttattctatcatgcatgtatttgaaatgactgtaacgagcgagctctgccctgttatctgaaaacaggtatctctttn

SEQ ID NO: 591483 - DNA, 388 bp, Homo sapiens
atttactacccatagtctttaggttcctttccatctttccttccttcctttgggctcctcttcttcccagataaaaagctgagaaatttagagtctcgccctgtcgccaggctggagtgcagtggtgcaatctcagctcactgcaacctccacatcctggattcaagccatcctcctgcctcaggctcccgagtagctgggactacaggtgtgtaacaccatgcctggctaatttttgtattctttagtagagatggggtttcaccatgttggccaggttagtctcaaactcctgacctcaggtgatcctcccaccttggcctcccaaagtgctgggattacaggcatgagccacctatgcccagcctaagtttcttgacaaagaaaa

SEQ ID NO: 591484 - DNA, 254 bp, Homo sapiens
gggaacagcagcacaatggacctgacgctcttcgcagctgaggccatcgccttaaccgccagctatctcagcacgagagaacgaactagcagaggagccagaggcactagctgatggcctctgctccatgaagctttccctcctgcagtcacgctggcccggagacgcttggccaggcaggccgtgtgaagacaggagccgccaacagcactctaaatgctccatacacttataggcctagtcgcaggatttcc

SEQ ID NO: 591485 - DNA, 258 bp, Homo sapiens
ccccgcgagttccagcgcctcgaaaagcacctggacggggctgcactacctgtgcaagcacacctccacgggcgagtcgatgaagatcaaggtgctgaacgcctccaagaaggatctggtgcgcgacttcaaaaccgcgatcgacttcgaccagagcaccctcttcaagaaggtgtacgaggaggagttcggcaccttcggcggctcgccgatcggcgcgctcatcggcgactatgagatcggacggcatcccgagga

SEQ ID NO: 591486 - DNA, 133 bp, Homo sapiens
attgcacacattccccttcaccttcaggtaccggctgtgatacatgtggcgatctgatctatcttagattcactggtatctatctgtgcagcctggcgcacaaatcctccaattccatcatacctatgggacg

SEQ ID NO: 591487 - DNA, 867 bp, Homo sapiens
ggaaaaaactcgtctcgtaattttgtcttctccgcacgactgttagcagagggctatgcccgacggccgttctctctcctgtggcgataaatggcaactcttaagggaaaaactacatgtgcgtccacggctctagcggcgagaatgagcggcaagagttccgaaggataacgatcactgttagatgggtgtaggatctaagttgtgttattggtagtgtgcatgagtgaagatatttgctgttgacgttctctggtctgactgaactttgcgtctatgatggagtgtctcggaagataaagcttaaaggagaaatgatggatctggtgcatggaagcttatttaactatacaagaaacaccataaaattgggtacgcacgaatacagcggagttaactatctgcagaaccgggccaatttcctaaggactatgcaacgatgggtttgacctggccaggatgcccgttcaaggtgtgaagggtccgacaaggtcggccacaactcttgtgtgccccgaagatgaatgtttaccccggtgcaacaaagagtctcactaaactttgccttcggggaaaccggacacacagtccgaggtacccttgatgtggcgagtcggtacacatcgacgcgtattaccaaacccccagctggacatttacttaacgataagtgataaccatgaggaaagctaaagttgggataaggcgcagaacaaataagaagaatgaatatggaagattcggatggtaatatgtgggaattgtagggaagaatagtaggtaaccattacaatgggaatagaccaaaacttggaaatatgcactacaagataggtaggcaaagagaattgaataatagaggaagat

SEQ ID NO: 591488 - DNA, 116 bp, Homo sapiens
gaggatccccgtcactcgaaaccctgtcatcaaaccctgtcatcgaaaccctattagtggtttaacaatccaacgcttggtgaattctgctgtcagggtttgatgacagggtttga

SEQ ID NO: 591489 - DNA, 286 bp, Homo sapiens
aaaaccccggaaaaccccccccgggtttttttttgggcttttttttccctttttgggggggggggaaaccccggtttttttttgggcccccccccttttggggaaccccaaaaaccggggggtttttttccggggggggccccccccctttttttttgcccccctttttttaaaaaaaagggccccccccttaaaaaattggggggggggggggggggccccccaccccccccccttttcccccccccccggtttttaaaaaaagggtttgtttttttttttttta

SEQ ID NO: 591490 - DNA, 615 bp, Homo sapiens
  misc_feature (15)..(15): n is a, c, g, or t
  misc_feature (162)..(162): n is a, c, g, or t
  misc_feature (203)..(203): n is a, c, g, or t
  misc_feature (245)..(245): n is a, c, g, or t
  misc_feature (253)..(253): n is a, c, g, or t
  misc_feature (314)..(314): n is a, c, g, or t
  misc_feature (333)..(333): n is a, c, g, or t
  misc_feature (359)..(359): n is a, c, g, or t
  misc_feature (399)..(399): n is a, c, g, or t
  misc_feature (421)..(421): n is a, c, g, or t
  misc_feature (424)..(424): n is a, c, g, or t
  misc_feature (441)..(442): n is a, c, g, or t
  misc_feature (450)..(450): n is a, c, g, or t
  misc_feature (472)..(472): n is a, c, g, or t
  misc_feature (489)..(491): n is a, c, g, or t
  misc_feature (493)..(493): n is a, c, g, or t
  misc_feature (503)..(503): n is a, c, g, or t
  misc_feature (509)..(509): n is a, c, g, or t
  misc_feature (540)..(540): n is a, c, g, or t
  misc_feature (557)..(557): n is a, c, g, or t
  misc_feature (566)..(566): n is a, c, g, or t
aacaagtataatttncaaatattacaaggatgatttccaaatctcatttgacctctttcccaactgcaaaccctcatttagtctttagtgacaacaaaaaccaaaaacaaccacccacacatctcatgtgaaattctggtggcttagaaatccctgaaaaancagtaaactgattattgaaaagctcagaacactggcaaggnttaagtgcaaagtatttaatagaaggccacaagaactgtttncctaagangagctaggaactacaaatgtcatttagtaatgcattgaaatggcattgcctagtgtgagtnttgcacagaaacttcaggncacttcttctggatctattattttgnataagcttccactatcataacatggccctgccctccaacngcacacgcgcccctaagccatnctngcctccttctttccgtnntctgtcgncagcagccatgaccaacctgcngccagtggctccaaatnnncngtcccagggncagacntccaccccagttattaaacttctccaaaggnggcaatccaaccttggntttcctacncatgtagttttctgcaaaccaatcagaatccatggctttccaatttgcc

SEQ ID NO: 591491 - DNA, 261 bp, Homo sapiens
  misc_feature (231)..(231): n is a, c, g, or t
  misc_feature (243)..(243): n is a, c, g, or t
agagaacaaaaaaaaacaaaggattaacaaaatgaaaaattgatttttttgaaaaagtaaacagcattgataaacctgtagctagactaaccaagagagaagacccaaataaagaaaaacagaaataaaaaaggagacattacagctgataaccacagaaatacaaaagattatcagacatgattataaactacaatacacttaacaaactgggaaaatctaggaaggaantaaataaatttntgaatgtacaatctaccg

SEQ ID NO: 591492 - DNA, 271 bp, Homo sapiens
gatgctacatcctgcactgacgcctggaatggtggtactgcatagaggaatgcataatatagatgcgatagagccgtggtcagcagtggagaggtggtgaattcttcactgacgcctgagcttgtcgtgctgacaggtagagagtgttgtaggcagatgatctggggctactatggacagtggtcaatctctcactgaggccaggcgtagtggtactgccgggtaacgctgtcgtttccattgagcctgaactgatgggtagaggctcaaa

SEQ ID NO: 591493 - DNA, 676 bp, Homo sapiens
acaaccactcctcggagttcactgtcacccgcaactacctagactggctcacgtccatcccttggggcacagtacagcaactgagaaccttgacctgtgcgcgggcacaggcagtgctggaggaagaccactacggcttggaggacgtctaggaaacgcatcctggcagttcgattgcgcgttatgccagactccgcggctccacccagggcgacgatcctctgcttctatggcccccctggcgtgggtacagaccagcattgctcgctccatcgcccgcgccctggaaccgagagctacgttccgcttcagcgtcggcggtgcatgactgacgtggctgagtatcataggggcctacaggcggaccgtacgtgggcgccatgcccgggaagatcactccagtgtttgaagaagaccaagacggagaacccccttgatccgtcatcgagcgaggtggtacaagatcggccgaggctaccagggggacccgttcgtcggcgactgctggagctgcttggacccagagcaggaatgccaacttcctggacctgctacctggacgtgccccgtggcacttgtccaaggtgctgttcatctgcacggccaacgtccggacaccatccccgagcgctgcgagaccgtatggcgatgatcaacgtgtcgggcgtcgtggcca

SEQ ID NO: 591494 - DNA, 1031 bp, Homo sapiens
atcggctgctgcagactctttgttcgctttctgatgtgtctgtcttcgtccggttcatcgttctctgctacactgctggttccttcctcgcgattccgtttccgacgtctcttcattgtcgcctagccgtgtgatgtgtgcctccatgccggctcgcccctgcatggttcccggttggtccctgtgcgtccgcgaagatggtcggtcctcgtccaattcacattccggtccgctgtgcccggtctgttgttgtccccccgcccagttgtgtaagaaatttttccctctccacgggggtcccgaaccacctttttctgtttgacatttcgcccggacttcctccattccccgttgtcctggcagagccctatgtccagggttattaccctttttgaaaacacagaaggtgctccccccgtgcgcatgctccccaggagtttcggcattgtgctggggaccaccttctcgttgtggttcgtgggcccccgtccgcccgaagtaccagaggtttgccctttgcggggcaccccgctttgcagaaaggcgccttatgtccctaatccttctgaatgtatctctctaccatctggcgccccaagatcactccagggcggtctcccttttctgctcgcccctagaatcgagtttatggaaactgcaagagcggccgcaaaatatttttcggaagaaattcctcctgccccccgatgaagagtattcccgattctgcagttcttcggttaatcgcccacttcttcctcggatatttataggggtccccacttaaccgtggcataagggagctattcctttatattatttggagacccagcatcacggattgtgggccacactctcactaaattgggggattttctaatatagagaaacacaagccaccaccactggggggacaatatataggaggccgaacagcgtcccattgatccccctaatatgatttaaagtttttaaaaccccttttttgggggccaaaaaaaaaaattttcccctaatcctaaacccaaaaa

SEQ ID NO: 591495 - DNA, 205 bp, Homo sapiens
tagaggatcccacttccagactagatgatgcatcttggtttctggacactggtttgggttggggagttctggttggataggttccttctttatgtctttaccaccatttagaatacgtggccctcacaaaagaactgattaggatgattcaaagaaaagccacaatcatccacattgtgtatcatctcaaagtatatttgacagg

SEQ ID NO: 591496 - DNA, 310 bp, Homo sapiens
  misc_feature (187)..(187): n is a, c, g, or t
caaaaaaaaaaaaaaaaaaaaaaagagagagtcaattatgagtgcagtgattgtcaaaaaagtttattagaaaactagaagctttccatttagtaggcagcaccagtggatgtaatgaaaatgataaatcattctcaaattatatttgttacacattagggtattcattcaggagaaggaccctacngatggagggaatgcaggaaagctaagaagaatcacacctcattgcaggtaaaaattaaaatctgaaagtccaaaactctttgaatatcttgtttacggggggaaatctccataggttccagtg

SEQ ID NO: 591497 - DNA, 627 bp, Homo sapiens
  misc_feature (71)..(71): n is a, c, g, or t
gtgacttaaggatcctttagtcgggacgagaagcagaaatgagtctggagaaaatctcagaggacatatanccccaaatgcggtaggagatggagtgggggcttcttaattctggagtacagagcccattttggaatacttgggaggcaaattagatcccagtttagttttctgtctttgcatttttttcttccatttctccagagggtctcatggcgcagcagtgcgggcttgcccctcttgatttaggggctggggaggcttggcaggacgggaggcgtgggaacatggcaccccctaagtggccccctgttttggactagaggtgttgcttgctagctagggggatttttcaaaccttcaggggaataaaggctggtagtgacggagtttgagcagtgggacttgggggtggggggacgccagaagcaggcctgagggaagaactttggggtctgggaaaagagaagcaggagaagggcttatcatccctgagagtgaagccatgatttcggaacagactggagatacagaagagggaacaatttcttcttggatttgggaggaaacctgcggtccgcctaacttgcggtccgacttaactggggtacgagctcaattcgatca

SEQ ID NO: 591498 - DNA, 1184 bp, Homo sapiens
gcggagccgcaatgcctaaaggaggaagaaaggtgaggccacaaaggccgggtcgaggcagatatacaagccctgtaggagatcgacctgctgcagtatgctaggcttgatgaaggcagaaggccagggaacgaagaggagcaaaaagaaggtggacgatggggctgcaggttgaccccagataaaggagaatgaaatctctagactcagatgagagtgaggatgaagaacgatgactaccaggcaaaagcgcccaggcgttgatagggctcatctgacatcgagaaaccccaagccggtgtgtgcagcagagcaaccgaagaagaggtcacagaactggagtctggacgggccaaaggagcttccgacggagacgaacgagaagagattgagaagcagaaggcaaaatgagcgttacatgaaacatgcgacttggccgggcaagacaagagcaagccaagtgctgacctggccctggctggtcatcatccggcatacatgtgtgcgatgcagtgctgccccggcaagtaaggcagcagcgaccggaaaagcaaaagacgatgccacatttgtccaggaaacacgaatgcagtcactcttcccctgaaagtaagtaacatgagaacccgtgagagggaaatgccgagggaccttgggccgggctgcaggacactttgctgtgtctagaacaacactgtgccctggcgccgctgcacaagacccattcattgacctggaagcgccaattgagcttgaggcctccatctatcaatcttggggacagacaatatgtagcgaggaattagaggtatacactagggaaacagggatagcaaggagaattagacaacaacaaggagaagagaaaagaatatagattttacaattcaaagatcgacagagaggttaacaaaatcaaagccactttcatgaggagttcatggcaaaatagaaaaaaaaacaccaacctacggcaaacatcaaagacaaggaaaactaccaaaaagacaaacaaaacagtgacaacatcaccaagtataaccaaacaacacagataataaaacctaacaccatacaaacaagaacagaacacaacaaacaaacaataaacaacaccacaaaaccaaagaaaaaacagatacaaattttaaattatcatctataatatataacaacaaaacaaa

SEQ ID NO: 591499 - DNA, 349 bp, Homo sapiens
cccctgcggttcatcatatataggtaaagctctcacgactcctgagccaacttttatgtaactggcttatcctaggcgggggctatgaactaatgtaaagacgccacggagttcagatctagatagcagagaagtacgtctcatactaaaacattgcaactaactgtatagagtccaccccatgaagctgtaacagatggtgtatctttgactgaattctcataagtatatatggtacagactaaaacaaatgttgctagctaggtgggctgtgctagctcagtaggacatggcacagactccagctatcaccctctgaagaccttggacctaagtgccacatgcataa

SEQ ID NO: 591500 - DNA, 410 bp, Homo sapiens
ttagctggtgcggtgctcataatgaggaaggtgtcgtcaacgctgccctcgctgaccgcgccgcccatccgctcctctctgctctcggacaccgcgctctcgtcgatatactccagtgagatccgcatgctgcaccgacagctccgacagctgccagtgctctgtgcaacgggctctgctcctgtggttgcagccacggcttgaagtgagtgcaggtgcttctgtttccactcggggtacttgaggcacgccttgtacatcttcttcatggccttggtagccaggaacttgaaaatatttattcaccacccacttggttaaggatcctattggggtccaccttgggccagtgtatggtgatgacgcatgctcttgtggccctgtgctcatggatgaggtagcccgtctgg

SEQ ID NO: 591501 - DNA, 1873 bp, Homo sapiens
  misc_feature (1873)..(1873): n is a, c, g, or t
gctgcgcgccgactctcactcacagcctcccttccttctttctccctccgcctcccgagcaccatgctgcgctctgatgctgccccacagtggatcccatcacccctgcctgccagcagcccattatggacgggatggaatgtaaaggtgaatgatgtgagacgtgaatgtggagatgacctgtgaccagcacatcacgccgacgaagcaggatgccgcaggtcgcacatgggcagtgtatagtagcgatagacgcacgcagggaccacagacacacagccgcacaatacacgaacaaacaagacaaacgaaacgcacacacgcacgcgactcaaagacaacagacacaggagaaacaagcacaagcagcaaagaacacaacgaagcaagaagtgacatgagagtacgacagagactaatccaggaccgataggcgagtagaggagcaccgagagcacactaccgtagtatgacaaaaagatagtgcaagaagatgctgatgactagacagagcagcatcagcatgagagaagtgaagcagcgacagacaacaaagaaagagaccaagaggagcaaagaggagaacgaaacgaagaagcggcgcgcggagtagggacaggagcagcgagcgacgagggagcgaagcacgacgcagaggagaacaggcgatgaggaccacagcagcgaggacagagatgagaacaacagagcagggaggcaagcggagagagcagagagacaggaacggcaaacgagcagacagacggacggagagatagcgcagaggggaggagggagagagggagagagcgcgagaagaggaagagatagagagcagagagaggcgcacaagggagagacaacaaccagaagagacagcacagacgaacagaaaaaggcaacgcaggacgagagacagaaaaacatgacgacaaagagcagagagacgacagagaaacacgagaggcagcaaggacgcaatgaggacagacacgacaggagagcatcggaaggagcaaaacgaaatatcagagagcgaagagagagagagaagacgtaagacatgaaaagcaggaaacaggaactggataagagaaagtagagggacgacgcgcggagagcgcatacgcgaggaggaacaggtacgacgcagatacgagacagaaaaggacgaggagcatagagacgcgagcagagtcagaggaaagcaacgagtaagagaaaagacagagcagcacgagccccgcgccgagagaagaagaatgaacaaatgagcgagcatcaacaagacgcgcaccgagagattacagacatacgaggacatacgagaacaccaacacggagaagagagagggcaacaagtgacagtcagcgaggctcgagcagggagacaaaacagaaaaggaggcgagacagcgcgacagagagaacgacaaacaaccagagagacacagacaagacgaaagacaggacagaagacagaagacgaagagcgataagatatgcagacgacgatcgccagggagcacgagacagcgaaaggaaggatgaagacgcacagacacgcagacgaagcgaagagacagcagtaagcgcaagacagcgagacgcaaggctacgcatgataactaaccgagtagcgacacgctgaagcagggaaacagagacaggacagtgcacaagtacaaggatcacgacggacactacgagcagaagcatagcagcaaagcagaacaacaggcggaacgacgagcccgcagaggggtcgacgcaaagtgaagagaggagagaacaaagagaaataagaagagagcaagacacaaacgaagcgagaaataaaagacagacaagagacaggagacaagaaacaggn

SEQ ID NO: 591502 - DNA, 209 bp, Homo sapiens
  misc_feature (65)..(65): n is a, c, g, or t
agcaaggggaccttggcgctttcagctttccctgccacatccagcttgttgtcccaatgaaatantgaaatggtgggctgtctttcccttccaggaatgttgggcccccagcctggccagacaaaaagactgtcaggaagggtcggagtttgtaaaaccagcatacagtttggcttttttcccattgatcatttttatatgaaataaaa

SEQ ID NO: 591503 - DNA, 551 bp, Homo sapiens
tactgaatcactgaaagatttaattttatttagtttgctaagggagaaggataaatacatttatatgtaacatttttattaaacaatcagacagttttaggttaaacaaaactatcagaagaattaattcaaacacccttagtaggaaaaacaaatgttggctagctagcacatgagcttcaataccctggccctagctgaattacagtaagtaaaaatcccatttttactaataatgaagttttaattacatagagtcaataatcacaacagtaatatgaaataggataacagtaatttgaagagagaatttataatcaataatactccatggataaataattgagaactgtaaaaattaagactcaatttgcttttttgtcaatctgaaggctacaactagaatataacaatatcttggtcaagtgtggtggctcacacctgtaatcccagcactttaggaggccaaggtggaaggattgctggagcccaggaattcaagatcagcctgagcaatgcagcaagacctcatctcaagaaaacccaaaaaa

SEQ ID NO: 591504 - DNA, 212 bp, Homo sapiens
tcaccgctttatggtgtaaacggcctcgcaggcgctcggctggtgtcttgatattatcatctgctgagtggtggagctgatgggtggaatggggagtgagctgacgctcggaaggtgtcttgagattatcatccgctcagggtggaagcggcccccgctatacgctcggctaggtgtcttgagtattatcagtctggctgagaggtggagct

SEQ ID NO: 591505 - DNA, 684 bp, Homo sapiens
  misc_feature (3)..(3): n is a, c, g, or t
  misc_feature (68)..(69): n is a, c, g, or t
  misc_feature (113)..(114): n is a, c, g, or t
  misc_feature (116)..(116): n is a, c, g, or t
  misc_feature (153)..(153): n is a, c, g, or t
  misc_feature (158)..(158): n is a, c, g, or t
  misc_feature (170)..(170): n is a, c, g, or t
  misc_feature (188)..(190): n is a, c, g, or t
  misc_feature (235)..(235): n is a, c, g, or t
  misc_feature (237)..(238): n is a, c, g, or t
  misc_feature (249)..(250): n is a, c, g, or t
  misc_feature (258)..(259): n is a, c, g, or t
  misc_feature (297)..(297): n is a, c, g, or t
  misc_feature (313)..(313): n is a, c, g, or t
  misc_feature (316)..(317): n is a, c, g, or t
  misc_feature (352)..(353): n is a, c, g, or t
  misc_feature (410)..(410): n is a, c, g, or t
  misc_feature (433)..(433): n is a, c, g, or t
  misc_feature (468)..(468): n is a, c, g, or t
  misc_feature (480)..(480): n is a, c, g, or t
  misc_feature (483)..(485): n is a, c, g, or t
  misc_feature (487)..(487): n is a, c, g, or t
  misc_feature (615)..(615): n is a, c, g, or t
  misc_feature (649)..(649): n is a, c, g, or t
ganctcgatgagccccagcaccaacaacctgagcaggtgtgtgagccagcgtgcaggcatggcccacnngaggtagggcagtgtgtggaaataccagacgtagaactggtagnngngggagcggctgaagcagatgccaatgaagttgggggngaagngggtagaaacgntctggttgggtgtggggnnntggggtggggcttccttttggagggatccctcagcagcgacaagntnntttcccctgtnntgtgccanntgcggagggcaaacagcaggggcggggtggggtgggcngtcaacagggcccggnggnnggctcgatgcggggagagcgcctctgggaggaagnnccagttcactgtccagtggaacagaaactggcggccaaggtcaaaggagcgggacangtagccgctggggttctccagcnggaagggcagccccagcaccacctgaaggccagcncagattcccagnttnnngngggcccacggaagccaaactgtgtgaggagaagaaacagtaacccaggggcgaagagcagcacattcatcttcacagagactgccaggctgaaaaagcagcaaccccagccccagcgctgggccagcnggaggttgatactgaggaagagcagcaccatggncactgggtcattgaagagccgcagcacaaagatgg

SEQ ID NO: 591506 - DNA, 190 bp, Homo sapiens
gtagaaaatacaagtttcactcttagacataggaactatatcaataccattattgttaatttactatagttgccccattgtgctagcaaacactagatcttactccttctatgctaactgtattttttacccactaaacatcccctttctactcccctttccactaccctttccagcctctgctaaccac

SEQ ID NO: 591507 - DNA, 325 bp, Homo sapiens
gaattaacggaatccccaatgtaatgactgaaaagacgtaaaaaacagaaagaaaatgaggtaatatgtagaatcataccatctatacatcatgcaaacatgactccccatatcaggatgcctaaatagaatatagatacatatccttagtacacatctttctctccctctgtgagtacacgtgtacttgtccttgcaatgttcaccgaggctacatgtggtaatgggctaaatttgctagcacaagagtccagaatggttttgtttcttactgaggatatgttctaggtattctctaaattcctaacggatatccgaatacacc

SEQ ID NO: 591508 - DNA, 203 bp, Homo sapiens
atccgccagggcctcccaaagtgctgggattataggcttaagctaccttgcctgtccgttttcatattttttggagagatgaggtctcactgttttgcccagacgggtctccacctctgggcttcaagcagtcctcctgcctcccaaagtgctgggattgcagttgtgagccaccacacctggtcgggagttttacttaccat

SEQ ID NO: 591509 - DNA, 244 bp, Homo sapiens
  misc_feature (105)..(105): n is a, c, g, or t
  misc_feature (171)..(171): n is a, c, g, or t
catttttattaaatgaacaagttgttgattcgataattacaagacttgtacaacaatttcacagcgcctgtaaggagcctttggttggaactggtgacacctgtngcctctccggcacagaggacaggaagtcccacccctgccttccatgcagcagggagccttgtgtcnttggcattcccttgttccgcttgctcccacccttcactgtggcggacaaggggggtacgaggctcgaattcgt

SEQ ID NO: 591510 - DNA, 186 bp, Homo sapiens
tcgcataccactgttgcttatccacacatgtatcgtgcatgtgagctgccaagttactaagttgaggaaggagcaggtcctgagtaggtgacaggactgcccacactcgcttgggatcttgtgatctgagctttacttcctctgcatccatttctagttaggagcatggaccctggagagaccatg

SEQ ID NO: 591511 - DNA, 102 bp, Homo sapiens
tccgttgttttactatcggtcttacttggaaaacccttgcggtacaggactaggaagcaaataaggaaaatgattatgagggcgtgatcatgaaaggtgata

SEQ ID NO: 591512 - DNA, 3018 bp, Homo sapiens
  misc_feature (26)..(26): n is a, c, g, or t
  misc_feature (2332)..(2332): n is a, c, g, or t
gcacgagggaacaacctctctctctncagcagagagtgtcacctcctgctttaggaccatcaagctctgctaactgaatctcatcctaattgcaggatcacattgcaaagctttcactctttcccaccttgcttgtgggtaaatctcttctgcggaatctcagaaagtaaagttccatcctgagaatatttcacaaagaatttccttaagagctggactgggtcttgacccctggaatttaagaaattcttaaagacaatgtcaaatatgatccaagagaaaatgtgatttgagtctggagacaattgtgcatatcgtctaataataaaaacccatactagcctatagaaaacaatatttgaataataaaaacccatactagcctatagaaaacaatatttgaaagattgctaccactaaaaagaaaactactacaacttgacaagactgctgcaaacttcaattggtcaccacaacttgacaaggttgctataaaacaagattgctacaacttctagtttatgttatacagcatatttcatttgggcttaatgatggagaaaaagtgtaccctgtattttctggttctcttgcctttttttatgattcttgttacagcagaattagaagagagtcctgaggactcaattcagttgggagttactagaaataaaatcatgacagctcaatatgaatgttaccaaaagattatgcaagaccccattcaacaagcagaaggcgtttactgcaacagaacctgggatggatggctctgctggaacgatgttgcagcaggaactgaatcaatgcagctctgccctgattactttcaggactttgatccatcagaaaaagttacaaagatctgtgaccaagatggaaactggtttagacatccagcaagcaacagaacatggacaaattatacccagtgtaatgttaacacccacgagaaagtgaagactgcactaaatttgttttacctgaccataattggacacggattgtctattgcatcactgcttatctcgcttggcatattcttttatttcaagagcctaagttgccaaaggattaccttacacaaaaatctgttcttctcatttgtttgtaactctgttgtaacaatcattcacctcactgcagtggccaacaaccaggccttagtagccacaaatcctgttagttgcaaagtgtcccagttcattcatctttacctgatgggctgtaattacttttggatgctctgtgaaggcatttacctacacacactcattgtggtggccgtgtttgcagagaagcaacatttaatgtggtattattttcttggctggggatttccactgattcctgcttgtatacatgccattgctagaagcttatattacaatgacaattgctggatcagttctgatacccatctcctctacattatccatggcccaatttgtgctgctttactggtgaatctttttttcttgttaaatattgtacgcgttctcatcaccaagttaaaagttacacaccaagcggaatccaatctgtacatgaaagctgtgagagctactcttatcttggtgccattgcttggcattgaatttgtgctgattccatggcgacctgaaggaaagattgcagaggaggtatatgactacatcatgcacatccttatgcacttccagggtcttttggtctctaccattttctgcttctttaatggagaggttcaagcaattctgagaagaaactggaatcaatacaaaatccaatttggaaacagcttttccaactcagaagctcttcgtagtgcgtcttacacagtgtcaacaatcagtgatggtccaggttatagtcatgactgtcctagtgaacacttaaatggaaaaagcatccatgatattgaaaatgttctcttaaaaccagaaaatttatataattgaaaatagaaggatggttgtctcactgtttggtgcttctcctaactcaaggacttggacccatgactctgtagccagaagacttcaatattaaatgactttggggaatgtcataaagaagagccttcacatgaaattagtagtgtgttgataagagtgtaacatccagctctatgtgggaaaaaagaaatcctggtttgtaatgtttgtcagtaaatactcccactatgcctgatgtgacgctactaacctgacatcaccaagtgtggaattggagaaaagcacaatcaacttttctgagctggtgtaagccagttccagcacaccattgatgaattcaaacaaatggctgtaaaactaaacatacatgttgggcatgattctacccttattcnccccaagagacctagctaaggtctataaacatgaagggaaaattagcttttagttttaaaactctttatcccatcttgattggggcagttgactttttttttttcccagagtgccgtagtcctttttgtaactaccctctcaaatggacaataccagaagtgaattatccctgctggctttcttttctctatgaaaagcaactgagtacaattgttatgatctactcatttgctgacacatcagttatatcttgtggcatatccattgtggaaactggatgaacaggatgtataatatgcaatcttacttctatatcattaggaaaacatcttagttgatgctacaaaacaccttgtcaacctcttcctgtcttaccaaacagtgggagggaattcctagctgtaaatataaattttgcccttccatttctactgtataaacaaattagcaatcattttatataaagaaaatcaatgaaggatttcttattttcttggaattttgtaaaaagaaattgtgaaaaatgagcttgtaaatactccattattttattttatagtctcaaatcaaatacatacaacctatgtaatttttaaagcaaatatataatgcaacaatgtgtgtatgttaatatctgatactgtatctgggctgattttttaaataaaatagagtctggaatgct

SEQ ID NO: 591513 - DNA, 840 bp, Homo sapiens
gccacgagatactgttgacgtggcaatgccgttgaacttcactggaggtcaatggcacagcagaatgttccagagattttcctactgagtagttgctgtcattagcaggtagaaccgtctgagctgccaagtttccataaggtggagcctctccgtgaagaatttgacaattgaatgagaagttaaagaagtttttcaatgtctataactacgaatacgagatggctaagattgagtttatttcaagcaactggaaggtagtatagagtatccagtatatggtgtccaggtggcatccagagaaagcacgcttatgagtggaagaattcggatggcatttcgcgcatgcacctaatgctgtgaaaaggcggcattgttattgtagcagagtttttggttaatgaagctcggaaaagcaagcatcattttaaatctgaatctgaagaggagaaagcattgattgatcagtacagtccaatttatacctggaaatatttcttcatttcagcaatgttacatattggattgaagagtcttcaattgggttaacagagcagaatttgaataattccatgattaaactgttagaataacttgtactcatggcaagattaggaagtcacagattctttactataatgtggctgggtctgattcttcattctgtatgtgactaatttatataacaattagagtaattacataggtgagaacataaatagagtgttaacaatgggaaaagccttcttatttctgaaggattggaacaaaataaatttatggaacaaaagagaaaacagagagaaaaaaaaatagatgtgggaggcgacagaataaaag

SEQ ID NO: 591514 - DNA, 245 bp, Homo sapiens
tatggcgacatttcaatcagaaatgatggtgcctgcatcagtggttcagagcctggttatacatattagatcactcaggcagctttggaaaaattaagatttgtcagccctatctcaaagcttgaatcacaatttctggggtgtgggcacaataatctgtaattgtctttgtttatacttcccctgatgccactggttccgatgccactggccggcgggccagattggaaatggtcgccaatccg

SEQ ID NO: 591515 - DNA, 115 bp, Homo sapiens
ggaagactgccgtgcagaaggtgacctgtctcagtggagctgggtcatctcaggctggatccttgaacttttggccgccatgtgcttcccgaaggtccttttttatgacatgaag

SEQ ID NO: 591516 - DNA, 153 bp, Homo sapiens
agcttagctcccacttggttgccaggctggtcgtaaactactggagctcaagcaatcagccggtcttggcctcccagagtgctaggactacaggcatgagccaccatgcccggccaggaacttgttatctggcaaggtaaacatttcaagtat

SEQ ID NO: 591517 - DNA, 371 bp, Homo sapiens
atactccaatgaccagtcaatggggtcagcgcctccttacgtgtcactccttccgtttttaaaatatggcacatttcttcaatttcagcaacagcctttttcaaatgctctttgggaaattaaggccctccttgcttgtggtaaaatgccgagtccttttcatatgtgttgcgccttcacctatatggtgaccggtggaacacaggcgttttctgctctgcccactatcacttcctctaagggtgtcccattcgtgtgtaagaagacacaggccagtccttgggcagaggctcagtggctttgtcgtcagctgcacaggagttccgagagaacgcggtatctgtctgggtgctctggaaagttcgctgcat

SEQ ID NO: 591518 - DNA, 894 bp, Homo sapiens
ctcgggggcggtgcctgccttgcagcctcccctcgcgcgatcgcgcagccccatctttgtccggcctccgcgctttgttctcggctgcccgggccttggccagcctggccagccgccgagcatgccccacgcctgcgctggcgtcgtcctctgcctccctcgcctgcctgccccacgcgctgcggacgggccttgccccccatggtgtcccggccagagccagagggcgaggccatggacgccgagctggcggtagcgccgccgggctgctcgcacctgggcacgcttcaaggtggacaactggaagcagaacctgctgggccatctaccagtgcttcgtgtggagcggcacggctgaggcccgcaagcgcaaggccaacgtcctgtatctgccatgtctgtggcgtccacctcaaccaggctgcatacctgccctctactgtgtctcctatcgcgctgtctccacaacagaacgcatattcaccgagcatgcgaaggcgaacgcggccacaacctggcccatagactcctcgactgcactgcgagcgcatccaacagaaacactagagcccacggacctccatccacagaccaaacgacatgccacaataatcgcccaaaacaccgaccaagcgaacaaccacgccacacacagcccacacgcacgaacgcgacgaccaaaccccaacaaactctgagagacaccagacccacaaccgagcgagcaccagcaactaggcagcaacgccacaaacacccggaaacccggcagcaacacgctccaccctcgcaacgtcggacccagtaagctctcgccatgcgcctgaaccaaaacccaggacaacacacaaagcacaacgcaacccgcccccgcgcacgccccaggacccacca

SEQ ID NO: 591519 - DNA, 213 bp, Homo sapiens
  misc_feature (19)..(19): n is a, c, g, or t
gaggttcccgttatccggngaggcaacacaggtagatggcatgagctcaggagttcaagacgagtctgggcaacattgtgaaaccccatctctacgaaaaaatacaaaaattagccaggcgtgttgccacatcctggtagtcccacctactcaggaggctgaggtgggatatcccagattctttttgaacaagcagatctccccgggatacag

SEQ ID NO: 591520 - DNA, 998 bp, Homo sapiens
  misc_feature (269)..(269): n is a, c, g, or t
  misc_feature (276)..(276): n is a, c, g, or t
  misc_feature (278)..(279): n is a, c, g, or t
  misc_feature (293)..(293): n is a, c, g, or t
  misc_feature (295)..(296): n is a, c, g, or t
  misc_feature (306)..(306): n is a, c, g, or t
  misc_feature (317)..(317): n is a, c, g, or t
  misc_feature (330)..(330): n is a, c, g, or t
  misc_feature (341)..(342): n is a, c, g, or t
  misc_feature (344)..(344): n is a, c, g, or t
  misc_feature (355)..(355): n is a, c, g, or t
  misc_feature (453)..(453): n is a, c, g, or t
atggtaatgatgaaaataatcagtacaactatcaaagattggccaggcacggtggctcacacctataatcccagcactctgggaggccgggtgtggtggctcacacctgtaatcccagcactttgggaggccaaggcagacagatcacaaggtcaggagttcgagaccagcctggccaatacgtgaaactccgtctctactaaaaatacaaaaatcagtcaggcatggtggctggcgcctgtagtaccagctgctcgggaggctgaggnaggagantnncttgaacctgggangnngaggttgcantgagccaagancatgccactgcantccagcctggnngncagagcaagantccgtctccaaaagataaataaataaatttgcagctaaaaatgatgacatttagcatttttcaggttcatttttattaggctcacttcgtttcacatncatgttcagttaagaaggcattagagttaaggctgttattcaaagctgaataaaatatccgtgaaaaataatcttcacagtatcaagccttggaaaaaaactattaattctgaagaaatctgttaagttctaacatgatgaggttaagaatcatgagaaactgaatgaaattagtgtgaaagaccctgtcttctatacttgcttaatcttttagaataaacattgatttctttagcgagtgagcaaaacaaagtagagccatgacaaatcaaggactccgaccacctgcccagttgtacttttattagttgataacattaggaattaacagcgtggttggagtgtaagtctaaataggtatttctaacaaggtcataagaggagatcatggcaatcttacaatatttgtattctgtaaaattattttcattctataatttattaaacaaggcgttctaagatacattgttgtgaaagttatatatagtctgtatgtgcttattgggggtatagagaaaagaggtatctacctgtgatattaagaa

SEQ ID NO: 591521 - DNA, 276 bp, Homo sapiens
ggatccgccgcctcccaaacatctgacctgattatcgcacccgcacgcggcggcttgccgaggttacgttctcgattcaggtctgtcgtacatgttgttgcctaaagcggtgctgcgcctagcgtgcgcagtgcttgtcctcagctatccggcgcatgccgggagcatggttcgcgtgcgatttcgctcgttcaggcgctgcagccgccttggccgccaacccccgcctgacggccgccgagcgggatatcggcatcgcggccggacttcgaattc

SEQ ID NO: 591522 - DNA, 204 bp, Homo sapiens
  misc_feature (164)..(164): n is a, c, g, or t
  misc_feature (190)..(190): n is a, c, g, or t
  misc_feature (200)..(200): n is a, c, g, or t
cccctgaactcctaatctatggtgcgtccgaattacagagtggggtcccatcaagattcagcggcagtgggatctgggcacagatttcactcttcaccattcaccagttttgcaacctgaaggatttttgcaattatttactgttcaccagagtttacagtaantttctacatttttgggccagggggancagggttggngatt

SEQ ID NO: 591523 - DNA, 153 bp, Homo sapiens
tgaccaggatgaactggatcagctttccaaggctgctgtgacagccctggctctctctacgggaccaagttcaactatgcgcatataaggcaatttatcaagcagtggaagcactattgactggacctacagccaggcatcaggtactccttc

SEQ ID NO: 591524 - DNA, 373 bp, Homo sapiens
ccccagactcaccttggcaggttatgggaggctgtctagaagtcatccaaaagctattagtgagagtagagttcgaagtccttgagagaggattatgatgcgactgtaagtgcgttcgtagtttgagttcgctaggccgaatactaatgatgattgctcgtccgtgggcgacttatgacaatgactgcgccggttaagcttcagggggtttggcttagaatggctgttactacgaggtgctatgtggctgcttcatgagtatgccatgagcgattttaggtctgtttgtcgttaccgctgattgtgcttgttatgattatgcctcatagggatcgtacgcggaaggggtaggctctgtgtttcgtccgggggt

SEQ ID NO: 591525 - DNA, 1044 bp, Homo sapiens
gagtccccatggccccagcagcaagcccctgcctctctcctgtccggctgctgccccactctgaggcccaggttctcttctcccaagagcgagtgcgttgggtcaaggtcaccccatctggaagctacctagaccccagcaatgttacctgacctgtgacacctttgttcctgtgtcctcctctgtgccgcccatggtgaatgtggcttctctgtctacatggatgcactcccaccacactgggagcttctggggcacaggagtcctgctttacttcctatgttgagcccagggactgcccaagataatgcccagtgcaggaatgtttccaccaggggtcacaggaatggctctgctgccctgggggctgagttggccacctgtctggtgccaccaagttaacaagcaaagcagcatgaaggcagtggctggggaatcaaccctgattatcaaggataggaggcctgaagaaccacatgaagagagtgcccacaacccagaggatctcctggatacagctgtgttaccatgatgtccagtggaagacaccacaaccccattcaggagggacctccaagcctgaaagcctcagagtgatggtttgactcacaccaccagtaaaataacttccaacaagctgagcaagaagaaaaggggaattgtggcaaattgcattttccgaaaatggtcaccttaccactattccatcaagaggtggtgctatggtttgaatgtgtcccccaaagttcatgcgctgaaaactttacgtaaacacaaatgcaatagtgttgaatggtgggacctttcaacactatcgcaagggtgattaggtgctgatggctctgccctcatgaatggattgtcattgttgagggagtgggttcctgatgagagaatgggtacagcctttccctctttctcacatgtgctcttgtccttctgccataagatcatggagcaagaaggctcttgaaagatgccggtcctggaccttggacttcccagcctccagaactgtaagaaataaatctctgttcgatatga

SEQ ID NO: 591526 - DNA, 935 bp, Homo sapiens
  misc_feature (746)..(746): n is a, c, g, or t
gagtccccatggccccagcagcaagcccctgcctctctcctgtccggctgctgccccactctgaggcccaggttctcttctcccaagagcgagtgcgttgggatccagacctcgagtaaccctgtgcgatggcaggccttcaccctgggactggccaagggccctagccccttcatcagaggtcacccatgactctcccgccctcatccgtttctgcacattcctcgccatgcccatctccctcctgcccatcccggagcccaccggactgcacagccagcatcagcacagcctgtcctgctgagtggggctgcctgcagtccatggcacgagatagaggcagaacctggaggcaggccgaggtcgccgtactcctggcacttccagaccaccctgccaccatcctcccttcagtccacggtccagacttcctggaaggcaccttgcagccttcgtttgccgaattgtgagatgtgtttgctcaccggctcctcccgctgagcgtccctggtgtctgacccacctctgtttccttctgtatgcacaggtgtttgtgcatgactgaacgacattgaggaggggacacggtcagtagaaacttcctttaagatgcatacaagctgcggcatagccaaagtgtgtttaccaggagtcctgtgtggggctgggcagggcatcagctgctcttactggggacggatggtcgtgatgcaaccaccagaggtaggtgggcagcgcacccttgnataatagggcagctgggcttcccggcgtgtgaggcctgtccttggtgttcctctacatgttcctggagaacccaggtggctttcctggggtgccctcgtggaaagggttcgtttagccccgagttgcacgggccgggccaaggaggcgcaaagaggggcctctaccccggcagggagtgcgccgagagc

SEQ ID NO: 591527 - DNA, 499 bp, Homo sapiens
tttaaaaaatgaacatttttgtatttactttttttccaaagtaaaattgattcctaaaaattactgtttcagagggtattaacaaaaactttttaatggggggcctagaaaattttaattatatatggggttcaaggtaaaattccaacgccagggctgttttataaaaaagaatgcttttatattatttcatgataaaaattcccaaatttggccggggtcggtgggtcccccccgtaatcctagccctttgggaggctgaggcgggtggatcccccaaggtcaggagttcagaccagcctgacgaacatggagaaaccctgtttttactgaaaaccccaaaaattaaccgggggggggggcacaaacctataatccccgctactcgggagggtgaggcaggaaaatcccttgaacctgggaggtggagggtgcaatgagccgaaatcgcgcccttgccctccagcctgggcaacaaaaaggaaaccccccccccgga

SEQ ID NO: 591528 - DNA, 224 bp, Homo sapiens
ttttttttttttaagggccccccacccctatagtgtgaatgtttattttcagaggatggctaaaagaagaaaaaaaagttggagtaagtgttttggtttgaaagaatgtttaaagagggaaccccaagagggacccaaaaaggtccacccaggttggggggtgtaattagggagggaaggggttgcccccttaacacccctttaataaacagtttacagaccca

SEQ ID NO: 591529 - DNA, 161 bp, Homo sapiens
gtaaaccttccccagttttttttttttatacttaaaaccccggctccccagggcctgggcccttactggaagctggcttcctcttataaaatagctttggccggaaacatagtttttttttaggcagatcccaacaatataatggaaggggagggggggat

SEQ ID NO: 591530 - DNA, 384 bp, Homo sapiens
tcagcaatattacaatttgagcaagagccccataagagcaacatgaattctgctcaagcatcaaagcaccaaattattaaacattattgtgcaaacatagagtcagacagaatggtgaaatcattgatgtttcatgcacaatgccccaacataagtcaacagtttacacaatagatgattcattttaagcacagagacaagttggtgttaaagcatgaagcccacagcaagcagaccatccacatcaatctcactaggcaaaagtttcatcttttttgtgacctaattgaaaatgactgacaacagaataaacaatagccaataccatagacatctcaagtggttcagcttacacaatttttacccaaaaaattatgcttaagc

SEQ ID NO: 591531 - DNA, 871 bp, Homo sapiens
acaaattatttattagaagcaagacaaaagtttaatgtcagcttaagtgcttaaatatatcactgctgaccagaatcctgttatttttactctgcatcataaaatttcccatttctgcattaaactaaacagaggaggggggtcaagtgatacttagactacttggcacacacaaggaacaactgattggcaggcagtatcgatctttatgaagagaaagctgaagctttgaacaaccttttcaaaccttcttctagattacaatccaaatttttcaagacttctgatacatgcttcttccaaaggtgaaaagtaagatacgacaagtaatcacttgctctgctgctgacttacagactacggcattactccagtcgtgcactagccccttggtaacaacgtgcccacttatatactattttacgatggcttaaacttctgtggttacaactaactggtacgttattatactacgcctgcatagaaaccaagccatatactccaacactatattactaacaactacttaactctacttcattgatcttctatctcaacacagcgcaataacatacacaaaaatgacgtttccattccaagatctcaaattatgattcacgccacagtcaagttgtcacagaaggccaagtagccatttatattaacaaagtaaaaggcgtttctgtgggtcttcggtaaatttaacatcgggcttccaaacatggtactcgaactggtcaatttcgaacgctgcaaacgggattaaggcacctgaaccacaccatttagaccattgtcaaggcccctttacccgccccaatgtaacagtaatatacttggtaaacaacagtacttgtttacggagacttgg

SEQ ID NO: 591532 - DNA, 305 bp, Homo sapiens
ccggattttagttagtctttaatataactccaactttttaacggtaaacaaagatgtacgtacaaaacatcaaaatacgttaccagtagttctaaacagccatactactcaccgtgccagaacctgaggctcactcacattttcaggaaacataattccctctacttcagtggaatccatgttctggcagttggaaggcacacgtgacccttaccttgtgcaaaatgtatccactttatctcgaaagcagctttcttttctgtcccttccttggcattttcaagaacccgttcctttcccttttt

SEQ ID NO: 591533 - DNA, 557 bp, Homo sapiens
  misc_feature (134)..(134): n is a, c, g, or t
  misc_feature (166)..(166): n is a, c, g, or t
  misc_feature (370)..(371): n is a, c, g, or t
gtgaaaggggaagtgcggcgcccaaagatggggaccaggttcacatgccctcacccattgccgtgattaatgagggcgagcgcttgggggatattgtccccctgggtgtgaccaatatgacatcccgtgacatngaagaaaagggtttccgcatccttaagggaangacactcatccccaccctgtcatgggtgttaaaggatgaggcggtttgggaaaagcccttccgtttcccccccgaacattttttgaatgcccagggccattttgtgaagcggaaggccttcctccctttttaagaaggccccggggaatgcctgggggagccccgggccggaaaggggttttttcttttttttcccctcccggnngaagcatttaagtttttgggggcccatgggacagccccggcccaccccccagggggtttttgtttttttggggggcccacccccctatgagttttgtgttgggccccgttaaaatggggtccctagtccccagccggctcccaagccaagggttttaatgtccaaaaaaacaatggggtggttcca

SEQ ID NO: 591534 - DNA, 275 bp, Homo sapiens
tcgtgatctagaggatcccgaaacctaattacgcacaacgaaagggtcttaattcacttagagttgtggatatcctgataatcaatttgatgtgaaaaaaatatagatctgaaccacaaatcttacaatattaataagcaatgagaatttggggtcctaagcaaatcccaagatggcatttgggggtttcttacaagatccttgggcttagaacctctttagaaaatcactatgatgaacgaagtgattgtcaattactgtattaattcttcccc

SEQ ID NO: 591535 - DNA, 165 bp, Homo sapiens
tatcctatccaaccgaactaacgcggacacgggacacctaccctcagaacttcaaaggggcaagatcttttttccttcactgattgctgaaaccaagagcacaattcccattgagagaaagatctctgcgctggaaactaaaacaaattgagcattccttccggg

SEQ ID NO: 591536 - DNA, 1380 bp, Homo sapiens
  misc_feature (1)..(1): n is a, c, g, or t
  misc_feature (933)..(933): n is a, c, g, or t
ngcgtttgtcagcgccctgggttcatgttgttcaaggagtatacttgtgggttgctctttgtgaatactggggcgcacgtgttcacggcctttttcctcctggggtttccacaagggtggtcgccgaccccccgtgtggtgtgcgccaaccatttgttctaagatgttgtctccccacacagtcccacaggtgggcccacaccaattgggggggcccggaagaaggaccggccccctggtgtttgtgaccccaggatagggttccccccccccggcgttgtccccttgcttctacccatcgccgccccgtcattcgtcttgtttggagtgttacccgaccgtcgtcgctgggaccacacccaactggcttctcatgtgggtgggcacccaaactggggagagcgctcgttaggtttaagaggtgttcttttagcttgcgcccctgggaaccgaggccctagacttgggaggaccccttttgggggacccaaccctctgttcctagggaacgcggcccctgcacattggtgcccggagcccaaatttcttcggacgctgtaatatttagaagattccccgcgggatattgtcttgagacaccacgatttgggccagaatatttggggaatttgcggaattcccctggttggccctcacacccccaagacttgggttatatggaaagagaggtctcctctcgaggttcctcattagaagagaattgtggagcaccgagattgtgggtataaatatcgcctcgccccactcgagatgtctcggagaattcacgccacactgagaaaggccccactgtataaacttcgaggagacgcacactttggctcgttgagtttcacacacaggaatatgagacccctctggtgagcacacaccacgcgggcttgcgcctcgagacacccatccgcacacacncctctctctctcgagaaatgtgagaagtgtgagactgaccacatgcttctttctgagacactcacgaactcccacgggcgcggacacacacagttgcacaaaggtgtggcacaccctgtataactgctcacaccccccacaaatgggctgagatggggagggctcgtctgctctttcacaggggcccgctggcttgtataaatatacctctccacggaaagaggcaccacttgcccacacctcttggaaaagggagaggaatattgcctcttctccctctggttgttccccacgaagttttaaggaaaaattctgttaagggagatgggtaagatgtccaactgccttaccccgtcatactgatctttagccctccgattgatttttttcacccccagctctgtttaccatccgcagaggtgttcctgaagaaaattctgttccaat

SEQ ID NO: 591537 - DNA, 271 bp, Homo sapiens
tctgctctagagccttgttactcgacttatttgaccgatggagcttattagaattgcataataatcaggtcccactccagccctgtgcaacatgagtaagattctgtctcccaaaacaaagttcggggagtgagaatccttaacattttgcacactggcttagatcaatgtttctcttacttcatgtgtgctggacttacctgtggatgttgttaatatgtatgttttgattggtacattctgcattggggcctgattattctgcatttct

SEQ ID NO: 591538 - DNA, 611 bp, Homo sapiens
accctctgaatgtgtttatgtgtcaagtgcctaaagaaccgtagaaacagtacatcaaaagctcttatcaaaagaacaaactgattgaacattcagcccagaaacaacaatatgcatttacattttccatcatgggttgctgggcactgaatacccttaacaacctcaagcagatgtgcagtggggcacaccatgtctacatggcatcaagcaaagttgcatcccctactgacttatttgtaccattggcaatctaacgtagagacaatgagcctttttacacgataggcccaagtcaagaaaccgttttaaaaaagaaacagcacaacagcgcttaccaccccagttaagatccaccatggtgtatggcccttttcgcacatctaccacaacactttggcacacaggggtgcaaatccgaaccgtgggctcacaaaattaagaggatcggtataacaatagccgatatatcaagctgtcaacacggtgatacctaaccggttaagaaacatataattccccattataaaacagggggcaaaattacacgaagagtcaccgcaaacatatttttgcggtaaacgagatctccacaggtaggtgctaattaa

SEQ ID NO: 591539 - DNA, 544 bp, Homo sapiens
  misc_feature (163)..(163): n is a, c, g, or t
gagccactctacctggcctaatttaaatttaaatagccacatgtggatagtagctattgtattggacagtgcagctctacaagttggttgaacctacaggaataccaccagagcatgaaactggcataagataagaggatgagaggccagagtctttgtagtnagtactcttaagagtccatgagacaacagatgcaaagattctgttttagatttaaatttagcacaggagaggaagatactttagagtggattgaaaggaggtttttatttaaaaatacacctgaagttgtggtaggagtggctaaacaaatgattgggtgtaatgtagcaacaaagcaaattccaagaggtggtgataggaaagttaataagatgatcgctggtatagcattagatacttaactatttttatggaatgaccctgcaaaagccctgtactgatgggtagtcccagacagtcattgacattgaagagatgacaccttctacttatttttaaggaggaatatatatttttgaaggaatagaagacttctaagct

SEQ ID NO: 591540 - DNA, 111 bp, Homo sapiens
actcaagcggtgtcgcccttccacctggtcatctccactgagtcgctggactgtgaaggtcaacaataatggccgtaacagggcagttcattccaaatccagcactgctgt

SEQ ID NO: 591541 - DNA, 136 bp, Homo sapiens
ctctgtcttagataggtgcatgtagtagtcttcagtcccatcattatttccaatgcttgtggtggtggcctctcttgctgattgccatttctatctccttggatagctctaagggaactgccattgggccaggggg

SEQ ID NO: 591542 - DNA, 477 bp, Homo sapiens
gggaaattcggccataatggccgggggaaagtttgacctgaagaaggagggtcccctttttaggggggattaaaatttttttggggaagggatgcagttgacttacttgcaaacttttcttttgttggcagatggattaatcccaattactgttataagggttttaacaccaccattaaactttttcccttaccttaaattagtcaattaattaaactgaagtaacgttggcctgaaaaaaaaaaaaaaaaaaaaaaaaaaaaaccttgtgggccgcttgggccaagcgaattttagattgggccaggttaatgattgcggccgaatttggggttaattgggccaattggccttatggggggcggattaccatttaatgggccgcggtttaacaaggtcggaattggaaaacccttggggttcccaaattaaatggctttgaagaaaatccccttttggcaagttgccgaattacca

SEQ ID NO: 591543 - DNA, 269 bp, Homo sapiens
ttgggagtactgtgaatgtgatcatgtgctcactccagcctccacctcgaggctcgagtgatcctctcaacatcagtctccctagtagctagtgatcacaggagtgtgccaacaccccattcattacatttttactgttttatgcgcagatttgagtcatacctatgttgcctcatggctgagcctcatcactcctagggtctcaaatcagtttctcaccatcctcgggctctctcataaagtgccagaatatatgcacgtgctcttat

SEQ ID NO: 591544 - DNA, 1144 bp, Homo sapiens
ggcagtactatacggtcttaggtagcgaggctgggtggctggtcatggaggcctacgagcaggtcacaagggacccctaagctgaaaggcggtcgcacgagctggtgagtgaccaatgcggaagaagacaaagaaggacacagacaaagctggaaactcctggaagcaatgggaacgagcaaaaagaacgaggaggagaagcggcgcggctggacaagcggaccccggaccaggcttggccttcgagaagaatgcaggagaagcggcaaatggaaaggatcctaacagaaggcatacaaaaaccaaagcagagagtggaggaccttcaacagacacctggaaccaaatcacggagccattacgacattccacaaaagtcagctggacgaagtagccgccatgcccccagatatggagcagcatcgaggtgtacgcaaaaggacacaactggggtagattgtgtgataaccataggatatattcttggaaacatggcataaacaaacccataggcatctactgctacagaacgtgcgtagatcgaacgactgtgtacaccatcaatacatgaacccttgacatcacacggatacgatcggtcccttagaacgtcagaaaaaggctccatatggcaaacaatacaagagagataccaccgctaacaggaacgggactgggacacgttctcgtacagtacactccagcagcgtaacagcaccaattgggatgatgaaccatgggatcatggtaaaacaagtgtatcagcaacccggacgttgggatggataaagaattcatgaaggagccagacaagacttgtcttactccctagagatggagaacagaagatccagaaagggttaaagagagatagcagcccaatggtagggcatgaagtattgcaaaggcacaggagaggaaccgaaaagttgggcacagcattaccatggattcgtattaacatatggggctactgctggagcccatagagggcctaagggaagagacgagtagaagctaataggagacaacaaaactagtccatcaaacaactgggacagacaaagggtaacgggggataaggaacaaaacacgcaaagcagaaatggagggacgaactgttcgcttatggaaggggacacag

SEQ ID NO: 591545 - DNA, 233 bp, Homo sapiens
ttgacgagtcctcccctgacgcactactgttggaggcaaaagactgagggtcatgatcaactcagtataccactggaggttatatgagtaagcagcaaactgtttttcataaatgcagaatgttggcaaactgacagactgcgtatgccacccacgaaggaatgctgaaggcagtcatgcccaacagcacagtgtttcttcgtgattaggtacatctgcacagcctgttagta

SEQ ID NO: 591546 - DNA, 236 bp, Homo sapiens
atcagcaggcagctagatataagataaatgtatatgtgctgtgaggaaaataaagcaggttgatatcataaagaggtgattcatggccaccgatagggattactttagtattgggcagtgagagattccctttccagaaaggcgacccagcttgtgaatgcattgattttgggtgtgaggagaactatttcaggcactgagtcacaggacgagactccattctcaatataaaaaaa

SEQ ID NO: 591547 - DNA, 642 bp, Homo sapiens
ggtctggctcgttactctacacgggaggaatgggcactgcaatgtacgtggctctggggagacctcatcatcctcatcagtatttggcccgcgtggactgtgatgttcggctaggccatccaggtggggtccctgggcatcttcccactggtctatgccatgccccgctcggcctcagtaccggagtgccgattgtctgcctcgaattgccagagcaacgaccagggacatggagtccgagcgggaggctggtatcgtcacgctggtgcagtcctcatgcgggcccaggttctcctacatgtctctagaaggaaattgctgccttcctgccctacctggtcttcaacatcctggtgcacagactgcaccatcagtcatggcgagctcccccgtgtcttaccattcccatgggcttgctcccttgtagagacagtttctgaagccaggccgttcaatgaaagctgcccagaggactgcgaaggctcgaacctcctgctgggacttttctatgtcttgtggcatcattctggcgaccagcgaggcagtcttgccaaagatttaaggggacaagtagctccccccacgacatgtctccctttcttagaatatattaaagtcagagtctctgaggaaggaatgtga

SEQ ID NO: 591548 - DNA, 730 bp, Homo sapiens
agcgaaggaaggagagaaaggaaagaagaaagaaggaaggaaagaaaggaaggaaggaaagaaaaaagaaggaaagaaaggaaggaaggaaagaaaaaagaaagaagaaagaaagagaaggaaggaaggaaggaaaaggtaaatgaggaaatcctctttctcttccttctcccagtccagcaatagggaaggctgctttgtatactgagagaataaagttgtaatttaaaatgatgccgagaacagaggcctggatcgttttactagtgaggtacagtgcgtgcttagaaggcacgcactctgcaactctgtccttacgcagaagactgtcagcagaagtttagggacatatgctcaagaggagatctcatgactgcattatcagtggggactcattaagctgccctggagacatttttgtgtcatttatatcagtctacttcctggctgcattttgcctttgatacgtattttctacagagagtgggcggtatttactaaatctcaacatctgctgctcttatggatatttagtgatgattttttccatttgtattgatctccaaactctttcatgaagagcacactagtgtatacaggggatttagtggtcatgatggtatctcatagagtagacctgaagggtataatgcttttaattaaacaatgagtattataatatactctgtgtgtgtgtgcgtgtgtgcgcgtgtgtgaaggggaagaggaa

SEQ ID NO: 591549 - DNA, 820 bp, Homo sapiens
  misc_feature (819)..(819): n is a, c, g, or t
cacactgtggaaggttgttctttgctctttgcaataaatcttgctgctgctcactgttgggtccacatgcttttatgagctgtaacactcgccgcgaaggtctacagcttcagtcctgaagccagcgagaccaccaacccaccaggaggaacaaacaacttcagacgcgctgcttaagagctgtaacactcaccgcgaaggtctgcagcttcactcctgaagccagcgagaccacgaacccatcaggaggaacgaacaatccagacgcgccgccttaagagctgcaacactcaccgcgaaggtccgagcttcactcctgagccagcgagaccacgaacccaccaaaaggaagaaactccggacacatcctaacatcagaaggaacaaactccggacacgccacctttaagaactgtaacactcaccgcgaaggtccacggcttcattctttaagtcagtgagactgagaacccaccaattccagacacacagctacagcaagccctctttgcttctctgggccagctctctggagctgaattgtggtggctggtttgaggagctgaatgggcatttctttctctgaatccagtaggtctctgctgtattatagatcagtgtggaatgcagctctaatttaaggagctcaatagaacatgaagtcgcgtatttgcagatcgtggcagtgaatgtttaagaaaggacgtgctggagatgttgaagggaggagtgtgtaacagattgacatggacgtgcggagggaaattaaaggggatcggaaggggggagcgcgttattgttttgttgttatttttttgng

SEQ ID NO: 591550 - DNA, 103 bp, Homo sapiens
ctcgctactccttatggccacgcatgaagcatctgtagataataccgacattaaaactttaatgagccgggctcgccagcttacccttcctgtgcagagatgt

SEQ ID NO: 591551 - DNA, 274 bp, Homo sapiens
tcaaaagcaattattaagtaaagtggtgaaagaatggctagtccatagacacagcagcccatgggctgctctgtttatttttatggctatttcttgatgatatgctaaacaaggggtggattattcctgcctcccctttttagaccatagagggtaatttcctgacattgccatggcatctgtaaactgtcatggcgctggtgggagtgcagcagtgaggacgaccagaggtcactcttttttttttttttttttggaaacgggatttgccgag

SEQ ID NO: 591552 - DNA, 228 bp, Homo sapiens
gtgaactgctattttttcctgcaatgcactggtctttggtttgggaaatgtgctatatttggaccgtgcttttaacataccccatggttttaaataactacttttctttaaagttagatgtaacattttaatttaaatgtcatccattaatcaggcacagtttgttaggttgtgcgagcgttaaagctccccagttttaggcctggagaccccttctgtcgtcttctc

SEQ ID NO: 591553 - DNA, 816 bp, Homo sapiens
tgtgtcacttgcataaggctacaggtgttagcctggactaaaggcatccttgtcttgctgagctattcacctcagatagaaaaggatctaacgggaagatcactgtagtttagtccctgttgacctgtgcacctaccccttggaaccatgtctgctggtatttctagattccacaggtcatcagatgcctgcttgataatagtactataacagactacagaaacaaacgtgtccatcttcttcctagttgtacagtcgtgtgccatggatctgagtctgtaccagtgaccctacataaggctggatggcacctcaggctgagggccccaatgtatgtgtggctgtgggctgtagggctgggacgtgtgtctgctgagtacacggacacacgacttttacaaagattctaacatgctcatacttctagagatgaacacacttaatgatgaaatctcagatctggatcaagagtccggactttctaacatgttccttgacttggggggcgtgtgctgacaacttaggctcaggtgccttaggcatcttgttcgtaatcacagtgtgtgtcctatgagtcctgcacctcacggtccctctgtccagcaatccctttgctccctgagaccctactgaagtggctggtagaactaggggcctgagtggcaggattatcagtatcacgatctgccggatgcccttcgtggcttcattctggaaactgtgtgcccaggctgcttgtcttaagctgcccacatctgcctgggggtgccttcctggcctgtccttcgcacatcagtcctgctccccacggcgtcc

SEQ ID NO: 591554 - DNA, 533 bp, Homo sapiens
tgagatggggtctcactagctcaggctagagtgtagtcacagctgcactacacagcaaaatcacagctcactgcaacctcaacctccctgggcccaggtgatcctcccacctcagcctcccaggtagctgggactacaggggtatgccaccaagctcagctaatttttaaaaattttgttgtagagacagggtctcactatgttgcccaggctataataaagcagagttttggccaggcacggtgaatcatgcctgtaatcccagcacttttgggaggctgaggcaagaggataccttgagcccaggagttcgagaccagctcgggcaaccacagggagacctcatctctacaagaaatttaaaaattatctgggcatggtggcacatgcctatagtctcagctacttgggaggctgaggcaagaggattccttgggccatggacgttgaggctgcagtgagctgagatcataccactgcattccagcctgggcaaccgattgaaaccctgtttcaaaaataaataaataaaa

SEQ ID NO: 591555 - DNA, 309 bp, Homo sapiens
  misc_feature (15)..(15): n is a, c, g, or t
  misc_feature (135)..(135): n is a, c, g, or t
  misc_feature (171)..(171): n is a, c, g, or t
  misc_feature (176)..(176): n is a, c, g, or t
  misc_feature (217)..(217): n is a, c, g, or t
ggagatggccaaccnccccgtgtgttaatgcccccctagacccttacagtgggataagatgtgtggatgtagaagacagtgatattgattacccctgaaactgtgtaggcttcagcctagtatgggtgttagtgnctttgtttttaattaaaaaattaaaaagtaaacaanaaaancttaaaaatttaaaaaggcttatagaattaagatataaagnaaatatttttgtacatcttacaatgtgtgttttaagctaagtgttatttcaaaagagtcaaaaaattttaatattttaaaagtttgtgaggt

SEQ ID NO: 591556 - DNA, 137 bp, Homo sapiens
tcccaagatgagaaattggacctgtgcactactggtgggaatgtaaaatgatgcagctcgtatggaaaacagtatggcagttcctgaacaaattaaaagaagagtcataatatgatctagcagtttctcatccttgg

SEQ ID NO: 591557 - DNA, 219 bp, Homo sapiens
caaatatattgaatggaaggtctaccaaaaaaaagacatggatgaaagacgacgacttcattgaacagaaaacacaagaaagtcaaaaaaagaagcaacaagatgattctgatgaatatgatgatgacgactctagcagcctccaacttcatttcaagccacagccatgtatcaacctacagacaagggtaatattcctaccaactggacacagaccca

SEQ ID NO: 591558 - DNA, 235 bp, Homo sapiens
acaccattaagtctacggcaggaaatacacttctcgcagccttcttcgtgatgtgggacaacgattctggggacctacatgccctactcgctcgagagagaggaacggagggaggtttcgaagcccggccaatcaaactcaagagctgatgaatcatcgatgccttccttggattccaactaaaacatttgttttgcattctacttatatattgcagcgattgctgataaataag

SEQ ID NO: 591559 - DNA, 471 bp, Homo sapiens
  misc_feature (7)..(7): n is a, c, g, or t
  misc_feature (138)..(138): n is a, c, g, or t
  misc_feature (178)..(178): n is a, c, g, or t
  misc_feature (239)..(239): n is a, c, g, or t
  misc_feature (246)..(246): n is a, c, g, or t
  misc_feature (268)..(268): n is a, c, g, or t
tctaganatccaggtgtcatccccccaagcatctgtggatctacacaccttatgtcatactactaccatctcatgatggatcatgggcatccaggtaacacagtcaggtcttcccccaatttggtttcatttctatgnagattcctcttaggtgataagggggtcctcctctagtgtngtcttggttggtaacaataccagctgtcatgcaagctcagggcctgcgccttccactcaanctcctgncgacctgcagcacactctctgnaccgcactgtcatcggtcttctgcacaaccttggaagtaacagtgtgtccccagccttgggggactttgcacatgctgtttcctcctcctggaggtcttgtttccctgtcgtatctagttaacttcctggtcatcctattatatttcaggcactgaagtcactttcctcgggggggttttgctttaatccctgcacgagtaag

SEQ ID NO: 591560 - DNA, 447 bp, Homo sapiens
  misc_feature (37)..(37): n is a, c, g, or t
  misc_feature (71)..(71): n is a, c, g, or t
  misc_feature (283)..(283): n is a, c, g, or t
  misc_feature (299)..(299): n is a, c, g, or t
tgcgggaagcggtttatatggcgtggtaggctgattncatggtcgaacagcatctgatgcaccttttagtngtccagctcatctgatgccgacatgccgctcagggtctgcagcgactggctgaccgtttggtggcccttaaagttgggtgggaggtggcttatgcggtgcatggtctccatcagctctggcaggttgggctggatctcatccatggggcggattttcaggcgcacttgttcatgaccgttatgaagagcgagaccacgtttgcaatgcagcngttgaggttgcccttntggtccttgatggtgatgggccggtcctccttgatccgctccatggccagcgggcagttcaggcggaacttgcggcagattttgtcaatagagctgatttctgatctctggacctgcctgaaggcagctttgtattggaccaggagcc

SEQ ID NO: 591561 - DNA, 133 bp, Homo sapiens
gcggccgcctactactactactgctcgaattcaagcttctaacgatgtacggggacatgaaaagttatttatgctataaattttttgaaacacaatacctacaataaactggtatgaataattgcatcaaaaa

SEQ ID NO: 591562 - DNA, 182 bp, Homo sapiens
tacccctcagttcatttcaaatcaccaatggtcagtcgacagatatttccaaaaagaatctgttctaggaccacttgcgctgagagcacacccgggggtcacagggcagccaccggggtcaaagggcagccatcaggtactccccatggaagggcttgcggccaccagtcactgcaaccccg

SEQ ID NO: 591563 - DNA, 238 bp, Homo sapiens
ttcactcactaagtggctaggatacagtgccagtcttggtcagccactccaggattttcattcacagcgaagtcaaatatctccaatttttcaaactaagttgtaaggcttgaagatgagagaatatactccaatactgtcttataaataggatctagattactactgaagtgtcctccattcatgagttggcaaaatcttcagagtgactgttggagcaaggagcctttcatgtgct

SEQ ID NO: 591564 - DNA, 216 bp, Homo sapiens
cctgcatcactcaggtccatggccggctgctgtgcccagggaggcaggtacaggacccccgggagaaggggcactgaccgagggcccagacagcaggaggtaagcagaggaccctcaccaggtcatagtaggcccataaatcagctccaggacattccgggcattgtcaaactccggcttccgctcctcttcagcttcttctcggagataatcctg

SEQ ID NO: 591565 - DNA, 545 bp, Homo sapiens
tgacaagcaattcaatggcatttaaacctggaactctgctaatcacccatgacctactgatctacaagaggtggtgggtttgtgaggaaaactaggtgatgagaggagttaggaagacagtagctcctatttccttttccttgcctatccctccccacaaggcatgagatttttcattcttacattttatttcctttgcatctttcagtttcattcatcttggtaattactttgccttcctgcctgctcctccttcctttgctcctgccactggggaagaattgggcaagaaacagactatgctgccagatacagaaaatacggaagtggcagatagctgttaatgacttctcaaattcagagcattttacacccttctacgcccttttagtcctagagtactcgtcttttggtgagtggcatggagggggagtttttgcctgaaggatgatttatttttgtctggcttgctgttctctttacctgtttttttctagtcgaagtaatggcatcgtggagagcttgggtatctgagttgttaactt

SEQ ID NO: 591566 - DNA, 170 bp, Homo sapiens
tgggccctcggctcttgcctgcttctgggcccctcggcttcttgccctgcttctgtgccccctcggccttcttgccatgcttctgggccccctcggccttcttgcgctggttctagtggccctctccctttttgccctgattctgggccccctcttgcctttttggggct

SEQ ID NO: 591567 - DNA, 843 bp, Homo sapiens
  misc_feature (214)..(214): n is a, c, g, or t
  misc_feature (255)..(255): n is a, c, g, or t
  misc_feature (258)..(258): n is a, c, g, or t
  misc_feature (263)..(264): n is a, c, g, or t
  misc_feature (287)..(288): n is a, c, g, or t
  misc_feature (327)..(328): n is a, c, g, or t
  misc_feature (366)..(368): n is a, c, g, or t
  misc_feature (380)..(380): n is a, c, g, or t
  misc_feature (394)..(394): n is a, c, g, or t
  misc_feature (404)..(404): n is a, c, g, or t
  misc_feature (434)..(434): n is a, c, g, or t
  misc_feature (499)..(499): n is a, c, g, or t
  misc_feature (511)..(511): n is a, c, g, or t
  misc_feature (513)..(513): n is a, c, g, or t
  misc_feature (519)..(521): n is a, c, g, or t
  misc_feature (843)..(843): n is a, c, g, or t
ggttagtctccggcgagtgttgcctgggctggacgtggtttgtctgctgcgcccgtcttcgcgctctcgttcattttctgcagcgcgcagaggatggccaaagcagatctatactcggacaagtacttcgacgaacactacgagtaccggcatgttatgttacccagagaactttccaaacaagtacctaaaatcatctgatgtctgaagaggngtggaggagactgggtgtccaacaggagtctaggctgggtncanttacnntgattcatgagccagaaccaatnntcttctctttagacgactcttccaaaagatcaacaaaanntgaagttatctggggatcgtcaaatctttttcaaattnnntgtatatgtgtntataaggtagtatncagtgaatanttgagaatgttacaaatctttcatccatanctgtgcatgaggtgtattcttcacagaacagagctcagttaaatgcaatgtgcaagtaggttacntgtagaatgttnangataannngttcttccaatcagttttctcttaaagggcctgttgagttactgaaacagttactttgtgtccaataacggcgatgtgcttctaaaacacaacaaaaacgaaacaaaaatttgggggggcgcggcccaaagagttttaaacatcttgtgggcgcgggcccgagtggtattgacacggacaacttgtccaaaaaccgccaaaagtgtgggtccacaaaaagccgggcacgggtcaaaacaaagcgtgggctcggttcacgccgctactccctctgcggaaaacacaaagacacgccacacaacacccagcacactcagcaaan

SEQ ID NO: 591568 - DNA, 396 bp, Homo sapiens
  misc_feature (329)..(329): n is a, c, g, or t
  misc_feature (346)..(346): n is a, c, g, or t
ttcaataccctgattactcaatccatgccccccacacaccaccaccaacaccacaacgtggcagggatggccccatgcccagctcccggcacacctgacatgaacctaatgtgctgagtcttgtaagagcagtttccctatttctgttcctccctcctcactgtgttagcctccttcctcccagcctcactcacctcgaagctccatacttccaaagcctgcttttagtgccacctcctccaggaagccttcctggattccctctgccaggatgcttctaagagtttccagagcaatccatctgtgctcagctctctgtttgctccctnaagtggacttacagatnaaaacatagattctcctctggttggttcctggcccagtgggattgacgta

SEQ ID NO: 591569 - DNA, 126 bp, Homo sapiens
gtttcggttgctgtgttataacctctctgaggggagcttcttagagtcgcaggagcctggacctaattgttttagagagctctttggacacatgtgtgcaactctaagctctaaggtgtctctata

SEQ ID NO: 591570 - DNA, 148 bp, Homo sapiens
actaacacgtacatataatataggactcaaactataacctacactaatctagctgcggtgccgccaactaaatataaacactatatacataccaaacataccactatatggcttacgaaagccgaccagcctagataactaggacata

SEQ ID NO: 591571 - DNA, 514 bp, Homo sapiens
gatgcgtgtggtcgacgtctatagaggacccgcgcgcgagcgcccgaagtccacccagttcagcactaccactcacctaagagttcagtccttatggcctagacagcctttcaaatttacttagagacccagagccctttagcccatcatggcaattgacctctggggattagtgattcccctctggctagggctggtccaaatgcttcctctgtgggtggatataagctgagtttggtttggtttttctttctggtctaacagacagccttgagttcatcaatgcctcacacttgctatgctctccctctccccagcacccagaaatactctccacaccatgctgcactgctgcggatgagggaaggatggtgtcggggcttcaagactgtttttcctacctcttcagtgcctctttcagtgatatgaagttaaaaccaggtactatgagtgctcacctgatttgtggttcttatggaggtgctttgctcgtgccacttggggcgttcgtgcc

SEQ ID NO: 591572 - DNA, 909 bp, Homo sapiens
ggaggggtgtggcctagaccactaagggccgtgacgtggtgccgctgagcttggaccccgaccagaagaaagagattgaaacgatgaggaaaacgaagtgcctaatccccgctggacgctaactgcagggcaagctccccagtgttgtagttgtgtttcggaggccgagaaccgctatcgggcttcctcggactctggccctggaggggggaaacggcgagggagaaggcgaaacgagtctccagtgtgttcttggggcctggtgcgaggccagagaattctctgcaggcctttgcccgggcactgattaaggctgcgaagagacgcaccgggctgcgggcttagtagcttcaggcttctgaagtcagagggagggctgagagcttacacttctggagctccccgggagacggcaactacccaaccgtgtgggtgtgtttgtgtatgtgtcttttgttgagcttcggctggctgtgttattcattcaacaaatatttatcgatcttcggcagtgtgtcagacataccttcttctcaaatcttcacatcaaacctgaattatctccatttaatgatgaggaaactcgggctcaaagaagttaacgtgttctagccaagactgcatagtaagtggcagataaaacctcaaagttgggccgggcgcggtggctcacgcctgtaaatcccagcactttgggaggccgaaacgggtggatcacctgaggtcaggagttcgagacagcctggccaacatggtgaaaaccccgtctctatttacacaataccaagattaccctggcgtgggtggcgggggcgccggtaatccaagctgttccagaggctggacggagaatcggttaaaaccaaggaggtggcggttgcactgagctggaaatcgggcattggatca

SEQ ID NO: 591573 - DNA, 738 bp, Homo sapiens
  misc_feature (689)..(690): n is a, c, g, or t
  misc_feature (723)..(723): n is a, c, g, or t
  misc_feature (733)..(733): n is a, c, g, or t
ggaggggtgtggcctagaccactaagggccgtgacgtggtgccgctgagcttggaccccgaccagaagaaagagattgaaacgatgaggaaaacgaagtgcctaatccccgctggacgctaactgcagggcaagctccccagtgttgtagttgtgtttcggaggccgagaaccgctatcgggcttcctcggactctggccctggaggggggaaacggcgagggagaaggcgaaacgagtctccagtgtgttcttggggcctggtgcgaggccagagaattctctgcaggcctttgcccgggcactgattaaggctgcgaagagacgcaccgggctgcgggcttagtagcttcaggcttctgaagtcagagggagggctgagagcttacacttctggagctccccgggagacggcaactacccaaccgtgtgggtgtgtttgtgcacccagaaatactctccacaccatgctgcactgctgcggatgagggaaggatggtgtcggggcttcaagactgtttttcctacctcttcagtgcctctttcagtgatatgaagttaaaaccaggaacatggaggagacatatttccacctatttctctccataagtataaaagaccataaaagaccatctagggacttcagaacccaaataatgacacaatgttaatttgcaggttctccctctnnctgcacccaccagcaaggaggagaggaagtgtngagaagggangagat

SEQ ID NO: 591574 - DNA, 639 bp, Homo sapiens
ggacgcgtgggtcgagccttggtacaaaaaaaaaaaaaaaacctgctggttgcccagatacctaggcttgcccattttatgcattccagcaaagtcatggggatactatggcaacttgggaatactgggtctgcatcaaggttaatccggtagttggaccgctagtatgttgggaagttattgggatggttttgggaattttggactgggctgaattatggtgggtataaaggtcatgtgtataacctggcaggcttattaaatctgtggcactgggtaagcttaaactgggtccggtatttattctaagagataagtttatacgtcaaggcaattaaattctggcagagaatttggaaccaaattaaaaaaacaaaaaaagaaaaagaaaagaaagagagaaaagaaaaagagaagaaagaacagaaacagagaaaacagaagaaagaagagaggaagaaaagaagaagcaagagaggagggagggggagaaggagagacccaggcggagcacgagagacggcgcgagaaggggggaagaggcgcaggaagagcgacgccgagggaggagggggcggaggcgacggggaagagagcgagacagcggagaagagcgcgggagcgagagcggggagggga

SEQ ID NO: 591575 - DNA, 612 bp, Homo sapiens
  misc_feature (563)..(564): n is a, c, g, or t
  misc_feature (597)..(597): n is a, c, g, or t
  misc_feature (607)..(607): n is a, c, g, or t
ggaggggtgtggcctagaccactaagggccgtgacgtggtgccgctgagcttggaccccgaccagaagaaagagattgaaacgatgaggaaaacgaagtgcctaatccccgctggacgctaactgcagggcaagctccccagtgttgtagttgtgtttcggaggccgagaaccgctatcgggcttcctcggactctggccctggaggggggaaacggcgagggagaaggcgaaacgagtctccagtgtgttcttggggcctggtgcgaggccagagaattctctgcaggcctttgcccgggcactgattaaggctgcgaagagacgcaccgggctgcgggcttagtagcttcaggcttctgaagtcagagggagggctgagagcttacacttctggagctccccgggagacggcaactacccaaccgtgtgggtgtgtttgtaacatggaggagacatatttccacctatttctctccataagtataaaagaccataaaagaccatctagggacttcagaacccaaataatgacacaatgttaatttgcaggttctccctctnnctgcacccaccagcaaggaggagaggaagtgtngagaagggangagat

SEQ ID NO: 591576 - DNA, 425 bp, Homo sapiens
  misc_feature (376)..(377): n is a, c, g, or t
  misc_feature (410)..(410): n is a, c, g, or t
  misc_feature (420)..(420): n is a, c, g, or t
ggaggggtgtggcctagaccactaagggccgtgacgtggtgccgctgagcttggaccccgaccagaagaaagagattgaaacgatgaggaaaacgaagtgcctaatccccgctggacgctaactgcagggcacccagaaatactctccacaccatgctgcactgctgcggatgagggaaggatggtgtcggggcttcaagactgtttttcctacctcttcagtgcctctttcagtgatatgaagttaaaaccaggaacatggaggagacatatttccacctatttctctccataagtataaaagaccataaaagaccatctagggacttcagaacccaaataatgacacaatgttaatttgcaggttctccctctnnctgcacccaccagcaaggaggagaggaagtgtngagaagggangagat

SEQ ID NO: 591577 - DNA, 1227 bp, Homo sapiens
gagacgttcttcgccgagagtcgtctggggtttcctgcttcaacagtgcttggacggaacccgtgtgctcgttccccaccccggccggccgcccatagccatgccctccgtcacctcttcaccgctaccctcggactgccccaaggcccccgctcgccgctccagtcgctgtcgcagccaccgccgccgccgccgcctctccttagtcgcctgccatgacgaccgcgtccacctcgcaggtgcagccagaacataccaccaggaactcagaggaccgtcatcaaaccgccagatcactcctgaagcatctacagccatcatacgctatacccttgtccaatgctcttaactacatttgaaccgtgcgactgcactgtgcgctaggagacgaacatttgcccaaacttaacattatccttcagccaactctccattgcagcgacgaaggcgcaaccactgcctagacgacaacttggactgaccgccttgacacgacacccacaccgacgagtggcactgaaatcctatcccattacagagcattactcccactgaaaacccaagcacctgatgaactcgccccggacaacagaagcggggactgcattttgcaactggtatgtatgtggccattcaccctttcggcgaaacaaatacactggtagaacttcaagatcatctaacttggaatctggcgccagaaactgtgcccactgacactatcaattgacccccacatatagttgtgacactatcaatatggagaaccacatttaaacccctggcacattggaaccatctggcgagacaaggccactaacaacgactatcgggagctcgacccactgtagaaccccaaacattaggcgccaaatgatcgtggagaagcagcacaccagcaacaatctgggcgtattcgggatagcgatacttaactcatcacgtatgatgaagccaaagcgataaactcaccctattggtgctaaccactagttcagatataatgtaggaatgcgtaaactccgtacaggtcgccaaacttctgcctcctcatatactctagtagagtaatgaacttttcattgtgctacacacatgtcaagagagcaatatcttatcagtcaagagtgatcatctgccagcttgatccataagaatgttactagcactcacattctctatctatacttctgtgcagtatgagctgacacctctactgactctaag

SEQ ID NO: 591578 - DNA, 397 bp, Homo sapiens
tcattagttcctttgcatgtgtaagtcaataattagtaaagcttccaaataaaaagtaatctgtatcgtaatggttatgttggaaagaagcttatgtggttaagtgtccttgctctctttcatcagaattatcacctaaagttagatgggaggaataaattctggaggtctgtggtacaacatggtgactgtagttaatgataatgtaccatatacttgaaaattgctaaaagagtagatttgaaatgttctcaccacaaaaaatgatcagtatgtagtatgcaaggtgaaagatatgttatttagcttaacatccccccggttatacaaaaaccaatttttcccattgtatcccttaatgttttcaataaaaattgccccctatacaaaaaaaaat

SEQ ID NO: 591579 - DNA, 969 bp, Homo sapiens
  misc_feature (47)..(47): n is a, c, g, or t
gcttctcgcctaacgccgtcaacatggtgttcatgtgcgcttcgtgngaggttggccggcgtggcctatgtctcctttggaccatcagtgcccgagaaatcggtcgtcgattgtagatgatcatccgatcagaacagggcttgcggtcgatggaccttgcactcaagtgaggagacaggccatgccttacaagtagcatgcaattcactgattgcatcctcaagtatccgcatcagtgaccacgcaaaagtatgtcctgattaaagcctgtgactagaatggcagacatcaatacacataatggggcacggcattagtgattgggccaatgaacgattttgaagcctagtaacactaaggcaaagaccgagagcgatgaacagcaattttgaactcgttgtttaacagcttactgaaggtcctcagaatatgacggaaccagtaataaattcaagatatgtacaggttaaaggaatagtctgtccgaacagtgtgcagcgctcctcctgataagagcttgtcatgcccaaaaaagaagccacgctgggtgtacctaaagggggatagctggctgtgctggcatgcctgtgctgtgcttgtcatgcgatgcgtgcgtgcttagcctagagtcttctcgagcaatacaaagagattcatccccgcgcagcaggacggtaaatacagaaggcttccaagcacacaggagagagtttccttgtcccaagaaaacatgccaacaacggggccagaacaaggcacgtgcacttgcttccgaagaagggctccccgaaggggttccaaaaaagcttcccaaggcaccaagaaatagcaacccttgcgtaccgataaggtcaattcctggcaaatgaaatggcattaagttggcaaaatcacttaaaaacgttaagtaaatgggttacgtttatggaccctgttgaaaacaacatagcaacaagctggagaccgatg

SEQ ID NO: 591580 - DNA, 433 bp, Homo sapiens
gattcccgagcctgctgagatcgtgccattgcactccagcctgggcaacaagagtgaaacttcgtctcaaaaaaaaaaaaaaacgtgggggcccaaaacccctccatttatacccaacggcggtgcctaagaaggtttatttatgggctttttttttccccccgaaaaagggaagggaagggcccccctggggtggcataagttttccctcaggggtttttttccaggccggcctaaaaaggggggggccttttcccccttaaaaaaaaggggctttttggaaggcccccctttacgttaatattcccccccagggggcgggtttttcccttgcctttaaaaaaagggggttttatttccttgggttaaacttcctcccccatttcaatggggtctcattccaccccttttccccgggggcccctccgggtgg

SEQ ID NO: 591581 - DNA, 271 bp, Homo sapiens
tagtcctatgctcagatgtacagattatgaagattttctcccactctgtgggttgtctgtttgctctgctgactgttcctttagccatgcaaaagttctttaatttaattaagtcccaggtatttatctttgttttcactgcaattgattatggatccttagtcatgaaatccttgactaagtccaatgtctagaagtgtttttccaatgttatctcctagaatttttatcgtttcaggtcttagatttacgtccatgatccatctctagt

SEQ ID NO: 591582 - DNA, 558 bp, Homo sapiens
gaagtgatgctcctgcttgagcctcccaagtagctgggactacaggcgcccaccaccagagcctggctaattctttttatttgtggtagggatggggtttcaccatgtcagccaagatggtcttgatctcctgacctcgtgacccaccggcctcggcctcccaaagtgctaggattgcaggcgcgagctactgtgcttggccctgtctttaactttaaacgtgccagctgcggggggatttactacgtaacaaatctcttccctcatatagatccatcccacttctaggtggatgactcatataggtaactcttgtgaaccaggagggtctttaacagccctagactgaaataattcatttctcattgaagttttattcttggtaagaaaatgattcatggtaggaacaaattaagcatattatatgtaaaaggttgatagataattaggtcacctgataaaacagcattatatggctggacccatcattattaatgacctatattttacgtaacagtttatatagaatgcttcaaatatgtatcatgtcggtaagat

SEQ ID NO: 591583 - DNA, 363 bp, Homo sapiens
  misc_feature (1)..(1): n is a, c, g, or t
natcgagaaggaaatgaaatagggcagaagaaaaaatggcatatggctaagaatactccaatagtgacaaaggacccaagcctcagattcaagaaacagtataaattcaaggcagatgaaagcaaactccacctagacacatcatagtgtatctgatgaaaaacaaaaacagaaaaatcagctcagcatggtggcttatgcctgtaataccagcactttgggaggccaaggtggaaggtttgttcgagctcaagagtttgagaccagcctgggcaacatggtgaaaccccgtgtctactaaagacacagaaaaatagccaggtgtcgtggtgtgtcttgtagttccagttactcgggaggctg

SEQ ID NO: 591584 - DNA, 938 bp, Homo sapiens
ttgtaggcgtctctgtgcgcgcggcatccggtggggcaacatagcgcctccccaggggggggggcgcctcccccctctccttgccccccctcacatatttggtggcgtcccctcccgtccctgtcttgagtagactttctcttttggaggccgctcaacagcgagtcctatcttcttctatgtggggggccgacacagcttgtgataccacaccacaggggggtgcgctcttgtgggttgtgcgcgtctgtccacaacaacaacttttgggcgcatctctttctccgccctgggaggggaaccacatccgccgtgttgtgtgtgtgcgcgaaacacacacacacacccccggggactcatgttgtcccgcacaaaacacccacgcgggtgccaaacacgtggtctcacacagaaaggatgctttcccacgcgacactgatctgtgtggcttcttcggtgtgagacgcgccccccccctcatatttaggggagatatatcccggggtaggttcacactgggggccaacacacgtttcctcttttcaagcgctattttcttgcggcggtcgttctcttggagaatagaagttctcttaagatagctctgctatataagctcgcccctcgggggataatactcggggcatattagttctaaactcggggcggactatgtttgaacactttgcccattaggctccgaccactcttttctcgcttcagggatgtggccgtcgcacccgtgagtttatcgttgcccggagtggcacaaattctgaaggtgggatgataaatggtgcgctgttgaaggaaggatgttcttttttttttcttaacaccatatttctgtagaactaggcagaagaaacactttggtttttcggaaagtgaagttttttttgagcccaaattttttatggaaaaaatttttaatttta

SEQ ID NO: 591585 - DNA, 188 bp, Homo sapiens
cgagtggaggtcgaaagggaagggggggggaggacgcttctgctaaggacgttgtgttctttaagatctcatattcagctctgggaaataattatttctctgattatcccttcaactttggagagaggaccagatttctcaacagcaatactgtggtctggaataaaaggatggcctcgttggcctca

SEQ ID NO: 591586 - DNA, 327 bp, Homo sapiens
  misc_feature (11)..(11): n is a, c, g, or t
  misc_feature (72)..(72): n is a, c, g, or t
  misc_feature (83)..(83): n is a, c, g, or t
  misc_feature (86)..(86): n is a, c, g, or t
  misc_feature (108)..(108): n is a, c, g, or t
  misc_feature (112)..(112): n is a, c, g, or t
  misc_feature (119)..(119): n is a, c, g, or t
  misc_feature (132)..(132): n is a, c, g, or t
  misc_feature (136)..(136): n is a, c, g, or t
  misc_feature (140)..(141): n is a, c, g, or t
  misc_feature (145)..(145): n is a, c, g, or t
  misc_feature (152)..(152): n is a, c, g, or t
  misc_feature (168)..(168): n is a, c, g, or t
  misc_feature (180)..(180): n is a, c, g, or t
  misc_feature (184)..(184): n is a, c, g, or t
  misc_feature (186)..(186): n is a, c, g, or t
  misc_feature (189)..(189): n is a, c, g, or t
  misc_feature (196)..(196): n is a, c, g, or t
  misc_feature (200)..(200): n is a, c, g, or t
  misc_feature (212)..(212): n is a, c, g, or t
  misc_feature (216)..(216): n is a, c, g, or t
  misc_feature (254)..(254): n is a, c, g, or t
  misc_feature (324)..(324): n is a, c, g, or t
tcctcctcggnctcgccctcctcctcggctgtggcatcctggtactgctggtactcgggcaccaggtcattnatgttgctctnggnctcggtgaactccatcttgttnttgntctcgcncgtgttccagtgntggntggnnttgngccgggncatggccgtgaactgntcggtggtgggnttgntnagntcctggntggncgtgctgttgcnaatnttggtggcgggcattttttgcccccggggtggggtgtnacagacagccgttttcacattgttggggatccactcaacaaaatagctgctgtttttgttttgggcattnagc

SEQ ID NO: 591587 - DNA, 105 bp, Homo sapiens
taaacctctacactacgcgcaatttcatgcatcctgcagcttcgagccaatggtgagctccttctggatcaggccattggactcctcgtggccatcttccactaa

SEQ ID NO: 591588 - DNA, 870 bp, Homo sapiens
tcatttttcagggtttgtaatcttcccaaagttttcctttgaaaataggataatgggtggaattttcagagtgattacatacctcaacatttttattaacatacaacaatgggaaagttcatcatccatatactgcagtcacttaaacaacagccaattattgcaagattagaattggagatcttgtcctcaaaagtataaattgtcctttgagttatagaaaataatggaattgggatttctacatatcattattatacctattttaaatttaatggcagccaggcatggttccagctacttgggaggctgaggcaggaggatcgcttgagcccaggagttcaaggctgcagtgagctatgattgcaccactgtattccagcctgcacgatagagttagaccctgtatcttaaaaaaaaaaaaattaatggctggtatatagtaaacttaattcactgtgcccattgttctaaagaatttttttaaataaatgtttcattaaactcttatgatttaaccgtgcttgccctttttgccagctatgtggcagtttacggcagaactgctgtcagtgtgctggtaagccctctattcatccctccctcagagccccagtttccagaactgcttatcactgtgcttggtagcccctcctggtattcatccctcttcagagctcagcttctgggttgtatttcctccatgagttttattaattgcccttgaacaaaattgttgggagccgagaaagtaaatatctgcccgttaaaactttggaagaactgccacacgagaaacatactttggcttgtttgaaaattcctcaaacccttgctggacaacaaaacccattgtctttgtgccgtaaa

SEQ ID NO: 591589 - DNA, 1913 bp, Homo sapiens
  misc_feature (340)..(340): n is a, c, g, or t
tgaaatgacgatctctggaccgctaccgcaacattagacacgtcgttgatatgtgcttgcgtgggagatgtacttccgaatcggtgtggtctacttctcacgcattcaaacgtggtagatcagcattgcgtgcgatagacatggttcacaacgagttcgacatagtcccgtcactgtttctgccagtcgagaagctcttgtgatttatacatagactcgcaacgaacatagtttggaaagatagcttttcctgcttctcttcttaaacaaatacctggcataaatgtatataggttaggacgaacgctactgagaactgctgtgactaggggtgagatgnctagagggaaagagcatagtgtggggattatatggtaacagttaaatatacaatacgtggttgtacatagagaggggcagtaaatttgcgcaagtgcattggatggatacacactcgagccacttttctccacgcgtatcatgtcaagggtctttaggttacgtactatactaatgtggtcatacgtagagcgctcacttcgcgcaaggagcgaagcgcaaggcgtaaaactttgcacgcttgggtagcgtaagggaagaaggaccacctataccatttttgtgtctccataacttgtggggaaacactacaaacttgtctttgggggagggttttggagttcacaaagaaaattcgcgggacagaatattgggggtatggttaggttaatgggggtgcgacaatacgtggtcccatttctcggtcgtataacggccgcgtaagttcgtctaatttacggttggcgcaataaaggaaagcgtaataaaggcaaactgcggcacggtatataaagaaagaccccagaaaaaaggaattgtaaagttctgttgcatagaagctcctctggtaaacacccacctccataagtaggtcactaactaagggcggtttaatgcaacttcgacagagtagcgtttggctaaccaacgggcgccttacccgagctggcactgagggcaaggcgtactttggcacctccaaagacgcgtggaagatcggacatctgtactgttagaacgaaaatttggggacaccggcacatagtttgcccccaaataaattaggcaactcattgccaggagttacccctcatgatatcaccaatcaaaaaagggttgccgtcccggggcacacacacgtcacacacgacgattgtacagcggcacgttgccagtggggcacagaaattttggcgcgaaataatgcccatcatgtaagtgccttttggagccccatcgggtcgcaagtgaatcttgccgcatggcgcaatttgttttacaagccacacgagggtagcgtcctcacatatactctctagcagcaccgttgtgtggctacacaggaatgtgtcgaacaaccagtgtcagtagaccacgccgacggtcggcatcttatctatacgaaatgggctcccaagaggggcggtggcattcactcatatagagcaccctttctggggaaagtgaaagcaacgatacactgctgcgacctaagtcagagctgtctttgtaacaacaccacgctagaggggcgtgccacccaggcaacaattatttgagaggggggaacgatcccccactagtttgcagcagaaccagtcgtaagatgactgttgcaaacaaggagcaaccgaggtattcatcaacgtagcagtaggtacccaagagagaaacgtggtatctcccatgattggatgcagaactgccctggtgtataccacaccccgtgggaatgatgggtctacgctaaagggaggaagactcgacactccttccttgaacaactacatgcacgggatggttatcacacaacgcgtggctgtgtcgtacttctgcaccgacgctcctcacga

SEQ ID NO: 591590 - DNA, 199 bp, Homo sapiens
  misc_feature (1)..(1): n is a, c, g, or t
ntaggtgtacgcccatattgtttctggagttggttcctgctggtgggttcgcggtctcgctgacttctagaatggagctgcacattagcccttatttcatctgaatttcatcacatgcttcagagttgtgtttaagtatttgtttgctgtgtcaggtacacagcaaataaataaatacttaaaaactgatttttaaccc

SEQ ID NO: 591591 - DNA, 176 bp, Homo sapiens
cgtcgacacaaattctgccagacctgggcagaccaaaataatggtgttccaaaaaaaggtccagttgccaggaccacaaatacaaattccatctagacaccattgccctagagcacaccaaaaactatacataccttggcctaaacatcagagccacaggtaacttccgtcgacgc

SEQ ID NO: 591592 - DNA, 234 bp, Homo sapiens
  misc_feature (9)..(9): n is a, c, g, or t
  misc_feature (15)..(15): n is a, c, g, or t
  misc_feature (74)..(74): n is a, c, g, or t
  misc_feature (101)..(101): n is a, c, g, or t
  misc_feature (177)..(177): n is a, c, g, or t
  misc_feature (180)..(180): n is a, c, g, or t
  misc_feature (194)..(194): n is a, c, g, or t
  misc_feature (226)..(227): n is a, c, g, or t
  misc_feature (231)..(231): n is a, c, g, or t
ttgaaattnattaangtgttggtctcccagagtgtagctgtcgtaaagcagaagacagagaaacctaagcatgncggggaaagggtgtaaatgtgaaagangcaaagagatactgagttatacatgctcagtacgtttcgcagtaccaggcaagagaaataggatggttagataganggnaaatataaattgcnaagtttaagacaacagacgtactactaatttnngacngaa

SEQ ID NO: 591593 - DNA, 283 bp, Homo sapiens
tatcgagctcggtaccgtgtagagagaagggggaggtgctacacacttttaaacaccaggtctcatgagaacatattcactatcatgataacagcaagggggaagtccaccctcgtgatccagtcacctctcaccaggcctttcctccaacactggggattacagtttgatatgggatttgggtggggacacaaatccaaaccatatcattccatccctggcccctcccaaatctcatgtccttctcacattttaaaatacaattatgcgttctctctccact

SEQ ID NO: 591594 - DNA, 824 bp, Homo sapiens
tatggcacaattatcaaatctgcacagaagtttaattggataatctgttctacaaaaatatcataaatgtacacaaatataaggaattacatcattaattattatcaattcccatgtagccatttaaaagcattaggtggatctctatgaaatgtgtcatgaattatttattcagaaaatatttattaatccatgaagctgtgatactgttggcgtgctgaaaaactcttcaggatatattacttgcaaaaactaaggaaaactatgataatatgatttcatatagtatgttaaaattaaaaagctgtggtgtattcatggtggtcatgtgattacttatgaaatcttctgaacaggatatatatattccaagctttaaacagtaatacagaacaaaagtgccgtgcggaataaggtcgtaaaggggaattttctttaatgcgtctatattaactgttcacaaataacatatgtatccatgtatggtactaaatttttaagatattccatattaaattttcacgtatgtaactggttgtcataacatttttaaacattcaagaactattaacatatcataaatgggtctgggacattggggcgatacaaaattctcataaccttgtaatgtcttttccaggattagttgtggcagtacgtatccacaggcagaaaaaatatttcctcttagtgtataccaaaggtcacacagaggttcctggtgagatctatcctgggcaaactgtgtaacactgcccaggtgacatgtcacacctttggacttgtctccaggtacacgttaaataggttggggggggggggac

SEQ ID NO: 591595 - DNA, 341 bp, Homo sapiens
catgctggttcaccagtcactgagcacagctaagggacttctcagcgcattcatcgtggctaccatcccctcattgttgccagcctccagaagccctcagatttgcccagcagtccttggtctctctctgctcctttcccccactggccttttcaaccttcagcaccctccttaagccacctgactctccaccctctccactgaagacctcatcctccttgactgctatcaggtgtactcctttgttccctcagcttcctgtcagacttatctctctgcctccaacctcatttcctgcccagtggtatctaggaggaagtctgaattctgaatctcctccc

SEQ ID NO: 591596 - DNA, 284 bp, Homo sapiens
tctgcacgaggctctattgcggccgcatgcgcgcctctgtggagtgcacctcgtggttgtgggcactgtgcccccagacccctcttctttggacctacttctgtttgccggcccatttggcctgctgtgggataagacaccccacgtgtctctggaggtcatacctaactggctgtgcccccttctgagcacactggggcccctggcactgcgaatgcgggccaccaacaccccccacatcaaccttaaccttaactgggctcttgctattccctgagcccttc

SEQ ID NO: 591597 - DNA, 452 bp, Homo sapiens
gtcaccaggaagtactcccacgtacacccaacctccatctgcaagtccgcacaggaaactggatgcttctgcaagctgcagcccctgcctctctgccaacttcatcaccggctgctcccattgccactttttctttgcttcctgttggtggagcccccactgtgttctcctttggttcttcatctttgaagtcatctgctacggtcactggggagcccccttcatattccagtggctccgacagctctaaagcaggcccaggtcctggcccatcaatcttctctttggttcccccttctaaagcctccctagctgccatccctgaagcgtctcctgtggttccatcagatgcttcattctcctttggatcatctggtttgaagcctaccctggaaagcagaccagtgccaagtgtgtttgctccaaatataacaatgaattgcgtattcccc

SEQ ID NO: 591598 - DNA, 840 bp, Homo sapiens
  misc_feature (513)..(513): n is a, c, g, or t
  misc_feature (521)..(521): n is a, c, g, or t
gcgggcccctagtgctggtgttgcgggacggggcctgatggcccggtcggttggggcgtggtgggcggagaggatgtgagcctccgagtgctgttaggcgactctgtcatctctgggcgtgcagtgcgtcgtttcctggtcgcgggccgtgtgatggtgccgggaggaagtgaagcgcatgtggagctagtgcctaacgttggagccggggttccggtgaggtgaggagtgcctggtgggattgtgaggatcttggctgagcgtgtgactcggctgaggctggggtcagacgcgagtcacagatagtgacgtgcgcgagagtcgcagcagaggaatccttgctggtgaagctggccggagaggggctggtagcactccgcctcgccagtatgtgtaagactatgctccagagtcgcgtaagggagcagagggcgaccgtctcttcgattcatgctcttgtgagtgtataacatacattgtcatcaggcatgagtactcgctcgagcaaccaantgtcgaancatggtgatgactgacagtcaatatagggcatgaccgcttgcagttcgagccaaggcgaacatcacttctcatgggaagcgatgcaagagaacctgcatggaaccagaagaagtcctcctgtcatggcgccagagaggaagaagggatcgtcttgtctcgagataattccattagtcaagatgaagaactatcagcatctcccttacgcacagcaggaagcaatagaggagcctctgagccttcaccctccgaatgtatctccccgtcttggtacatccttggtggtcatcaacccaagggattgcagtcatggttgaa

SEQ ID NO: 591599 - DNA, 158 bp, Homo sapiens
aataaactacatgcgtgtgtgtgtgtgtgtgtgtgtgtgtgtgtgtgtgtgtgtgtgtaggacagtatgtgtgtatgtacgggagacagagagtggagaaagagactcagagagagtgctgctttgtgcccatgaatgagtacatatatggagatgta

SEQ ID NO: 591600 - DNA, 249 bp, Homo sapiens
accagcacgggaccgcttcgatcgccgcgtttagggcgagcaagttggttaagctgggaaatgcctttgatcacatccaggatgtgtacgatgttatcggtactaggcattaagggtaacgatctgagtgcaggaccggctgctctttttgcgaaagctccgacatcgcctgaataggtatgctccaccactttacgaccatcgtcagctatgtacgcatggcaccactggcatgctgagacgctgtca

SEQ ID NO: 591601 - DNA, 452 bp, Homo sapiens
ggaattaacctggtgctggatattttcaaattgtatctagtgcagctgattttaacaataactactgtgttcctggccatagtgtggtctgattagaaatgccccatattatactaagaaaagatccggctttattttttggtagatagaaataaatagctatatccatggactgtagttttttttcaacatcaatgttcattgtaatggtactgatcatgcattgttgaggtggtttgaatgttttgaccttaacagttttccatgaaaacgttttattgtgtttttaatttatttattaagatggattttcagatatttatatttttattttatttttttttaccctgaggttttttgacatgtggaaagtgaatttgaatgaaaaattttagccttgtttgcttattgttcccagacattgtcaataaaagccttttagttgaatgcga

SEQ ID NO: 591602 - DNA, 336 bp, Homo sapiens
taagtggagtgattaaagatttacatgaaggttgggcactgacgctcacacctgtaatgccagcactttgggaggccaagccagaagattcacttgagcccagagaatagcttaagccctatagtgaaaccctgtctcttcaaaaaatccaaaaccgttctgggctttattcaggtggcataaaattcactccaaaacccttacaaaagagccttaaggagctcatgggatccttccctgcctcggttcttgagctcgcggacagaggagggacacaggagaggaagaaagggaaatgctgacagtgttggtatctcgaggacccgtggaaagtct

SEQ ID NO: 591603 - DNA, 313 bp, Homo sapiens
cacgaggaggaaacatatctagattatgtgattccatgctttgttattgtcaactcagcacgaaccattttgcaggaaaatggatgtctgtctgatactgatatgttttctcaagctggattgagaagtgaagaagcaaatgagaacttagactttgtattatcatttttgaaatcaaatacattgcccatctcactgcagtctataagaagtagcctactgctacgattcaggacgtctatgaatataaatctttggagcgagataacagtattgttgtacaaggatggacgttattgccaggagtctcgag

SEQ ID NO: 591604 - DNA, 1412 bp, Homo sapiens
  misc_feature (798)..(798): n is a, c, g, or t
  misc_feature (1172)..(1172): n is a, c, g, or t
accaggtttcgtattatgttaacatatagtgccttagtaataaggaaaagaataaccatttagtgtatacattacgtttatgcgttcttgagctacttgatatataactcagggtgtcgtgatggctgtagtagatggtgacgacacagagatgaatgagtttgactcgatacggaataagagatataggagagaagacatatttcaaacgtccgtgtgatgtatgaaattgatctttggattccagctaatcgttgctgccaagaggttatccatagtcgtgaagcatcgcaatgataataaatctaaggtgaaagatcgaatagatgaaaatagtgaattttgggctagaaggatgatgtttgtgttaggcttgcttaggagatttcagaatctggtatacatatttgttggagcgaaaagtgcatgcgtttcatgtaacctgcttatttttgggtagtatacgacaaatataactgcacattcaagcttagaaaaaactttcgctcatcgttaatgaaaacaggacctacgtgtgacgtaaaacggctgtggtatgggacttcgagcttgtttgcacacaatatattgcattacgcataattcatgattaaggaaaggactggataatgtctgctcccattttcaataatgagcaaagggacgtaattcgatctacaacctcgaaatattcctccccccttcactggacttttcgagggtgacaatgaacccccaaccggcatgaggtatgcaaatggttcgattagggtggccaaaaaagaatttctccaattntatgggaactaattcgaataagttaaggaattactgtgtgtggtgaaaatcatataacctttttattatttgcaacaaattaaagcaccatgaaacgaaccagttcgcctttatattcctctgtgtaaaagtgggcgcccccggggagagaggttttcaccttctcttgtggcatctttagggctcaacagaaatggggtatttacaaccgccaatttgcttggaatataaccaattggaccattattttcatgtgcctaagatgagcgtggcttcgatttacaaatggtttgggccttagagcaatggctatgggaccatttatgccatcctgaaattgtaaaccattcggaggtagattggaggaagagggnacaatggggcgtattttggtgaataggaccgaaaaaacaagggtacgaatcatcataaagataggataagacagaaagagttcctttcccaaataaaaaatttcgttgggagggaatgagagactgctttctttggagaattggccacttgggcgaaaggtataacttagggaccttgttatcgcaaaggaaagaacttttgtcattaaaaaggagttggaaagttttgggacaaggaaa

SEQ ID NO: 591605 - DNA, 484 bp, Homo sapiens
  misc_feature (3)..(3): n is a, c, g, or t
ttntaaagagagaaagcagggattgcgtgaaataaaattttattatttatttctttatagacggtagtttcaccctgtcacccagactagagtgtaatggcacgatctcagctcactgcatactccgcctcccagactcaagcgattctcttgcctcagcctccccagtagctgggattacaggcatgcgccatcacacctgactaattttagtatacttagtagagacagggtttcaccattttggccaggctggtctttaactgctgacctcaagtgatctgcctgccttggctctggaagatcacgccttgggtccttggaagatccagtgctctggaagagcacatccaaagtgctggaattacaggcatgagctaccatgcccggcgggggagcttattctttaaaggcactttgtaactataaagggctgtacaagtgctatttgctgttcttatcatccagtcccttctgtcgtctt

SEQ ID NO: 591606 - DNA, 336 bp, Homo sapiens
cggaactgaaccagaggttcacaaaacaaggtagtaggttgtttctgcgtcacatgatcttggcctacagtaagctttccttcagccaagtgtttaaactgtacactgtccttcagcaggacttccagaatggtgagaaaacgacagtggaggatgctgatatggagctgaccagtagagatgagggtgaaggaaaagtggagacagaggaatttgaggtatctgtaagagaagaggaggtatcttggatgggggctctcggtgccaaaagaaaggagagttgctggcttactcaacaggcttctttgctaaagaatgatgacggtagtggtgctg

SEQ ID NO: 591607 - DNA, 367 bp, Homo sapiens
gtcgacggcagctgttgcagcatccagtttatctcacgaatttcagtgattaatcatgccataaaggttctggtttaaaacctgaactgaaaaaaggctaggcacggtggctcacgcctgtaattccagcactttgggaggcagagataggcagatcacttgagctcaggagttcgagaccagcctgggcaacatggcgaaacctcatctctatgaaaaatacaaaaacatagccaggcctgggggtatgcgcctgtagtcccagctacttcggaggctgaggtgggagaatcacttgagcccccgaggttgaggctgcagtgattgtgccactgcactccagcctgggtgacagagcgagaccctg

SEQ ID NO: 591608 - DNA, 510 bp, Homo sapiens
cgcggtggctcacgcctgtaatcccaccactttgggaggccaaggcgggcagatcacgaggtcaggagatcgagaccatcctggctaacacggtgaaacctcgcctctaccaaaaaaaaaaaaaaaaaaaaaaaaaaaaaaatgtggggggcgcgcgcccggggccccgagagagaaagccttccaagaacacaagccggtgggggcgcgcgcggggcgcccaatgggggtaagggagaacactgggggcgcataaccgcgggtccccaagagagagagaactcgcgggcgccagagagaaaagagggcggggagattctctccccccaatataacaaaacgcgcgccggggggagaaaccggagagcgggttcctggagaaaaaatctccaaagagggagagcgtctcgagagagggaccatataagcgggagatcttctataaacacagggggggctcaaaggagaacgccagaatattcaaaaattaacccccggacgggggggtca

SEQ ID NO: 591609 - DNA, 359 bp, Homo sapiens
gcgggtcgcaacggagctgctctgagatgccgctacaggctgtcaactgccggctcttggcacagagggcggcctcccgagtggccccgaaccgaaggcggtgggaccagcggctgaggccaggatgccatccacgcggcgcggtggctcctcactcatcccacatgttgcttatctttctgcagtagactgtccatgagctgaacattttccgtcattttgagccagaacttactattggcatgtctggtgattagctgtgtgactgtgtgctacctgtgccagcatgccatggaatgtcatcaccggatagaggaacgtagtcagtcagtcttggagagcacaatgactactgtggc

SEQ ID NO: 591610 - DNA, 1559 bp, Homo sapiens
  misc_feature (312)..(312): n is a, c, g, or t
  misc_feature (1289)..(1289): n is a, c, g, or t
gtaattcgttcgtcttaccctattatcattggaactgtggcactaagtcttcatcactttcaattgcctcattctaaatttcatatacttcaaatatccaattggacttatacagtattggaagaagctaacagcgactgagagacttgtattcgtgcattaatcacgtaccttgaatcacgtttattgccaattatattaattagactccgcgcacttagtacctactatgcagaaggtactattggcttcaccttctattgttaacactctcgcaacctctaatctaaatactaactcaaaacactcagngcgcaatgtgcacagttccccacatattactagaatgtcgtgtgtgactaagatgcattgttacttaggagaacatctatcggacgttctttatagtatttgacatataaaacttgactctcatgagggcctctatcgtctccctcttatacatccatagtgagacaggctaactccttaatcgaagccgactctcctttagtgcgctaccgaaataggcctaaggttctatctatatcttcagaaacaacgcatatcaacaagcgctttaacttgctacctaatctattcttccatagttgatagccctaatggcgtacccagaataccttgtcccgtgatatctccagggtatatataccatttaatcaattctttagagccacgagttctcctaaccaccatttaaacattaccaatttgtgacaaaacgtccaattataactccttgcaggaaacatagcgggttcctaaccctctttcatggcttatactaaatttactaagaacagaaattctaaaaagacactcttttcggccaccttttcttcaccaaaccatgatactcaccactccttttcacaccacacatttttccttaaaaatttgttccactaaacatatgaagccttaattccacttaagtgacaacacacttccaggacattgattacagagcccccttgtgcaatagtccccaaaagggcacctttaccccgagttatatatgcacacccaaaccattgttccgttagggtctacaccagggccctttctattaagcacatttgtgccaatccgcgcaagtagacatccaatcctatattaaagacgttggtagacaccagcaagagtgagcgagtaggtcaccagacacatatatgaggcgcgcttgcaatttctaatgtcatttcatggagtgaagcacagacagccgcccgacggattccgcctagttggtaacgtccgcaccgtanaacacaccaagagaggtggcacccccatgtactcttacctaagaggaagaccactatagactcctgacaaaactataggaacgcccttgcgctagggagggaccactgaatgagtctccagactggttatgagatatatactacccacctatctatcctgcaacgttgcagcccgatgttaaacgacgagccatcaacccgtaccattagaacttcgaagaagcgcctgtaacttaaagcgccaacaagataaaattgaaaaacccttta

SEQ ID NO: 591611 - DNA, 1315 bp, Homo sapiens
cagaggacagctcatgtgctgatccccaccgacaattcgaccccacaccacaggcaggcatctcaagcagccaagcattacaagcacaccacacacacacattgtggctggcatgcacactttctcaaccgttcacagcaagcaataggcacacagtcatcatcaggcacacacacagcaaccagcaatcatattcgtgttcttgcgagcaccggcacacagcacacatgctagctcttgcagcagccacagcaatcatcatggcgcatgcaacgtgcacaaacaacagcaatcacccacagccacaatcagcacagcacacgttcaggcacccaagcaccgcacaacatccacaggacacactcagagtccaccaccgtaggaactatagctgcagacaccataacacccacattgatgaatgcgccactatctagcgtctgggatctccttgctcccacacccgtacttcttcgtggccgtcgtacggcccaatcgttacaacgctgccaaagacctcgttcaaccacgcacgcgcaccatgtcacgtactcataacagtcgctagtaacgacaccacggacgggcggggcaccaccgcaccgtcacgataacgctaaagcacacacatcggatggacaacagggctcgtggcagtggtgcacacacctaccaccagaagccacacacatcacacctggccctccaccggttccataacaacctacgaacgcgggctgcactccacgcacatacaccccccagcccccccgctgacacacgcctgccccaccgagggccccccaccgccgcttccaccccctgccgacacgcggccgcgcacctcaccaccaccgtggcgacaacacaacaccgcccctgcacacgacctccccagcaacaagccacccaccgcacaccacatggccgctagtaaagatagagatcccatagacaacacccgtggatacaagaacatcgcagtaatgccagcaataacgggcaacagccatccccccaacacgtcccaacggcaccatgaggtaccctgatatcaccacttaaagaacacgcgcctcccaaccgatcaaccgacaatgagataggcacaagcgccacttggacagggccccagccggaagggacaggccccggccaacgtcccaacaccacaacgcggaccaacaagtcgctcgccacacccaacacaacgagcgcgccctaacacacaccgcgacagggaaaatgacggacgcactacacccacacaccacagcaagaagaccacacagcgcctcgccacgaccagctaaac

SEQ ID NO: 591612 - DNA, 300 bp, Homo sapiens
  misc_feature (14)..(14): n is a, c, g, or t
taaaagcccccccntttttttttaaggagaagggcccggtcttttcccaagtccccacagggggggggaaagcattgtttttgggtaaattatgaaaggcaaaatttttttatttttcccccaaaaactttttttttttgtttttttttgaaaaatgggccttggggcccccccttcccccttttttgtcccccaatttgaaaggtaaaaggggttttggtttccctgggggggggggggggcaaccggggtttccctgtccatttttttgagcccggttgaataaaggggcccccctta

SEQ ID NO: 591613 - DNA, 267 bp, Homo sapiens
atctgtagagtggacctgctagatgtctagcagggatctgacagtcgagacatatgaagaccaactccatagagtacccaccagccctccagggcaatacagtcatagctgtgtcctgcgcatgaacccccatctcagtaaatggcaagtccagtctaattactcaaccgcgaaaactccaggctcccttctattaccttctcacttccctcattatccgagtatccagtccactgggctaaaatccattcatcagacaagtaccat

SEQ ID NO: 591614 - DNA, 382 bp, Homo sapiens
cccgaggacctccgaggtggacggctgcttagtactgccaccttcttggtgaggggctttagcgcccgcctctgatgagatcaagacccttcaaaggtttttgtctccatgtttttcatcgactcctcagacattggacagcagcagaagaatactggagtcctatttgcagaaccacttgtgtgattggaagaccgctattatgagtatctcatgacccttcatggagtggttaatgagagcacagtgtgcctgatgggacatgaaagacgacagactttaatccttatcaccatgctggctatccgggtgttagctgaccaagttgtcattcctgttgtggctaatgtcacttgctattaccagccagccccctatgtag

SEQ ID NO: 591615 - DNA, 374 bp, Homo sapiens
aaatataggctccaagcttgtgagcagccaggacaaaaggataatgtgtctgcacagctttttttaatccaataaaacataacatggtactcagggtttttattccctaaatttgaacttagggaatatttttccttgcagtttttttcttaatatcagaagcatcatgtcttaattgctggggttattatgagaaattctacatatagcttttttaatgtcaatcctccatgaaagagaattatgcagagagcactattataagtcatgttcttaaaaggcaattttatatccttgcggggtttaatagcacgccacatacccgccaagggtaaaactttttgatgaactaatttgatatggaaataaaggct

SEQ ID NO: 591616 - DNA, 430 bp, Homo sapiens
ccaggggaaccaagagaacccgtagaatcctcaaccgtgcgggccatcaaccttcgagaaattccagttgtctttttcccagccgcatcctgcctgtaaatggccggggaaggctttaaaaaaggggcgcattgcgatccaaccctcggcaaccgattccgtttttttatcacggggtgggagggaaccgtggggtccctgcgtggggcccatgggttaaaccctccagtatttagacctaaagtccaaatgcttgtaggagccaatttgttttttaagtttttttttaaaacaaaaaaatcccgttttcccctttgtacttcagcgctagccccttttttgcccacccgagtactggcgagtatttttttttttgggcctccttctgcaaaacaataaacaaaggacccaaaggtcctcctgcctggca

SEQ ID NO: 591617 - DNA, 172 bp, Homo sapiens
tgtggactctgagtataagatgtggcttgcggttactgggtatgcgcttggtgttgacgggtggggatggggttaatgctatggtggtcattgcagatatgcaggccactcacggagcccccttctcccgccgctggcgaaagaaggggaccccctattgcgtctcacgcag

SEQ ID NO: 591618 - DNA, 299 bp, Homo sapiens
tacagaaccttcctctaacgaggatatggagcgtaaatacctcataatgttgatcacatttgccaatttacacaatgtgtagttgtccctaggtatccatggggaattgatactaggatctcctatggatatcaaactccaaggatgctcaagtcactcatacaaactggcataatatttgcctgtaacctacacagatcctcttgtgtactttaaataatctctagattacttataatatctaatgcaacataaatactatgtaaacacttgttatgatatttttattggcattattt

SEQ ID NO: 591619 - DNA, 154 bp, Homo sapiens
tgctgggattataggccatggtttaactacagtacagttgtgcacacaaccttcccacccctacccttgacccttcatcaggatcaagtctctgtattgaaccggatagcggttcaatacactgctgttggccaacattgaaccggatagcttg

SEQ ID NO: 591620 - DNA, 398 bp, Homo sapiens
gaggaagtgagagacaggcagacacttctgttcttcctgcagaaagtgctgcttctgcagtgactcgtcagatgctccccagagcccagcacagacccggctccacccacttctgtgggttggccagatgagtgagaaacacaggcacagcaacgagagggagctgaggccggacccaggagtctttttcctatggtcctgcctgatatagtaaccgggaaagggatgaatgtgatgcaatgtgctcttgtaatggagcatcacaagaacaggtcaaagacacaagccacacagcaacgagcgcggacagcagggcagacacagctgcacccccatcaggtacatttcaggtgctcagcagtgcacttgtgctttgtggctgccttctggacagcatg

SEQ ID NO: 591621 - DNA, 888 bp, Homo sapiens
cctggctcagcctcctgagtgctgggactacaggcgcgtaccttctttagtagagactgggtttcaccatgttggccaggatggtctctatctcctgaccttgtgatctgcctgcctcagcttcccaaagtgctgagatgacaggtgtgagccatcagacccagcatttttttgtttttaatttaaatttacaatttttttgcattttttggagaggtttttattgtagtttggttttggttgttagttgttgttgttgttgtttttgagacagtcttgtgctctgtcacccaggctgggagtgcagtggcatgatctctgcaacctctacctcccaggttcaagcaattcttgtgcctcagcctcccaagtaactgggactacaggtgcacgctaccacaacctggctgattttttttatgtttaagtacgagacagggtttcaaccatgttgcccaggtgtggtctcaaactcctgagctcaggcaatccacccgccttggcctcccaaagtgctaggattacaggtatgagccaccacacccagctattttttctttcgttttttactttctaacacgtgggggggggggtcctcacttggtttatcctggtagatctcgaactcccggagttaggcgatcctctggctccgagccccgctaccgagtctcggggtttctttacttaaaaggatcccttaccttttgttctctttttcttgctgcatgtggagatttgggtttcaccttccggccatagattgtggggcctcccggccgtggagctggtgttcctaacccttttggttctcgacacactccttttgatactagcagggtgtggagcggggcgctcattctccctggtggctttttgcccggtttc

SEQ ID NO: 591622 - DNA, 559 bp, Homo sapiens
  misc_feature (375)..(375): n is a, c, g, or t
  misc_feature (547)..(547): n is a, c, g, or t
gacgacgcttcgacggtgtctggatattgtctttattccatacagttactatttagaacaagacaagcatggcattggaaaatggttagcttttaaggttgtaacatagatttctaaaacaaagaaactaaaattacagtgttctggaagtctgtaacatgatgtgttgagaactagaatctgtgtttcccgggaggcctttcctgtaacataagccttttggcctgatttctaggcagcccgttggagtcttaataaaagcctcacaaatagggtaaaataatactttggtggtcaaatattttctgactgattatcaggttttggctgggttttgttaactgctgagctctttgaacaaataaaatatttggnctacaagtgctctgattatgaggtgggtgaacctgtagccttgccagtcaccctcctttaccaccttaacaggtcctcactatttaaaaatcactgttttgagttccctgttaggagactcagattctcccaataaggcattgctattaagcttaatttaagtacagaacancgtcgaaggggt

SEQ ID NO: 591623 - DNA, 398 bp, Homo sapiens
gtctttgagttcggacacgcaaggctgtgagactacctattgtagatattgccccctatgacattggtggtcctgatcaaaaatttggtgggggcgttggccctgtttgctttttattaacccaaccctttttgaaatcccacaaaaaaaatttaaccccatatgggttcctcttgttctaatcttgtcaaccagggcaagtggccggcaaaattcccgttttttttttcccaaatgtttgggacccgtataatttggcaaagaaaaatgatacttctctttttttgctgttccccccaataccattccaatgctttttgttttttttttttacccattcccatttccaaatgtctcaatggggctataataaataaacttcccccctctttttgata

SEQ ID NO: 591624 - DNA, 103 bp, Homo sapiens
  misc_feature (75)..(75): n is a, c, g, or t
cagacttgtctcttgtaaattgaaaaagggtttagcccaaagacttgcagttttgagatctctatttaactacanattagagtcctcgggttatatagttccc

SEQ ID NO: 591625 - DNA, 298 bp, Homo sapiens
cttactataatggccttaatgtcatccatgttgtagcatgtgtcacaatttcctttttaaggtggaacaatatactccattgtaaatacacacaccactcatctgttgatgaacacttgggttgcttttgcctcttgtgaataaggctgctatgaatataagtgtacaactatctctttgggaccctgctttcgattcttttgggtaggaacccagaagggcactactggatcatatggtaattctgtgtttaattgtgaggatcacttgaactcaggagtttgtggttccgtcgacg

SEQ ID NO: 591626 - DNA, 207 bp, Homo sapiens
atcatcaacctccttaccccatccccacgccctgacaccatccctgggatatcagctggcacctaatggcaggttgttatcactggtccacttccatcatgaagagatcattaaaataaatttgccttctaggtccacagggccttaaagaatgtcctgttctccatgatgggatccccacaccattgcttctgaccaggtcgacgc

SEQ ID NO: 591627 - DNA, 1030 bp, Homo sapiens
  misc_feature (325)..(325): n is a, c, g, or t
  misc_feature (728)..(728): n is a, c, g, or t
  misc_feature (1030)..(1030): n is a, c, g, or t
gcggagtcgcttccacgcgcaggacatgagggaagggcctggtgctagtgaatctatgccatacagaaaaagaagatgatgtgccacagttcacaggagtgcacggagaggaatcctcgataaatggtttagctgggaaagctgagatagagttttgaacatatctggaccacctctgaaggcagggaagactcgaaccttttatggtctgctatcaggacttccccagcgtggtgctagttgggctcggcgaaaaggcagctggaatcgacgaacaggaaaactggcatgaaggcaaagaaaacatcaggagctgctgttgcangcggggtgctaaggcagattcaatgacctggagacctctcgtctgtggaggtggatccctgtggaggacgctcaggctgctgcggagggagtcggtgcttggtctctatgaattacgaatgatcctaaagcaaactacagaagatgtgctgtgtcgggcaacagctctatggacagtggggcactcaaggagggtccgtgggcacgcaccacggatgtcctgttgtgctctctgggcgagaacttgtgctacgtccccattgcctggagacagccaacgcgcaagtgactatgactggcgaccaggatttgcccggcattacttgagcaagaactctccaaagtgctagttggaaacaccgagggtccagtactcaaaccaggtcttccgatttgaggaaccnggcactgggaacattgcgcactttgtggcaacacggtttcacatgccccaggtttgtggaatcactaccaagggagacgcatttgcacgaaccccccaggttgtggacaagaaccacacaagagggaacacacaacggcatcgcattgacgcaaaggaaggcgacgtcgcattatttcgcaccctttttaaatatgccgcaataacgcttaatgacgagaaaaacgagtagtgtaaaagacacaaatagtatgataaacaaagaacggatatcgatgtataatatagcaaatatgaaaggcn

SEQ ID NO: 591628 - DNA, 153 bp, Homo sapiens
gtcccttctcatagctacctgaacgaggtccgcagcacgacgtagcaaatggctacacggaggacatcgacacagcctgccccacactgtatgcagaggctgaccacgacagcctgcgggagctcctggtcactgagaacttctgtcttctga

SEQ ID NO: 591629 - DNA, 754 bp, Homo sapiens
  misc_feature (34)..(34): n is a, c, g, or t
  misc_feature (74)..(74): n is a, c, g, or t
  misc_feature (82)..(82): n is a, c, g, or t
  misc_feature (107)..(107): n is a, c, g, or t
  misc_feature (109)..(110): n is a, c, g, or t
  misc_feature (125)..(125): n is a, c, g, or t
  misc_feature (134)..(134): n is a, c, g, or t
  misc_feature (161)..(162): n is a, c, g, or t
  misc_feature (182)..(183): n is a, c, g, or t
  misc_feature (186)..(187): n is a, c, g, or t
  misc_feature (193)..(194): n is a, c, g, or t
  misc_feature (196)..(196): n is a, c, g, or t
  misc_feature (200)..(200): n is a, c, g, or t
  misc_feature (204)..(204): n is a, c, g, or t
  misc_feature (210)..(211): n is a, c, g, or t
  misc_feature (218)..(218): n is a, c, g, or t
  misc_feature (220)..(220): n is a, c, g, or t
  misc_feature (224)..(224): n is a, c, g, or t
  misc_feature (228)..(228): n is a, c, g, or t
  misc_feature (266)..(266): n is a, c, g, or t
  misc_feature (282)..(282): n is a, c, g, or t
  misc_feature (295)..(295): n is a, c, g, or t
  misc_feature (309)..(309): n is a, c, g, or t
  misc_feature (328)..(328): n is a, c, g, or t
  misc_feature (750)..(750): n is a, c, g, or t
agggcccctgctggacagcacgctccctggggangagggtgagggaccccaggactgcacagctggggacttgntgggaacntgggacaggtgagaggcccactctngnntgtggcgccagggcnttccacctntgcatccagccatgcacccaccatttnnccacagggtacaggggcagnnttnnttgatnnanagcnaacncttctnntgctgtntntggntgtnagtgagacccctctggaaagggcagaagcaggcaagcnagggagaagggggggnggggtggcagtangtgggtaggaatgngcagagggggggcagagcnttgctcgcttgtgggaggtagacaggtctcactgcatacatgggacagatgtgtgcacccacacacatatacatacacacacacacacacacacacacacacacagccctttgaacccagcactggcctgaggaaggtggccccggaggaaccctgaaggcacatgtccaccaggctataatgcccctgccaccctggggctcagctggccagactcccaggggtgggatgctgctgacccaggagcccaccaagtccccagggcagttctgggcagggccagaaaaccccacgcccagcccaccagcctgccactcctggcctcagatgccactcccggcctcagatgccactcccagcctcagacgcagatgggcccgagaggtgttcctgggaaacagttcacttagcaagacccagtncctg

SEQ ID NO: 591630 - DNA, 277 bp, Homo sapiens
gccccaggtatcaaatttcctaatcagagccccctgagttgactcaagtcgagccatttagccccgataaagctgcaagacagtgaataatacttgctgttcccagcccgtgtgtgtgtggtcttattttggataatccctgctgggtacagtaacgcatgcccatggtcccagctactcaggaggctgagatgggtggatcatttgagcccaggagtttgaggctgtagtgagccatgattgtgcagtactctagcctgtgcgacagagtgagacc

SEQ ID NO: 591631 - DNA, 211 bp, Homo sapiens
  misc_feature (2)..(2): n is a, c, g, or t
tnccgaatccttcatctctcatcagagaagggatcagacttcatgattccataagcaaacaaagccagtgatacagtctaccatcatctaggctcaactgaatctttgagtttactctgaatctagcactcttcataagacagattgttgattgaatttgcgtttcttcggtatttttatgtgcacatctctatgcctatgacagaatctt

SEQ ID NO: 591632 - DNA, 941 bp, Homo sapiens
acttggattgatttgctctccaggacatcagcacatggccctgatcagcactaccacatccaaacataagtcactgaaaaacacttaatatttatgagtggtaatgacaagggacatgtataaagtactattgctagattcatgcctcaaaagttattataaacagacctttattaaacacatctgaaagatgtagaagtccctctatagtctagtatagtttacaatagagttgtaagaccaaaaaaaaaaaaaaaaaaattcaaactcgttattcaggaaccgtgctttataaaatgtcagtgggattcttggcattgccaatcttgatgcgtgggaatgggtccatgaattagggttctgtgagcagttctgggcccagaaattctggcattgggttctagttggatgaagggcatgacctctataaagggtttcaatggctaaaatatttacctggggatactggggtcagccatttggactggagcagactaggggattcagacatggtttcagttatttggtttttaaccaaatcaaccaatgctccctgaaataagtcaatgaactcatgttccagcatcacgtgccaaagggtctgtgattggcactctggatttcagggagggcaagccagttcgtgtgtcttcatcgtcttccgttagagaaattctcctttttcttacagatagatctatatttttacaatatatttttacgcagatgaattttggtagatactaagaaattacattaaaagaggggtcagggaaaaaaaacttttttggaactaaggtggttttttacaataaagccggggtggccatgggaacagaggggttccgataaaacggcaggagagtaaggtggaaaggaaagggtacgtcgtttcacaaaaaaaaaaggggcaggacgactgagagtaagggcagaggtta

SEQ ID NO: 591633 - DNA, 105 bp, Homo sapiens
ctgtctcgtgcgatgccatgtggattgaatgaggccaaatcaaacccagactgattcttaattcccgtgcccttgctttttcttcttttagatccatcattagta

SEQ ID NO: 591634 - DNA, 615 bp, Homo sapiens
cagcccttcctcccgctgctgcatctgtctgagaggggaagctcttgttttcaccagctggaaccctttatgaggaaaactgagccgggtggccaaatggagaaaggagaccattttctaggttttcctacgcgtgatattgacgcgtgctttttctttgatttgaggtaccagcatgtaaataaccaaatttcccatattccaaaatggatccatatatagcagatgacatgagatgacccttttggattttgaagcaccagacttaaaatctggacccaggacccacccatgtaaaagatataaaattaggaaacttataattcccagcgtaaatttcagcgtttgacacccaccttactcccagtgaataggtggccagctccagaaaccaggacagcactgctgctgcccagagccagcgtcaccatcccagctggccacttctgtgagagctcccttcctgccgggcaccgtgtgagttccagcgtgggcccagagacttttaagcacattctgtcattccaaagggaaatgatgcccacccccgatgcagcatgtcctgaatgaatgatctgtttaaataccataataaaagcttatagtttgagtaga

SEQ ID NO: 591635 - DNA, 292 bp, Homo sapiens
caagaatataacaaaaatcagccaggtacagtatggctcatgcctgtaataccagtggtttgagaggccaaggccagaggatcacttggggccaggagtttgagatctgcttgtcaacatagggagacccctgtctctacaaaaaaacgtgtgtggtggtgtacacttgtggtctttgctactcaagaggctgaggcgagaggatagcttgggcccgggagttttaggctgcggtgagctatgatcatgccacttcactccaactcagcaacagaatgagaccctatctcta

SEQ ID NO: 591636 - DNA, 141 bp, Homo sapiens
  misc_feature (75)..(76): n is a, c, g, or t
tctctgctgctccgaggagtaggtcaaacgtgacaggaggtgaaatctgaagaagacctggaggaggaggcaagnnccaggagatgaggcagaagcactcacaggccgtggaggagctggcggagcagctggagcagacga

SEQ ID NO: 591637 - DNA, 362 bp, Homo sapiens
cgtcgacgggctggctggggacacggccaatgatatacatattattcccagattctgagtttgtttgaacagcatgcgtaacctgaccctcttgttctattgatttcaaagtgatatcgatatgagtgattgacaaataagtgttgcgtttctcttttggcgacccccctccctaaatcaaaatggatcactccaaaatgtaactgactgtctttagttatggcctagttatcctcagtctttagttatgtcctagttagtcttcagttatgtcctagttatcctcagtctttagtatggccaagttatccttagtctttagttatgtcctgttagtctttagttatgtcctaggtcgacgc

SEQ ID NO: 591638 - DNA, 495 bp, Homo sapiens
  misc_feature (252)..(252): n is a, c, g, or t
  misc_feature (349)..(349): n is a, c, g, or t
gctcttctgatcttcctattggtctgtgtatgaaatacatccctccccaccacccttgtaatacaaggggagacagctgataacggctgagatttttctactgcttgctccctctactctctccctgattgtgaccactaacatttccactgctcgaatcacacaaattacctcaactttagtagagggagcgacgacacaactctgtcaacccagggtacatgtaaccgtttaggctcacccttatttcanaattttcttataatcacgttgtaacagttttacaaaatcccaggatttcaatataaaaactctggatttcttagctcctcctgtaaacaatgtgaangacctgccaaccctggcgcttgcttctcctaatgacaaaacagagctgaataactgccctattagatcaactttccaggggacagcacaatcctccccagaatgttttactcatttatgttacctgcacggttcccttaggcattt

SEQ ID NO: 591639 - DNA, 332 bp, Homo sapiens
ttttcttttacaataccaaaatgcaatgaatattttatttaaaaaaatcaaattacatgtggtcactcatgcctgtaatcgcagcactttgggagaccaaggcaggagaattgcttgagcctaagaattcaggatcagcctgggcaacatgatgagaccctgtctctataaaaagataaagaaattagccagctgtaggggtgcacaactgtggtcccagctacctaggaggctgaggtgggaggatcacttgaacccagcaggttgaggttgcagtgagctatggtcatgccactgcactccagcataggtgacaaagtaagactctgtct

SEQ ID NO: 591640 - DNA, 199 bp, Homo sapiens
actgccatgcttgtcgggacatacttctggtgtgcactgtgcggaaacttgaggatgaaatcaaagtgagctgcatgcatcgttaaaggcatggcctgttctcctcacttgcagctgcaaggttccactcgaaccaaatgccctgattctgactcaattactcagtgtacagtccaggggttaccgagcctcgagattc

SEQ ID NO: 591641 - DNA, 186 bp, Homo sapiens
  misc_feature (19)..(19): n is a, c, g, or t
gccccaagttttttaaacnggggggtaagcattttaaagagaccccccaggggttttggcctgtgactaactaattgcccccccccagccgagacctgggggagactgtaactagtgatgtttggccacccaaagactttattttggggtttaaggagaataaagttggctcccttttccccccca

SEQ ID NO: 591642 - DNA, 595 bp, Homo sapiens
accaatgccatcccctctttgcctctccccatccctcgctggcctgctcctgctcccctatctacccatcctcccatacaaaggctctgcagtgagacattgaacattgaacaaaagcacgctgtactacccaaccaaccaccaactacagatccaacatagacacgacatcagacgcaacgaatggcattactacatggctcccactatacgcacacacatagtacatatcgccacgcagctgaacgagcacaacacaacgagaccagacacacgcgagacaaagaacagagcgctagcagctcgcaacggatgagcgcgtaggtcgcctcatgactatgtgcaccgacgtcgtgcgcacgacaagcgcaacgccacccagacgtacagagccgacaccatctcagcgacgcctacacgtgcatacaacgattcctcgatccggctatccaagctacatgagagcgcagcgaggccgcacaccgcacgataaggaggaaggcccgacgtggggtcatttcgtccgctgacgaggcgacagaaaacgaccgtcgttctatgcggtcctccagcacgaacccctggtctcactctt

SEQ ID NO: 591643 - DNA, 147 bp, Homo sapiens
gagtgactctgcaggagcttatcctctacgacatctgtgaccctcaccgtcgctggttcttctctgaccctcagcccgcctgcccttcctctgaccctcaccccgcctgccgcttcctctgagcactctacaactggcttttcatcc

SEQ ID NO: 591644 - DNA, 418 bp, Homo sapiens
gtggacttcatgtgatgctgccaggccagacgccagatgctagtgctctactctggccaggtgcaccatgcctaagcatgggtcactatatgctgtacactggttgagacaggctgacgcacatgtgctaatagcgcctatggacgctattgactactgcggtgtgtgtcagatgtgttgttcggtactcagttgtgacaggtctcttctgtgcgactacatatgtgtgcattaggctgtgcgtcttcccaatcacacgtgtagttactacgagactctcagagttgccagagcccagtctgagcactgttctgtggccgcacttagaggacgatgtctcatgagtatcctcagctcattagatttgttcggaccacttgtcgcaccagtgtcgctctgacatgcttacagtgattac

SEQ ID NO: 591645 - DNA, 141 bp, Homo sapiens
gtgaagttctccaaggagaagtacatcctggactcatcgccagagaaactcccctgcctacagcactgtaacccgtgtccatgccgcccctgcagccccttctgccacagcattgcctgcctcccctgtcgcccgccgttc

SEQ ID NO: 591646 - DNA, 363 bp, Homo sapiens
  misc_feature (1)..(1): n is a, c, g, or t
ncacagtctagagtacagtggcatgatcttggctcactgcaagctctgcctcccgggttcatcgcgttctcctgcctcaatatttttagtagagacggggtttcatcgtgttatacctggctaattttttaaacccatctgtagatatggggtcttgccatgttgcccaggttggtctcctggcctcaagcgatcctcctgctgtggcctcccaaagttctgaaattataggtgtgagcctctgggcttgccttacaaatattttagagttaaattaaatatatacacatttcaaaacttctcctttttatagaatatgtgccacaagcgcccaatattcgatctgttctctcactattttct

SEQ ID NO: 591647 - DNA, 323 bp, Homo sapiens
aacaattggggcctatcccgcgtatccaatgggaacaacaccactccaccgccgtgcgaagaaaacatgttatcccatcttttcgcgccatgaggaagaacatgctaatcacctcgggaataagcacctccgcgtttggcacaacagtagccccaaagatggggcacactgcgagagggaccccgctctcttctaagcaaggtgccatctctcctagtgctgcttgacacgccgacccgaatatcaacagcctgtagaggacttcatctgcggcgcctccggagggttttttttttaaaaagaaccctaacgcaaaaaaaaca

SEQ ID NO: 591648 - DNA, 203 bp, Homo sapiens
ggttttccccctccccatccgccccaggccccctgcttgggcttgccttgccccccctttgtttgggccccggggtttttgcattgcctgcctttttgccttccccttttttttttcccgccccctgcccattgggggtttcagcccccaggctgtgggctccttgggggcgggcccccaataaatttgaattgttgttgcca

SEQ ID NO: 591649 - DNA, 151 bp, Homo sapiens
gatcttgtgatcccctgctgtacagttgtggtctagtagtatagtgatgcagcagtaggactgggagagataggagaggtaggactgctgtgattaggatggatcagacgaagaggggcgtatggtatttgggttataggcagggtggttt

SEQ ID NO: 591650 - DNA, 338 bp, Homo sapiens
gtttggaggtgcttgccttaaagctagggaaacagctctcattcggaactagaagcctgtccctcagtggtagggagacagccatgagcggttttctgggaactgtgggatgtgcccttgggggcccgagcagaaggaagatgctccagaccattaactacagcctggtgctctctctgcaagtcctgctgctgttctatgacctctttgtcaattacttctcataactgctcctcttcaacatcatcatcatggtgctcatgtgcttgaacaccttgatcttccaggctggtctggacaacctcctataccataagttccggtaccatcatactgac

SEQ ID NO: 591651 - DNA, 220 bp, Homo sapiens
  misc_feature (31)..(32): n is a, c, g, or t
  misc_feature (40)..(40): n is a, c, g, or t
  misc_feature (51)..(51): n is a, c, g, or t
  misc_feature (89)..(89): n is a, c, g, or t
  misc_feature (121)..(121): n is a, c, g, or t
  misc_feature (129)..(129): n is a, c, g, or t
tcgtggtgggaagaggagatgttagctatgnnggtatgtnttatttctttnatccattaaaaaagccctgggagagtgtatattcaggncaacttgaatctgtgtttcctggttacagtcntcacactnggcctaagtaaaccccctacgagccccccaaagcgccacgcgaagtgccacacaaagggccacccgatgagccacacaaagagccgggtac

SEQ ID NO: 591652 - DNA, 434 bp, Homo sapiens
  misc_feature (206)..(206): n is a, c, g, or t
agacctgaagaggtagatgtccccaatgtgtgcctaaaggtacaaaaagaccagactaatatattaatatatatctgctgtccagacagcctgtatcttgggggacagggctggcccagtcctggtggccgctcaccccctcggtctcctcactcccttctacctgccactcacacagccaggtgccttggagggtcccaagctgncgcccagccaaccctcctgtcttcccagggtagcccgcctgccagtccctagctgcacagggcagttgggcccaaccctgtctgtagaggcgcctggtgtatctagcactggccctgcacggtggcctttgctgggggacgggggcgcaaagtcagcctctctcccagtctaccaagagaagcccctttcccccatgggaaggacggaggccttcgggccccagcccc

SEQ ID NO: 591653 - DNA, 381 bp, Homo sapiens
cacgagggcaagtacgcctgcgagaaaaaaactttaccgttttggcgagtcaccaacaggatttaacttcagttttaactctgctttgtgtccatctaagactccagccacgttgtttcagagtgggacttcagttggcactgatgaacaatcagatgttactcaagcaacaagagagagatggccagtacattgaacctgttgttcctttaactgatctacttgaagtatccagtggggaggaaaatgaacaagttgtttttagtcacagggcaaaactctacagatatgataaagatgttggtcaatggaaagaaaggggtattggtgacataaagattttacagaattatgataataagcaagttcttatagtgatga

SEQ ID NO: 591654 - DNA, 375 bp, Homo sapiens
cagccgatatatcagtagagaactgggtagggataggaagtacttggcagggaagcagcaatctagctgtgtatgatataacatgcatccttgggcaggtaggccttaaatcttacacagtggtgaagggatgtttgttttggtaatgctgcagtagagtgggagtacttagttctctggtggtccagtatatctaataagtgtctttcatataatttccacgtaagggaaataaggtagtacttttcttaatatatttctatgcttaaaattctctttcctagtcaaaaatggcccaaatctgtgttggctttcggctggctacattggtctcccttacttttcttgagctaaagacaggctttttccaccggc

SEQ ID NO: 591655 - DNA, 168 bp, Homo sapiens
agccgtggtcaggcatgcaagactggtcaggcatgcgagcttgcgcaggtcttgtacgcagcgcctcctcgagaagccaacagagcagtaagcgcagcagtccggagtgtggaagatgaccaggagggtcacctggtgtgccggatcggcgattggcttctcgagtag

SEQ ID NO: 591656 - DNA, 156 bp, Homo sapiens
gctcacagcctcctgagaagctccaacggccacccccgccaggaacctcaacgatacaaagttcattgaacataagctactgaccttaaccgtagtcatgctgcataagtcagtcactccgtcgtagatcactccaccctgcaacctacctaaagc

SEQ ID NO: 591657 - DNA, 411 bp, Homo sapiens
gtggaggtagatcaccagaggaggtcagatgtgcgatagcccatctaggcccagctgatagtcatgcagcacgcatagtgacacagaggctggaggaggacaggcacagacacctggtacacgtcagggaccgcctcattggccaagctccagtgtgcgctgatctgcacggccgggggcttaccctcctccgaacggtgacgcacgcggggagtgttgaccagcagggacaccatgctgaatcgctcctgttccagtgggttgaataggaccacaaacctgggcgaggaatccagctggatcaccgtgcgctctgggagggcgtcgtgacttaagcgagtgtcatccacttggaggaagggcgcctcagggtcacagtggtaggtctccttgtcccccagcaccagcacg

SEQ ID NO: 591658 - DNA, 1348 bp, Homo sapiens
ttcgaatgctgcggagctaggaggcggaggcagctggggaggtcctgagcgatgtgaccaggccgccatcgctcgtctcttcctactctcctgccgcctcctgtctcgaaaataactttttaagtctaaatgaaagaaagacaaaacgtaagtcgtccgcccctcacgcccatctcttcctctcagccttacagtccggtgaggaatgcccggcggttggttagctccgccgtacgggggccgacgcagaccaaagccctctggacggccccagggcgactgcccctctagaaccgccgcggcacaccattgcattcccctatctaacaacccctggcgcctgagaacccaattgactacgcgcgacgatccaggacacgcctggccccgttggtccctatccaattcttcccagacgtttacacccgtggagaccacaaactgagggggcttccaagctgatgcctggaatgcagaaccaagttcgtatggcacggacacttttcagaggcccacgaaatgcgctgtggaaaggggcaacccctttggcttcggtgccaccagacacccaagtttaactttaacagcccagcttccaaccatagcggaattcgccccgaagtgaaaatggaggccccatttagcaacaagagggaactcccctggcgagtattcaaccgcggggactgcggtcagtttaccgcgaccgcaatgtccaaagcgccgcaagtacgcacgagatacttggcgacattatcccagtctcgtatggcacatattaggcggcaacccaatggcgcgcacagcacaaaaccaaggcgcggcacacacatccttggcggacctctttgtcaatgccaccaagaggcttccaccgagaggaaagcagcatcatgggtcatacgacgcgcggcgcatatctccaatcccgccgccaagagtctatcgacacaagcctctcatgcgagcagctaccagtatggggagcaccttatcgaagagccgccccacgcatttagattatgaaaaacaacgcgtaggtggatccccccggtccaccacaaagcaacactacttttgctgggcgcaacatgacgcagcgtcaacttctggcgacctcccccccaaatatctttggcagtgccttgaccccatggactaatgtatggaagaacagccacgctatagacaacagcacgagccgccatgaggtgacggtgtgcataatgacccaaccttatcgcaaccacagagactacgcggcacaccccatacaagtcgtgtttgtggcccaaaccaattcttgtcggctcgacggcaaacgacagtgtcgcccagacgacaccat

SEQ ID NO: 591659 - DNA, 447 bp, Homo sapiens
  misc_feature (38)..(38): n is a, c, g, or t
  misc_feature (40)..(40): n is a, c, g, or t
  misc_feature (83)..(83): n is a, c, g, or t
  misc_feature (95)..(95): n is a, c, g, or t
  misc_feature (99)..(99): n is a, c, g, or t
  misc_feature (193)..(193): n is a, c, g, or t
  misc_feature (204)..(204): n is a, c, g, or t
  misc_feature (216)..(216): n is a, c, g, or t
acgcgcttccctgccactgggttagggaaggcttgcgnanagacgatttcggaggacagcaggtgttagccaggcagcggcgngccgccaacacnacgnaggggcggagagacgccgtgagcaaggttcctgacggagacttcgcccttcatgtggtccaacctgggcattggcagctatctccctgtctgtngttggggcaanctggaacgctcnctattaccggctcctccatcattggtggaggagtgaaggcccccaggatcaagaccaagaacctggtcagcatcatcttctgtgaggctgtggcaatctacggcatcatcatggcaattgtcattaagcaacatgggctgagcctttcagttgccacagaccccaagggccatcgccatccggaactaaccatgcaaggctactccatgtttttgggggctggcctcaacc

SEQ ID NO: 591660 - DNA, 678 bp, Homo sapiens
gcgcttaaagcgaagggggaagctccagccccgggggaagctcaccccaaagcgaaggcaccaaaggccaagaaggccgagctgaaaggcgttcacagccacaaaacgatgaagaaccgcacgtaacccacctgccggcggtcgaagacactgcgacaccggagacagcacaaagatccccggaagagcgctcccaggtgaaacaagctagaccatatgctaccatcaagttcccgctgaccactcgagctgccatgaagaagatagaagacaacaacgcactggtgtacatagaggatgccgaagccaacaaggactagactaaacaggctctgaagaagctgcatgacaatgaagaggccaaggtcaacaccctgatccggcccgacggagagacgaaggcataagcccgactggctcatgatgaccatgctcagcatgaggccaacatgagtagagatcatccagaactgataccaagttgcctaagtcgcgaaaacagacacatatatactacgcgctcaccacgagatcgagacccgcactcgcaatcattcatgggcgccctgggttcgataagaactttcgacccagagccacacgtaatgcagtgaggcccgcaactacagagtcacacgtggtcactagcacagccttaatagtacacatcagactcct

SEQ ID NO: 591661 - DNA, 85 bp, Homo sapiens
acggccgtgtattactgtgcgagacgttatagtgggagctcacacactgactactggggccagggaaccctggtcaccgtctcct

SEQ ID NO: 591662 - DNA, 590 bp, Homo sapiens
  misc_feature (162)..(165): n is a, c, g, or t
  misc_feature (170)..(170): n is a, c, g, or t
  misc_feature (172)..(174): n is a, c, g, or t
  misc_feature (176)..(176): n is a, c, g, or t
  misc_feature (179)..(179): n is a, c, g, or t
  misc_feature (182)..(183): n is a, c, g, or t
  misc_feature (187)..(187): n is a, c, g, or t
  misc_feature (198)..(198): n is a, c, g, or t
  misc_feature (202)..(202): n is a, c, g, or t
  misc_feature (393)..(393): n is a, c, g, or t
  misc_feature (463)..(463): n is a, c, g, or t
  misc_feature (500)..(500): n is a, c, g, or t
  misc_feature (574)..(574): n is a, c, g, or t
  misc_feature (590)..(590): n is a, c, g, or t
gcacttgctggagctggggcagcagtcattgctatggttcactaccttatggttctgtctgccaactgggcctatgtgaaagacgcctgccggatgcagaagtatgaagacatcaagtcgaaggaagagcaagagcttcatgacatccactctactcgctcnnnngagcngnnnantgnatnncatnaagctcttctnttcnttctaccatttgaatgcattggtgtttaactaagggccatccaaccatccaacctttaaaaaacaaaacgaaagtgcttctcatcaatgatatgtaaggtggactatgaatcacctgagtacaattctttggtgcttagcacttacatttcccaatttataacatgatgtaaatcagatcttttctacaangctctatccagccctttttttgaaattctcaaactcattactacgtctgtaaaaatcaagatactaacantggtcaatgcaaagatttgtttgattttaaccacttnccatgtgtatacataacacctttgcattacttctatgctttgaccttcaaaggaccatggacattatgaccatngatgagatgcatctgn

SEQ ID NO: 591663 - DNA, 261 bp, Homo sapiens
gcacttgctggagctggggcagcagtcattgctatggttcactaccttatggttctgtctgccaactgggcctatgtgaaagacgcctgccggatgcagaagtatgaagacatcaagtcccgcaggggttttccaattcagaacatccactataatcgcccgtaagagcggctcaaggcagccagatgaatgtatgcttgattgttctttatacgtattgagtatagcattggtgttaaactaagtctatctgatcgccat

SEQ ID NO: 591664 - DNA, 509 bp, Homo sapiens
  misc_feature (1)..(1): n is a, c, g, or t
  misc_feature (9)..(9): n is a, c, g, or t
  misc_feature (13)..(13): n is a, c, g, or t
  misc_feature (35)..(35): n is a, c, g, or t
  misc_feature (42)..(42): n is a, c, g, or t
  misc_feature (70)..(71): n is a, c, g, or t
  misc_feature (114)..(114): n is a, c, g, or t
  misc_feature (160)..(160): n is a, c, g, or t
  misc_feature (175)..(175): n is a, c, g, or t
  misc_feature (216)..(216): n is a, c, g, or t
  misc_feature (287)..(287): n is a, c, g, or t
  misc_feature (378)..(378): n is a, c, g, or t
ngtgctttnaaanaaaagcttggaaagaatttttncaaaaanaattgggaggagaggggattttgccttnnaggggctttctttcttccccaaaggaggaattcagtcatgcantgggcaaaggcaagcagatgggaatttttgtttttcacggattttntcagggaaagacccnttccctttgccagcagaggaacctgtagttttttccatttnttttttcagaaccaaagtatgtatcactcctcatgctcacagggattgacaggagagaattcaccaggatnttagctcaaaagacacagcctcagaatggccagatggattgcacgaaacctgacttggattcaccattttcctcctgccataaggctgtgntcccacataacctcccagaagctccagggaagctttccaagagcaaaggcttggaaattgaatgttaagaaaattatgacataaattacatgtaaatagtgtatatgattaaatattgtccagttacattt

SEQ ID NO: 591665 - DNA, 627 bp, Homo sapiens
  misc_feature (208)..(208): n is a, c, g, or t
taaacctttccttatgagcatgcctgtgtggggttgacagtgagggtaataatgacttgtgggttgatggtaaatatggggctgtaaatggtcagtccagtgtttaaatctgacgcaggcttatgcggaggaaaatgtttccatgttacttatactaacattagttcttctatagggtgatagatgggtccaatggggtgtgaggagntcagtaatatgttggggatattaaggtagtgggtgttgagcttgaacgctttcttaattggtggctgctttaaggcctactatgggtgtcaaatttttaactctctctacaagggttttgtccctagtgtccaaagagctgtccctcttgggactaacagttaaatctcacagggggattaaaaggggtccggggggcaatttcaaccgttcgacctaagatcctatctgggacaaccgagttaatcaccaggctcggaaggttggcgcctctacctataaagtctgcccacatatttggctacataaacggggtgtgcccttaaagctggtcctaagggtagctcgtcgggtaacgggggtctaagcttgggctctccttgcaaaggtattcctagtaatgcattatgcacaaggtcc

SEQ ID NO: 591666 - DNA, 253 bp, Homo sapiens
ctatccacaaaatttcgcctactgtattattctagaatatgtaccggttgacaagtcttagcgttacgttgtttacatccatcttgggtctagtgtgaatgtgctgcagagatatggatctagtcttgtccttccacctttgttctattctttgtccccaaaaccaagtattgaatagggtgtcctttccccagttgatatttttgtccgctaagttgaaaattacttggttgtaagtattcggccttatcga

SEQ ID NO: 591667 - DNA, 968 bp, Homo sapiens
ttgcatgggtaaagccaaacatcttgtcggaggatgacagctgcactcgcatcaagccatcgcctttgagcgcattggtcagcgtgtaatctcctgcactgttcgttgatgcgagaatgtcgagcgtaccggggtttgcaatggttacttcactcgaccccatgcccgttaccccatctgccgtatgagacgcaatggtcaggaggccgtcattgaccagacgttttaccgctataagtattccctgcattgaacaccgtatggcctgcatcatggatcacttttccgtctttatcgtcacctgtaatcagcatatcgacctggtagccggcatcactgttattggtatgattaaagacaaaaacgccgttcgccaagaccaaactccactttcgtcgcattggtgataaatccggcatctgacgccgctcaccgtgaggcagaccaatgtttagcgttcctacagcgggctccataaacacctaagtaaacttctccaccttacgaacattccagcgtaccgttattcgtcagggttaacgtacccgtaccagatgtccctacgtacatattgaatgttcacagaaagagagttctgcccatccacccttcacggtggccttactttgtcattgagacgcatctgtgtatcaccgcccttaactatacctccggtgtattatcagtcacccggtgcttaatacaccgacctgtagcaatgtgcgtaagtagatgatgtcttaacgtccagagatgtccttgaatattaatatccccgtacggagggattctccgagaatctaagcgtgaatagggtgcgtaagaattgcgaacggtacaataacaatagtccccgttacgatagctacagtaggacacgtcttccaaaatattgcacaccccgattagcaaccaaaggaaatatgacacccggaagcacgtcaggtgcacttatgcgaaaatatcac

SEQ ID NO: 591668 - DNA, 1052 bp, Homo sapiens
cctgcgtggtagcacgcccacgctgcggtgtcgcctatcagaagaccccggcgtgcttctctccttcccgcgctttttttctctaccccgcggcgggtgtgtatatatttttatccaacccgagcgcctgcttgtctccccttccgggctcgccttgtttgtggggccgtcgatcgttagatccaatcgttggttcgcactcaacaacaacagcttgggttgtctgcgtcgtccgtctagtttctcgccggatgtgttgtttttgctccccacccccttcctcctgtgggcgtcgctctctcctcaccaatgtgtgggtggggtcgacacaccacaacaaactgtttgtgggtggggtgtgttgtctcctcccctccccccccccctcctctcttgttgttagagagtgaaaaacgtcttatttttcatttacctcctaccccccctccctccaccatagaagagaaataatcaacacacacatacagaaaaattatatctattagaagaaaaagacattccccccctccctaactcactcctcccccccccgcttcgttgttttctaaaaaaaaggattcgtatagtgagtgacttttatatatgtagtattattgagttatgttttttatgagtgagaacccacgcatttctctcctctctctctctctctctctcgcaatataaaataataatcgtcgggttgttatagtatgtttttttgtctccccatacttgttttgttagttcgggtgtttatataataggctctcctcttctcctctataaaatatgtttattattttttttggtgtgtgtgaccccagccccctcttctctccaccgcacttggttgcatctatgagcgagtgtgtctacccaacaataatttttttttctccccccagcgagacctgcgcccgcttgctttttgtttacttggtctctccaccgacgcccccccttttttttctcccccccatattttttccccccttttttttcccttttttcccccccccccccccttttttaaaaaaaaattttgtgta

SEQ ID NO: 591669 - DNA, 1127 bp, Homo sapiens
  misc_feature (415)..(415): n is a, c, g, or t
gctgcccgtattagccatgggggccatgaatttgtcgcggcgggtttcggtaactgcggtggaaattctgtctggccggtccccttgaggcactcgcctcggattccgagggggctatacctacgagctcaggtgggctgtatccagacaggcttggctgcgtcactggtatacagaacacaagtggatgacgccatggagaaaagacgacgtatgtctgtacagtacatgaccgtgtctagaattctatcgacacggcgttcttggtggataagttattgatgattcctagctattagcattggcactggggattccacgtagcgaatgttgctcataacgtcgtggtgacatgtattcgaatttggtcaaagcttgaactagtcagacaattccaagaatggcatatgtcccnatgaaactagatgtgggaatattgactacagtcatgctcaccatttagtgctaagcatcgtgatattgctcacgttcaactatgtgctaatcgatatgatctctagtaatagatgatgattacttgtaacagcaagcaaatggtggccggttccgtatcaggatttgaacagctgataataggggtgaatttactgggtaaagagagactggacaagtagcagaaacaattggatggcatggtggaagaaggacgattgcgaccctgggttattcactatcgacgacaatctgagcattgtgattccttgattttgagtcattcctccaggaagagcaaccttgcctcgagaaattcaagccatgtgttgctcttctcccaaatatacaaccgtgattattcgttctataagttcgggacaatactagaagtgtaactcaaaatttattatttctttgtcattgtattcgtgcctacctccggtttgatcacaaacaagaaaatgaagccgttccttgaaccatttaactggttctactcaagatcgtatcgggtgtcaggacattggaggggcctttactggttgttgaaggaaggtttggggctttccacggtcccccacaagaacatggtttcgaacaacttgctgctaattacaaaaccctcgacgaaaataacagacaacttccgtatggaaccttccgtaaaattg

SEQ ID NO: 591670 - DNA, 138 bp, Homo sapiens
tagtgcagtggcgtggtcattgcttattgcagctccgactcctggactcaggagatccttccgcgtttggcctctggagtacctttgtacttgttggcttgttgccaccatgaccttgcttattttctgtagtatttt

SEQ ID NO: 591671 - DNA, 160 bp, Homo sapiens
  misc_feature (90)..(90): n is a, c, g, or t
  misc_feature (129)..(129): n is a, c, g, or t
  misc_feature (134)..(134): n is a, c, g, or t
ggagggattttcagtttgtccacatgttctctaacaacacttgcccatttctgtaaataatccaaagcagtccaaggctttgacatgtcnacaaccagcataactatgattatccttcaaaaatacagnttccngtgaaaatttaaggaggcctttgtga

SEQ ID NO: 591672 - DNA, 797 bp, Homo sapiens
catcggcgaagttctccacagtgagaaagccatgttcagttctgatgcgcccaagatcgtgacagcccaatggcgagcaagcctggcacgagttcagagtccaggcatctccacagtgctctctctaggcagcctggagaatgcaacctccggcaccgtctgaaggcctccagcatccagcggcagcatgacatcattcacgcgccagcttcaaggccacattggcacacgcttgcgtaggctaggtcaggcaacagcctcatccatcacatcctctctgcgttccccaggtatcccttccacacctggcacacatcgtttctccacgagggaaacacattcccgcaagttccccggggcctcaggtcaacgtgccgcaacatcttgcgcacagcacacacacagtttcccaagatcggcggcaaaggcgcataggtaccggttcctactctcaatccgggatacgaagcaggcgcagcaacatccccataggccactcaaaaggcccaacagcgatccggcacaacgaacaggccccggtcaaccaaccaaccacacaatgtaccacgccccaacgaaccacgcccggcattcgcaccaaagagggaaacgggaccccgggacacaccgttccccggggaacccagggacacacatggggcgggcccacaccaggggccaagccagcgcgcacccacaaacatacccccgcgcattccctcgcacaaaacgacggtcccacacccatcgcatgggggacggaccacacccgtatggttaacacaccaacggagaaa

SEQ ID NO: 591673 - DNA, 352 bp, Homo sapiens
gttcttggtgagaatagtgtgtcctgctctaatctatatcctgtgtgggaagtcgggtgtggaccgccgttctggtcggtgtggggtgggccaagcgagacagccgacatgggctaaagcacaacggtctcctaacgaagtggctggctttctcaaagcataggacagaagctgtctgctctcctcaatgtgctggtcgtgtaccgtagagtgagccaggatttcgggcagcagttttcatatattctactttcgcgtcgaggttgcctggcttcagcataggggagatgctttaacaggagggccatcgctttatccttggagttcctgtctgacaaagaggtgcctgggg

SEQ ID NO: 591674 - DNA, 332 bp, Homo sapiens
tgccgaggcagaaggatgtttgactccggataaggagcgctgtgtgcattcattccgggtgcatcggtgcgacagcagaggtcgggcggcgactctccggcagcggcggcggtaggaggcaccagcggcagtgcagggaccgaatccgagcagcgctgcgttacctctctctctcgctccttccccctctaactcacgacatgcaagtcgctccctgcgtggctcgctttcactcctccggcccggcgggtgtgatgtgccgcgccgctgcccacgccggcgctgacgtgactggcgccgcgcgcccgggaccgacccctcctgtccggacc

SEQ ID NO: 591675 - DNA, 490 bp, Homo sapiens
  misc_feature (236)..(236): n is a, c, g, or t
  misc_feature (300)..(300): n is a, c, g, or t
tcattccacagacttctccagtgtactcctactccagtgcacccaggttatttgcatagtttttaagttggatttggttttgagaaagcaaatgggtgtcttgtttacatgatcctgttatttcacatcccagatgtgtgtgtgtttgccagcagagcgtgttgcgcttccagcaagctcctccgcaggacatcacggacaggctctcttcccagtcaccctagaacctctacagngtcccgctcgcgcccttactgctcgttgtgtgcccttgggttcaagcagcttccttctaagccnttggtctgctcctttctttgtcacgtccccctgttttcctgagagttaggtacatacgcttacgaacaggatcttgcgggcttgtatttcttctagtgcgccaaactcccagagatagcccaggactgcatgggttttctaggtctgcgatgtcttgtcacatggcggcagagcattaacagattgacag

SEQ ID NO: 591676 - DNA, 170 bp, Homo sapiens
  misc_feature (49)..(49): n is a, c, g, or t
taccaggtcttttccctcaacgctgggctcatacaaacaatctccatcntggctcccaaagaaagtgctagaattacaggcatgagccactgctcccagccagtttttttttttttttttttttttttttttttttttttttttttggggttgggggggaaaaaacccgg

SEQ ID NO: 591677 - DNA, 313 bp, Homo sapiens
cttaaccctgacatcagtataatgaaagaaatgtctcttgggcaggtacagtgactcatgcctgtaatcccatgcattttgggaggcgagggcaggagggttgcttgagtctaggagttcgaggttgcagtgatggtaggactgcacctgttgcacatccatgcctgggtgacaaacgactctgactcacaaaaaagagaaagtctctttgattggggaggccctgtgagactggcagcaatgactaatgggctattcctactcagacagcagataagattcccccttaatcttcaaatcattgaagtcatga

SEQ ID NO: 591678 - DNA, 548 bp, Homo sapiens
ggctcggtacctattttcacagggtgagatatgctagaatagctatcttctttcaaaaaactactacagagaaaaaaaaaagaatatgttagccagttatctgtcaaaaaaatagtgaagggggcaaatctggcagctggctgatggaattatatatttaaagaatccatatcaacacgaagataaatctctattaggtcacatggtatatatagaaaaagacttagttaagagttttagtcatggcaagctcaaggaaccaaagaatgacatgacttaaaaaaaaccaaccaaccaatctctcaggctaggacattagaagtaaggtttacaaagggaagccctataaatgagagcaattgggccctatcaagcgcattactaaatataaacaagtgggatagtaaagaaatctattcgggataccatgtcacacaagaaatggttaaagctaaatagaagtatttttatctaccttagaagaaaaaagatttacaggaccatagtagtttatttcaaactaccagaaagtttagaagatgaaataa

SEQ ID NO: 591679 - DNA, 1048 bp, Homo sapiens
acaaaaaaaaaatctacgggtctctggtacgaaggctggggtttgtgaaattcagagccacggaggggacgacgacgacgacgacgacgacgacgacgacgacgacgacgacgacgacgacgacgacgacgacgacgacgacgacgacgacgacgacgacgaccactgaggtagtcgacgtacgcactcactcagtagtactatattactactaattaattctcctccttattattttctttccttccttccttatctacctactacctaacagaacttttctctctacctctactcttcctacttcgccagtcgacgaacgactgaccgcatgccttattcctttctttatttatttcttactttcttctcttcttcatattcttcttatttactatgattcgatcagttcctaattttttttttttcctatacactgactgccggccgattcggctccccattccttccctcacattaaaccacagatccactccttaccccccacatccgttgcgctccgtgtttgacgagggaagcgtagacaagtgagtcgcgcgagcgcgccgcgcggccctgaaatccatccattaacatacatgacgaggaagaaatgccagccccgtcctcccgatccgttgcagatcaccccatcgtttcgggatcggttgcattggaatcgatctgtacgcttcctgcgatgcctttccttgccgtttcgtctcgtagctcttccttcgagacgtgccgttcacctcccgatgcacattgcttcgttaccttctcctactctcgttctttcttctttcgctctgcctcgccttcgccatccgcttccgcctcccttcccctccacctccctccagattcacctcagcccccgcgccccctacccacacactccctcgcccactcccgcccccgtctcgcctccctccccagcaccacccttcccatatagactcacaccgacctaccccttgctagcccacacccacactaacactccacaccacaccacaccaataaagcgcgaccaacccactcc

SEQ ID NO: 591680 - DNA, 583 bp, Homo sapiens
  misc_feature (92)..(94): n is a, c, g, or t
  misc_feature (97)..(97): n is a, c, g, or t
  misc_feature (156)..(156): n is a, c, g, or t
  misc_feature (184)..(184): n is a, c, g, or t
  misc_feature (191)..(191): n is a, c, g, or t
tcacactgcacatgaaacaattaatctgaatcacagaggaaaaaaagatggagggaatggcgatcctcagtgggacaatatctagcatctannntanatgtaatagagctctggaagattgaggaggaacaaggggagagataggaaaactggaanaataatggcagtacattttccaaaattntggtganaagtataatcctacagatccaagaatgtcaacaaaccataagcaggctaatcacaaagaaaactacaccaaggtacattgtaatcaaactgctaaattccaatgacaaaaacatctttaaagtagctggaggagaaaaagaatattacatactagagaacaaaagtaagaccaacagcagacttcaggaacaagacaagcctgagacaacagaacatccttaaagtgctaggagcataaaggtgaaataaggacaacctcagacaaacaaaagctgagaaaacatgtgaccaaaataccagtactataagcaaagttaaagttcttcagactgaaggaaaatataccagattcaagctcagagctataaaggaatgaagcctagaaacagaa

SEQ ID NO: 591681 - DNA, 347 bp, Homo sapiens
  misc_feature (125)..(125): n is a, c, g, or t
tgtggaccccgctccacccgacgggggcactggaatgtctgttttacacacacacacattaatatcatctgaggagcaattctaccagcttttatttcttaagtggccaatttgattgagaaagnacaaagcagaggaacctctaaaccaattaataaaagtcctctacttacaatccaaaccagaacctcatcattgtccttatccagcaagcacagggtagacagcagacagagaaaacagagaacacagtcagaaggcatcaacaggacaggcagacagcagtgcagaaattttgcaaatctgattccagttgtagacggactgctctccccaccccgcggagc

SEQ ID NO: 591682 - DNA, 266 bp, Homo sapiens
  misc_feature (34)..(34): n is a, c, g, or t
cccccccccaggggaattttttttttgggggggngggttttttttcccccttgcccccggggggtttttttttaaaaaaaaaaattggggcccccggggggggggggggggggggttttttttttttgccgctcccggttttttttttgggccccggggtttttttttttgttttttttggttccccccaaaaggggttttgggggggaaaggcccccctttttttttttttttgccccaaaccccaactttgtttccccccccca

SEQ ID NO: 591683 - DNA, 603 bp, Homo sapiens
gcgcgggcgcggcgagcgcaggccgcccgcgcgtccaatggccggcgcgttcaccggcggagcgccaggcctgcagcccctattggccgcggaggtccccacctcagcgcggcccgcccccggggtaggagccgtggcggactctgtgacgctcagacgccgcgcggtgcgggggattggtctgtggtcctctctcggctcctcgcggtcgggggcgaggtccgtggggacacctggtcttgctttggccgtccgtgcggctctaggacttctctgcgtgcgctcccggtttcgctggacgggaagaagggctgggcgcgtcccgtctccgtccccatcggaaccccaagtcgagccgctgacccgtcgcagggcgagatgagcgcggacgcagcgggcgggtgcgctccctgacccgcggatctgctgcctggagaagggtccgaacgggttacggtattccagctgtcgacgggggagaagggcaagtggggccgatgtacatccggctggtggagccccggctcgccggccgagaaggcggggctgcctggcgggggaccggtggttggaggtgaaccgggaaaacgtggagaaggagac

SEQ ID NO: 591684 - DNA, 1155 bp, Homo sapiens
ggcaccagatgtcccatgagtagaggtgaaagggagatggagcagaagcaaggacgttgtctgtcttatcctggtaaaacccataggtgctgctgctttatctgtgaagcactcattctcctaggaacgcctgttccttagcatttcctacatttcagcccttctgtgtgtacacctgcggtttccatatgacccacacctaaaggttctgaattctactgctgaaactatctaaaagtggaagaaacctacttgcacattctcagtacacttggatccaaaatgtctacacttgatgctccggcccaagcctctgccctgtgatggcatactgtcatggagatagtgtggcctctgcacatgggcctccaaaagtaattcagtcctttgtcctatgattcccttgacagtctttttctttttctttttttgatcaagcaattatgttaaaattttcagttctaagctttgaaatatggttctttccatgtaaaaaagtcaactgaaggactgccatgtgatagaacattggtatgaaggtgtcctcttcaatgccagtcaggcctaaaagattggtattttattgtgtctgtctgaatgctgttcagtggaatgatgcttttgtaagtgtgagtcttaccaatgacgtaacagtttaatatcgttgaatgttttcaataggccaagattgctgactggaacttggtactaaatctcgggggatcccaaaattaggctcttacactgttccacaacgtggtttctgggcctggatgttacagattacataagggtcgacattaacccaggtatcaacggggcccactttgggcggaaagtaggccacaggggcgggcacacaaggaggaacaaccaggaaggcaagggggagatcaccccgcgtacacacctaaacacaagataaataatgaggaggagatcccacagatgatgacaacagacgaccataacagatagaaaaacatcatctatgaaaacaacaaaaggggtgaatacgaaaagcacgacaacacccagaaggaaataaagccgaagaaatcgcataaacaagagacaacgacagcggcacagacaacaaatgagacaaaaaatcagacaccggaatgctacccctctcctcatttccctcaagtg

SEQ ID NO: 591685 - DNA, 106 bp, Homo sapiens
gggaatgtaggtctttcctctctaaccccagacccagtcagacaaggtcagtggctccccactgtattctggcacagagtcatttctacacagccaaatgggggtg

SEQ ID NO: 591686 - DNA, 202 bp, Homo sapiens
atgctgtacgtttccctggtgagcaccctcctctcggcctctgggcaacacagtcccaaccatctgtggggtaacaaaggggtgtggggtgtttttttcaaccctgcttaactgtctgaatcaagggttcccaactcaagcctgcaggccaaattcagcccccagcctgtgtttgtgaataaagctttgttggaacaaagcc

SEQ ID NO: 591687 - DNA, 597 bp, Homo sapiens
acgggtgtgctctgccacctggggcaccccttcttccctccaggatccagcaaggagttgtttctcgcagtagccgcccaacgggggggctctttttgctacttgtgcctgccgacgctgggaggagagttttctgtaaaaaacgataattggtggaacaacacacgtgcgtgagagcaatttgccgtgcgtgcttgcgtccgattgtggctaacccactcgagtattgtcgggcgggccccctgtttttgaacacggcgtgcgggggagaggagttctgctgcctccgctcagcgtggtggaaacaaaaaggggcgcccgcgcgatgttgtatttactccagaaattcggggctggtggtcaggcccacaaccccccgttttaggatttttttaataaagggcgattacgccccccctctagttcgtgggcattgttcacaatcagtattagttgggcaattcgtgttaatacaggcaacaacattgttagggtacggaggcgcaagacagacaggagagttgggggaccccgataacagacgcatgccgggcagacgcaagcccggtttctacaacaagagaacaacaacaatcg

SEQ ID NO: 591688 - DNA, 225 bp, Homo sapiens
tatgcggcagttagtgaagcggagttctcactgtttgaacacaacccaaaatggctggtttaagggctctgatcaggtgagcaggcagtgcccccaatccaccctctcccatactttgaaaacgtaaatcattcttacaatatatatcttcaaaataggagttcccgacgtggctcagtggttaacgaatccgactaggaaccgttcacttaatgccgctagcgc

SEQ ID NO: 591689 - DNA, 611 bp, Homo sapiens
  misc_feature (519)..(519): n is a, c, g, or t
ggtgagtgtgcaggacgcgggtcgtgtgggaacgccagacctgggtcagagctcgagccagtcggcgcacgtatagattctggagatgcatggcggctcgtgatggtcgcgagctatggggcggcagctgtgtgaggctcgaggtgcggaagctcggcgggtcacggcgctcctggtgcagcgcccggccccggtaccctgctcggtcggtcctatgccggtgggtgcctgcgtcgagcgtggctctgggacaagtctagattcctcacgcagcattttggaccgctcgtgtagctaggaaacaagaccggtgccaaaggtcgagaactcttaatgatccgttcgtcgtgcgtggaaatgtaaccacaaggtccatgctcagacaacatgcatcaggtgtggttccgcatagggccggtgcgcgttgtcgtgcaaacgagaggaggcaagagcacagtttgtctttaaagaaggctgggtgggagcctggtgctgcccgattgtcttacggagggaagntgaacgtatacccgccaagaactgacgtctctggaggatggtgggagcgagaagccacttggtagggtcctccagagggattctggggggcc

SEQ ID NO: 591690 - DNA, 441 bp, Homo sapiens
  misc_feature (220)..(220): n is a, c, g, or t
  misc_feature (432)..(432): n is a, c, g, or t
atactttctgcctgagaattacatgggaaaatcttaaagggaacttatcagataaatggaattatagtgtcccttggtaatgagtgatactgaatatgtactttcctgggaaaattgttcaactgaaggaaaaaaatacacacacacacctagtcctgggagagtgccagagtgctgttgacagtcccttaatgtaattcagacaaagtgaaaggattcnggcttctggcttctgaactttaacttaactgcccataagtgttgactcattttaatgcttttcatgatttctgcattgacagaattttcatactttgtgtgtgtggttttttttaaaatgactttttttgttaacttcagacatatttgattacttttagaaggtagaaattgccaccaactttgtggtattgaataagtaagaaattgcanccggatttt

SEQ ID NO: 591691 - DNA, 279 bp, Homo sapiens
aaagccacctcatctaaaatgaaggttcccaattttttttgtgagacagtctcgctctgtcacccaggctggagtgcagtgagacaatctcagctcactgcaacctccgtctccttggttcaactgattctcctgcctcagcctcctgagtagctgggactgcaggcgtgtgccaccatgcctggctaattttttttatctttagtagaaatggggttttgccatgtcgcccaggttggtcttgaactcctggttcaagcgatctgtccgctttggcct

SEQ ID NO: 591692 - DNA, 338 bp, Homo sapiens
cggtagcccttaactctacggcagggtctatattgtcggcatcagaggagctggaggcactgatgcaggaaacacacaggagttatgaggacacactaacaatcccaaaagtagcctaatgcaagggcaacacctgttgaccttgtacatgatcaaccactgaaaacagagcagctgaccatctgagagagaccaaggccaagggccaggcagaactctgatatcttagccacaaagctcatgcaccgtacagctggctccacaaagcctctgggaagggctgtacacacggatccagaaagctggctcagacattccctagggctaagggctcccgg

SEQ ID NO: 591693 - DNA, 361 bp, Homo sapiens
tcccaaagtgctgggattacaggcgtgagccaccacgcctagtggagtgatttcctttcatagtaaagttttaaatgtggtatatttgaatgacttttaaagaaggaggctgggtgcgatggctcacacctataattccagcactttggaaggccaagatggaaggatcacttgaacccaagagttccagaccagcgtgggcaacgtagtgagacccccatctgcacaaaaaaataaaaaaaattagctgggcacagtgcacccgcctgtaatctcttaggaggctgaggtgggaggattgcttgagcctgggagggtgagactatggtgagctgtgactctgccactgcactccaggctg

SEQ ID NO: 591694 - DNA, 286 bp, Homo sapiens
agtcggtacccctagtttagaagtttcaatagcaaaagtacataataggcacagaaagaagcaacatatgaaagagatttaagagcctctgtttcacgagaatttatgctttacaggttcacagtaacactttatatttaccactctacataaaaggttcaggccgtgagcacagtggctcatgcctgtaatcccagcactttgggagggcgaggtgggcagatcacttgaggctagaagttcaagaccagcctggccaacatggtgaaagcccgtctctacaaaa

SEQ ID NO: 591695 - DNA, 1322 bp, Homo sapiens
gcacgagcggaagacaagcggtctggtacctccggtaatgctaagtcgtcgtgcaacttccggtgaggtgcttgtgtgcctgtgtgtcgcggagactacaggggcccacgtggattgtgttctaagaggctacgctgcgttcatagcgcaaacactgtccgcgtgggttcccagcgccgagttgttgactcgcacagcagtttacgcagttctctgcgacccgagggttcggcgtcgtaccagagttagaactatgtctctggaagggctattgaagcgcacgggtgggccttacatcacggtaagcttgtcaggaccgggacataggacctgtgtgtcaaggtaagtgtcgtacacacagcacgagagaaaagggtagcctgatgcacaattactttgagactttcccactggcaccagggttgatctcaacctttaggtatcaagagactagacgctatgaaacaaacaattggaggttgagttgtagactggacgcggggaaattgacatgcttgacacggcaagatcctcatgggataacagacgggggcaccgcctagttgacggccaaggcttaaacatgggaaaattactaaagtatagggctactggaggaatatcccgtagtggggatccatggcctgttgctaacaaacagaacattgggtgctgaataattgtcctacaaggggttcgttaacaatgaagcatgaaaaatggtggctgataggacttgggggggctcgtatttgtggagtatgagttagggtatttggactttgttcacagtgttgtgtgtattaagaatgggaacggagggcccaaagtgcgcgcccttaaaggtgttttagtattaaacggagtgggtggaattcacctttggattaaggggggtattacacttaacccatgggtttgccaggctttttgaaaattagagaggcccacacctatgatcaattacagagcgagcaagaattctcagaacccacacaactgggtcggaaacaatcaccaacatggccacatgggacatcttccccgtttcgtttccaaaaaacgggaatgaggagagtttggctagaacaacacatgtcaacaacactttgtatggcacatagtgggggacaaccccacttatggttgatcagacaaagatgaaacacgtgcgtatggtcaaacggcgagaccgtgtggaccacaagtgtacccaatgtgcccctgtgggtccctgtaactgtggggtggcgtattgtgacaccacgttgtggacatagtggcaacaaagctcgttttccccggcaaacagttcgggtaca

SEQ ID NO: 591696 - DNA, 310 bp, Homo sapiens
gctcgacagaaagagacatcagacaccacagaatttaacgtgccatcctcccaacccgggcacgatctagttaacccagtgggccttccttaacccacccagtccatcttcccaaggccagacactgtgagtgaccacagattaggaccgttaaaatgtctgtggatgtttaaacggctagatttgttatcgagactggttggtggtccttatatccaccacacgcacataaaacaatacctgtcgagaacccgtgctgcccaacagtgctggcagattctcaccagcactgcttttcccttgtatgtcg

SEQ ID NO: 591697 - DNA, 136 bp, Homo sapiens
  misc_feature (87)..(87): n is a, c, g, or t
attaagatcgtatcataaagaacatcgtatcaatcaatttctttcaccagcatggggttttccattgatcgtagtttggcaacaacnaagggtactggtatttatacatttaaagctcatggccgggtaccgagct

SEQ ID NO: 591698 - DNA, 848 bp, Homo sapiens
taagttaacccccttttattaagtgatcccagctgtggtggaacctgcgtgcggttgctcagcctgtgtctttaaaacattaaaagtgctcttctccaattctccctctttgtccaggacaagagggatctttccaggatagcacgccaacagaacaagagatctccgatgaccgccagctttcaatgtgatggtgccactccagagagggagaagggctcagtggcacatttcaaccggggcttctccagaaggttttggaaaagaggacgccttgtgggggccgcagccgtgccgtggcattttgtgagtgctgctcgggtgtgagatttggtatctccataagtgggtgtgaggagaggttaggttaagcactcgcccgaagtgtgttgtcccggaatctcgggactgtggttgcgtgggacacgggcagtcttatcccatatgtgaacataagtgtcttccgtgaaagccggacagaaccaccaagaggcccccacagaatcttccttcccaaaccgagtgaactgtgttcccccagatgtgtgccaaagagtgagatttctcccagacaacggagaaggcccaagccctttccgcgagccgaaataactccatttgccaccattataatgggacatcatcctccccacatggggtaaaattccttcttttgacagactatggcaacttccctgtgtggcctgctcaaggtcccccaggacgtaccaatgtgcgcaaaaaaaacctccaaaaatggccccacaaaggcaaaaggggccactcgagaaggaacacacggcaaagctccgggagcccgggaacggcgggagaaccccgaagaccat

SEQ ID NO: 591699 - DNA, 1235 bp, Homo sapiens
ctacaagccacagaagactgttggaacacctatggcgctattgagttcggggcgacagtgagacgtggtagtccgtagagcgacaggtcgtaaggcctccgtgtagttcgaggccgaggcgtggagccgagaccaggtcaaagccgtttcatagcgtaacgatccacattctacaccacgtttattcgtcacgggatccatggcatctgtaattaatcttcttcattagtaagtacccatcataatcggaggctgcggcaactgagctatgttcgcccttaataatacggtgacccccgatatggctgtttgccccgcgataagacaaggatgacagctatacgtgactctatatcccaccatctctccatactccgtgctcgacatctgcatagtacgtggaggcgcggagccagtgaatcaggcttgaaccacgtgcatacctctccgcttagcagggaaacgtagtcccaccctgtggagcctccgttaggacctaaacgcagtcgttctcgctgtgagcacctagcagggtatctcctctgatctgtaggggtccagtcgactgtgtgcagtcacaacaaggttatcaagtatacaagacccccatgtacataaccgcaagtaccaaatgcccctgcttcgtctgatccgtcctagatcacagcagtgccgtagcttctgcctatctctcgcgcagtcctagctgctggcaatcactatactactaagcagacgaatctcagaatcaacttcgttcgaccccggcgggaggaaggaggacctcgagtctattacaaagcgtaatctgatgtacgggtgacgctggaagtttatattcttgtcgtaccaggggctcggaatactctcccatttggtactgactaacgccgcggaaaaagaacccttggtttaacaaagacatgggctggaagaacgaaaattagcggggggcccgagagcggaaccggggggaagaacgcgcctaaattttacaggacgagcaaaaagaataaccacagggaatataccacggtcacaaaatatcggggccccagggggaacgagataatgtacatccacacccccgaggaaataggtcgtccgcgcagcgacgaggacgtaccccaacgaagtgaggtcgcacagcaacctccgagagcagaagagaaccatacaagagatgagagacgacctcatacaaatatacaattccatatctgcccgcccacctc

SEQ ID NO: 591700 - DNA, 129 bp, Homo sapiens
tctgctggtcgtatctagagtatcccccacgatgcgccccagtgttaaattcattaagaatttttgcggctgatcatcggtggctaatgcctgtaatttccagctctttgggaggccagaggcatgaag

SEQ ID NO: 591701 - DNA, 242 bp, Homo sapiens
  misc_feature (45)..(45): n is a, c, g, or t
  misc_feature (104)..(104): n is a, c, g, or t
  misc_feature (107)..(107): n is a, c, g, or t
  misc_feature (123)..(123): n is a, c, g, or t
  misc_feature (187)..(187): n is a, c, g, or t
cgggcacatcatactttatttcaactagaaggtacaatctctcangggtttcatagtttaaaaagctacaatcacagcatggggtaactacataaaaaacaaanctntaaatggaactgcttngctttaaccatacacatttctgcccagcccttacaaaatctgcacaaaaaaatatctccctttnctccagttaattgttcttatatgtaagttgctttctaggcagtatatccaaaatg

SEQ ID NO: 591702 - DNA, 968 bp, Homo sapiens
gttttcatgctatttcactctattaaatcttgcaactgcactcttctggtccatgtttcttacggctcgagctgagctttgctcaccgtccaccactgctgttgccaccaccgcagacctgccgctgactcccatccctctggatcctgcagggtgtccgctgtgctcctgatccagcgaggcgcccatgccgctcccaatgggctaaaggcttgccattgttcctgcacggctaagtgcctgggttgttctaattgagctgaacactagtcactgggttccatggttctcttctgtgacccacggcttctaatagaactataacacttaccacatggcccaagattccattccttggaatccgtgaggccaagaactccaggtcagagaatacgaggcttgccaccatctggaagcggctgctaccatcttggaagtggttcaccaccatcttgggagctctgtgagcaaggaccccccggtaacatttggcaacacgaacggacatccaaagtgatacatcctgggaaggaccctacccagtcattttatctaccccaatgcggttaaagtggtggagtggagtcttggatacatcacacttgagtcaaatcctggatactgcaaaggaacctgaaaatccaggagacaacgctagctattcctgtgaacctctagaggatttgcgcctgtcttcaaacaacaagcaggagaatcgaagctgtaaaactacaaatggggccaagatgcagtcaagataagatctacggagacctggacggcggtagccagatctgtgttatggctcaggccctcggggaatttagggaacttatagcccaattagcgaacagtaagcgggggcacccccaagctggcggggggggcggacgcgacgggcgggaaccaccgggggcgcccagcggcccggcacacacggggggcactctgggggaccgccccaaggc

SEQ ID NO: 591703 - DNA, 318 bp, Homo sapiens
tgaatgaattttcacaaattaaatgcactcatttatctgcacccagatggggaaataaaacatggctgggcacggtggctcatgcctgtaataccagcactttgcaaggccaagatgggagtatcacttgagcccaggagttcaagactagcctgggcaacacagtgagaccccatctctacaaaagattttaaaactagccatcgtggtggtgtgtacctgtagtttcagctacttaggaggctgaggtggcaggatcacttgagcccaggaggttgaggctgcaggagctttggtcatgccactgagaactaccta

SEQ ID NO: 591704 - DNA, 476 bp, Homo sapiens
acccaagaatggcctttgtgaggaggcactgtgccgttccagtggctttctgttacagctggccacaccatacaagcaagtacatcatctgcatgcactgctcctcacaggagcttgcacttcattcatatttattctgccctcatttaaggtataagcttagtgtcctaatatatttatttttggaaagggccaagttacaaaacatcttttttttgaggctgcactgttgatatgtcatgcagtggccaccaagaaagtatatactcgtgttagatactgattacatcatttacatcacgctcagtatttggaattaaagatgtgaatgttctgtgaccagagtagggatgacacaaatggaatcagctcctggtggactaagaatcttgaaaaaatctggccacctcatccactacatctggattgagtgtactgcaacaaagaaaaacattaaacaattttatattaaaaga

SEQ ID NO: 591705 - DNA, 159 bp, Homo sapiens
ggtacctgactggaggttaatatggtggctggattaatgcctgattgctacctcggatagagcactggtgagtacacccgctcgctgtaccaggtggtgaccatctgctgctggtggtgtcatggatcgcggcggtgctgttcatcccgtacctgggcg

SEQ ID NO: 591706 - DNA, 379 bp, Homo sapiens
atttaccttctttttctctatagctcgacttataccaggggtgtgtgttgtcgagaggcacacaagagagaggatgttcatcggtttaaagatttgtgagaagataatttcaaagccttgttgttgagatgcctttgcttagtatcttcatcagtgaccatttggagatcatgttacattagtggatgaagttactgcatttgcacatgtgttgcttatgagtcagctgcaactcttagcgagacctatggtgaaatggctgactgctgtgcataacaagaacctgagagaaatgaatgctatttgcaacacatagatgagccccctttaccgattggtgagaccagatgttgatgagatgtgcactgctcttcatgag

SEQ ID NO: 591707 - DNA, 140 bp, Homo sapiens
ggctggtccccccagtctctgagtacgctcagctccgttggagcaccccttccgctgggatgtgtttttcccatgcagcctttttccctcgggaaggagaagtccagtctcccctcctgttgattgttttcttcttggtt

SEQ ID NO: 591708 - DNA, 212 bp, Homo sapiens
aacaggttgaacagtctaccctcccttagcagggaaactactcccaccctggagcctccgtagacctaaccatcttctgcttacacctagcaggtatctgcttctgatgcttaaggggccatgcaatttgcatgcacaacaattgatgcaatgatgaaaacccctggccatgaacccaatgaccaaacgcacctgtggcgtctggatgactg

SEQ ID NO: 591709 - DNA, 220 bp, Homo sapiens
gaaaacgtggagacgactttaaaaggaggggaaaatttatagattaaggactcaagatgatgtagatgaaaacaacactttggaattggaaatttccactcaaccagattgtaggtgtgacaaagtataatatgtgcaataatcattgtttctcttatgatttaattcaactaaaattctacttggaggaagtgggacttgctttatattttccaactgg

SEQ ID NO: 591710 - DNA, 407 bp, Homo sapiens
tttgtctgcgcacaggggctcttgcctgtaattccagcacttcggcaggctgtggcgagcagatcactttaggaccggagtttgagaccaacgagtacaacatggtcaaaccgtgtctctgatacaactacaaagtattagtctggtgacgtacgcaggcgcctgaactaccagctactgaggggagactgtggcaggtgaatcaattgtacactgcaggcagaggttgcagcgtgccgtaatcacgccaccgaactacagactggtcaacaaaagtgaaactctggtcacaaaaactaatatgaatggcgataacagatatacatgtcagccgccttgagccatacgactgttgactcgatcatgcttatgcatgcggccgttcgagctcctgggccttcgccctt

SEQ ID NO: 591711 - DNA, 171 bp, Homo sapiens
gcaggatccccttgcacaccatctgcatgcttctggtccgcctctaggaagcttgcaatcatgcatggcaacatgaaggtaagagctggcatatcacatggccagacaggaagcaaggcggggtgggaagtgtcacacattttttttttttttggaggagtctctccctgt

SEQ ID NO: 591712 - DNA, 508 bp, Homo sapiens
ctcggctctacctgtccgtctatcaaaaagacagacaaggatgtggagaaatcggagccctcatacttgctggtgagaatgtaaaatggtacagctgctgtaagaaaacagcctggcagttccccaaaatattcaacatatagttaccatatgactcagcaaatatactcctaggtatatatacccatgagacatgaaaacacacttctaacacagaaacttgtacacagattatcattcataatgtctagaaagtagaatcaactcaaatgtctatcagctaatgaatggattaacaaatatgcctatacattagaatgttaattattcagcagtaaaaagcaatgaagtacagatacgtgctaccacataggtgaaccttgacgacatgctcagagaaagaagccagtcacaaagtactgcacattatatgatttcatttatgtgaaatgcccagaataggcaaatccatagggacaggaagtagacaaggtagagccgaggggta

SEQ ID NO: 591713 - DNA, 110 bp, Homo sapiens
gaagcgcacgattgccgtccacagtgaccaagaatggtgagattgaccaccaccgtgaacagtatgaaaatctaagaatggacactggagagaaaacttgaggagctcga

SEQ ID NO: 591714 - DNA, 427 bp, Homo sapiens
atccccgagccccgatcatacagggggacggttcgattttcatggtgtactgagaaaacagtcaaagtatctacggagcaaccatttcactattatatatgggtctgagtataagattaacaagcaagagagcctgggaggagagcctgattgagccaggtggaagtgtagcccaggatggaagtgaaatgcaggattaagtgtcttcttaagcaataattactactaatatgatcaagtctgtcagtcctgatcggggctcggcattttgaatcttagagcgacagcctataatcactgcgcccgcacataaggggatggctatggctaggtttatagatagttgggtggttggtgtaaatgagtaaggtaggagtccgaggaggttcgttgtggcaatcaaaatgattaaggatactagtataag

SEQ ID NO: 591715 - DNA, 161 bp, Homo sapiens
  misc_feature (87)..(87): n is a, c, g, or t
tcaatcctccctctagctatttgaaactatatattattactattattattttgtgtgtgtgtgtagacggaggtcttgcctctgttnccacaggagtgcagtgagctgagatcgcaccactgcactccagcctgggcaacagaataaaactccttctcaaa

SEQ ID NO: 591716 - DNA, 666 bp, Homo sapiens
  misc_feature (264)..(264): n is a, c, g, or t
  misc_feature (289)..(289): n is a, c, g, or t
ttaggccccccccaaaaccaaaagggggtgggtcgtgtgagagtgggagggggactggttccccacttggcacaccctcttagatgggggaaaagggattcttgtttgttttggtgtaaagggtcttccccccccacaaacaatggggtggaaaggtcagttccttcaggaaatattattcgggagagataagttcccttggcttctggattctgggttaccccaaggtaatgtggggccccctttttaaactgtcaggggtgnatagcacccctatcccccccccccnccctgtggggaaaagagaggggtttttttcccccaaggccccggccctttagttttttaatattttccccccggcccaaaagtttttttttaggaaagaaaggaaaggggggccaatatccctttttttttggattgggcctttttttttccaaggccaaaggggggttatattccctttttccttttcctcttgggcccactggttggggggccccccccctgggttggaatttttcggccaaagggacaaagttttttcccaatggggaaggggtcccacccgtcccaaaaaaaagtttttgtgggttttcccccccccccccccccggttcccccctgggcttttttaataaaaggggggggttttttttttta

SEQ ID NO: 591717 - DNA, 1207 bp, Homo sapiens
gggtctcgtcatgtcggccacgccgctcccgtctggggtgtcgttcgctctttcctttttactcctccgccgtctccgccgtttgtgtccttgttctcttccgttcggttcgctgctctttgcttctgttgcccgggggtgagcggagttctatgagtttctcgtgttcgttccctgtgcgtgtgtcggctggtggtggtcgtctccgctcgcccctactttcttgcgtctgcgtcctggtgcgttttcgcgcctgtcgttgctcgggtcgttctggttggtcgtcctcttccgctctttttgtgtgctcgtccctctttctgttctcgccttctcttctccgggtctcgcgcggcatccctgctgctgttgctcgcgcgcgtccctctgcgtctcttgtcttccttgtgcgtcccggctctcttgtcgtccgatcggttctccgctcgttcgctgcctcctcgtgcgtcgactgaccgctcgccttcgtctgccccccgcggcgcgggggtgtttatataacccagcgcctctgtttttgtgtcgcccctcgctgtgtgctcccttgtggcaccccgcctccccccgcgtgtgtgtggccccgcctctttgtgcccctcctcggccttgtgctacgccgctccgcggttttttgtctcttgtccccgcggggcgcgtgtatccactgttgttcccccgtcgttcctctgcttttgtcccctcgtggcgcccttttttgggggcccccttgtgaccacctcgtgttggccccaaagtccacgcgcggtgttccctcccgcgaatttcccgcggcaattttctgcgcccccccccccccctctttttttttttttttttttttttttttttttttttttttttttttttttttttttgttttgtttgtggtgggtgaatgagcccccctgtgttttggtaaatatatttagagggagtatccacctttgatagaggattgtccaaccattgctcgacagaatagcggccccgatcctttagcccgagactcttcttggaacccatttaagagatcctggggactgccccagatcagtgggctgtaatgttgatggcccgcccatcctccatgacaatcatcgatgaccatcccaccagtggtgctgtggaaagccccagcccagttaagcaccatagggaaacatttccatccaggatcatttgacca

SEQ ID NO: 591718 - DNA, 912 bp, Homo sapiens
  misc_feature (1)..(1): n is a, c, g, or t
  misc_feature (3)..(3): n is a, c, g, or t
nangcgaagaagaggaaagcagagaagaaacaaaacgaaaaagaccaacaggagtctcccagtctcggttgcaaggagtgtgttgcacgcctcggtgcacacgctgcgtccgccaaatgtcgggccgtctaaacagcggggccaaaatgtcgtcggtctggtgcccctgccgagggtgcccgtgccctttaaaatgtagctgggccaaggccgaaacgtgccaccagggggcgcccatctcaaactcagggactggctggtatctaagtttaaaacacgcgttaagcgaaaaaattttaaatcgggcgagacaatcctcccctgtctttggtagcccagggaagaaattcacccggtgtcgcggagcaaaggggctacaatgcgcctttcaaggccagggtttgtataatgacaaatggtccgccaagcggtctcattgggtgggcccgtccgagcccccctgagtgtgatgttgatgccccccgcgttctttgcaaagggggattgtcggacatagctgcaaagcgcgtttcagggagggatattctgtcgaaatatttaccagtatatctccacacaggccgtcccctcttccacagatcgatagaagtggcacacacactgcttgtgacagaactgtgttacaagacgtattacagcacaccctgtgaggtgttctttcccgacacttaagcgccccctgaagatgtggaccttcaggacgatggtgcttgaacacccccctccgccagatccgtggactctggggactgcggtcatttattgatggggaatgcgtgcctttggccaacagtcaagaagagagttaaaggtctcggggagaaataccccgcgccatcttcgaaacatgggggccccccccgaaaaaaaattaaaaaacacccacaagaa

SEQ ID NO: 591719 - DNA, 102 bp, Homo sapiens
atatacacatgtctatttttctctgtaacgtgtctgacttcgtcactgggctggcctgagcgctgttcattgagaaaccatgtcaggaactgaagcagcacc

SEQ ID NO: 591720 - DNA, 989 bp, Homo sapiens
  misc_feature (79)..(79): n is a, c, g, or t
  misc_feature (83)..(83): n is a, c, g, or t
gttggttgtttgtgtgtgtttggtgtggtttgtgtttaaggtttggaatggttttatgatgtgctagggttgcagcacnctgnaggtctgttgatcagagtaccagagcttagtgcgactccattaaaactactacaaacactaggacctcttgtccaagagagtatcacatccaccggtcccgtccattggaagatggcagggatagccgctgtaacaaaaacaaaatacgagaaaagacaataagtaaaatatttaatatatgatgtagagataaagttacaaaagaaaaaagtttgaattaatctggaccatctcgttctcgcgttgcgttaatagtatatcgcaattatccacgaggaccaagccccgccccatgaggacgagataagtagcgacccggtgtatgcgagcggggaacgcctcacacgagacagccagagagccgttgtcgttgtatcttgagcgcagacttgtgacatgttgtattcgttagcgatggacataaaaagtaagtttaatcaaaatttctctacatacccatacagcccccacgcccacctgcgcgtcccctcgagcacgacccaggctccggacgtcgagcggacgccaacgaactacgccgagcaccccccccccccccttgatagaatactcagatgcagagttgatcataaagttcagttagatgataagtgagcttcgagtgatgttttctctcgccatccagaccgactacatcggagacatcgcgagctcctccagcgacagcgctcgccctccgcgtttgtgtagcgtgtcagtttcctatgtcatgggtgatagagtgaattcaatataaacgtcgctcgtctttcatacatataaatatgattgctagtcaatcatgccacagagatgctacatcatataactctataccactattcatcgcagtttagttaggtgccaccggttgcgccgccgcagaacagagctgcaggtagatg

SEQ ID NO: 591721 - DNA, 902 bp, Homo sapiens
  misc_feature (452)..(452): n is a, c, g, or t
  misc_feature (684)..(684): n is a, c, g, or t
gcagataagttttttgctcttagaaagatagagattaatacaactacttaaagaaagtatagtcaactaggttactaagatattgcttagcgttaagttatttaacgtaattgttaagtagctttaaggattttaagagaaaatatgaagacgtagaagagtagcatgaggacaggaaagagataagaaggtttctaaagacatgacaggaggttgagatgaagcttcttcgatggagtaaaaaatgtatttggagaagaaaattggagagaatggacatactagagccccgaattaatacgctaatagaagggcaatgcgttttagattaaaatgaaggtgacttaaacaagcttcaaagttggagtttcaacacacgttgtaaggtcgatctcaaaataattccgcaacggctgatcttttcacacaacagacgattaaaccgaatggtngattcacatagaccttgaaatccgatgacgcagggagaattgcgtcatttataagcctagttaaacgcatttgactaaacgcagacgacgatggaaatgattaattgggagtggtaggatgaaacaattcggcagaagatagaagtttgaacgtggaaatatggaagacagaagtacccggagggcgaatgcaaaagaatagatgcagatcgggaaattagaagatcctccncatacttttcagcagagcactggattcttttgtacctgataagtaggaagcgaagacatctgacaagctaggacacaatcagctaagggccaaatgttcgaacttagaccgcaatcggacgattgaaacatgattcgaactgaccttttggccaggagttccgagtgcagtggaaacaagttagcacaagtttggacccaaacaaatcccaggaaaag

SEQ ID NO: 591722 - DNA, 125 bp, Homo sapiens
ttctatttactactttaatatagcttaaaagcacaaatagcttgtgcttgcagtaacttacctgaaaagcagaagtaatagtacccttattactaccttaataacagcatataggccctttgata

SEQ ID NO: 591723 - DNA, 174 bp, Homo sapiens
ggctaggtagagcctgggtgaatcggccgagggagtgcggacgccgtggggtctccgggacaggaaccctcagttgctgcgtctagattctgcaggtgaggttgctgggaccttggctccacccagccagcgaaatggcagccacactcgatttgaaatcaaaggaggagaagg

SEQ ID NO: 591724 - DNA, 1363 bp, Homo sapiens
gaagctatctactatgtatactcatggttggcggttcttacgaggcattacatctaaatatttatgacttttcatccgaccgaggtaggtagcgagttcaaatatacaagcaccagccattcatttctctcttcaaatcatctatttcggagagcaacactttgaggccgtatcaccagctcttatcatcatgcaacctaactactctagtatcttcgccagatcgcacgtacaccacatcattgcctaaggccagaaacgagacgcagcttcactcttggcccctcttatgcttcccagtatggtactggccctctatttcccacctcctttcccagctctttacttgccacttgcactacacgaactaacaagcactctggcccacctcatgactggccatgcagcaaggttctccaatttatattcccactaagatcaatttctgcaaggtctgccaaggttcaacaccccctggagtcccacacacgcggacaaccacttctcacaccgactactccgccccccagcatcacagctggcttgcacacccacgcgaaccggccgcccttggcggcacacaaccacccgcacgccagcctccccctctacctgcggccagaccatgtcgaacccctcgtgccccaaccccgcctggcaacccctgggatccattacaccaaggaccacaaccttcacccagctgtaaatacctaaagcgaataggcgcgaccaaacgatcggagcccattgggcgacaccccatccatcgcacaccggcgccatgcccaggtcgcctctagcgcacacaattgcgactccacccccaagagggccacacccaactgcgccaacatcccctggctcgtccacacacccgcacacctaaccacctccggccgccgccaaaggacagccaaaaccaacacgcgacgtggacacgggcaccctctcccaaacctgaccggcccacggactaggacatctgcccccgcaccctgcccgcacacccacaacgccccaccccccccggcggaccccacttaccgcacacacacacgaggcaaaccttcaacgcacgcaaactcgcaacatcaccgacacagaacaccgtcggaccacccgttacacaacacccaacaatatgtcgaggcatcgatggaacacataccaaggacccacacggcagtcgcgcgcatgacaaagcaatggacgtagaacaccacactatcacccaccccgctctccgcacacacctggcgccagcgcctacacctccacgcgcgccacgcccgcaacacgatcagaccccacacacgccccaatccccgccggctgaccaccacacacgaccacgacactt

SEQ ID NO: 591725 - DNA, 123 bp, Homo sapiens
cagtaccacaggggatgtgatcgtcaccctctcctgtcattctgctacctcaggtggacacatggcttatgtttaccaaagagagctagcctctcaagcatatgatacttggtgcctgaaaca

SEQ ID NO: 591726 - DNA, 299 bp, Homo sapiens
  misc_feature (85)..(85): n is a, c, g, or t
aaaaactctgtctcaaaaaaaagttgaaggttgacaagtttaacattttttggattattgtagacaaattggcattaatattttnctctttagaattttatttattggccaggtgcagtggctcacgctgtaatcccagcactttggaggctgaggtggaggatcatgaggtcaggagatcaaggccatcctgctaacatggtgaaccccatctctactaaaatacaaaattagctggactacagggcatgcgcaccacgccagctaattttgtatttggtgaacgggttcgcatttgg

SEQ ID NO: 591727 - DNA, 553 bp, Homo sapiens
  misc_feature (1)..(1): n is a, c, g, or t
nggggttgtgatccgacgaattatggggtggatgggattatggttaggctattaaatgaggtggtggctgagagttgtgggggtgactgtgcagatttctgtgggctaacagttggtctggattttgctcggtagatgtgcatatctcgtaggagtcggcgtctaggcacgcaaggggtgcattgggatcatttctcagttggttagtagaggtgtatggagttgtagcgcatgaatggtttcaaagtgtatcaatagggatttagtatatgcagattttggacagtgctgcgcgaggccatgtagtattagttaagtcttccttgagagtgttgtggcgctcttgtaggggtcagttcttgtttacttctggatgctttttttgaagtctggctggatgtccagtgctggtgtagtgcagtgtgatgtcagttaggtcagcctgcagcatggtgggttcaggagaatggcttggctgtgggatgcagagattgcagtgagccaagttcgtggtgctgtagtccagcctgggcaacgagcaaaactccatctc

SEQ ID NO: 591728 - DNA, 110 bp, Homo sapiens
tgtcggtacctggtgcctcgtgtgccaagcaggtacgttgttcacgacgcttctggtctatgcctggcttgactggacaagaagctgttgcctgcagtgcatgccgaatt

SEQ ID NO: 591729 - DNA, 271 bp, Homo sapiens
  misc_feature (131)..(131): n is a, c, g, or t
gtgcagtggagagatatagagaagggctgtggacgtgttctggcacggctggtgcttgtgcgctgggtagacctgtgagggtgtgcatggggtagcaggactggagtcatcctcccagaactgagagaggncctcggggcatggaggcatcacaagtgctaggcttggcacaggtacagtggagaggttacggaggtggtgtgtgcagtgcctggtggggatggggagacccgtggacagagcttgttagagtgtcctagagccaggggga

SEQ ID NO: 591730 - DNA, 472 bp, Homo sapiens
tttgatattagaaaatctatgatttccacttaacactttaacaaagaaggaaaactgttatcatcctactaataaagaaaacatatttgaaaattttaacatctactcacgataaaaactcttagcaaactaggaatagacttgatctttcctaaccatgtgaagttagaatctagaaggagaaaaagacgtggactatttacacttcatctcaaatatttcaaattttgccagtgaataaaaagtaaaggaagaaacaaactgataactgttctatacagaccccctaattgacacagaaatcattaaaattattaagaagttagccgggcatggtggcacacacctgtagtctcagctacttgggaggctaaggtgggagaattgcttgagtacaggaaggttgatgttgcagtgagccgtaatcgcaccactgctctccagcgtgagcgacagagtgagaccctgcctc

SEQ ID NO: 591731 - DNA, 235 bp, Homo sapiens
caggatgatcatagactgtgtcttggagctggcgagatcaggaagacttacagccctggtcctcggtgtccatggttgtgatgcgaatgctcattctcgctggccttgtagatctgcatctgggcccacagacttggtgttgagggatcagtcgcaggctcccctggttccgcatcactagtcgggactgtagtgtgccgtcatcggtggacgccatgtcattgagtctgagcag

SEQ ID NO: 591732 - DNA, 350 bp, Homo sapiens
  misc_feature (199)..(199): n is a, c, g, or t
  misc_feature (266)..(266): n is a, c, g, or t
  misc_feature (346)..(346): n is a, c, g, or t
tttgatattagaaaatctatgatttccacttaacactttaacaaagaaggaaaactgttatcatcctactaataaagaaaacatatttgaaaattttaacatctactcacgataaaaactcttagcaaactaggaatagacttgatctttccggaattccccctgaggaatcgccacactgacttccacaatggttganctagtttacagtcccaccaacagtgtaaaagtgttcctatttctccacatcctctctagcacctgtngttgcctgactttttaatgatcaccattctaactggtgtgcgatggtatctcattgtggttttgctttgcatttctgtgnatgg

SEQ ID NO: 591733 - DNA, 92 bp, Homo sapiens
tgcttggcgtgttggtagcatgcctgtcctggttgattattgtgaccccccacgttgttcagcgaagggtctctgcacctgccgcgctgtga

SEQ ID NO: 591734 - DNA, 612 bp, Homo sapiens
gctttccccgatggtccactgtgtgaccttggaccgtctgtgcattccctgtgaccatctcattgacatggtacatgggctcctagctcttgacccactcgtgcgtcgcgtttcacacggatcgttgcgtggatggcgcgtgccatggtgcggcttgacgacttgtggaccgtgtacctggagactgggatagccgtggaaactggcgtcgaagaccacatgagattactacgcagagtaactcatagctagactttgagctcatcgcgttgtctgcatcaacagtcgcagaaggctatcgtctggggaatctatgacatagaacaacaatgatgccagagctgagggatgatgatcttcctagaggggtgctagagatgtttcctcataggagcagacttgtagtcgcacgtccagagtactgactcatcgcgccttgatgctgaatgcctgtggaaaacctggtgggtcgggggaccatcgacggtctcgagcgtcaggaattaaaggacaatcgtgtagtaaccatggaggtagaggccagaaacctagataagaaggacttcctgggaaaatcagatccatttctggagttcttccgccagggtgatg

SEQ ID NO: 591735 - DNA, 143 bp, Homo sapiens
aggaaagatgccagagaggaaaaatcctccccatgactctagacgggattgccatggtataagcaagacacatcccctttcccacagtgtcaatgcaaaggtgattagaaacttccaaggatgagccaacctttgcctttgcg

SEQ ID NO: 591736 - DNA, 512 bp, Homo sapiens
  misc_feature (498)..(498): n is a, c, g, or t
tgtatcggaaacgagaaggtttgcagccagcttgtcttgatgagtcagagaactttctctgacttgattagacttatattttagagcaataactttggtagattgaagtggaataagagattggtattagggagaccaactgtgaggctattgcaaatggtttaggtaagaaatattgaaggcccgcacaaaacaatggcatattttctttttttttgtgatggagtttcgctgttgttgcccaggctggagtgcaatggcacgatcttggctcaccgcaacctccgcctcccaggttcaagcaattctcctgcctcagcttcccgagtagctgggattacaggcgtgtaccaccatgcccggctaattttgtatttttagtagagacagggtttctccatgttggtcaggccggtcttgaattcccaaccacaggtgatccacgtgcctcggcctcccaaagtgctgggattacaggcgtgagccaccgcgcccagnctaacaatggcata

SEQ ID NO: 591737 - DNA, 156 bp, Homo sapiens
ctcaggatcttaaccactgattgaggcaggatcaaacccacatcctcaggtgtactacctcaggtcttaacccactgagccacaataggaactccctggtataatgtttttacttttactttgtcttcatcttaaacatggtaaaattttgactgg

SEQ ID NO: 591738 - DNA, 509 bp, Homo sapiens
ctggcatgttggaacaatgtaggtaaagtagccaggcatggtggtgcgcacctgtactctcagctactcaggaggctgaggcgggaggattgcttgaacccaggaggtcaaggctgcagtgagctgtgattgcgctactgtgctccagtttgggcaacagagtgagactgtctcatcaaaaaaaaaaaaattttttttaaagggttaacaggtgcctgggcattggtggctgaagcttgtaatcccagcactttgggaggctgaggcagatgcatcacttgaagtcaggggttcgagaccagtctggccaacatggtgaaaacccgtctctacttttaaaaatacaaaaatttagccgggcatggtggcatgcgcctgtagttccagctgctcaggaggctaaggcaggagaatcgcttgatcgcttgaactcagcaggcggaggttgcagtgagtcaatatcacgccactgcactccagcctgggcgaaagagcgagagtccgtctcc

SEQ ID NO: 591739 - DNA, 638 bp, Homo sapiens
ctccgggctccgcgagggatgagggtctaagacgtcaacaacagcaccatgcaggtgagcttctctgtgccatcgctgctagcctgtccctgaaactggacacgagtttcaagatcctggaccgtgtcaccatccaggaactcacagctccattacttaccacagcccaggcgaaaccaggagagacccaggaggaagagactaactcaggagaggagccatttattgaaactcctcgccaggatggtgtctctcgcagattcatccccccagccaggatgatgtccacagaaagtgccaacagctttactctgattggggaggcatctgatggcggcaccatggagaacctcagccgaagactgaaggtcactggggacctttttgacatcatgtcgggccagacagatgtggatcacccactctgtgaggaatgcacagatactcttttagaccagctggacactcagctcaacgtcactgaaaatgagtgtcagaactacaaacgctgtttggagatcttagagcaaatgaatgaggatgacagtgaacagttacagatggagctaaaggagctggcactagaggaggagaggctgatccaggagctggaagacgtggaaaagaacgcaagatag

SEQ ID NO: 591740 - DNA, 121 bp, Homo sapiens
  misc_feature (1)..(1): n is a, c, g, or t
  misc_feature (72)..(72): n is a, c, g, or t
  misc_feature (94)..(94): n is a, c, g, or t
ntaaatgtacaacttcgcaattgtaggatttaattgattgaattcctttatactgcctcttcccttctgcanagacattatgccactgtggtgnatgtcagtacctctgaggttgcttgtt

SEQ ID NO: 591741 - DNA, 141 bp, Homo sapiens
cacaaatgcaaagcattttgtataactcttactgcatttctacaataagtagcttaggacaggtcacactccactatcaaggtgcatagcgtgcaattaaccaaaatgtatgggccacctattacttgcctaggtactagg

SEQ ID NO: 591742 - DNA, 250 bp, Homo sapiens
agaaggatcccattaggcgcgctctgcgtgccagttcatactttatcccctggccccaggcatggcagatcgcgtatcacagactcatagttaatgactcggggttcgcatcttccacttgtttctatcccattgtcggataggtgggatgggagatcagaaactgcttgtctggatttggtggagcccggtagggtcccgagctcaaccttcgtaagtcctagtcataggcctttccctgtgtcacaac

SEQ ID NO: 591743 - DNA, 219 bp, Homo sapiens
tgtcaacgcagattgttatccaggctggaatggaggctctgaaggctgctgagtgtgcaaggaagctctttctattccatacatgcctgcccattgctgaggccccaggaaactgaagagcagagatgacaggaagctgatcgatacagacaaggagaagactctgttccagcctcagacaggtgcctatcatgaccctggttggcgaggtgggggggc

SEQ ID NO: 591744 - DNA, 698 bp, Homo sapiens
gagaaaaattagtccttcaaatactgctgtattttcaggaaaaaaaaaaaaaaggggtgtttctattgaaactgtactaaattttggcctacaatttaccttgtaaatatggtagataaatggctaatactaatagccaaatagataacactaatgcttggtttaaaaaaacgaaaaaaacaaaacaaaacaaaaaaacatgagccaggggttgttctaattgaagtttatgacatctgtcctaattagtttcttaaatacatttactacttaagggtttggaaggcaacgtgtttaatttttaacaattttgtgaaaactggctaataaccctttggtccagaaattttagtagatggtttaatgccaggacatcaaactacattaaatgaaagatgcttgaaatgctttggttattccagggcaaatcaaaattaaattcagactatcaaactacaagagaaccttagtctttttggttttggtctaaccattgtcagttcagtgatgtctggtgacctgtgagtgacctggtatggattttctaatcttagagaccttcacacagcatgagggctgttggcatttggaaaaggttactaagtagaagcatacaatgtttcccttgtgtctttgaaaccttgtttgtaaaccataaataaaatattgctgcttttattaaattataacataaaaag

SEQ ID NO: 591745 - DNA, 101 bp, Homo sapiens
ctcccaggatgagaaattgaggcaggcaactgtacaaacagacctgttaaccaacccttatcctgttaatcacctcttcacccaattaactacaccagttc

SEQ ID NO: 591746 - DNA, 235 bp, Homo sapiens
  misc_feature (15)..(15): n is a, c, g, or t
  misc_feature (92)..(92): n is a, c, g, or t
  misc_feature (154)..(154): n is a, c, g, or t
atcgatcgcagtgtngtagcccgcgaacgggtccagcgaccgccacgttcacgttctttcggaacggttcgccccgctcgctgagccaggangcgtatgccttccccgatctgcccggcacgaggtcgagcagcctggcccgagtcttcccggngctgtcgcggctgaggtcgaccatgccggtcagttccttcgggccccgcttgcggtggtcgacgtgatgccagatgtgctg

SEQ ID NO: 591747 - DNA, 280 bp, Homo sapiens
tcctatagagcataccctatcactatggacacgtgcgggcagtgtgagagactggagggcacgaactctggagtcagactatgtgggttcaaattctggttacagattataaatcatgaccctggatatatattttcaatatatttgactaacgcttatttaaacattttgtacttcagttttctgagcttaaaatggagataaagaatacctcttatacagctgttatgacgatcaagtaaactcacacatataaagctcttagcatgatatctggtac

SEQ ID NO: 591748 - DNA, 296 bp, Homo sapiens
  misc_feature (281)..(281): n is a, c, g, or t
ctgctgtctagatatcgctgggaaggggcagtgcacatagcgtggtatatccatcaggagcttgggcacccagcgaacactctacggtgtaatgggaatgggaaagcccccaacagcttccaccagtgactccatgggacaggatcaacgggtgggagagtcctagtgtcaccgggcagaacctaccgtacaggctggtggtgaacaacatgaactcctggggcaaagcggcattttctggaactacagcaagtgaaggaagtagtgatggttctggcacncacaatgaaggaagc

SEQ ID NO: 591749 - DNA, 396 bp, Homo sapiens
  misc_feature (16)..(16): n is a, c, g, or t
  misc_feature (23)..(23): n is a, c, g, or t
  misc_feature (48)..(48): n is a, c, g, or t
  misc_feature (85)..(85): n is a, c, g, or t
  misc_feature (125)..(125): n is a, c, g, or t
  misc_feature (144)..(144): n is a, c, g, or t
  misc_feature (184)..(184): n is a, c, g, or t
ctctctaacccccagnatttgtncgttcaccccacccaagacttcagnaagtgtcatagcactcgtggactaggtttcatggganaaaggcattctgcaagaagtagaagcttgtggccgggtgnagtggctcatgcctgtaanccaagcattttgagaggccaaggaggtggatcaattgagnccaggagtttgagaccagcctggccaacatggcgagaccccatctctactaaaaatacaaaaattagctgagcatgttgacacacgcccgtaatcccagctactcaggaggctgaggtgggagaatcgcttgaacccaggaggtgcaggttgcagtgagccgagattgcgccactgcactctagcctaagcaatggagcaagaccctatctc

SEQ ID NO: 591750 - DNA, 204 bp, Homo sapiens
cctgagcgacaggtggatactgcagaagggctttctgaaggaggaggacctcaacggagaaagaagccctggttggtggcacctcctgtgttcatggagctgggcctgtcatgcccctggtaggcctgtgctccctgaccgatcacgctgtgggcacacccaatcggagatccttcctgggagcaaggggctttcggaccaagg

SEQ ID NO: 591751 - DNA, 325 bp, Homo sapiens
acgtctatggctggtgacagagtgaaccccgactgtaaaaattaaattaaattaaattcaaaaagcactatgggctactgaaataactctgctataagaatgtgaagtgtcggccgggcgcggtggctcacgcctgtaatcccagcactttgggaggccgaggcgggtggatcacgaggtcaggagatcgagaccagcctggccaacatagtgaaacccccatctctactaaaaataccataattagcggggtatggtggtgggtgcctgtagtcccagctactcaggaggctgagacaggagaatcgcttgaacccaggaggcg

SEQ ID NO: 591752 - DNA, 344 bp, Homo sapiens
tcgtcttttgataggatttaaaaaaaaaaaaaaaaaaaaagggttttttcccgaccttatccattggtttagggcccaaccctatcctttattttttaaacccaaaaaacttttttataacttgggccttaaacactccacctcaaaccgggggcccttttctttttttcggccgctctcccggggggggatccctccctgggggccccccccaacagttttcgccaggtggggaaaagccgccccaggggcgggaaagtgggggtaaacggcaacttgggttcaaatttaaaggggaggggggcttttccctacacggggcccgggctggaattcgaaaccag

SEQ ID NO: 591753 - DNA, 418 bp, Homo sapiens
ggaatgagctccagagattctcccaacaccttccccacccagagcaagaataagaaaaacaagttcttgttatcagtttccccctttgaaattcttttcctataccattatcctttgatctcttctcacaactacttttgtaactatttctgcaagtttgcaaggattttgtaagttcctgttttccagctgtgcagtatggcaatggtcacaagacatgcctgagttgtaaaacctgtcactgttcgataaactgcctttgttctgcttctgtaagcttgcttacccaccttacaggttttgcacccttttcagatgtatatataaaagtcaagccctgtctttgtttggtgctcagcctttggatatgaatccgctgagttggtggccacctaataaaatcctcctgttccaaaaa

SEQ ID NO: 591754 - DNA, 619 bp, Homo sapiens
gtttaccaggggtgtttataacgaaggatgtaatggggtaaaaacagatacagaaatgtttaggtaaaagctctgaccggattttaagttataagttgtttgagaagatgttggtggtcaaattaaagtgaaataattgtgctgagcttggtgtagttcaaaagccaataataagttaagcaaggtatgtgtgtatatatgtgagaatcagtactataatggaagccaggatagaagagttagtatcggagttgtgaaagtatgagtaagacatgatggcagggtgtgatgtcgatttatggaaaggttgacgaataattcgtaggccagtatgagagcacagattatggtctgtataaagaagaattgctaaggtatgatcatattgtggtgcagatttgtagagcacaagtgatatggaatgtcagaatgaagtttcagatggtctccaggaattatatcggaggagtctagatgctgatgtggtttttttaagagtaaaaagcaaaaggtgtgaacgtctaacgtggttttagtattaataataccagtttgtattgtagaattgtattgatatagctcacgcttggttaaggctggctgtgtatatatatctctg

SEQ ID NO: 591755 - DNA, 318 bp, Homo sapiens
gtagtagagagtagataagtaagttgccaggggttaaggaggatgagggaaaaggagggaagcgagtgtggctataaaagagcgacatgagaaacccttgcagagatggaaatattcagtatcttgagtatattgatgtcaatatcctaattttgttactattgtgttttcaagatgttaccattgagggaaattggtaaagggtataggggatctctgtattatttcctataactgcaagtgaatctacaattatctcaaaataaaaattttaattaattttaagaaatattttccccaaatggtggaagttaagtg

SEQ ID NO: 591756 - DNA, 236 bp, Homo sapiens
gcgggcgcggtggtgtggctccgaacggtgcaggcggtcaagaccagcctggccaagatggtgaaacccggtctctagtaaaactacaaaaattagccagtgccatggttggcacatgcttgtactccccagctcactcgggcacagctgaggccaggagcacatggcgtgcaacccggcgcaggttggccagcttgccagttgcagcccaagcatcgtgcccactgccactctca

SEQ ID NO: 591757 - DNA, 370 bp, Homo sapiens
aagacagatcagcaggcaggaagctgaggaggagggttgttgtgaccacaaggtctggagacgggagggcaggggtgtgtgtgtgtgtgtgtgactatgtgtgagtgtgtgtatgtatgtgtgtgcgtgtgtgtgtgtgtgtgtgtgtatgattttctaattcctagtcatttttctattgattgttgtgcaaaagccatttacatcttaaggatatagataatcttgtgttatatgtgatgcaaatatttttttccagtttataggtggccttttaattgtgtgtcacaggtagataaaagttacacgattttcttaggtgagtatatcagtgtggtttctgaacttgttatgtgtagatcttttccac

SEQ ID NO: 591758 - DNA, 954 bp, Homo sapiens
tgggcttgactcaggatttaaaaactgggaacggtgaaggtgacagcagtcggttggagcgagcttcccccaaagttcacaatggtggccgaggacttggattggcacattggtgggttttttaaatagtctattccaaattatgagatgcgttggttacaggaagtcccttgccatcctaaaagccaccccatttctctctaaggagaatgggcccagtcctctcccaagtccacacaggggaggtgatagcatggcttccgtgtaacattatgtaatgcaaaattttttaaatcttcgccttaatacttttaatttggttaatttggaatgatgagccttcgggcccccctttcccccttttttggtcccccaatttgagaatgtcatgaaggcttggggtctcccgtggggagttggcgtggaggcagccagggcttacctgtacacgtgactgtgagaaccagttgtgaataaaaggtgcacaccttaaaaaaaaaaaaaaaaaaccccgagggcaaacacataggccggggggcggacaacaacgggtgtatacggaacggggccatagggccaaaggtggtacctctagaccaacagttctggcacccacgggggcaaaatccggcagagtacccctaataaggaagagccgaataaaatccgaaaacccgggtcaccccgtggcttaaaatgaaccgcgcggaacaaatgagacgcaagacaaggaaaagacaccacgaagaagcgacgacaacaaagggacgacaggagatagccacacaactgagtcatcaacaacaaaacatagagtcacagaagcaacgcccacagcacgagtgggccaaacgcgcaacatcagtgagtccagaaaaaaaaatatacaacacaaataaaaacaaaaaaacagaagcagaaaggaggacacagcgaaagaagaacaacacaaac

SEQ ID NO: 591759 - DNA, 1697 bp, Homo sapiens
  misc_feature (1515)..(1515): n is a, c, g, or t
ttgtgggcgtcttttttagtccaccgcccggggggggtgttataatagatatagtgtcttgcccctaccactgagagggtgtgcctcgattaatatgacaacgagtggtgagggcaccacacgccggtcgtcgtgttcgttgtacaaagaaactaacttgctttctctcgtggggtggggttgtgtggccacccacacctcggggggaagtgtaaatgttgttcctccgttgcgcacaacaactaatcggtacctcgtttgttttgttactcccccggaaaagattaaatacaagaaaaaagtactttctccgggggggatattataatatagtgaatgtgctccccccggggggtgtatttattaagatagcgccgccccccccacatattgggtatgtttctcacccccccccggtttggtttgtgtgtttgaggaagaatttggcggaacaaagaataatttttttgtcgcccttctgcgtggcgaagacaatatcagcaatatagatgttgcgccacctcctggggggaaccacccttggctgtctataataacggccccccccgcgtttatctcgttgcgggccacaacatacacgaaggagcgacgtcgaacaaacataggtgttcctcttgctggggacgatgttgggaagattattgttggcggcgcccccccccgcgacattgatgttcttgctgtcgcccccttaaatggtagaaagagctctttaattgtgtgggtactctttgtgttgcgcaacccagcatttagaagttttgtggtccgccacacccacacagcagatttgttggtgttgtgtgttgttgtggtccccactatatcagaccactacaacatgttgtctacaacacagaatggtgacgacacactactcccgctacagaagttctgctcggccccgacaccacaagagacgacccacggactccccaggagggacaacacttggtgcttataatacccccgcgactcccccagagaagagagagttgtgagaccacccagaagagactcctctgagagacgcgtcgcctctccgagaagaccaatagtagtcaccactatagtgtcctcctctctcccggcgacggcgcacaactcctcagagcaacaagtggtgtcacacacacagagtctctctcactgtgctcacacaggggtagagagagagactatcacgggccacaatagagtggtgtcacactatcttttctaccctcctcacagggagaccacacaagtgtggtctctgctggcgcggagtgttgtgggcgctatatggagacacatcttctttataccccgagaatcgccccctatatcgcctaaggagaagactccacttaagaggcgccggtgagcagccacgccatgagacagagtctctccacaatgagaagtacaccacacaacactatttccacaccattcactgagaagatctgtaagcccccccacgctggagaattggccaacccacctgcacgnccccctcgaagaaggagaggtcgaaatgggtaaaaggagccacttctttttaattcacccacgactttctcctgggataatgagtgtgaatgatccagtcctttgctgaaaaattttcaactatgtaggtaaattcgttcaaagggtcacctaggtgaaataaattctgattcttctaaaca

SEQ ID NO: 591760 - DNA, 1205 bp, Homo sapiens
tactagagtccccacgtgtcccctgacgtccctgccccttcgcgtccctgggaaccgagatggcttccgagccgcactcgccgatcctccaggcatgccccgatacgagctggctttaatcctgaaagccatgcacgcggacagagactgctgctactttgaaacgtacgatatgaggccctgatggacacgagcgagcaatagctgagggacttggaaaagcctgtggtgaacgagcgcttccttctaggatctctgtcccacagtcagacagtcatcaacagaggcggcgtatttcttggtggattggtatgcaccccaccgcagcctgttgcaacagcatggtggcagccacttgtctcgcagatcatcagatgtgattaggagggcacatattgtcaaacaccctctgaacccagcgcaactcaaaagaatgtgacagggattgtcccagtcaccactcgcagagacaattatattccgaaaagaagaggcacgaagtgagaagattcgacagatttagccgttatatgtacattccttcacatactgggcagcatggacgagaaggacagaacttgcaagattgggacctacatataagcatgtgtccgcagcgttgctgccgactcttctaacggtatacacagcccttgatcccctttgcttgcccagaggatgcgcgaactgctcactgaccagtttctctgataatcctgacaccacccagctggactcactcatgcaccctggcattccatagctgccatatctttcggtcatctgacggaatttcgccttaacaacagctaacacacttgacggacgaggaagacataatcaaacctccgcgcatggcaacaagcactccacccgggtacccagtgccaccaccacgcgcaccacggctaacgcacaccacacgccaccacacacaccccgatcaaaacacacaccagggggcacgaacaaacacccgaggacacgaacacacaccagactacaagcaccaaacgcacaaaacgccgccccacaaaacacgacaacaacgaccaccgcgaccacgtagcacaaccaacaagacactaacacccacgaccacaatgaacaacaagaacacaccacccgaccccatccgaccgccaccccacccacgcacccaacacaccacacgacgaccgcaccgcaccacacgagcccagaga

SEQ ID NO: 591761 - DNA, 1292 bp, Homo sapiens
ggcactcaggaaccgagagacagacctcaactcactacttcagacttccctgctgtgttgcagcccagccgcatccatcatgtcctatacagatgctgaccagattgctagaattcaaggcaggcatttctcctgttttgacagaacaggtgattccaagaatcacctataagccagagtcggtgatgtccttcgagctctgggcaccacaatcccaccaatgcagagcgtcacggaaagttctgggacaccccagcaatgaagagcctgcatactgccaagaaaatagagtccgaacaatctctctgcctatgactgcacagaccatacaccaccacacaaggaccaggccacctatgaacgcacttcgtcaagagggtctgcgtagtctccgcacaccctcctcgcgcacactgacccaccactaccactagacacctagcctgacacatacagacctaatccttccttatcccaaccccatgctacctgtcaaacagactcaacacctcatcaaacacccatgccaactccacatgatctagccccacactccacaccaaacaacctcccccacagccctgccactcacactctatccaaatccaccacagatcaacaacaccactccacacgacctatactatcccctgtcataccacccatacaacgcaaccaaccctctcaggctctcagccacacctccctctcctcctcacctactcactcacataactcacacctctcttcatacttaaccccccaaacaccatgacacaactacaaccaattcaccgacaatccacacaaccccaatccactctatctgtccatacacaaacacacaacacatcccacctaaccaacctacctcactacaattcactccaccactctaatcactcaccctgacatccaaacctaccacactaccaatacatcttcagcactgacactacaccttctacactcccacctctcacaaccactccccacaccccacctcccattctcaccactactccccacctacacactcacacaaccctctataccaactaacatcctcaacaccactagatcaaccataaaaaataataacatcatcacaattctttactacactcacaaccaacaacacactcaacaccttcaccactcacacacatcacatactcctcactccaccctccaaccacacacatcactcaccacttcgacctcctcatcacacccatatccaccacgaccaccccccacacatcacactcaacataccatcacccgatcac

SEQ ID NO: 591762 - DNA, 472 bp, Homo sapiens
  misc_feature (96)..(96): n is a, c, g, or t
  misc_feature (142)..(142): n is a, c, g, or t
catcttctctgcccggagttcttgacggtcaagaagccaaaagctgtgggcttgatccagcccatgtgttagaaccagaaccaggaaggggatgcnagcctacaggaaggccgctgggacctggcgagagagtttcttaccntcaggggcctgttgcaatgagagtggccaaactagcaattaaccaagggatggaggtcgacttagtaacagggttagccatagaagaagcctgctatgctcagaccatctcaagccactgtgcgccatgtcatatttattcagatttataaagctagcaatgtccgtggtcaaaacacgtaaaaattaggtatatgtttttaatatttcccgcatatcaggctttgtcgttaattttttaatgtgaataatttatattgcacactctaggaaataattgattgtatgtctaccatgctgcattaagaaaataaaactatttctgtatccc

SEQ ID NO: 591763 - DNA, 366 bp, Homo sapiens
  misc_feature (17)..(18): n is a, c, g, or t
  misc_feature (47)..(47): n is a, c, g, or t
  misc_feature (59)..(59): n is a, c, g, or t
  misc_feature (72)..(72): n is a, c, g, or t
  misc_feature (94)..(94): n is a, c, g, or t
  misc_feature (99)..(99): n is a, c, g, or t
  misc_feature (124)..(124): n is a, c, g, or t
  misc_feature (196)..(196): n is a, c, g, or t
  misc_feature (221)..(221): n is a, c, g, or t
  misc_feature (228)..(228): n is a, c, g, or t
  misc_feature (298)..(298): n is a, c, g, or t
gtcccatcacagctttnnaaacagcaggataagttcaagccaagggngactttttcccnggtttgcggaggnattccaccagccccagtgttgntgggnttccccgtggccatgtgggtgtttntaaagcaactccccaccaaccttttgggctgtggtgaccaagggctaaaaattaagtggggaccctggtatntgacttttgctccacttctgacacnttctttntctcccgtttcactaggactggaaaatacaggctttttttcccaatccttgtttctctcaaaccaagacntcatttacataaaacatctagggtcaggcccatccactctagctcttattacagagaaagagctccag

SEQ ID NO: 591764 - DNA, 470 bp, Homo sapiens
agtagaaaataagaccagagtctgaggcccccattccaggacctagcttatggatgacattatctagacacaccttgtgaacaaaatgcaagcagcacatatgaagggaaggatccagtcctggcaggagtcatcacctgctgaccaaagagcccttgggctctgtataatcaacagtggtagccaggcagtactcactgtgggcattgggtgagactcagagccatgctggcctcaggaggccgaggtgagcaaatcatgaggtcaggagatcgagaccgtcctggccaacacggtgaaaccctgtctctactaaaaatacaaaaacttagccaggcgtgatggcacgcgcctgtagtcccagctacttgggaggctgaggcagaagaatctcttgaaccctgcaggacagaggttgcagtgagctgcgatcgtgcacctgtactccagcctgggccacagagcaccac

SEQ ID NO: 591765 - DNA, 1177 bp, Homo sapiens
gagctctcgggcgaagttcaagaacaagattgcttccacagtatgatcatcaggcagaaggaagatcttcgcacatgggactagaagaggtgacaaggcagtgatgcatttggtgcccaacttaccagctgcgcttagcaggatggcatcatcctctgcgaacgttataaacaagctacagccaggctcagttgaagaacggtcaagcagagtccatcactgaatctggccgtcagatggacgaaatatgggcaactttactaacagctatacaggcttatggtatgaagccacatgacatatacgaagcaaaatgatacttataaggagaatgcgaaaccattgacccaggttcaggactaactactggtgactctagcagggtcatggactaaaaacaaaaaggattccaatacaaccattgacacttggaggtaaacgtatgcagaaaaaagaaaaaagacgtattggatgaaggacaatttaaagagctggcaaaaggtgtaatatggtctgcaagattgggaaccaaacaattgtgccagcacaaggcaggtatgacagcttacggggactaaaaggcatcttatgatcccaaaaatgcaaactggacaaacactatttggacagaccaaaaattagtctgcagcatgcggcactacataaaggagaccagccaaggacaggacatgctaagccaccagggtacgcagaaagagagactctatgattcagaacgcttatacattacagccggtggaacacaattggagcaaatttcctaacgaatggggtaacaaaaaggtgtattccaaaacagtgatggatgtgaataggacatgggaggaagaaatattaccacagaataggtggggcacagagaacggttttatacaaggaggacaggacaagcacaacagtggtgagaaagaggaagaggaaatagaccgacaagacgaagataaacgagatacgagggaacagcagataaaatgatagcgagtgtaaaaacacagaggaatattattgatcatgataaaggcagtaatgattgaacacgaactgagaaagcatactgctccactctctcccccctcctccctctcattcttcttcttctctctctactgcacctgagacaaaaagagacagagacggacatagagagaagagaata

SEQ ID NO: 591766 - DNA, 376 bp, Homo sapiens
gttccatttgatcacctttcttcactgggatcttactatcttgtggggaaacattggcatctcagagggagtccgtttcattgttagaaagttctggccgggagcggtcgtcacgccagtaatcccagcactcggggaggccgaggcgggtggatcatgaggtcaggagatcgagaacatcctcgctaacacggtgaaaccccatctctactaaaaaatacaaaaaattagccgggcgtggtggcaggcgcctgtagtcccagctacccaggaggctgaggcaggagaatagcgtgaacctaggaggcggagcttgcagtaagccaagatcacgccactgcactccagcctgggcgacagagacggatccgtctca

SEQ ID NO: 591767 - DNA, 332 bp, Homo sapiens
cggcacgagggcagatagtttttttggacaatgaaaatactgcccatctgtatgatactataatggtagatgtatgtcattatacatttgtccaaagccataggatgtacaacactagtgctgtgatgtaaaccatggacttcaggtgataatgatgtgtcatgtaggctcatcaatcatagcaaatgcaccactctggtggcgggatgttgataacgggggcagctgtacatgtgtgggcacaggacataaatgagaaatctctgtaccatccactcagttttgctgtgaacctaaaagtgctccagaaaaaaaataaagttttttttaga

SEQ ID NO: 591768 - DNA, 411 bp, Homo sapiens
attgaagtcgagaactcgcgtggtgagaacatcaacaatcgatgctcgataagtactccccacttatccctcacctgtagttgtcgtaagggcacacgtacatttcaatctcgtgatacatcgcacattaggaataggcgaggctcgagagtcactgagtggtcatcttcctaatgacctgcttctaatagtttttccggcaaggaacagtctgggagtctctaatccagagagactttcagattccctctcttcacatgaacctccattagttagattttgggaaagtgagcatgaagaagggactcagagctgccaggtacccgagtctcgggtctgacatccttgggccccttctgccacaacttgccacttcacggacttgaattatgttgcttcttcctggaagtc

SEQ ID NO: 591769 - DNA, 385 bp, Homo sapiens
cctggaggtaaacatggacaaacatctttcacttgtcctaaccctcatagcacgtcagccttacgacacagtatatatcttcaaatggcggggagcagatgacatagacggactaatctaacactgaggggtgcttgacaagtgtttacttggtatacatctatacaaagctgggctaaacattgattttattgatctgctggaaatggatgaatatatgcattatttatagaatctgttatgagacgtggctgctcttaaccctataaacccaatgcgctctcatgatgcactctaacttaagagtttttactttatgtatcgatacctaacacaattctgaaaatacactaaagaaaaaacataatggcctcgttgtgcctaa

SEQ ID NO: 591770 - DNA, 888 bp, Homo sapiens
ctcttgagtgtactcttgctgtctatcatcaccgtctccctgctccgtattaaaatatatatgtgtccgctttatatatcgcgtcgcccgctgcaacattacgtgcgcccgcttaattaacactaattttaggccgcttttatttcgcccatttaacccaacctgggtgttttgcagaaaccaccgttgcgctcgtgttgatgtcgagaaaaaaataaacgctgtttactacttttgtggggccgccattattaaaatatcttcccgccctcttgcctacataatcgttcgtccccctcgccttgtattacttttcggaccaaaaaagtttgctccccgtgttggctcgcccaggcgcgaatgagtttggctcgtgctgtggtccgccggtacaatatagccgtttaaatttcttgggacgccaatatataagggggtaaaaaaaaataattctgttgtggtaaacgtccacggatagatgggttttaggcgccgacgcacgcttctgtttaaagtggtggcgcccaaaatgtgtgaaaaagtgatttttccaaaacccactgtattaaactgttgtgtcgacaaccccactttaaagaattgtgggtaataatttcagaggaaaattttgtgtcacgaagtatagggttttttttcctgtggtttgggggggagactatctacacaactatggtaaaggtagtttggcgccagaagtttcactgccaaatttgtagagggtccaccccacgggggtaaatttaaacaacaattgtgacgcgaaccccgacaaaatggaaggcgcgaaactggttaaaccccgtttttgggcccggttttttttcgggtttaaacccaacccaaaaaataaaaattggcccaaaaaaa

SEQ ID NO: 591771 - DNA, 706 bp, Homo sapiens
  misc_feature (143)..(143): n is a, c, g, or t
  misc_feature (236)..(236): n is a, c, g, or t
  misc_feature (287)..(287): n is a, c, g, or t
  misc_feature (289)..(289): n is a, c, g, or t
  misc_feature (318)..(318): n is a, c, g, or t
  misc_feature (341)..(341): n is a, c, g, or t
  misc_feature (369)..(369): n is a, c, g, or t
  misc_feature (405)..(405): n is a, c, g, or t
  misc_feature (442)..(442): n is a, c, g, or t
  misc_feature (444)..(445): n is a, c, g, or t
  misc_feature (485)..(485): n is a, c, g, or t
  misc_feature (505)..(505): n is a, c, g, or t
  misc_feature (591)..(591): n is a, c, g, or t
  misc_feature (594)..(594): n is a, c, g, or t
  misc_feature (636)..(636): n is a, c, g, or t
  misc_feature (641)..(642): n is a, c, g, or t
  misc_feature (679)..(679): n is a, c, g, or t
gggggcgaaggactctccaattccaagaaaccatgggccaatttggccggaaccttggtggagaaagaacccgggcggctgggtgaaacgcgtggtggtgaacttaactccgaaagcctcgcaattgggccccaatttttggntaactaacggcccaagggttgaaggctgggttcctttcccaacccctgtgctgaagaatctcctaagaagctaattcacgaaggcctgtaganaaacaactaaggtcaaataaggtggctcacgaactgtggtaggctctcaanancaaggctcaacacaggttaaaggagaagncgtggtgtgctggaaatggggtntcatgggtgggccaaactggagaggtgngattgaatggtgtggttttaatggttcgcgaagagnaattactatgcggccaaggcggcggggcactttaatntnngggctaatgtacatgtgtttgagaagaaccacaattcttntataacacattctggaattntactatatttgagactttacattaattatggaaggttggttgggttgggggaaccacatggtggtgtgaatctacggaactgggcntanatcgtcggagattatacacacctatacggacatctctgcgtncacannacacacacacacaaacatacagatacataaacacaancttcgcgacgggtgtgtgcgtgtgccc

SEQ ID NO: 591772 - DNA, 116 bp, Homo sapiens
gagcctcagttacggagtgatcatcactttgtttcatacataagagaagctgttttggctattcagctcccgaaggcattttcttcggtataaagcaatcacggagattttttgac

SEQ ID NO: 591773 - DNA, 369 bp, Homo sapiens
tgacagggtcttactctgttgcccaggctggagtgcagtggtgctgtctctgcttcaagtgattctcctggctcagcctcccaagtagctgggactacaggtgcctgtcaccacacccagctaatttttgtatctttaatagagacagggtttcaccatgttgggcaggctggtcttgaactcctgaccacaagtgatctgcccgcctcgaccccctaaagtgctgggattacaggtgtgagacaccgctcctggcctagccattatgtatttttgacagtcttgctctgtcacacaggctggagtgcagtgtcataatcatcacttggtggcacaatcatcactcgccagcctgtcacctcagtgctt

SEQ ID NO: 591774 - DNA, 544 bp, Homo sapiens
cggaatacagagtctgggaataagcaggaaaaactcagtacctcccattgggatttctttatttttcacttggaattatgagcaaacatccggagcgatctatctgggatcacccctcttctagagctgaaggtgcaaactaagaattattcccagaagccagcaggggtgggggaaattcattttacccccttaagggaaaaataagggcgggtcattccccggcatgttggtcgtagtatgctagggccccacaacactcaaggtccggtgggctctgatacttccaagtagcgcatcttcatcaagtggaggaaaatccatttcctctttcacttcccaatcactacgaactccaagggaagagtctcggggtttctggagtggaaaaccattagaggaaaaaaaaggttatagtccatacaaaacttaaataaaggacagggtaaaaatatgaagagctggcctggtgcagtgggttcatgctggtagtcccagcactttgggaagcgggggcaggatgagtgcttgagcccaggagttt

SEQ ID NO: 591775 - DNA, 680 bp, Homo sapiens
  misc_feature (333)..(333): n is a, c, g, or t
cgcgccgggatatcttggagggttggttgggcgagggttctggtagagacccttggtcccttagggtggatagcctgggaggggtgcaggcatctcccttcccccatagccctaggtcccaggtatggagtagagaggtggggaagtctggctgatggaagggagactgtgcagtcaggatcccgctgtgaaacagggcagtcttgtatctgcactgaagtaaagggtgggagaggcctcttccccatttcctcatctccccagccgggctgactctttcctagttctctccggggcctgagtcactcccgaggtagggggtgattgcctctnacttcttccttccccctctctggatcctgcgcgttgttcctgtgcacctttgacctgctgggccagtcagccgtacagcatctcctgggcccccaggtgtcaggccccaggtgctaaggataaaatagtcctttcaaggagccagtcatctggagagagagaaaagtacttaaacagttggtttcaatagaagacgtcgggtttagcctagagatctccagagggtttcctggagcacctacagcagggagtcagctgaacctgctctgaatcgtggagagtaagtaggattgatttagtcttggctatgtgtgcagggatcgggggaagcctgtgggagagttttc

SEQ ID NO: 591776 - DNA, 449 bp, Homo sapiens
agagcagatggatacccacgcgtcacagataacctagtgtcatgcacgagacccatgtttctcaggtgtagatactggcagtcttagttttagtatctctaaggcgcagacatcatggcagaacaaaggatactcagctctgttccacagggggagactagctgatatcctcagactgtggccacagagtcttagaggtaccaaaagagagtctagagactactttgatctatagggaacaggcggtcgggttaaagagaactggtcatatcagccagatggattcagagaacgtactttcctgactctaactgtctgcctgtctaaatccagtcatcattcatcacgcactaactgagtgcctacctgggaacgcgggggatatgcagagagcaagagagagctaggctttgccctcatggtgcttaacattttagtagaaacagaca

SEQ ID NO: 591777 - DNA, 598 bp, Homo sapiens
  misc_feature (101)..(101): n is a, c, g, or t
  misc_feature (221)..(221): n is a, c, g, or t
  misc_feature (228)..(228): n is a, c, g, or t
  misc_feature (402)..(402): n is a, c, g, or t
  misc_feature (498)..(498): n is a, c, g, or t
  misc_feature (566)..(566): n is a, c, g, or t
  misc_feature (568)..(569): n is a, c, g, or t
gagccccaaatgggcatccgaaatgtaaccatttaggcagtgagggcagcatgttagcagagaggtgaaggatgaagagagagcaccaaatgggcatcganatgaaccatctaggcagtgagggcagcatgttagcagagagatgaaggatgaagacagagcaccacatgggcatccgagatgaaaccatctaggcagtgagggcagcatgttagcagagnggtgaangatgaagagagagcaccacatgagcatccgagatgaaaccatctaggcagtgagggcagcatgttagcagagaggtgaaggatgaagagagagcaccacatggacatccgagatgtaaaccatctaggcagtgagggcagcatgttagcagagaggtgaaggatgaagacagancaccacatgcgcatccgagatgaaaccatctaggcagtgagggcagcatgttagcagagaggtgaaggatgaagagagagcaccacatgcacatcngagatgaaaccatctaggcagtgagggcagcatgttagcagagaggtgaaggatgaagaaagagcacnanngacatccgagatgaaccatcctgaagaca

SEQ ID NO: 591778 - DNA, 974 bp, Homo sapiens
aacgggtccacagcactgggaggcacaaatgaagccatcgaggagcaggtggctcgggaatcctacctgcaggggtagcgggctcaggagaaacaggctcgccaggtccgaggccccagaacagcccgtgcaaagccagacgccgacatgcagtatcggccacagcgagcgagcctccagatggccgtgggaggaggtggaagtagacacgggtccaccgtcgggcgagacggtagattcaagccttcgtgagcatgaggccacccctgagtctgcgagtgcgtgaaattgggcgatgaaagcctctccattcacgcaggcacatgttattagcctcttggcacaaaccctcctttcggcctgtgcgccaggtacaaagcagaacagcttctcggcaggggccgaccgggaaagtgccccccttgtgttccctctaccctgctttggagtgcctgggtcctcattcaagcagatgtccaccgctctgcctttggtctgaatgactgggatgatgatgagatcctagcttcggtgctggcaagtgtcccaacaggaatacctagacagtatgaagaaaaacaaagtgcacagagaccgccccagacaaagagttgatggagacccaggtattggaaacatctcccaacgcagtactcctgtctcggtggccaccatcaccttcttgggttcttccctctgctcttctgtcttctgtactcccctcttttcctcctccttaatactctggtagccaaccctggatcattcattgcggtgcatatactgttctctgccagttgttgccggtgcccaccaatcgaagacatccgattcaaggacggcagtgcgaatgcaaggccagagcaagcatgggcggaccaggaagaaaaagaagccggcatcaagaaagcgccatacggggaagagatcccagtggaggttataacaccgagacatgtcctgctcaagcagaa

SEQ ID NO: 591779 - DNA, 220 bp, Homo sapiens
tatgcgttcaaactggtgtaatgatatatgataggatacacaaaccagttggcaaatagtaaagccagtcatcttgcacatgtcagaaataggtacaaagattataagacaccttacacacacacacacacacacacacgcgtgtgcacgccagtgacaaaaaacaatggggcctctcctaaaataagaacatgcagagtgggagcgagaggggggggat

SEQ ID NO: 591780 - DNA, 219 bp, Homo sapiens
caaagaaaagactttagtaaaaataagcaggaggtaggtgagagtgaccaacaaatggcaagtgcacagaaccccgtaggagggcgagaggatcagcccaggtccatggcttcttctgcgaccttcgtggccttagcgtcgacgtctgtaagccagggtccagtgctggtgagaacagcacaagtagtcgcgcacacgtcgcccttctgtcgtcttctc

SEQ ID NO: 591781 - DNA, 398 bp, Homo sapiens
atgcgcgagctatcccatctagtccttcccagtaaccagtagcaaagcaagcgccatgcttcattctacggttgttgtctcaatgtttccctgtgtttcctttgggtcggctgtgttcttaatttgcttttcccttgatgagtcctgcatcatttgaaaatgtccgtgcaaagtggtatcctgaggtgcggaaccactgtcccaacactcccatcatcctagtgggacactcaacacttgatcttcagggcatgcatcaagcaacgcatcgagcaaattgcaaggcagcaagccagctggctcccatccactcatccgcagggtctcaccatggctcaggcagctgggtgctgtaaccatccctgtgcagtgtcggcgctcacccagcgcaggcctca

SEQ ID NO: 591782 - DNA, 487 bp, Homo sapiens
tcagtacttcatttcaaaacttatttccaatcacgaggaaagatttatttaaaatatactcgtacattttctgctgtggatatctactaattccttacttctgtttgttcccaatatctgtgttgactttgtattcgccaaacattatactagtgggtttttctactaattattttttgaagcattattttcccaacacaaaagagcttttttctcggtataatgaaaattgaaatcctatgtgtattcaatagtaaatagacaaattttattttttatttccacttgaagagttacatttcgtataaaagtttacaaataacggtttttattttgattttttcagtataaaaaaagttgccttgatggcatattatgatgtaatgctaattgcttgtaggatagtaaatggtcagtattgaaacctaatctctagctgccgtcttgtagatttgaacgaatgttcaccaagcatgtattttgtatt

SEQ ID NO: 591783 - DNA, 912 bp, Homo sapiens
ctggatacagagccggaggttctgggcatggacgagaacagcatgctgatccccatcgcatgtgggtggtgccctgagcggggctggtcctcatcgtcctcatcgcctacctcgtctgtgcaggaagacggagtcacgcaggctaccagactatctagcctggtgcacgcaggcacagcacgcctgcacggggcctcgtgttccatttctcatggagcttagggatcctgtcagaagcgggaggcacagcttgtctggcaaaccgtttctcaaactctgcttcagtccaactgtgaagttcatcttgcaggcactgtactaatgcacaagcagagtaacctatcgaccctgacggtgttaacgtgtttgctaaaacttggggttaacactatatttggctaagctgggtttaaaacaattacatactttagccaaacgtagggaatatatggaagggtgagggagtgcatcacgtcatgaaggaggagtagggagagtggccggcatgatatcgtgaagaggagtgagaaggatggccagacatggacaccatctgaagagagcgaagggggagaatggccaggagaccatccactggacacgaggagaatgcggaaggatagcccagacaataaaacttccaatggaaggggaggggatgggaaagagctggccacggaatcccatcgcatccttgaatgagaggtgggatgacagaggagatggccgaggcaatagtaccagatacaacgagaacaggagaccatgatagggggaccaaagttggtccccggacacactggaatgacattcgcatggaacacggggggacgactggcggaagaggaagaaatcgcgcagcgtgcaatctaccgataacaagaaacgttcacgggaacagtctccacacag

SEQ ID NO: 591784 - DNA, 658 bp, Homo sapiens
atcaacaactgatgtcatgtcgattgtaatcttaaaatcgatgctcatgtacctcatttcataggaaccgcgtcatcacgtgctcattaatatactgtactctcctacgtccctcattctcactgttgcattttttcagcttgcacaacattcacttcaatctggctttccgtctattattaagtacacatatcataccacctaacacactatcttgaaactgaataatacctaatattgattcgtgcgactacttttaactacgaagatatacattattccacaagaacaaacgatttacacaagcatgtacacacataggacgtttagactacttgctctaactctataattctctagacacatcataggaggaaaccctctgagctaggtccatgtcagaatcttactaacaacgtctgtctgggtacgattttcttttccttgcaagcagtcttctgcaacaactgtactgatatagtcagcttgcttccgaggctagtacacaaagcatatttttctaacagcagtattggcagttggcagtatagtacaaatacgttttctcactaatgacagtccatgattcggaaattctaagcccatgaatcatggcgcggtcttaccacggtgatgcctgtgtgccgagtagatggga

SEQ ID NO: 591785 - DNA, 226 bp, Homo sapiens
  misc_feature (36)..(36): n is a, c, g, or t
  misc_feature (38)..(38): n is a, c, g, or t
  misc_feature (51)..(51): n is a, c, g, or t
  misc_feature (55)..(55): n is a, c, g, or t
  misc_feature (94)..(94): n is a, c, g, or t
  misc_feature (196)..(196): n is a, c, g, or t
tataaggggaccacctggaggaaagtttcaagtttnancctttcaaataantgtnagctatcaaaagcaatacttcagcatatttccctctttnagtcctgtttttaaaatcagtctgggctggacagtgactcacgcctgttatctcagcaccttggaaggccaaggcgggcagatcacgaggtcaggagatagnaaaccatcctgggctcttgattggtaaagg

SEQ ID NO: 591786 - DNA, 109 bp, Homo sapiens
tacaacaggattctgaccatgaagtctcttttaggtaacagatccattaactttttttgaagatgcttcagatccagagcaccaacaagggggcaaacgccgccgcgcc

SEQ ID NO: 591787 - DNA, 790 bp, Homo sapiens
  misc_feature (330)..(330): n is a, c, g, or t
  misc_feature (399)..(399): n is a, c, g, or t
ggtcagccatcaggtacgccaagagtgggtgcctcagaagtacatgcaggaggctatgtgagaaagaagcaggctgatgtcacctgcgctttctttctgagggtcctgctgctgggagatagcggcattgatctctggtctcgacagggatccccggcccgagcccggcctgacatagacaggcgcgccggactgcggctaaccaagggtgcaaatgcaatcggttacggtcagtatatatgagaattcgatgttctgctccgggtggtttgggcagaagaggggacccagcttgacctaagagtggttgcaagcttaaccaggacaagngcacttgtccagtcattcggttgttacactcgagctagaaagttgtgctgcgggaaggcgcgtgcaagnatcgctagatggtcgacgaggcgatgcctgaagctggagagcgcgacgtgatggaggcgtctgatgaagtctcatgatacttctttagctttggggattagggtgaagaatatcctatgagtagcaaaaattgtgttttgacggggttagtccgtcgacgtgggactgccacctttcactaaaaggtatcccagacgaaagttctcgtggtacgactcctaggtggatcaccatatacacaggtcctagcaaagcacagggggagcatgcggtggcggcgtagacaatcatggctagggcacggaaaaagacgcctgtggatctttgcgcaataggtggcaccgaatgttaccgaaacgacagttattaaggtgggcatcttcggcctggg

SEQ ID NO: 591788 - DNA, 446 bp, Homo sapiens
  misc_feature (19)..(19): n is a, c, g, or t
  misc_feature (39)..(39): n is a, c, g, or t
  misc_feature (201)..(201): n is a, c, g, or t
tttaaccaacaagccttancctcaccccctcccaaaaantagtaagactgttattaattagaataccttgaatgtttgtacccatgttatgcctgctttccatgtaaatagagcccagcaatttcttgaacatcagataagaaagatggtgtcccaaaaaaatcttggaactgcctattttcttttttcccagaagtttantcttagggccgggtgtggtggctcatgcctgtaatcccagcgctttgggaggctgaggcgggtggatccctcgagatcaggagttcgagaccagcctgaccaacatggcgaaaccccatatctactaaaatacaaaaattagccagtgtggtggtgcatgcctgtagtcccagctactcagggggctgaggcacaaagattgcgtgaaccttggaggcagaggttgcggtgggtggcagcgcgac

SEQ ID NO: 591789 - DNA, 211 bp, Homo sapiens
gctcggttagtgaatggctcccacgggcatgacgctagagagcaggttgagtccaaagtaccctccttctactaccggcccacgccctccgactgccagctccttcgagagcagtggatccgaggcattcaacggctggggattctctaaaatcgaactggagggcatgtgcaaggcttgtggcactgggccggtcggttttacaaacggt

SEQ ID NO: 591790 - DNA, 737 bp, Homo sapiens
tgttgattgattttgttttttgggtttgcttgatttttgttgtgtctcttaaggttttatgatttgttcttttatcttggttgttgttatgttttgtatttttctcagattgtcttgaagatcatgggatggttgtattaatagggaagatagtattattgtctaaatgtgtttaaattcagtttattgaaacgtttttggtggaagagttgcagttgttatattgggttagtgtattgtcgagcaaagtctgcatagaatcgtcgtgtaagcgtgcaaggaggtgacgtggagaggatcgcgtaccgtgaagcacagtgcctagcaggcgctgtaaaggcaggctaggagtggagagcaggagattcacaggagagaagcaacgagtaggaagcgaatggctgcacttcccagccagaaggccacgcacgcacccagcatctgcggtgctgaagggagaaaggaaggtcaacgtgtagaagttcagcatagcattgaaagtattcgtttaggctgctcagcaggggctcacagcctgtaagtcccagcacttgtgggaggctgagtgcaggtggagtcacctgagagtgcaggagtgtgagaccagcgctggccaacatggagaaaccccatctctatctaaaagtacaaaaattagccaggcgtgctggcgcatgcctgtaatcccagctagcttgggaggctgagacaagagacgttagcgtgaaccgtgggag

SEQ ID NO: 591791 - DNA, 312 bp, Homo sapiens
gtgatgcccgtttttagcttcctgtggcctcaaggacggtgtcattgcctccgcccagccacgttccctttcctcctctctctcgtgtgggttctcccatcagccatctggttctcctcttaagtgccgttgacgctggtcgcttcaccgcttcccatgttcggttagtgatgtagaaatgctcctgtccctggcgctacctccttcccagatccccatcccctgaataaagcagttgttggtaattcttcaacaatacaaaacacaaatagtgtttttgttcaaccctcctaccccaaatacaactgaaca

SEQ ID NO: 591792 - DNA, 193 bp, Homo sapiens
catccccgaccagccccaaggtcttcccgatgagcctctgaagcacccagccagatgggaccgtggtcatcgccgtgcgggtccagggcttcttcccccaggagccactcagggtgaccgggagcgaaagcggacggggcgtgaccgaaaagaaattcccacccagccaggatgcctcgggggacctgtacac

SEQ ID NO: 591793 - DNA, 218 bp, Homo sapiens
aagaaggtaagaaaggtcatcagagaaatggtgagttaattatatcttgtatggatacaggtgtagataagctctcgcaatgtcccaggatggagagaaactaggagaaaagcacaggatgtagaggtctatacggcataatcttctccctcattttcatcttcaccatcaacagagagagcagcatacttgcttgcagaactgaacttagaagctgg

SEQ ID NO: 591794 - DNA, 151 bp, Homo sapiens
cttgttccttcaggactcagatatgaggacttccttagtgccattcagtctgaggcagacatggtcctccacccttcctgccatctgctgggtcctcaggtagttggaatcctgacttaggacttggggttgggtcaaggtgcttacatcc

SEQ ID NO: 591795 - DNA, 536 bp, Homo sapiens
  misc_feature (96)..(96): n is a, c, g, or t
ggcacgaggttgactgtgactgataccttacgcaggagagactgatccagatctgtcactacaagggcatcaccgttacggcctacagctccttgngctctacggattgaccttgggccaagccagactacccttccatgctggaggatcctaggattaaggagatagctgcagagcacagaagaaccgcagaccaggatctgatacgatgcatatccagaggaaggatgcatcgaagctggaaccagccgcatgtgaacatgaggcttgacttatgaggtacgaatcgactctagttacaagctgagcctgtacggtgatcttattgggattctcatcataatgagagaattcgtagaatcggaactctttctaagatctatatcatagcgtataaccgactgctgtacaataggtgttatctatgtaatgatgattccaactgtgaagagcatgtccttcgcgcattatactgacttcaatggtgagcactaatgattacatcacaatacgtattttactcttaactgtgtatg

SEQ ID NO: 591796 - DNA, 153 bp, Homo sapiens
ggaccacactggctctttgtgtctgtgacttctgagtattctgcccaggcttggactggtgattccctctgtctgtaatgtgcttcctgaaaacatctgcagtgtgctccctcacatcctttacaactttaatcaaggtcagctgtcagtgag

SEQ ID NO: 591797 - DNA, 181 bp, Homo sapiens
agtcatgtgacctgcggcaactataatatacgctattgcagctggagattcccgcgccgctgtcatcacaccttcccctcccatgtatcctacgttccagcatttccgtgaactcgttcctccttccagagtctcccagcaggtcctgcattcttatccctcgtcattacctccccacgtc

SEQ ID NO: 591798 - DNA, 844 bp, Homo sapiens
  misc_feature (175)..(175): n is a, c, g, or t
ctgtcccctaatttggcgccccttttgatgggctgccccccaggggttgagccgttgtctttgacgttgctgcgccaccgggcaaggtgtgctcctccctccttttataaagccgggcgtcttcctcctttcctcattcgctggggctccccttttgcgagacggttatagtatnttattatatccgcgccaccacggtcctctgtgtacatcagataccgccccacgggggctctcttgaatctgctcgcccacactcctctccccgctttttcaacatatttctttgcttgtgtgggggggcgcacgctctttcggggggctcaggagaccactcccatccatctctggggcgctggtgtcttacagtgtctagtggatttcttccccccgcttctaaatcgcggcgatggttgttgatagctcgctctggggttcccccataagacagtgtgtgctcccccgggcaccacgtttgtctcctaagcgggggatcacggtcggcattcggttttttgtgggccccatgatatgacaccactataggagggttctggccgcccagtagggtggtgtccgaagggcacttccccgatggggtcctcccgctgtattataggatttgttgtgtttccgaccagcatctgtaagatctctcgtgtgattgtgagtttcacccccgggtataccccggcggggtttttctattttagcattctacaatttctcccctttccaaagccacaaaaaaaaaagcctctttttccaagggcctttcccccctgatgaatttttttcccctttgttttataccccccccccccccaaaacaggggttttttta

SEQ ID NO: 591799 - DNA, 297 bp, Homo sapiens
aacttacagcaggtctcttcttacactcctgcacccgacgtcctgcaccagctccccttaggcctgtgggaggatgtggccccaccctgcctgacggtcactttgatgggatcctgtacgacaccatacccacatctcgtgaggagacctgtgcacacacaccaagttcacacttgcagtcaagaaccacgccttttcgcctgctgaagccgcgggggcgtcctcacctactgcaacctcacctcctggggggagctgatgaagtccaagtactcagacatcaccatcatgtttgag

SEQ ID NO: 591800 - DNA, 152 bp, Homo sapiens
aaaagagcgtagatgccggcgagatgaatagaggcctaggaggcgctggctctttggcggataagaggacggctgctgctgctgctgctgctgctggtggcccctttgcagatgtattgctgtccttgaatattagcccatttgaaaaggct

SEQ ID NO: 591801 - DNA, 362 bp, Homo sapiens
tacaatcgagccggacctgcagctctctctgatggaggaacatctcttctgtgactcatggttgtcttgccattgaacagcagccccaggctgtgtgtgtgctcagtgtgtaatgctgtgagcttggtgcaaatggcaggagctctaggaaatggattgtgatttatgacttcaaaagatggaagtgaagggtatgggtttttctaaagatttaaagctgtggatatacatagtaatctagaatactagtaacagcaataatgacttcaagcataaagggtgcatttgtatactacctctttctctgagggttccaggggtgctcatgtttttatcccccgaatatctcattgcaataatga

SEQ ID NO: 591802 - DNA, 206 bp, Homo sapiens
tgtgtcatctccggagcgttttcagcggcccctgggtctgcgtgcgtctcttcggggctgtgggcatgcagggaagtggctctgatggcagtctgggcgtgtgtgcccgtgcctctgcccagctgagaggccgtgggctcgtggacagagccgtccttcagtgctggggtagcaggtcagtccaggcaggaagcagcaccacgaat

SEQ ID NO: 591803 - DNA, 145 bp, Homo sapiens
cctttgggctttggccctttttccccagggggcccccccccattgggggcccccgggtttttttttccccccccccccccccccccccggggttttattttggtaaggggggggggggatgaataaataaaggggttttttgcca

SEQ ID NO: 591804 - DNA, 176 bp, Homo sapiens
  misc_feature (47)..(47): n is a, c, g, or t
tgccctttttttttttttaaatcatggcagatttcaggggaaggggntttaaaagaaaaatcgggaaaccagttgttataaagtaatttaaaaatgaaggaaaaaaaggaaaaaaacttatgtacaaaccaaggggtgtttttaggaacattgtgagggaaatgaaattgcatgtg

SEQ ID NO: 591805 - DNA, 321 bp, Homo sapiens
ggctaaagaaatgggctccacacacccgccttttagagcaaggttgaaggaaaaaagaaagagaaattcctttactgttactcctttccctggcttcctaagcataactgtgtttacaaatgtctggatttagccagtccttgtttttcttttgacacagctacaagccacaagttatgcactatatgattaactgcttttgttttacttttgtgaagtctgcttataaaaaccccattctgtctttattcaatgctaagctttttaaatgcaaatccactgagctagtgcatacctaaaataaacagtccttcccttctc

SEQ ID NO: 591806 - DNA, 196 bp, Homo sapiens
tcatttgtgctgtgaagagaacattcacaagcctctcttccggctataattatagtagtcgataccttactgtaaaccataaccaccctaccgtgcaatagaacaccacaacttattcctcctatcccaccgtaactttgtacccattgacgaacctcttcccgtcttccttttcttccttcctttcccagtctct

SEQ ID NO: 591807 - DNA, 958 bp, Homo sapiens
ctatgtaggaaagacaccgaaggagaaagaagatccttctcacagtacaagcgaaatgctacacagaaatgcatcaccacagattgcttgcaagaggtaacttaaggaatgctgaatatggacatgacacgaccattactggacaccacgaaagacacacttaaggccaggcgactatggctcatgcgtgtaattcccagcgacagctgggagtagcgagacaagcagatcacaagttcagaacgtccaagaccagcctggccaacatggtgaaaccctgtctctactaaagattaagaccagttgagctgggtgtggtggtgggcacctgttattgcagctacttgcggaggcttggaacctgggaggcaggaggttgcagtgagccaagatcatgccacgtgtacgtccagcctggcgtgacagaagcgaacgactagcatctaagaacatactaacatagaaaacgctccgttccccagggtatacagaacatggccgagggttaagagccaaggggaccactggtggtccgcggaataaaccgaccggaaacacggtgtacgcaggggtcacattcctgcccgtgtcagggtgaacccttgcggttgccacgtgggttgaaggacccagagtgacggcaggcccggcgcgcgtggcaaggaaacaaggaccgacgtggaggggccttcaagagaaccactcccacggcaggaccacgatggtcaaggcaggactgggacaacgtccccggcacggacagccgaaccagccggggggtcttccactagggcagcattaacacatataacaagaccgaggctgccaagtgcgcccagaccgtccagatgtcccgggagcacgcctaggtagaggagagagtaacaagtgcaacgcgaaacagcaaacagcgacaaacgaaaacagaccgcaccaaacgcgggcacgaaacacgggt

SEQ ID NO: 591808 - DNA, 220 bp, Homo sapiens
cttactaagtaggtgatgagtttgacagtttttgacatttatattaaataacatgtttctctataaagtatggtaatagctttagtgaattaaatttagttgagcatagagaacaaagtaaaagtagtgttgtccaggagtcagactttgacctgtcctgataggtcccaatcatcgtataagaccatatacctgcctatacaacagggtggaccaccca

SEQ ID NO: 591809 - DNA, 212 bp, Homo sapiens
taacatactctctcatcgtagatattatttaaaatattcagtgtgccatcagtatcaaagaaattattgccaacacaggagccacagcaattataggctactttactgatctgcccatctgtcaccttacaaggttatccctatgtacaggaaggaagcagctgtctccttgcaaacaggtcccttcctctccatctcccaccaaactaggg

SEQ ID NO: 591810 - DNA, 362 bp, Homo sapiens
  misc_feature (319)..(319): n is a, c, g, or t
tcaggaggagctgaggagatggatcactgaggttgggagtttgagacagcctgactaacatggtgaaacccctctctactaaaattacaaaattagccgggcgtgttggtgcatgcctgtaatcccagctactcaagaggctgaggcaggaaaatcacttgaacccaggaggcagaggctgcagtgagtggagattgcagcatcgcactacagcctgggcaacaacagcaaaactccgtctcaaaaaaataaagttcttcccttagaactagtccttgttgggctagtctttctgggattttggtttactctcctccanccattggaagggcttaaaaccgaatagtcagctcctcctagct

SEQ ID NO: 591811 - DNA, 770 bp, Homo sapiens
gccactgtctgatcctggccgtttgttagacctggcttgccaatgcatgctgatactactgagcctgcatcgaactaaagccggaacaggagttctgcaagctgcagaaggtctctcagtgcacctttaagttacttgtcttttgtaccagagcaaggaggagagcggcgtgctgagattactaggtaagctggtgataacccgggtatgaggaaagcggcgtctaattcgcaaggaatatagaaacgtggctgtgttgcagctgtgcgtactcagcgatgttctgtcataaagcaggcaagtaggtacgtcggagaggcaagtgctgaaggggacgtaatgaggctggagcagaatctctctaatcagagaatacaagtcatgaagcgcctagtgactgtaccattggtgagtgatggggcctgggaagaacccgctcttctctgcttcttcttatcgaagagcccccagagcacatcatgggaccattccttctagtgtcccaggagtggagggcacggttggctggaagcgtatccggacgtcatttggacagtatgacccgggttgggttgggccactcgtaagttaatttacgccgaagggaagcgacaacgaaaggttcttaaaacgcacaattgtgtcatgcgaaacatccccgtttgttgactgcagcacccatgaggagtaggcgcctatgggctcgacaaggaacatggtggtggctcgcgtaacgacactcccgtaagcggaaagagttactttcccct

SEQ ID NO: 591812 - DNA, 712 bp, Homo sapiens
  misc_feature (63)..(63): n is a, c, g, or t
agcttccgggctgcgctcttcgttgcccagtttccgctcagtggtcgcgtctccgccccccanccaccagtcccgctgcattctcggccgggctctaggcgccatggctccccgcgggaggaaagcgtaaggctgaggccgcaggtggtcgccgtagccgagaagcgagagaagctggcgaacggcggggagggaatggaggaggcgaccgttgttatcgagcattgcactagctgacgcgtctatgggcgcaacgcgcgggccctgagccaggcgctgcgcctggagggccccagagcttccagtaaaggtgaacccgacgaagccccggaggggcatctcgatggtgacgctgctgcgcccggacggcagcagtgcggagctcttggacttgggattaagaaggggcccccacgcaaactcaaattccctgagcctcaagaggtggtggaagagttgaagaagtacctgtcgtaggggagatttgggtagaagccctcatgctgagctttgtgtccctggtgatgttggaacattaatgatggaacatgggccaaactttcagtcatgatcctgaagccatggtttgctaccctgccagaactgccaggttcagttcatgaggcaaccctctagtcaaggcattgtaagaagcttactgcgattgggttcaataaagttggacattacagtacaaaaaccaaaacggggg

SEQ ID NO: 591813 - DNA, 118 bp, Homo sapiens
cacgaggcaggccattgtggctaaacacgcatggcaggatctgaaagtggtggtcttcacctgtgcatgaattattaattctggaaatttcaatataaacagcttgaaatacctgaat

SEQ ID NO: 591814 - DNA, 366 bp, Homo sapiens
  misc_feature (11)..(11): n is a, c, g, or t
  misc_feature (339)..(339): n is a, c, g, or t
  misc_feature (344)..(344): n is a, c, g, or t
cctgggtgaangctgggcaaatcccctttagaggtgcctgcgctgtggcttcttgctaacccatggctctgaaccagttttctgggttttgcccagggaggacagcttgtttcaccgtggatgagcaaaatggagaccattcatgaggattacttatcagaacaaccgtttaatcagaacttcaagcacaggcatggtgctgagtcaaagcagcaggggcctgtcaagaggccggagaaggagatacttatggagccggccagccgcgtggaccactgcgcatctcttaatagaccctctgtgagagatgagaaaaatggggataaaaaaggggaagtnacctncccaccatcacaaggctgagta

SEQ ID NO: 591815 - DNA, 101 bp, Homo sapiens
ttattatgtgatagatgacctcgaggaccaccagacccatttatctacacttcactccatgtcctatattacctggaactaggaaggtagttgatgttcac

SEQ ID NO: 591816 - DNA, 233 bp, Homo sapiens
ttttccgggatttttttcccccccgggtccccgggggggtgggaaggaaattttttttcccgggccccttttaaagggggggccggtggtgttttctccccgccccccccccccccggggtttttttttttttggcccctgttttttcagggccctcccccccccccccccctgggcttgggggggccgtgggggcggggtttgtttttcccctttaaaggttttttgtttca

SEQ ID NO: 591817 - DNA, 187 bp, Homo sapiens
gagctcgagtccggtgtgcacaaaggaccctggccaaaattctacagcgtagaaatgaaggtctgcctagagttcatggttttaagaacttctccagtcatgagctaagtctcctggtgcctgcttcaatgcactttcctccgtgaccaggctgcttcctccataactcccatttgccatactttgt

SEQ ID NO: 591818 - DNA, 1013 bp, Homo sapiens
gcctgtaatcccagcacttgggaggccgaggcgggcggatcacgaggtcaggagatcgagaccatcccggctaaaacggtgaaaccccgtctctactaaaaaaaaaatacaaaaaattagccgggcgtagtggcgggcgccggtagtcccagctactggggaggctgaggcaggagaatggcgtgaacccgggaggcggagcttgcagtgagccgagatcccgccacgtgcactccagccggggcgacagagcgagactccgtctcaaaaacaaaacaaaaacaaaaaaacaaaaaaaaaaaaaacccggaacatcagttccttcccccaggggggtgtccggggggggcctccacaacctcgcggggggcaccgaggggtagggaagaattctccgcaaatcaagcggcaaaaaatcggggacccgagaccgccgaaagagtggcggggcacccctgtgacgggcttgaggccccggggggggcgcccacaacaaggcggtgcagcgcacccgggggcagggaaacgggcgcccaaaccaggagaaagaggcacggacgagaattacaccgtgcgggccgactccgggcacaccgcatcacaaccaagagtcgagatacacaggcgcacataacacgaaaccgggggggacccacgcctaggaggggcccacaaaaggctggagcaacgacatcggggccgagccgcgaggcgcagacagacaccggcgcgagacgacccgaaccaacggcgccccacacccgcacccacgcgggacgcgacaaccggcagcccacagagccccgaaccggcgcacccaccacacgggtccccactgcgatgacccgcacgcgaccatcccgcggaaacgtcagaacacactcggcaccgaggaggagacgaccagtgagtgcaggccaaccacgcagagccgagccacagccagccccacccgacagcacaagccgccccacggagcagccacccaaacgagcacgcaacgacaggcgccc

SEQ ID NO: 591819 - DNA, 246 bp, Homo sapiens
accctaataggggtaaaacaggccaaaatatcttaagccttttataacacaattattttggcttagttataaaaggcaaaacaatacacataagaaaacctgagtactgaaaaggtggcattataaagtgtgtaaagagcctaggttcaatggggagggggtacaatactaaaataaaaggagatcgccagcaataggagaatagaatataatccagctatttagaatgttcccatcattcgggtg

SEQ ID NO: 591820 - DNA, 308 bp, Homo sapiens
tgcggggggggagtttcatttttaagtgaagtccaaaagccctttaaaaataatagttgtttatcattttatagaaatcagcattttctctatggcgaaacaccccattcgtttcgcgtatgattggcctttggagttacacgctccaacgagctatgttttaactgttaactgttaataattatttggcccagaagaagggatgcagtggttttgccgttcacaggaatattgaacttcttctgtaaaagagagaaagaaacctctctctctcatgcaccacatggaaacagagtgtggccatgaaa

SEQ ID NO: 591821 - DNA, 933 bp, Homo sapiens
  misc_feature (1)..(1): n is a, c, g, or t
nccagaccgtgtgccctgcgctttttggcccatggaccgatgtgcgaagaacggggtggccgtcgtcggatccccgtattttggtccccggttcgctctctgaggagagttctccacgatgtccggcgccggctcccttttttgtccttcggggggcagcagatggggaccctcttgcggtgtgtccccgcgtacacgcttttttgcacagccttttgggtgtcccgcggtcccggggggagtgggctcccccgtgttttgcgcgccccacactgtccccggattatatggggggccccctgttcccccctccctcccttttgtggtgggcccccccttgggcgtgccccgcctttcaaccggcgggggttcataccgcgcaaatttaacagacggggttcttccggggattcccgccccctgtcgggacccccttgggccgtgtcccctcggatggtccgcccctttgccccgcgcggcgggtgttgcgcgtgttccaggacccccagatgtgtcctgtgtggtggatatcccccgcccggcccgcaggtggcgcggccgcgagcggagcactgggtgacatttctccggtgttttacccgggatacacgctgtcccccgggggtgggcccccccccagagttctctgctcccgggttccctgagggcgacccttgccgtggtggcgccccctgttcccagctgtggcaccccgtcccacgaggtcttcccctctcccggcgaccctttgagtttcggggcccgcttgggggcccgacgaagctcgcccaaattccgtgggtccccccaattaaaccttttcccgggaccacaccctgcccccctgggtgtgcctccccccccccccgtgggttttttttggaaaaaattattttttttttttttccaaaaaagtttcaagccaccccccca

SEQ ID NO: 591822 - DNA, 254 bp, Homo sapiens
cgaattacaggcatgagccaccgtgcccggcccagcctaattctattctttcttctctttgagttttttttttttcaacggtttaacaaccagggggtggggggatcccatttaaaacctctgcatctaagttgaggggacaaaaagactgccttgggttcactggaactctgggccactatgagaggctgttctaaacccccagcagggaataagccgcctccacaattggctatccctctataaggtcccct

SEQ ID NO: 591823 - DNA, 151 bp, Homo sapiens
taatcgagctcggccctggtttatttctgttttgggcagaacacgagtttagcggttggttactggctagctgacagaaatgtttgcaaaaactcatattctgcccaaaacagaaattgtgccagtcaaggagaaggaggcacacagtgct

SEQ ID NO: 591824 - DNA, 165 bp, Homo sapiens
cctagctacaaaaaggctgcaaggatttgtggtgtgatctatagattcaatctgtaagaaaagagagcccataaatacaggtcctacgcattatatggacaatctgatttttgatagaagcgaaaggcaattcaggggggatccgtctagaaatcgaccttgcag

SEQ ID NO: 591825 - DNA, 162 bp, Homo sapiens
  misc_feature (26)..(26): n is a, c, g, or t
ggggccggccttgagggcttgcaagntataggggaacccttgccgtaacaacaaccccgcctcgttaagtgcccttcaggggcgccttttggcggttttctcccaccccactgggcgggttttaacccccaagggggaccctttttgggacctttaaccaga

SEQ ID NO: 591826 - DNA, 145 bp, Homo sapiens
cccgggccccccccccggttggggggattttttttttgggggcttgggccgcggggtttttccccgggggggggggggggggggggggggggaatccccccccaggggtttttggtttggccgaattttttttttgggggcttta

SEQ ID NO: 591827 - DNA, 338 bp, Homo sapiens
ggctcgccgattcaatccgtgaatgctgcccggacattgcctcttctggaggctgaaacaacatgtggctgaggtttagcacatacagtacagcgccggggctgtaggcgccagataggacgttgcctcctaaatctggcagctcactttgcgcccacagagtcgttgctgggaacaccctgttcacgggcccctgggtcctggctgaaggcctcttctcgggtgctggatacacagtatccaagggcggtgcccctgcgtgcggaagcatgtgcacagcttccgtggtggagttaagaggcaggggacagacctggggtgcacagagggtctccatg

SEQ ID NO: 591828 - DNA, 878 bp, Homo sapiens
tggaaacaaagtcttgctctgtaacccaggcttgagtgcaagggtgtgatcttggctccgtgcaacctccactcccggttttcaagcgatcctcctgtgcctcagcctcccaagttagctgggattacacggttgcacaccaccatgcccagctaattgtgtatatttttctagtagagacggggtttacaccacgtttggccaggctggccttgaacttccgtgaccctcaagtgtgatccaccctccttcggccatcccaggtgatgggattacaggcgttgagccactgtgcttccgtggccccccatttcctttggattctctcaaatcagtctttcacccattcgtgaagccagtggcctttcgtgtgtgcacccaggttcagtgggttcattaaaccccttaaacactaagtgtgaagtcatcctttccccaaaaggacccctgtgggaaagtgtacgtggccccctcgtgtggtggacttacttccccaggaaattcaggcacctttaaggaacatatttgtgaaaagttgtttggtgccatctctctatattgtggtcaccttttgaaaacctccggtatcaccccctgtgtggtgcccacacctctttcttcatatcgtgccccgtggtgctaataccgtgggctggtgcactcccccctttaaaagcgggttttttacacccgtgtgtgcctatcacaaaagccacttataagccccccataagaggcccccttatctataacttgcaaattaaccccttgaagagctcctcaaaaacacaccacgtgagaacaccgttcatctggaaaacaccagggccacgtgttgttttcccaaagagtttgtcatatgatgcaccacctttaca

SEQ ID NO: 591829 - DNA, 344 bp, Homo sapiens
gactgtgatccgattctttccagcggcttctgcaaccaagcgggtcttacccccggtcctcccgcgtctccagtcctcgcaccctggaaccgcccaacgtcccccgagagtcccccgaatcccccgctccccaggcctaccctaagaggatgaagccggtgctcccgaccggcccggggcagcccctgatgctctgccgcccgccacccgcccgtgcctactgagccgctccagggcggaccccgtgcagtccaagtccgcccgccgctttgcgtcctgggacgagatgaatgtccctggccgccacggactcctgcagctcggccaggggctgcgcgaacacg

SEQ ID NO: 591830 - DNA, 1398 bp, Homo sapiens
gagacagaggctcactctgtcaactagagcatggagtgcagaggctcgatctcagctcactgcagcctccaccatcccggattcaagcaatttcctgcctcagactcttgagtagactgggattacaggagcacctccacgaggaccagttaatttttgtatctttagatggcgacgaggtttccccctattggtcaggctggatctcaaacttctgacctcaagtgatccacatcgacctcagcctctcaaaagtgcatgggattacaggcatgaggcgccgcaacttgagacctagtgtttacttaactgtgcacacattccccattccatttccttgcacatgcaggctcccatcattcatggcaccagcagccaacagtacattgtcctcaccagcattcttcacaaactcatcaattcatggctcatctgcatgcaacatttcaacatcagcattgatcattcatgtctgccgcaatcatcatgggacgttattcattatgtgtctggcacaacatcatcaggcagacttataatccaacaaccatcaatcaggttcattatatagataattcacatgataaatcaaaaaccaaaatcaatcaagccaatctgcttagacatctggcagatcgcacatccattctcacaacaggttcccaaagcaagccaacgggcacaatccacttcccaggcagcatcaaagcaagtcccactttgctcaacatcaggcaacaaccatagagatcaaacacactcagagtacatgatcatcggctcaacttaaacaaccatttttccaacctggctaccaccttaataactgatggcactgcttggcccacaggacatccttcaaggttacacttgtgcatatcacacatggatccacgggactgacgcctctatgagcaagtacacaagacactaacacacataagcaactgttcagctgtcacaacgaccactggcaatgcgaggcactaccgggcaaacagcaaacaaaacagcaaacaaaaacataacaaggcaagaaataaaccacgaacccaaaaaaccacaggggaacagcaacaaacggcaccaccgacaatctgccaccaatgatcagcaacaaataaaaagccagagggcaaaacaggcggggaccaatacagtaagctacaaagagggatcaaaggcaccaagaactacaagcaagccataagagagaaagcaagcacgaacacaaaagaaggaaacgggaagacacaaggaggagacagcgaagcgcacgaatgagcgtgcacgaggggaccatagtaaaagccgcaaacaaggaagaagcagacaaacgcacacagaacaaagaaagaaacccaacaccggagacagtgtcagaagagcaacaacggc

SEQ ID NO: 591831 - DNA, 1269 bp, Homo sapiens
cccacgctgtccgcccacgcgtctgccctgacttgactggagcccaaggagtgagcagcctgccagtgccctcgtcgcccacagaggaggaggaggaggaggaggaggaggaggaagaagaggctgaagaagaggaggaggaggaggattcctgaggctgcatggtgggatgcatgtccaaggaggccccacctgccactgtcaccccctgcaggctcgtgccagccctgctgaggaacgacaaaatgcctgccctacgacgagcatgacgcaaggccttcatcgatgctgcccaggatggccccgcaacaacggttcccgaacggcacggccgagagcggggctcgcagtgaacgagcacatgcgaggccatccaatcaacgacaccgtggcccccaacgaacattcacttcctcgcacatctttggcccccagaccgcgggagacagtctgctttaccatgttacaccagcccatgtgcctaccgcacgctccaccagccaaccgacacctaccgtctaccccgccttctgcgccctttcagagctttgtccttcgccaggacccccccacacactcggcgcgggcctcttccccaaccaggcgcttggcacccttgcggcgcctcccctgggatctcgcgccgcccggacccatcactgaaacccacacgccttccccaacgctggcgcccaattgcaaacggctaacttgcaacgccccaacgtgccaacccggccccattggccctggcgcgcaacatcgacaccaacgcccaggtgcgcaggcgtcccaacacgagacgcgaatagccccgccacttccccttgatatcccccgtgacgcacatcccgacagcatccacactgagccatgaacgcccaactccaagccccaacacatcaaaccgaccccaatgacctccgactatagatagaactcttcctccaaattggaaacgacccagacctaaacccccacaccacgccccagccaccagccccccctcacatccaccaaactcatcccatcgcaaacacaacacaaacacaaccagaaccaactccccgtaaacgaaatgcgtccaaccccctctgaaaacaaagaacaaaaaatcgtaatccgcatatataataaattgaacaatacacacgactacaagcccaacataactcaaagtaacacagaaagcaaacaccagaacatacacccagacaccctcacctcccccaactcacataacatcacaaaacacccccatactatacc

SEQ ID NO: 591832 - DNA, 845 bp, Homo sapiens
gagtcggagttgtaacgctccactgactgatagatcgagcggctcgacatggctcccgagattggccctggtggccagaacgccgatagctggaggttgcagcctcgagtggcgccgtctgtcctgctgctcatccgcggtggccgccggcaaggaacctggggagctgtttgttctcagactagagacatatctgtgaacagtgcctgaagaacgtctcctgtcttgtggtgcaacactaacagggcttgtctggacttacccagttacaagcgtcttgccaccggtttccctttgtaaattgagctctgcacgctggagagttgtcgggtgaactttgaggcgctgatcatcaccatgtcggtagtcgggggacccctcctcctgggcattgccaatctgctgctgtgttgctgcaggaggaagaggagccggaagccggacaggagtgaggagaaggcatgcgtgcagggggaggagaggccggaatacggaagggaggaacggagagcagagatgaagaccaagacatgatgaattcagaaaaaaatatggcccgttaagagaagaaaaccgttatgctagatttgaaacgcagactagaggcgctccaaggacattcagtcccgacgcttcctgtgaggttgcacactaccgcaggccaagcccaggcgggagacccacgtgggcctcgcgggtttcatgaccttggccattgacctgcagcttcaggacagggccggaaatgccctaagacccgccctagcttccacggggactctatccggtacacctcttcacaatatgcccctacacaacacctggggagcgcacaactccctgga

SEQ ID NO: 591833 - DNA, 467 bp, Homo sapiens
gaccgcgagtagtgtacagagatgacaggaggtcagcgatcccttgcagctgcgtgtgggcatttgatgaagtgagggacaagagacacaggcagaaggaatgtgatggttacaacatagtttataaggaagctgcttgtcctccatcctctttctaatttcttgcaggctggaggtgaccatataggacaagtacgcttccttacacctaatgataagagctataaagatgacagacaggaatgataacggggtctcctctaaataggacttagggaagccttccaaggaagtgaccagctacaactgaggtacctacggatgacgaatgacgtcacccaaataccgaccctggggagaacaatgacctcaaaccagagggtagacgaatgcgtgacagtccctaccaagctgaagacgaactggttccgaggaagacaatgcaaagacactcgatgtgaagggga

SEQ ID NO: 591834 - DNA, 173 bp, Homo sapiens
gatccttataggtacgtgcagagggcagcgtagaggtatatggcaggagggcaagagggcaggtgaagggacatggaggagggcaggtggattggacgtggcaggagggcaggtggagggacatggcaggagggcaggtggagggacatgggaggagggcaagtggacagaca

SEQ ID NO: 591835 - DNA, 1606 bp, Homo sapiens
  misc_feature (1606)..(1606): n is a, c, g, or t
agggagaggcgggttgcgggcggcggcggcggcggcggtggcggatggtggttgtggcgaggctgtgcggcagggcgcacggagacctgtcctgcagcggctctctcaggccgagggtcgtcgctgcagctgccgggaccgaaggaaacgacgactccgggggcgaacttggcacacagggaggaacgggaaaggatgcatggtcatggaggctatgattctgatttagtgatgatgaccgctgtggagaatccagcaaaaggaaaaacaggacagttgaagatgacttactgctccaaaaaccatttcagaaagaaaaacatggcacaaggtggcccatacacacgttgcagccagaaattgctggatagggaacgaagcaacgaaatagaacggttacatctcatagctctggctgcttactcaaagacatacaacgtccgtacaactgactatatttatactatggtggcacacaagaagacttcaagcgttgggggacaatgacaggacagattgggatgtaatacgaggaaaatcatatgatcctaaggaaatgaggagacgagatggacctgacttggagaagggacttgattagaaatataggacacatattaagggatatggattgagatctagaaatatgagaaatagttggactaagcggccgatcaacacaacataccttccggccacggccatttcccgcggaactaaactgcatcaaccagctacacgcagccatggtactagcactcagaacaagccctaacatgatcccatgtcctattaccccgcagcaatggaacacggcactctcgtgtcgctctacgctctgtgtatcctactttcaagcaaaagaacaaagaagtccagcaacactacagcactagctaagatacaacccgacacaacggaggaagaccgaaggagcacgggacgagagcaggccgagagagtgaggagccgagcacagaccgaaaggaaaacagcacaatgagaggaagcgatcggaagagcagcagacgaacgagagagggaggagaggacaacacgacggcaggaagacccggaagcagcgagaggcgagagggacacgaagcagaggaggccagacacgcgcagcgaaccggatgaccgagcacagagcgcgaagagacacaaccacgacaggaggggcgacgacacagccgggggaggtaacagaagcggacactacgacgcggaacggaacagaacagagcaagcaggcagcagccgaaggagtgaggaacgacgaagcagacagaaggcagtggtgcactgccagcaccagacgcagcgagtccacgtatgcacgcaagagagacaagagcaggagaagaaacaacgaaagcgtagagagaggacagcgagaacagaaaaaggcacagaagcaaggaagcgaaggaagcaagaagagcacggagggcgcgagaggccaacgggagagagcaacggacaggagcgaacgggagaggggaagagaggacagacagacgacaagggcaccagaaggacgagaaagagagaggagaccgagaagcagagctaagaaagacgacagcggagaggaaccgccagn

SEQ ID NO: 591836 - DNA, 443 bp, Homo sapiens
gatgtatgctaggtcgaatctatgtcttggtattgtgaatagtagcatggtaaatcatacaagtgcaggtatcatttagtagaactatttattttcctttgcgtatatacccagtaatgagattgctgcattgaatgatagttctgctttaagttctttgagaaatctccaaactgctttccccaggggctgagctaatttgcattcccactgacagtgtataagtattcccttttatctccagcctcaccaacgtctgttaatgtcattgtaaaagtagtagttgttttactctttagtaatagccattctgacaattttgagaaggtgtctcattgtgattttgatttgcatttctctgacgattagtgatgctgagcatattttcacatgtttgtcggccactggtacgtcttcttttgagaaggatctgttcatgtcct

SEQ ID NO: 591837 - DNA, 165 bp, Homo sapiens
aggtactttgaggatccgacagcacagaggaggtggacaggacaggcacagaggagtgtggatagtaacagaggaggattatgatgagactgtaatgtgcgttcgtagtttagagtttgctaggcagaatagtaatgaggatgttcgtccgtgggcgacttatga

SEQ ID NO: 591838 - DNA, 624 bp, Homo sapiens
tgcgtaactttaatagtgtaggaagctgaataattatgaaggcagaggggtcaggttgatcgggaggatcctatggtgcggggctatgtatgattatgggcgttgatatagtagtagttactggttgaacattgatagatggaacatattctgctactagaaataatgggaacaggagcctaggaaggctagaagcaaggagccagcaagtctagacacattccagaggacgttacgcaagccctgcctcagtttccctcccaacactcagttctattcccaacaatagtactccacaggaagtggctaaaacatatcaaagaacagcacctaggtaccagttctctatgggttggtacatattatacactgcggtcataaaacaaggtatagccatagatacttcaacctgtgcacctgctaagggccacaccctgcttactgctccctgtgtaggtaaccctagggtctagattctgtctccgttgaggttactatccccaagctcaggctaaacacattctcctgtagcatgtgatggggcaggcagatagatggggggacagagaaggtagtacaccgtgcatgttaatataacatttatgctagaaaaactgtctttcg

SEQ ID NO: 591839 - DNA, 193 bp, Homo sapiens
ttgcaccattgcactccagcctgggcaacaagagtaaaattccgtcacaacaaaacaaaacaaaaaaaaacagcgtggatgcaggtggctcacacctgtaatcccacccactcaagaatctgaggcgagaggattgcttgactctaagattaaaataacaccccgcgccacatagagagaccctatctatatt

SEQ ID NO: 591840 - DNA, 592 bp, Homo sapiens
  misc_feature (8)..(8): n is a, c, g, or t
  misc_feature (62)..(65): n is a, c, g, or t
  misc_feature (68)..(68): n is a, c, g, or t
  misc_feature (84)..(85): n is a, c, g, or t
  misc_feature (92)..(92): n is a, c, g, or t
  misc_feature (147)..(147): n is a, c, g, or t
  misc_feature (160)..(160): n is a, c, g, or t
  misc_feature (167)..(167): n is a, c, g, or t
  misc_feature (174)..(174): n is a, c, g, or t
  misc_feature (178)..(178): n is a, c, g, or t
  misc_feature (184)..(184): n is a, c, g, or t
  misc_feature (195)..(195): n is a, c, g, or t
  misc_feature (204)..(205): n is a, c, g, or t
  misc_feature (213)..(213): n is a, c, g, or t
  misc_feature (217)..(217): n is a, c, g, or t
  misc_feature (220)..(220): n is a, c, g, or t
  misc_feature (222)..(222): n is a, c, g, or t
  misc_feature (230)..(231): n is a, c, g, or t
  misc_feature (233)..(233): n is a, c, g, or t
  misc_feature (238)..(238): n is a, c, g, or t
  misc_feature (240)..(240): n is a, c, g, or t
  misc_feature (245)..(245): n is a, c, g, or t
  misc_feature (250)..(254): n is a, c, g, or t
  misc_feature (256)..(256): n is a, c, g, or t
  misc_feature (262)..(264): n is a, c, g, or t
  misc_feature (277)..(277): n is a, c, g, or t
  misc_feature (280)..(280): n is a, c, g, or t
  misc_feature (285)..(285): n is a, c, g, or t
  misc_feature (295)..(295): n is a, c, g, or t
  misc_feature (299)..(299): n is a, c, g, or t
  misc_feature (307)..(309): n is a, c, g, or t
  misc_feature (312)..(312): n is a, c, g, or t
  misc_feature (314)..(314): n is a, c, g, or t
  misc_feature (332)..(333): n is a, c, g, or t
  misc_feature (347)..(347): n is a, c, g, or t
  misc_feature (353)..(353): n is a, c, g, or t
  misc_feature (373)..(373): n is a, c, g, or t
  misc_feature (391)..(391): n is a, c, g, or t
  misc_feature (396)..(396): n is a, c, g, or t
  misc_feature (404)..(404): n is a, c, g, or t
  misc_feature (408)..(408): n is a, c, g, or t
  misc_feature (413)..(413): n is a, c, g, or t
  misc_feature (421)..(421): n is a, c, g, or t
  misc_feature (431)..(431): n is a, c, g, or t
  misc_feature (436)..(438): n is a, c, g, or t
  misc_feature (451)..(451): n is a, c, g, or t
  misc_feature (461)..(461): n is a, c, g, or t
  misc_feature (468)..(468): n is a, c, g, or t
  misc_feature (478)..(478): n is a, c, g, or t
  misc_feature (482)..(483): n is a, c, g, or t
  misc_feature (490)..(490): n is a, c, g, or t
  misc_feature (494)..(494): n is a, c, g, or t
  misc_feature (527)..(527): n is a, c, g, or t
  misc_feature (529)..(529): n is a, c, g, or t
  misc_feature (539)..(539): n is a, c, g, or t
  misc_feature (583)..(583): n is a, c, g, or t
tttattanaatgttgtagtttttatatgaaaattttgataaattattgttgttttgtttttnnnnggnaatgatagtagagaannggaatantggtccaaaactcttgtctttactcttcttttaaagaaaaaaaaaggggagtganctagggtcactgnaacctcngcctccnaggntaaagnaattaaactgnttaaacatnnagaatagntggnatnanaggaatgnncnatgangncgggntaatnnnnntntttttnnnggggggggggttnggngatgngggggagggnggtntgggggtnnnggngnggggggggggtggggggnngggggggtggaggngggtgngggtgggaaggggggggggnggggggggggggggaggnggggngggggttngggnggggngggggtgnggaatatggnggggnnnggattgggggggnttgggggggntggaganatgggggggngtgnnggagagntgcngtgagcggtggaggagaggggggagggaatagngngagaaaaggnaggggggggggacctggtcgcgtctgagagcaggaaagagagantcccgactt

SEQ ID NO: 591841 - DNA, 650 bp, Homo sapiens
attggtccccgggttcaagaattcgggcccaggccaccaaaagtttagaaaaaaaaaaagccgggaaaaccaagccaggcccattgtcccttttcccaccagaaacaagggcccccaatagcccccaggccggaggggaaaggttcccagcctggatgaatatgccctttaaaagcttggccctttcctccctcggaggtggaggcggaaaaggttccccaaaaaaaaaattttttgccaacaacaaccgccccagccctggggggcacgaaaggaaattggtgcccaagctgcaaaattcaaaaaggaaaaatcgaggggcccggctctaagacaaacctggagatgaggccaggccatggtccttacccccagcaataaagacgggtcttcggagaaaggaggacccaggacaggatccaggcgggctttccacaccccccacccctaggacttattcccgctgactgagtttttgaggggctaccaggaaagcgcctccaaccctagcaaaagtgcaaaatgggaagtaaaagcctgggaatggaggggcaaacccaggaagttcccccagaaaaaaaaacttcaaaaaaaatgggggctcctccagggtggcagctcccataaatagacccgcccggcaacaatta

SEQ ID NO: 591842 - DNA, 213 bp, Homo sapiens
accatctagtcgctgactcttccaaatgtcatcttcccggcctatgtccgttgatataaagattctgggatccagagttgccgcagtccacaattatcgcttcactcaaaattactcatgtattttaatactggcttttatcacactggactgagacgcagagctgtcagaactccctgggtgagactcatcaggagggccgacagagccaga

SEQ ID NO: 591843 - DNA, 224 bp, Homo sapiens
agttatcatctgagtattgtctctaggctgtagaaccaaaaagcagctgtcaccaggagcatatggcaattcttctgcgcttgatatatctgtaattcccttcagcaggcacagtcactttaggctatcacctgcaggtcattagaagaattaagtaaatatctgatttgaggaacctgcgataagagtccttttccataaggagtatatatgactttattgtg

SEQ ID NO: 591844 - DNA, 140 bp, Homo sapiens
acagttgccttgtcagctgtgagtgacaaagctgatactgttgtgtgcagagctcggtacgatggcgcagggcgcttgcctacatgcagaagcaggtggtggccgaggtccagacccgggttcagccagtttgggtcctg

SEQ ID NO: 591845 - DNA, 347 bp, Homo sapiens
ttttttttgagacgcatcttggatctgtctcccaggctggagtgcaatggtgctatctcatctcactgcaacccccacctcctgagcaccagcgattctcatgcctcagcctcccgagtagctgggattacaggtgcccaccaccatgtccggctaattttttgtattttttgtagggatgggattttaccatgttagccaggagttcaaggttacagtaagctatgaccctgctactgcactccagcctgggagacagagtgagaccctgtctcaaaataaaaaacaacaacaagacaaccataaaatgcactaacaaatgtatatatatatacttcatacatagt

SEQ ID NO: 591846 - DNA, 387 bp, Homo sapiens
aatagcgtgtgcaccctggatatgtcctgatccaacatcgagttcgtaacctctatcgttaatatggactctagaataggattgcgctgttctccttagggtaccttgttccgttgctcaagttattgcatcaattgagtatagtagttcacttcgactggtgaagtcttagcatgtaccgctcgaaggttaggttgtgctcggaggtcgctccacccgaaatttttaacacaggtttggtagtttaggccctgtgggtttgttaggtcctgttcgctttaataaattacagctccatagggtcttctcgtctttctgtgtcaggaccgcctcttcgctgtcaggtcaatttcactggttaaaagctcgtgccatattcggcacgcg

SEQ ID NO: 591847 - DNA, 408 bp, Homo sapiens
atcccagccatcaatccaggacatggggtccgtgcccccggtgggaaggagaaggaggaagctggctttgttctgacgttgggctttttttgctccaccagtactttttgtgggggaaataggtaaagaaatggctgttcaaatgagaaaatgtgtcagtaaacttttgctacagtgatgctgcaaaacaaatcactggtgactttcagtggcacccagcaataaacatttatttagctcagggattgccaatcttttttttttttaaagggccaaatagtaaatattttaggtgtttcaggccatacagtttttgaactttgaacttgtagcccaacagtagccttagatgctatgcaaatggaggagcatgactgtgttccaataaaactttatttatggacacta

SEQ ID NO: 591848 - DNA, 325 bp, Homo sapiens
gggcgcgcgccgacgcgctcattccccgcctgcggccgactccctgcacaaagtgggctttgtctgggtcccctgtcccctcgtccccattgacagcggcggagtccccagagagggagcgggcgcggcggggaggcgaaggctgcgagccccgaggcccagcgggtccccactcgggcgcgtctccgcgggaggccggctggcccctggcgccgcgctgccccagccgcgccctcgccgggccgcgggcgcgcgcctcccccggcatggctccggcgtcgcgcggggcgcagggtcggccccctggctccccgggtgcggccgc

SEQ ID NO: 591849 - DNA, 148 bp, Homo sapiens
ttgcttatcgctgttttcgtgaatcttagtgaccacaaaaggaatcactcatctggtgactcatgataaccgcaaccatccgctaccccgatcccctcatcaaggtgaatgataccattcagattgattctccagccccaccaagagt

SEQ ID NO: 591850 - DNA, 414 bp, Homo sapiens
aaagtagccccaatccccccaattttagttcaaaattttatccaaaagcctgccatttttcctgaacgagttaagtagacaacagccctctgtattagtcccatttttatagtgctgacaaagacatctacgagactcgaagaaaattaggtttaatggacatacagtttcacatggctggggaggcctcacaatcatggtggaaggcaaggaggagcaagtcacatcttacatggatggcagctggcaaagtgagaacttgtgcagggaaacactcattttttaaaaccatctgatctcatgagatttattcactatcacgagaacagtgcaggaaagacctgcccccataattcatcacctcccactgggtttctcccatgaaaggtgggaactgtggaaattacaattcga

SEQ ID NO: 591851 - DNA, 164 bp, Homo sapiens
tgtctggatacaggcggtactaaggccaggtatggctggcgtgcattggtagtctcaactacttaggaggctgagcccaggagttccaggctgcagtgagctgtgattgcccctaagaaagccactgcactccagccagggcagcatagtaagaacctatctct

SEQ ID NO: 591852 - DNA, 414 bp, Homo sapiens
gcacctgtagtcccagctactcgggaggctgaggcacaagaattgcttgagcccggaaagcggaggtagcagtgagccgagattgccaccgtgcgctccagcctgggcaacacagcgagactcgcaaaaaaaaaaaaaaaaaaacaataacaacaaaattgctgtgccctctctctgggcctttctccgtatgtttgccatattggcttcttggggctgtcataataaatgaccacaaattgggtgaccaaaaacagtttactctcatagttctgcaggccagagattcatagtcgggcatcagcaaggccatgctccctccagcgcctctcagcaggagtccttccttgcctctgggggctgtcggcatcctcacctgtggctacaccatcccagtctcttcctctgcagcct

SEQ ID NO: 591853 - DNA, 346 bp, Homo sapiens
  misc_feature (44)..(44): n is a, c, g, or t
  misc_feature (73)..(73): n is a, c, g, or t
  misc_feature (81)..(81): n is a, c, g, or t
  misc_feature (86)..(86): n is a, c, g, or t
  misc_feature (98)..(98): n is a, c, g, or t
  misc_feature (102)..(103): n is a, c, g, or t
  misc_feature (119)..(119): n is a, c, g, or t
  misc_feature (185)..(185): n is a, c, g, or t
  misc_feature (202)..(202): n is a, c, g, or t
  misc_feature (219)..(219): n is a, c, g, or t
  misc_feature (223)..(223): n is a, c, g, or t
  misc_feature (256)..(256): n is a, c, g, or t
  misc_feature (265)..(265): n is a, c, g, or t
tgctgagccgtatgaaaaaataataaaaactcttcttaaaaaanagattacacagaaaaaacgcagaggaaanaggggaanaatgnggggaagggagncttnntggagaggcccggganggggctctgagatgactgcaggggctgagctgctggtggaaacctgcccggtccactgtgcatatnctctcactgcaggagcnggctcctccccatcgcnggcnagggcaccgaagctccacgctccctcaaggganccccttcancctgaggcttggtacctgcttctcactaaagtggctttaagaaagaaacaaaaaaaagatccaaagttagagaaggggctg

SEQ ID NO: 591854 - DNA, 413 bp, Homo sapiens
  misc_feature (149)..(149): n is a, c, g, or t
  misc_feature (189)..(189): n is a, c, g, or t
  misc_feature (206)..(207): n is a, c, g, or t
  misc_feature (225)..(226): n is a, c, g, or t
  misc_feature (264)..(264): n is a, c, g, or t
  misc_feature (383)..(383): n is a, c, g, or t
aaggtggacaagatcccggaacttgatcaagaaaccgaagcagcgttggaaaaccgaattaaaaatgaggaacccacagaaccaggtgctgcctcttctgagaacgctgaccgatcccaacaaagatacacctgaaaacgcagatggtnccagtgatgagaacaaggccgactatacaatcccagatgngtatagaattggaccanntcagcccaatgttcctgnnggtatagactatgtgatccctaaaacagggttttactngtaagctgtgttcactcttttatacaaatgaagaagttgcaaagaatactcattgcagcagcctttccttcattatcagaaatttaaagaaattttctggaataaattgggcagaagancgcagacagaagaaggaaacttaagatgtg

SEQ ID NO: 591855 - DNA, 1002 bp, Homo sapiens
gaagccgtgtggggtgcgcctgtagtcggggaagcccagcaaacaggtgtgaggtcttcaggcagaatctctcctccaggaatggctgacggtgcaattacctcatacagattctgtgacgcaacagaagaactcgtactatcttgaggtcagactcttgacaaggacggacatcgctcatatgtggctgacattgatctatcccttccgggccccactgtgacatccccattcccagacctctctcaagccaaggtatgagtgacgactggacaacctaggattacacgcagggagaatgaataggaaagctcccgtaaatgggtgagacttgctccgctgtgcgaatagacgaaacgtcggtgtccctagctctggccatggattaatgcacatgaaggtctggaactcgtccacatgatgaatatgctagttcgaggatagagtccatcatggagtccaagcatctgagtccccagaagattcgacacgattggcaacagtgatttgagcgcggataaggcaaactcgcatgggataaaaacgagtgccgaacgcccgacggggctagatagtgcccgtccaatagcttatggttgcaatgctttgtaccgagcggatgcaaatgttggctaaccctactatcatcgagcaaactgtcgggggcgcattgcgtgatgcgactcaagggcactcacagacggcaaggacattccataggttacactggggaggtattacggggtgggccctctagcttgggcattgcaaacgggatgagtggggaatggcaaggttcttcactagggctacgcccacctaggggggctgtggtgggttgggaagcactcgtagggggccactttgctaactagcatggaggcttgtttgattgccattgtctagtacacggaaacccacaaccctgggaagtagacttgaggtgcacattgccgactacggggttgggacaacaaaaagcgtttcgtaatctgcatggaa

SEQ ID NO: 591856 - DNA, 160 bp, Homo sapiens
caagcaaaagcgataggtcactgtactgagcacccactatgttcgggtgtggttctaggtactttatacttattaacactttgaattttcacaacaaatccatggtgtgggcaccatcatatatttaggttattagttattgctattgaaacttctaaaa

SEQ ID NO: 591857 - DNA, 638 bp, Homo sapiens
ctcagtcatgccagtgcctgctctgtgcctgctgagggccctgacaatggtgacccggcctgtctaaacagcccccatgggcgggccagaactggcacagcatgaggagctgaccctgctcttccatgggaccctgcagctgggccaggccctcaacggtgagtacaggaccacggagggacggctgacataggctcaggaacagcctgggtctctatggccgcacaatagaactcctggggcaggaggtcagacggggccgggatgcagcccaggaacttagggcaagcctgttggagactcagatggacgaggatatgctgcagctgcaggcagaggccacagctgacgtgctatgggatagtggccacgcacagaatgtgctacgggacaacgtgcataggctagaagatcacctgaagagcgactgtctgagcccatgctaccgagcaattgaggacttggctcacgatgacaagcagagccacatactatgggccctcacaggccacgagcagctggagaagcgcgagatcgtggaacaggaggatcggctgcgacagatccaggagagactacacacagcggcgcatccaggctgaatatgcctgcatggaactgatgacctcatgctgcgg

SEQ ID NO: 591858 - DNA, 532 bp, Homo sapiens
  misc_feature (359)..(359): n is a, c, g, or t
gcatagatgataaggatgaatttttaaaaccacttgagtttgatcaccattttcctctttctcagatatccccaaggctcctggcaaaatcatcccaagcagaaacacagacacctcagtggtagtttcgtgggaggagtccaaagatgccaaagagctggtcgggtactacatagaggcgagcgttgctggctctggcaagtgggagccctgtaacaacaaccccgtgaagggctcacgattcacttgtcatggattagtgactggtcagagttatattttccgggtcagagcagtcaatgcagctggacttagtgatattccaggattcagagctattgaagtcaaagctgctattnggggaggagtgtctcagatgtgtgtccgactgagcgatgagcctcgtggactaaccgcctccaggggggcgcgtgcatcaagcctccccgccaaccttccagacagatgcctctgcttggcagccaacctaccaaaccttccacttacccagtagcctcttaaaaccttgggc

SEQ ID NO: 591859 - DNA, 404 bp, Homo sapiens
gcatagatgataaggatgaatttttaaaaccacttgagtttgatcaccattttcctctttctcagatatccccaaggctcctggcaaaatcatcccaagcagaaacacagacacctcagtggtagtttcgtgggaggagtccaaagatgccaaagagctggtcgggtactacatagaggcgagcgttgctggctctggcaagtgggagccctgtaacaacaaccccgtgaagggctcacggtaactcagtcgggtgtgcagggcgggcaatggcctctggagctgccatagacacatacggcacacagacatccaatggaggagatttttttaaaaaattttactttttggctggatgtggtggcttacacctgtaatcctagcactttcggaggctgaggtgg

SEQ ID NO: 591860 - DNA, 101 bp, Homo sapiens
atcccgagtcttcattgctatcattcccgttgatattggaccagtatgcattgataccgagaaactagggcgatagtcttgatcaggctttgctgttagat

SEQ ID NO: 591861 - DNA, 421 bp, Homo sapiens
  misc_feature (224)..(224): n is a, c, g, or t
  misc_feature (295)..(295): n is a, c, g, or t
cccacggttagactcctagactcagatagcttcagactcctggtagaacaggacgcgcagtacacctctgctgttgctcatggtgcgattgtggccgacctgggcaccgcgcaggcccaccagcagcgtgcagctcgcattgtcgaactgaagcgtaattacgggctcaagtgaaccctcacagccacaacggaaaagcatctgctccacccatgtcggtcaanccagaaggaaaagcacaatgtcgcaactagagagatgggtcatcagaaacgctgacggggttctgattacnagtttcaagatcgatacgcaaggcacaactgtgggctgtcgtcttccgggcgcgggcgcgccaataaaaactaaatatggttggaatggtccgttaacttttcgtagcgagtctgaaggcagcctg

SEQ ID NO: 591862 - DNA, 773 bp, Homo sapiens
  misc_feature (201)..(201): n is a, c, g, or t
  misc_feature (508)..(508): n is a, c, g, or t
  misc_feature (568)..(569): n is a, c, g, or t
agcgggccaagacggagcagacagtgggtgagtccgtgagagctgaggcccccctggccggggctcagtcctgctacgcatcgaagggtctgagccagtgacagccatcctctgaggtctagctgctctgctggaatgttgacctactagtttgtgcccgcctgcccatgggccgccctcacgcgttctccagcacgtgantgaggggttgctggacgtactcttctgcgcggaattccaacaggtacatctcattgcgattcatgtctagccgtctgtcagggccatgcaacacgttgtaccctgtacagccacgtaatacctatggaatgacggaggcaatagtgggtgcacgagcgtagagccatcggagacacgaagtcgctttggattcgcaaatctccgcgagctctctaggcgcattcacgaatgactctttggcgtaccctcactctttactagaccccgatatgaatcgaaaagctcctctttcggaaccccatcaccntgaatagccctctccaatttcgctatgtccccccctgctttaaaaaggcagaaacgctgnntcttagggtctatatgtcagtctctggcgctctggggaatttaatcgcttaggtggacctagagaatccttcaggccggagaccatcttcaaaggcctagggagttaactgtgtggccctgggtgggggtgccaggtttggggtgtggcagttttcgaagtcaccagggaggtacttctacgttccgtttccgcccccagggcc

SEQ ID NO: 591863 - DNA, 165 bp, Homo sapiens
cgaaggtcatcgatgtgctttcccaggagtggactgtacagtctcagccctcaatatgaatgaactgtgatcgtgaccgttggccacattccttgtatgatgtcaggatagggtgaatcatgttgtgtcagatattgctcctgagtggctacaggatcctgcctg

SEQ ID NO: 591864 - DNA, 454 bp, Homo sapiens
tgaactagtacggctaggccctccgctgcttcgcaggcggcaagactcgactatcgactggacgcattcactcctattctaaaggtgacatgttgagttgaatattatcagttgctccccggatttctcaccaattgcactggagtaatgccacgtcagttcaaaaaggatttggattcctatcttaaaactcgatcaccagtcctttccttgtccgggctgcgcagcaacctacaggtatccaatgaacctgggaatcgctacaacctccagctcatcaatgcactggtgctctatgtcgggactcaggccattgcgcacatccacaacaagggcagcacaccttcaatgagcaccatcactcactcagcacacatggatatcttccagaatttggctgtggacttggacactgagggtcgctatctctttttgaatgcgtccgtcgaagttg

SEQ ID NO: 591865 - DNA, 180 bp, Homo sapiens
gccggccagaggtatgcaggcgccccaggcgctccgcaccgcacctccacctagctagcacctaaggagacagttaatgctacagtcagttggttcccctggcgattgagagtcaggagctcttctgtcgccgccaccagttggttaagtacctacggagttggtttctcggcaggcgga

SEQ ID NO: 591866 - DNA, 1063 bp, Homo sapiens
tggtaatcaagccatgtcccatccgcggtgaatccattaccctcttgggtcgtgacggaaagtctcccttgggacgctataccaggttgcacctcaagcctctcgggataaactttcttcagagtcgcctccaggcatgggctttcacccctgtcatacagactaatcgtcacaagggtctccaaaatgtcaacaaagcgtgatcgacgtgaatagttctgagcttcctcgtgcatggtgcgaactaccggctctacaactctactatactcgagcatcttttgtgtgacgacgcaagacatggaggatcactcgatgaccaggagtcctgagaacaagcctaggcaactctaccacgactcctgtctcttacagcaagtgttcaagaaatgcagccaagacactaggttgcgattggtatgcacttgtatgttcccaatgccaagctacagacagtgctcgagtgctatggatggatcagcattggagactacaaagaaggtattgaggcacttgccaggtagagcctagtgaattcgcacctcggtcacctcatagcctggcgcaaattgtagcaaggatcctgtcttctgacaagacaattctcttgttaaataatggacgccaagtagtgcgtgtgagcatgccatggtagttccagcatagctctaggacaactgacgtcaggacggcgttgctcgacgactgatgagcctggaaggctgtgactgagaccatgcatgcccgcatctgcactgccagcctgggacagacaggaacgatgaccccattctcaaaaacaaaataagttctggttgtcaattccaatttgggataaacagagagcttcgaggctcttctgccttctgtctcacggtgatgcattgcacatcttgggatatcttggaataggaaatgaggaaagaaattagggcctcctctgatctctcgctatctgcagggtcctgtccttttctcagagacattcaccatgtacctcgtgttattcctgtcttctctttagtatgatccatcaataactcactgctggaagtattgaact

SEQ ID NO: 591867 - DNA, 461 bp, Homo sapiens
gcgttgggcaatgattttacgacatcacaccgaaaagctcaggtctacaaaagcaaagagataaataaaccgggactacatcgaactatgaagcttctgcactagcaacagcgaaacaagtcgacattacaaagagtcaacctatggactgggaaacaatatttgctaaccacatatgtgacaaaggattaagtattcagaattcatggaaaactcttacaactcattattacaaaaaaataaccaagtaagaaattagcaaagggccaggtgtggtggcttacacctgtaatcccagcactttgggaggctgagacaggaggatcacttgagactagagtttgagaccagcctgggcaacatagtgagacctgtctctataaaaaattcaaaacttagctggccgtggtggcttgtggctgtagtctcagctacttgggaggctgaggcaggtggatcac

SEQ ID NO: 591868 - DNA, 506 bp, Homo sapiens
ctttcatttttaatttctaatgactacatattagtcacactatttaatgtgtgtgtgactgataaaacatgcctaattatgtttagtcattccctttctccgctggctccttttttttatttgttttttttggaggactagggcttctctgcccattttctagtgttgatgttcccaaagttttatccttactctaaatgatctccatttttgagcttatccacacagcggactgaggtttcctggtctttgcccttctgcctaggacattctttcctaggtctccacatgcctgctttcattattttcatgtcttaactcaaaggtgaactttgagttaaggctttttatcccttcatttaaaattgtgtgacctttcctgcgtacccagcttgccttatatttttctctccactgcacttttcttcctgcctctttttttgacgacaggacttaaaaaaaatgcattttttttctccctgtcccccttttcttggtctgtttct

SEQ ID NO: 591869 - DNA, 213 bp, Homo sapiens
tatcagcactaataagcatacttctcaccttctacatgtgtatcttacatgatactcagataactctaggagctcactgttatcctttttttcataatgcaagacacagtggggctgagagggattgagttatccacacaattttccttagctaataaggcggaatttaggcccaggtctacctgagcccgcattcctaatcactatgatgta

SEQ ID NO: 591870 - DNA, 612 bp, Homo sapiens
  misc_feature (214)..(214): n is a, c, g, or t
gcactctgcaagcgctttcctgagaaaggcatgtttagttagcgcgccaagattgtgaagccctaaggtgataagccgtccgagttcaagtccggcatatacgaggctgttctgtagatgcatatgaacttgagccactagggtcaactcacagagctgaatattacggttgctaatgcgactgaagttgctggcggttagtgaggtatcatgngtacgccaattgtaggaactaggtagtttgatgcatagtgaatatatcgctcagaggacaagtctgccatagtcatatccacaaaggcgtacctaagagatactgaaacggtccaagagacttactctgacagctgagcacgattgcattgttgaggacttggactgcccagcgaatttgccgggaggagacagcacgtaagactagatggaaccccgtatcatacagggtcattccgacaaagcacagacgaacgatgctggtacacacggttcaaacgattttctgatgcaactacgacgttcacggcttacgatgcctctggagttcccacttttaacctgttgatcttcatgacgcaactagaagtgtataatcaccggtgcttccacctgatg

SEQ ID NO: 591871 - DNA, 618 bp, Homo sapiens
  misc_feature (4)..(4): n is a, c, g, or t
accntaagttatctggtgttttggagatttgagaatacagcaggtgaagagaattagcttaaattccctcctcccttttgataaatccacagggatcccttcactctgtcaggaaatggtgtggtttccaagcattagcccttcatgatctgtctggtgcatttctgtgctcctgggatcgccaagtgcaggcacggcatcgcatccccaggtgtcatcctgtgacccaggaggggaagatgacacacccaatttaggtaatgctgcacttcttgttataattggttattggaaaatgtgcctttattatcagaacagtggtgtgcgcatttctgattatggagctaacttttggatatctgacttagatactaaaaacatttgggtgttgcagttttgcacttgtagatacaacttaaaagcatgaaactggtgatttaattagatgttttctataaaatgcaccttgttacatttctgtgaaagggtcttaccagcgtggaataactggctcaagggttgagagaaacaaccattttctaaacagttaattgtttaaaggactatacatgtaagtctgcaggcaataaaggctgttgtgaaaagtaaaaaaaaaaa

SEQ ID NO: 591872 - DNA, 812 bp, Homo sapiens
caatcatagctcactgtaacatcaaactcctcagctccagagatcctcttgcctcagcctcccgagtagctaggaatatgggcatgccactacacctggctcatttaaaaatttttttgtagagacggggtcttgctatgttgcccaggctggccttgaactcctggcttcaaaggatcctcctgccttggcctcccaaagtactgggattacacacgagtcactgcacttggccctaaatatagtttatttaaatgcaggtatatatgatttcatttttaataatgattatttttaacaactggctcacaaaattcttgaaaattaaaaattggctcttatgagctggtataagctggctctagcagagccctggacgtattgaaatatatcttagtaagcatgattcagtgtataattgttcatattcagtgcaagcaacaatggcatgtggcttggatgcaaacaaggaaatccaggggaattcctcaagctgacatgtctttttggatatttgttatatgattaagtcttggaattctgcctaagagcaatgctaagcaactaattaataaagttataataatacctagaccaggatgagaaattcaggctttcctctttttgtctgtactcttttctctttaccgctcccttgtttagccttgtattttattttctcccttccttttctctccatttctctcttgttctttgccttccatcctaattttctctatttgtgtttcccttgttctttctctttcttgcttttcccttttgatcctctcctcccgtgtttggtgggcgtt

SEQ ID NO: 591873 - DNA, 556 bp, Homo sapiens
caatcatagctcactgtaacatcaaactcctcagctccagagatcctcttgcctcagcctcccgagtagctaggaatatgggcatgccactacacctggctcatttaaaaatttttttgtagagacggggtcttgctatgttgcccaggctggccttgaactcctggcttcaaaggatcctcctgccttggcctcccaaagtactgggattacacacgagtcactgcacttggccctaaatatagtttatttaaatgcaggtatatatgatttcatttttaataatgattatttttaacaactggctcgtgcctgtattcccagcactttgggaggccgaggcaggtggatcacccgaggtcaggagttcaagaccaacctgggtaacatggtgaaaccccggctctactaaaaatacaaaaattagccgggcatggttgtgcgtgcctgtaatctcagctacttgggaggctgaaacatgagaatcacttgaacctggaaggcgatcacatcgttgccctccagcctgagcggcagagctagactacagctcaac

SEQ ID NO: 591874 - DNA, 945 bp, Homo sapiens
cggcccctgggacccgggcctccatggttttattgccgggtcctcccctggagtcaactttccaccaaagcttggacgacagatacgctgctgaccaagctgctgcgggcaggaccggcttctgcgcgaggctgcacggaggagcatacgaccagcaagcacggaggagaaggacgcaactagaagcacgcctcctggcagttgaccctggcaacagcctgggccaatgccaccagggcaggctggtggctcccggcgagggcctggggctcgccagctgcctcttgcagcgaccgtgctgtgtcacgctgctgagcggccacccttctgtcacttgacctcaggcagcgagagcagggctccgcggacacagtacagcgtggccctggcagcacggacctggcgcacctctaagcagcagcacgctgcgagtaccgtgctgcaccctggcttctccccaggacagagctgtctgctcagcagcagctgctggcactggctggaagacacgctggcaggtctgggtggcccccagaaaccgtccccacacactgagcctgactccccatctcccgtgctccagcgcgaggagtcctcagagagggagagcctgccagagtccttggaaactgacgctccctaggtcccccgagactgactgggcggcggcctcctggaggcgacaacagacctcgcccagacctccactcagcgccctgggaagtcaccgaaggatctaaccggaggcttccagcacctgaacggccacgcacactccccttccccacaagcgtagggaaaccacggggccccgcgtgggcccgggccccgggactgagaggcccacgaggcaacgggaaccggaaagtcgcgcgaaaacagagagcggtgaagagcctccctcgcccaaacccccacggccacacccgggagagatagggccga

SEQ ID NO: 591875 - DNA, 461 bp, Homo sapiens
gcaacctccacccaccggcttcaaccaattctcctgcctcagcctccctagtaactgggattacaggcacctgccaccacacccaatttttgtatttttagtagagacggggtttcaccatcttggccaggccaggctggtcttgatctcctgaccttgtgatccacccacctcagcttccaaactgctgggattacaggcatgagcacggcccccagccagagacagtcttgctttgtcgccaggctggagtgtagtggcgcatcttggctcactgcaacctccaactcctggttcagcagttctcctgcctaagcctccaagtagctggattacaggaacgaccaacatgccagctaattttgtattttagagagaagggttaaccatgtggcagatgtctgattccgacctgtattgcccttggcgccaagtgtgggtacgggtagacctcacgcggc

SEQ ID NO: 591876 - DNA, 305 bp, Homo sapiens
  misc_feature (21)..(21): n is a, c, g, or t
  misc_feature (216)..(216): n is a, c, g, or t
  misc_feature (233)..(233): n is a, c, g, or t
  misc_feature (254)..(254): n is a, c, g, or t
ataggtggaaaaaatattggngagactgttgaagggttagcacggtaccccattaatgtacgttatccacgagagatcagagattcccttgaagcattaagaaatttacctgttgttaccgagtcaggtcagcaaattatcttaagtagcgttgccaatatccagattacagatggccctccaatgctgaagagcgaaaattcccgccctagtggntgggtctatattgatgngcaaggaccgtgacttagctncagttgtacaagatttgaaacataccattgattcgcaagtcaaactttctc

SEQ ID NO: 591877 - DNA, 307 bp, Homo sapiens
ttgcattgtgacctatacaagacctccttctctttgtaaatacccagactcagatattccttgctagtaacacaaacagcttaagacacttcccacccagtagtctctcagacgctcattacggtgatgcttcttacagtgtgtatccactttagctgctatggtccccatgctatattcaagacacacgctggtgcaccttgcttgcctttggatagtcgttccctctgctgtgaacatgcctcctttagtgacctgcatagctcaccaattcacctcctgtaggtctatgctttggtgtcacctt

SEQ ID NO: 591878 - DNA, 142 bp, Homo sapiens
  misc_feature (56)..(56): n is a, c, g, or t
  misc_feature (97)..(97): n is a, c, g, or t
  misc_feature (103)..(103): n is a, c, g, or t
  misc_feature (122)..(122): n is a, c, g, or t
ttactcaggttcttctctcacacagaggaggaggtggaagttgtttcacacgcgtncagccacaggtggaaaagatcttggcttttctcaaggcggnagacangagcctagcaatcgtcggncaagactctcctgagcccag

SEQ ID NO: 591879 - DNA, 820 bp, Homo sapiens
  misc_feature (108)..(108): n is a, c, g, or t
  misc_feature (113)..(113): n is a, c, g, or t
  misc_feature (116)..(116): n is a, c, g, or t
  misc_feature (125)..(126): n is a, c, g, or t
  misc_feature (153)..(153): n is a, c, g, or t
  misc_feature (165)..(165): n is a, c, g, or t
  misc_feature (170)..(170): n is a, c, g, or t
  misc_feature (175)..(175): n is a, c, g, or t
  misc_feature (180)..(181): n is a, c, g, or t
  misc_feature (206)..(207): n is a, c, g, or t
  misc_feature (209)..(209): n is a, c, g, or t
  misc_feature (214)..(215): n is a, c, g, or t
  misc_feature (222)..(222): n is a, c, g, or t
  misc_feature (235)..(236): n is a, c, g, or t
  misc_feature (246)..(246): n is a, c, g, or t
  misc_feature (257)..(259): n is a, c, g, or t
  misc_feature (266)..(266): n is a, c, g, or t
  misc_feature (268)..(268): n is a, c, g, or t
  misc_feature (271)..(271): n is a, c, g, or t
  misc_feature (275)..(275): n is a, c, g, or t
  misc_feature (288)..(288): n is a, c, g, or t
  misc_feature (292)..(292): n is a, c, g, or t
  misc_feature (294)..(295): n is a, c, g, or t
  misc_feature (298)..(298): n is a, c, g, or t
  misc_feature (301)..(302): n is a, c, g, or t
  misc_feature (308)..(308): n is a, c, g, or t
  misc_feature (313)..(313): n is a, c, g, or t
  misc_feature (319)..(319): n is a, c, g, or t
  misc_feature (322)..(322): n is a, c, g, or t
  misc_feature (325)..(325): n is a, c, g, or t
  misc_feature (328)..(329): n is a, c, g, or t
  misc_feature (337)..(338): n is a, c, g, or t
  misc_feature (343)..(344): n is a, c, g, or t
  misc_feature (346)..(347): n is a, c, g, or t
  misc_feature (353)..(353): n is a, c, g, or t
  misc_feature (356)..(357): n is a, c, g, or t
  misc_feature (360)..(360): n is a, c, g, or t
  misc_feature (363)..(364): n is a, c, g, or t
  misc_feature (370)..(370): n is a, c, g, or t
  misc_feature (372)..(372): n is a, c, g, or t
  misc_feature (375)..(375): n is a, c, g, or t
  misc_feature (379)..(380): n is a, c, g, or t
  misc_feature (387)..(387): n is a, c, g, or t
  misc_feature (391)..(391): n is a, c, g, or t
  misc_feature (400)..(401): n is a, c, g, or t
  misc_feature (407)..(407): n is a, c, g, or t
  misc_feature (410)..(410): n is a, c, g, or t
  misc_feature (413)..(414): n is a, c, g, or t
  misc_feature (417)..(417): n is a, c, g, or t
  misc_feature (420)..(420): n is a, c, g, or t
  misc_feature (425)..(425): n is a, c, g, or t
  misc_feature (431)..(432): n is a, c, g, or t
  misc_feature (442)..(442): n is a, c, g, or t
  misc_feature (445)..(445): n is a, c, g, or t
  misc_feature (450)..(450): n is a, c, g, or t
  misc_feature (460)..(462): n is a, c, g, or t
  misc_feature (465)..(465): n is a, c, g, or t
  misc_feature (468)..(469): n is a, c, g, or t
  misc_feature (479)..(480): n is a, c, g, or t
  misc_feature (485)..(485): n is a, c, g, or t
  misc_feature (494)..(494): n is a, c, g, or t
  misc_feature (499)..(500): n is a, c, g, or t
  misc_feature (502)..(502): n is a, c, g, or t
  misc_feature (505)..(505): n is a, c, g, or t
  misc_feature (509)..(509): n is a, c, g, or t
  misc_feature (520)..(520): n is a, c, g, or t
  misc_feature (525)..(525): n is a, c, g, or t
  misc_feature (528)..(529): n is a, c, g, or t
  misc_feature (536)..(536): n is a, c, g, or t
  misc_feature (547)..(547): n is a, c, g, or t
  misc_feature (551)..(552): n is a, c, g, or t
  misc_feature (556)..(557): n is a, c, g, or t
  misc_feature (564)..(564): n is a, c, g, or t
  misc_feature (590)..(591): n is a, c, g, or t
  misc_feature (609)..(609): n is a, c, g, or t
  misc_feature (630)..(631): n is a, c, g, or t
  misc_feature (637)..(637): n is a, c, g, or t
  misc_feature (646)..(647): n is a, c, g, or t
  misc_feature (649)..(650): n is a, c, g, or t
  misc_feature (655)..(655): n is a, c, g, or t
  misc_feature (669)..(669): n is a, c, g, or t
  misc_feature (680)..(680): n is a, c, g, or t
  misc_feature (700)..(701): n is a, c, g, or t
  misc_feature (707)..(707): n is a, c, g, or t
  misc_feature (710)..(710): n is a, c, g, or t
  misc_feature (726)..(726): n is a, c, g, or t
  misc_feature (730)..(730): n is a, c, g, or t
  misc_feature (734)..(734): n is a, c, g, or t
  misc_feature (739)..(739): n is a, c, g, or t
  misc_feature (758)..(758): n is a, c, g, or t
  misc_feature (814)..(814): n is a, c, g, or t
gaccgttccggcggccattgcgaaaacttccccacggctactgcgtccacgtggcggtggcgtggggactccctgaaagcagagcggcagggcgcccggaagtcgtgngtggngtnttcccgggnnaatccatgccgggttggggggtgctgnggcgaggtgggngcccnggtgntgggnngactcggggacggcctgggtgctgnncnggggnnggggaanagaagcacacatnngggtttttgntaggggggttnnnggaaagngnggnacanggggggatggggntctntnngangannatgtgncattnatgtanggngtnggnntgtgatgnngatanngnncaattnggnngtnaanngtgtgntntgnaagnngaaccangggntatacatcnntggganggnggnnggnttngggtnggggtnnttgggtgggnggnggggntgatgggttnnnggnggnnggatggtgannagggngtggtgagnttggnngnggnaggngggtgtggtgngttanaanntaggtgnagaggaaaagngtgnnggannaatgggnagggtgtgtgtgggaggggaaagtgnntgaggttttggtaaaggnagatggatattggaattttanngggaanttggattgnngnngaaanagacagttaaaatntttaatataanagataatggtggaattaaannagggantgntgtttatggtggtgantttngtgnagganagtatgtggatgtgacagncaaaagtattggtaaaggttttgaaggtgtgatgaaaagatggggatttaaagggnaggctg

SEQ ID NO: 591880 - DNA, 1299 bp, Homo sapiens
cccttactaaaaaaagtgtgtattaggaggagagagaggaaaaaaagaggaaagaaggaaaaaaaaaagaattaaaaaaaaaaaaaagaaaaacagaaaatgaccttgatgggaaaaaaaattattttttaaaaaaaagatatactggtggaaggggggagaatcccataactaactggctgaggagggacctggcttgggggagtaggggaaggcccagggagtggggcagggggctgcgttattcactctgggggattcgccatgggacactgtctcaactggcggcaagctggctggcccatgtgtttccctggccccatttcacccccttggggggctggctcaaggggtaggtggggctgtgggtgggtaggagggtttttttttttacccaggggctctgggaagggaccaccaaacgtggtctctggctttggttacctttcccttccggtctttcttccttcggccttttcacaggtccccttccttggcctgtgcgtccctggtccagccagggttttaaccaaccaaagcgcaaacgcggttctttcttcagggactccctgggcccttccaagatggcgcggggagaacatattgtgggtaccatttaggggttccatttaaccaggtatagagagatgggactacactctagccaggggattctgggaagccggggaaaaatccaccgagctcccggctcccagagggacacacgcgggaaagttccccttcccccgggcggaaaatggccacaaccttggttactgagagggggataagggagaggcaacggagtaaacccaattgtgctgagggtaatagaggagatgagcaattattcccataggaccattttagccgctttttattggcaggcggacatggtagagcaatttgggaaccacggacacgcgtgagagacggacaatatgagaaatatttacagcacaaataaccgcgggggggagaaatttctaaaacatgtggtgcgagaaacacggcgcgccctctgcgcaaaacaacaacaagaaaaacaaacacaccacacagacgacccaacgacgacacaacacagacaagagacgacactacagaacgaaccagacccgcaccagaacaacacacaacagaggggcacacgccacacaccgacagcaaccagccaactcaaagccatcgcacacaaaagcggcgcacacgaacaggaactacgagccggtagccccaacacatatagcggaccccatcatgataagacagcaccgcagccaaagagaggcagcaccg

SEQ ID NO: 591881 - DNA, 399 bp, Homo sapiens
tttaacaacccccccccccttttttagggctggggttccctgggccccaaattttaccttaagtaatcccagggggcccttttttccttggaactggggtaagggaaggaaaaaagccaatttttaaaagcccctgaaaaaaagggcgccccttaaaaagaataataagagggtggggtggattttttttaaaaaaaggggtaggaaaaaagaaaggaaaactaattttcccttccctttggccccgcaacaagtcacgcccccaaaaatttaggtttagcttaaatgacaaacggtaaaaccttttgggtaaaatgttttcccctgggggacaagttttttcccagggggcccggaaaaattttcccccaaattcccaaagaaaggcctttaccccca

SEQ ID NO: 591882 - DNA, 319 bp, Homo sapiens
ctgctaactgtgactaagtttccaactggcaatgctgcagttatttattttactttcgagatagagtctcactctgttgcccaggctggagtgcagtggtgtgatcccggctcactgcaaccccgcctcctgggttcaagcgattctcctgcctcagcctcctgaatagctgggattacaggtgcacacccccatgtccggctagtttttgtaattttagtagagatagggcttcaccatgttggccaggctggtctcgaactgctgacctcaggtgatccgcccgcctcggcttcccaaagtgctgggattacagaca

SEQ ID NO: 591883 - DNA, 1019 bp, Homo sapiens
cataagatgatcacataaattctaactgagtgcagcttggagcatgcaatttttcaggcaacatagtgatataattctagtgataaaacattaaactcctaaataaattttttttgccatcatgcttctatagcatacatcatatatctatcagttgtccatctgcattaagtgatccagtctttgcaaaatcactgaagttttgaagccgacataaacatagttttaaacagctgcataacttcaagcattctgtatcggtgctgagtgactaaaatatccaaaaactttaaaacatcacaaatacttacttgctgcttaacacagctggtggttggcccattcttctgcttcagcagattttgcgcatgtcatttgcttaatctcttttttcaacacattttccaaacaccttattctcacggacagggacaaatgcaccagacacattaaataaacaacaaaatgcatttcaaggacaagcttctgacagagtaactcctccctcactcaagggactaagaacaatggtggaccacaacttgctgggagcacaactgggaaacttggggcattcaactgccagatattccgtggccatctcaagcgtcgcatcagttggcactagcagtaccttacacacgtggtgggcacatccgacaggcacttaaggcacaggcacacagcagcaactaccctaaactttccatccacaatccccgaagaactttccctctgcacgcttccacgtcccgctcgtcgcacatctcgccgcacacacggcctagtcctcttcacagaattcagctggccagggtctcctcaacagtgggcattacccttatcacctggcagcacattatgcccacacactggattaccaccgttgccttaccaaaaaacagaccaactggactacaccaccacaaggtggcttatctacgggaatagcaccactcggtcgcccagccaattacaccaacacaatgtcatgggaagcaaacccactctagccagaa

SEQ ID NO: 591884 - DNA, 161 bp, Homo sapiens
gctcatcccctgtgcatacagtggcaactctgtcttccctgcccagtagtggccaggcttcaacactttccctgtccccagggggggggtgtgggggggggcagtatttcatccaggtctcctccccacccccccagcatcaataaagtgtcataaacaga

SEQ ID NO: 591885 - DNA, 1043 bp, Homo sapiens
ggttttcctctttttttttaaacggtagcaggttatagcttaaactccttctgaaacagcatccatttctcaaaaggcctgagcaggaagctccgggaaaaccaagcttgcggagcttgtcagggacgtccacttgggaacgcttggtgtccacttcccaccttgcttgggcccttgcaattgggggtcccttggagcttggccaggctgtggggcgccagagagcacagcacccttattgaccacgctatggagcttctctgtggaacgcgggtgggagactggtctctttgaagccttcaagccacccgaggtctcaggaaggtctcttggggagtgccacattgtcctctcgcggcccttccctatacccgtgacaagttctcaggggccaaagtctctctcagccccgcggtggtgtgtgtgcccccgtactagtgaacgtttcggagagagtctcccagacatctctagcgtgaaaaccccaaagtaaaagtcccccagcgtgtgcgtgacaaagagtctctgtgcacgagagaaaagtctcagcggggcgctgtgacccgccagagacatataagttataaggtcggtgtaaaaataaagcgtttctccacgcgtttttcacccgccgtgttgtccccgcggatgtggaagaaccacgctttttacaagcgctgtatctgtgggcggagatatatatccccccgcaaaggagctttctccacaacaaggagcacaaacacacagcttctctctaccagacacagcacgcgcgcctcttctttcacaggtgttgtggtctcccacacgaggaggccacacacggttgtccccaccaggtgggccgccgataacaagaggttgggccgttgcccacagggtaattaacccccccacaaaaaagggcggcctcttgagtgtgtatatatgatgacgaagatagaaaggcggggtgttggtatacacccacgggcgaagggggtattaagtattaccgaaggcccccatggttgaggtgatacaattcactttccccggcg

SEQ ID NO: 591886 - DNA, 165 bp, Homo sapiens
  misc_feature (55)..(55): n is a, c, g, or t
  misc_feature (57)..(57): n is a, c, g, or t
  misc_feature (60)..(60): n is a, c, g, or t
caactacagcacctattccaaggcttctaacatgatgatactatttcctcgtatnancancattccaatattgttctgttgtccactagtcgccatctccacacattcatctatcacaatgttcataaagggatcaaatccccgcaatattccttggaatagctg

SEQ ID NO: 591887 - DNA, 172 bp, Homo sapiens
cggctccggagtatatagcgagcaaatatctgggaaggtagtcctcaatctccgatttcccagcaaggactttctcagcgaacagatctagcttgttgaggaacaggatcacagagatagtgcgccgccatctgtatgttccagatgctctatgaagaggttcagagcctcc

SEQ ID NO: 591888 - DNA, 259 bp, Homo sapiens
  misc_feature (28)..(28): n is a, c, g, or t
  misc_feature (40)..(40): n is a, c, g, or t
  misc_feature (47)..(47): n is a, c, g, or t
  misc_feature (49)..(49): n is a, c, g, or t
  misc_feature (51)..(51): n is a, c, g, or t
  misc_feature (57)..(57): n is a, c, g, or t
  misc_feature (65)..(65): n is a, c, g, or t
  misc_feature (67)..(67): n is a, c, g, or t
  misc_feature (96)..(96): n is a, c, g, or t
  misc_feature (121)..(121): n is a, c, g, or t
  misc_feature (158)..(158): n is a, c, g, or t
  misc_feature (195)..(195): n is a, c, g, or t
  misc_feature (213)..(213): n is a, c, g, or t
  misc_feature (244)..(244): n is a, c, g, or t
gagctgaccatctttacctggtcctggnactcaaaaactntagcttntntnaaaatnagcctttngnccagtctttattaaaacaaacaaacatgngtagtctgcatatcgaatatctagngctctaaaccccccaatacttaaaagtctaattgctntcctgtggtttcattagtctgataggaagatagggcnttcctcagtcacagatgnctatttttgaaggaaagctgcaataaagccncaatgatttggggtc

SEQ ID NO: 591889 - DNA, 916 bp, Homo sapiens
  misc_feature (904)..(904): n is a, c, g, or t
gacctttgtggtgattccacgactgctgcagcctgtctctgtccaggtacagtgagggagcccaaagccaagcaatgggcaacgtgaaagtcactagtgtggttcggtgtggcaatcacacttgaaatcagccacccagaccgtctttatatttagattctggtgtcctcgaaactatcagatatgtattgagccactacttgtcgagagccgcgaggtgctttgggcgagacacctgatgcgtaccctgacgaacagtggctgagctcacaggggtgtccgatattggccatctgaagcacggttaagtccaacaattggacatgctgtccttgattcatgcaaacatcagccatgaccagagtgaccggggagaagcgggtggaggtcgtccagaatgacggccctttgatggacccctcaccatggcaatgggcagttcaccgagaagcgtgtgtattctcaacagaaatgtgctagttggggctagagctgttgtccccaaaatattttatgtgacagagaaggttggaactaattatccctacacaattaacagaatacacatgttccctttctggcgaaatttctccattcatatagaaaccaaagtattggcgacaaacaaagggaaagcaatggcccatttttccggccaattgaagccaaaggacgtgcgacgagaaagttggcttaattgagaaattggctgggatgaaaattccggaggggctatacaaagaatctgggggtcctaaggccttcagttccagaaacaggccggcactcttaggaaggtcgggagaatgttacagccataagtgtccccacaacgggcagtgaattgggggcggggtcaccccctggcgcctgtcccggcccaaccgggtggcaacacgtcggntaggtatacccc

SEQ ID NO: 591890 - DNA, 413 bp, Homo sapiens
ttttttggttgttgttgtttggattggtttgtttgtttttttgaggcagggtctcactctgtcacccaggctggagtgcagtggtgagatcttggctcactgcaacctccacctactgggttcaagcgattttcctgccttggcccctcaagtagctgggactacagatgtacgccaccactccaggctattttttgtatttttagtagagatagggtttcaccatattgcccaggctggtcttgaactcctggactcaagtgatccgccagcctcggcctcccaaagtgccgggattgcaggcaggagccactgcaattaggttttggctttgttacttagttccatgttacatcttggttgtgtaatcactcaagtatatgtaccgcagacgagcaggtggcccccaaaaa

SEQ ID NO: 591891 - DNA, 526 bp, Homo sapiens
accatgaatgtattgtatgggctggtggctgcatgcagccacgaatgctggtttacagtttgatgaggagctggaggacattgccagtgtctgtccgtgtgggccaggacagtgagatgtggtgggccaaggctggcaaggccagaaacactatcacagggttccagacagcatacaaacccagtgtgtatggaccacaaggggaacggggcagaatcggccactgaaggagtcacattcctgtcacccccatcctcggaacggtatcgtataccttacgcgaagcaacccccagagtcagtcgatactctaaaggtgacacacccagagggccacacagaaaacagcaagcctgaccgttcactcaggcaagggcaccacggcagtcactggcatgcgccaaagcggcgggaaccacccggtggcaagacaatcactgcacggcgaaacgagacgcagcaccatgcatccctacggtcaccgacgggagcaaacggctggcgccgatacacccacggacccccaa

SEQ ID NO: 591892 - DNA, 685 bp, Homo sapiens
cagtatagagttaggtctcaagatacgggtatatgcctgggaggtcatcgagtcttacattagttggagggtcgaagtcccaagggctcatccatgcttcgtacgagactagttatgcgttaggcaagtaagatgtgttcacgcctacacagtacttggcatgtaatagacacctggtcagcagttggtacatgaaggaatagagtcctcggatgtataactcccgtgccagtggactcaaaattgcatgcaggtgcacaatgcattttttggacacagagggcttttaattaattactttgtttttaacttgtaagagcaatttatgatgataaaagtccaagcaccgtgcactagtatatgctgccatagggctatctggaataatcagctttcgaatattgaggcacttaagagacaaataactaccctgtttccttggacagtggaatgaaatgggtagaaacaaggcaggccttcttagtgaagacgtctgctcaataaaaagccttcgtattttatgtgaattgataatcatttgcatttgcctgttccgaatgctcaagtgacaaagtgaaagctagttgtctacactccagctcgtctcagtgtggccttagtcctttgtaaatgtggtttctctctccagtattgatgagctattagagttttcgaccgcatctta

SEQ ID NO: 591893 - DNA, 498 bp, Homo sapiens
  misc_feature (112)..(112): n is a, c, g, or t
  misc_feature (115)..(115): n is a, c, g, or t
  misc_feature (279)..(279): n is a, c, g, or t
  misc_feature (324)..(324): n is a, c, g, or t
caggggtgagaagaaggagaaaaggaggggaaggggaaggaacaaagaaaggaaaaggaaagggggacgaaggggaaagaccaaagaaaaaagagaaagaagggaggggcanacnaaaaaaaaagagggggggggagagcacggcacaaaaaacaaaagaaaaggggcggcccaaaaaaaagaagaaaacccccaaaaacggggaaatgggaggcggacggtgcccaaggggggccaaggggcggggacaccaaagaagggcgccacccctccaaagcngcctgggagccagggtgagagtctgggtccaggcctggccatggngccctccagtggaggagagggccctgcctgctgcatcttttctggggccccaaccaccgccagcttcccccccctcccctatcccattctccctaacaaggcaggggtcatagatcctaagccataaaataaattttattccaaaataacaaaataaataatctcctggcccca

SEQ ID NO: 591894 - DNA, 799 bp, Homo sapiens
  misc_feature (2)..(2): n is a, c, g, or t
  misc_feature (86)..(86): n is a, c, g, or t
  misc_feature (114)..(114): n is a, c, g, or t
  misc_feature (120)..(120): n is a, c, g, or t
  misc_feature (145)..(145): n is a, c, g, or t
  misc_feature (154)..(154): n is a, c, g, or t
  misc_feature (189)..(189): n is a, c, g, or t
  misc_feature (212)..(212): n is a, c, g, or t
  misc_feature (217)..(217): n is a, c, g, or t
  misc_feature (223)..(223): n is a, c, g, or t
  misc_feature (263)..(263): n is a, c, g, or t
  misc_feature (267)..(267): n is a, c, g, or t
  misc_feature (305)..(305): n is a, c, g, or t
  misc_feature (322)..(322): n is a, c, g, or t
  misc_feature (352)..(352): n is a, c, g, or t
  misc_feature (399)..(399): n is a, c, g, or t
  misc_feature (433)..(433): n is a, c, g, or t
  misc_feature (436)..(436): n is a, c, g, or t
  misc_feature (452)..(452): n is a, c, g, or t
  misc_feature (479)..(479): n is a, c, g, or t
  misc_feature (490)..(490): n is a, c, g, or t
  misc_feature (518)..(518): n is a, c, g, or t
  misc_feature (529)..(529): n is a, c, g, or t
  misc_feature (544)..(544): n is a, c, g, or t
  misc_feature (548)..(548): n is a, c, g, or t
  misc_feature (550)..(551): n is a, c, g, or t
  misc_feature (685)..(685): n is a, c, g, or t
  misc_feature (734)..(734): n is a, c, g, or t
  misc_feature (796)..(796): n is a, c, g, or t
tnacatttctcacatccattccagaggaaaatcttacatatgagggctcagctgaatgtgatggactgagttcagtaaaacttttnaaatagtaaatagcaatgaacgtattcncaaacngtgccaagtagtgagaaaggcaacnataaaatcnataaggataacacgtggcaggattagaactgtgcngtgaaacattaagaaccacatcnctgtnttagangtgacctcagtgcacctctttcactggtaaggcaacggcntgcngtgggtgccacaatgattaccaagtgtcttcggaagtnaaagacactggtgtgancaagactcaagtgagtgttctttcccaatnttgtgcttttgaagcagaaggaaatacctggggctttgagatatatnaggaggcaaagatgaaagacagcggtgataatcntcnaaatcacaagggcaangaatgattcattttctttgaaaatatncagtctttganatagttcattttgaaaataacaaggctncggaataattnctcaaaaccagcctnccantnnagtacacgagtcgataaacatagcacatgagagaggtatttagcaatttcttctaccaactacactttgccctcactaagggttagagtatgatttgaaacaatttctacatataaagcatctttaaataagtnttgtgttcactgaactgagacttctttcacttatgtacctatggaagtnaatctgagcatacacatatatacatacttgcatacatatgtgtacatatgtttttttaagtnagt

SEQ ID NO: 591895 - DNA, 1041 bp, Homo sapiens
agcgggctgcctcctgccaggcggggccgggccggtgccgagccccgggcgctgctggcgacgcctggatcctgcctccgcctagtgccggctgcctggtgccccgaggaggctgcatgagccccaggccatgggtcccctctcgcaggacgtggaacctgggagccacgccctcgcgtgtcgtggggccctgtggagagtgggccgggctcccgagatgcccagatgccggggatggctcgccccgtcgcccagcactcctagccatgaccgtgcctgaccgccctttcccagcacaccaggcccggggcaggttgaggaacatgcggcgtggaacagatatccccagtctgcagggttgacgagtggaactccgagctggccagcttgaagttgccaaacgttcgccccaggccctctaagcttcaagttgcccgaaggcctcttttagggagttgggagcgttgcggcttgtgacctcctgcgaaggcccccccatcgggggctacttactcgtagaaccacttgaccagggttagaaagcacctgacaggcgaacgaacggactcatactttaagggacccagtggccccaagggacattgtgaacgtcgccgagctgcagaagtcttgcacgcttgcgcgagtgggcgaccgcgaccttggcaccgaaaggtcgacccgtgtggaacccttggcttgcagttggaggttgggcagcaactgggccgccgaccttgaggagcccgacaggacgacttgccggccgccttggttgaagagccgcggaacaccttgcaatagaacccattgcgggccaccagaagtgccccgagcaatggttcccgatgggccccatttggtttggtgcacgcacccacgcccacggggaacgaaagcggcccaggtttcccggttgacggaagccttttccccagggccttgccatacttggagagtggggggagaacaggccaaaaaggggcgttgcgttgtccagagacctgaaacccttagtaggtgttccacgtgtaacaggac

SEQ ID NO: 591896 - DNA, 490 bp, Homo sapiens
ctgattctccaagctccagcaagctcacaaatagaccaaagcagctttttaattcttcattctatcatatcactgcatatggttgtcttctttgcactcataaccatatcaaataataattaataagtttacttgtttaacgtgtataactatcccttaggaaggcaggagtacagagataagagagacactagtatactcatatgtctagaaacagtgccttctacatagcaaacactcaataagcatttgtaaaacaaatcaacaaaacaaaaaagcaagctttaagatatacataaaacaagtaagggaaagaaatggatggtctaccaaacaaggcaagaaacattctactgttagtatatgcaactagacaggctgcactggtgttatagggatctgttatctataagcatcaaaagtgtactactcaacagttcacagtcaagtagaatggtttcacatgctatatagctagcccacggtatga

SEQ ID NO: 591897 - DNA, 519 bp, Homo sapiens
  misc_feature (121)..(121): n is a, c, g, or t
  misc_feature (124)..(124): n is a, c, g, or t
  misc_feature (367)..(367): n is a, c, g, or t
  misc_feature (391)..(391): n is a, c, g, or t
  misc_feature (404)..(404): n is a, c, g, or t
  misc_feature (489)..(490): n is a, c, g, or t
  misc_feature (493)..(493): n is a, c, g, or t
  misc_feature (507)..(507): n is a, c, g, or t
tgggcattagaaagccttccccagcaaggtgccttgtcaagatccaaggggcagaaacttaccagtctccaagtgggtcctaaggtgtgcttgatgattttgaggagggccaaaaggcatntgntccccaccagtcaaaatcaccctcctttttgcattagtggagacaaggacccttgtgggtttcaacaggcccttcctgatgatcattgtccctacagacacccagaacattttttttatgagcaaagtcccccattcccagcaagcctaaagcttgccctccaacaggggggctttcagtaaggaacttggaatgcaaactggatgcctgggtctttgggcccaacctggcccctgtgccccnagtggccatggcatgtgtggcccngtttgcttatccntggaaggtgacaacgattccctgtgtagctttcccatgcccaggggcccatggacttttcagtttggagggtcctgggcctcctnncancaataaataatttngttggccccgta

SEQ ID NO: 591898 - DNA, 386 bp, Homo sapiens
  misc_feature (35)..(35): n is a, c, g, or t
cgtgtgactcacacctgtaatcccagcactttggnagacaaggctggaggatcacttaagcccaggagttggcaagaccagcctgggaatacagcgagacccccagctctgcaaaaaaaataacaaaattagccaggcatgattgttcatgccgggtggtcccagctactcaggaggctgaggagggaggacagcatgggcccaaggagtttgtggttatactgcactccagcctgggaaaagagcaagaccctctctctttaaaaaaaacagaatagaacaaaacagaaccgggcgcagtgggtcacacctgtgatcccagcacttagggaggccaaggaaggcagatcacgagatcaggagttcaagaccagccagaccaacat

SEQ ID NO: 591899 - DNA, 293 bp, Homo sapiens
tctggtgcccacactgtccttttccttccacttgggggtggggaaatcctttctgctaggtcagggcatttctctacaaagtggcctgaatgaggcctggccctgataaggagccaccatctggaggaaaggggctccaagccttgtttttaacacccctgctaaacccccacccttccaatatgtttacattaggtgagaatttaaagttcaaatactattaatggactatttgtaattgcttgttccttacgcctatgcagttttcaaaaactttcgacacctgttttatg

SEQ ID NO: 591900 - DNA, 1133 bp, Homo sapiens
tcttaaactcacgttcttaccttgataagcatcagggtgctcacatttaccttatatctcacgtgcttcaggtggtcacaaacctcggaaggtcttctaggaaaaaccatctcatctaggttacaaaaggaaaaggaaaagttgtggagggtggaaaaaaaacccttgatccgggaactaattctcagaagccaccaactttcattccacctttcgaggctctcgaggtgttcacgtgggttaaccactgtgaccaagtgtgtcgttctcgtgcttgtggagaacgagaatatttagaactatttttgtgtggcaatgtgggaatctctttctacaactctgtgaagattctctttattcacagtgggcgcgggtctcaggggtctcgagatactcgcgtgtgtgtgtgagtatagtgtgtgtatacacatttgtgtgtatgtgataacctcttatagacaaagagttttattataaagagtgtgcccacagagaaagagcgtgtctaaaacaacaaaatacaacaaaaacagagagggcgcgcgcgcgcgcgctctctaaaagagatatatctcccccggcgagaggggggcgcccacagagagctttacgcgccgtatcaccacgaggtattcacggtgttacccaaagggaggggggcccccaaagagagaggagagatgcgcgctatataaaataacagagctctgagagcccgttgggcgcgcgcgcgccgatatttcaaacaaacgcggagtgccgagaaccgcggggaacaaaccgcggggcatcaacacctggggggaaccacctgtgtaggggcaagagggggaccccccctaaaactatccggaggggggggggcaccccacattaatgtggggggcgcaaaagagtgtagcccctataaaaggaataatttttttaaaagaagggtcccaaaaggggtgaacaaaattatttagaaaatttgtaaaaaggcgggggtaataaaggtgggtgtgtttacaactatattgtggcaaatattaatgttattggggacgttataaaacaaattggagggtaacacgggaataatgaatatatttgagaaacaaatattattcaatgaggggagaagtatagataaa

SEQ ID NO: 591901 - DNA, 103 bp, Homo sapiens
gagatcagagctggccaagcagtgtatgcaaccccatctctactaaaaatacaaaaattagacgcacacctgataatcccagactacttggtgaggctgaggc

SEQ ID NO: 591902 - DNA, 85 bp, Homo sapiens
gacagcagcttctacatctgcagtgctagaacagggacagcatcctacgagcagtacttcgggccgggcaccaggctcacggtca

SEQ ID NO: 591903 - DNA, 178 bp, Homo sapiens
cattgtactctgccgtgtggctgtcctgggcagcgattctgtgccagtgagaacaacaagcccaaagacaggtctggatgaagcctcctccagacgcctccactgaccccctcccaggctgcccagtgcccttgacctccacctacatcggctccttctcccaggcaccgggcagcgg

SEQ ID NO: 591904 - DNA, 186 bp, Homo sapiens
  misc_feature (72)..(72): n is a, c, g, or t
  misc_feature (83)..(83): n is a, c, g, or t
  misc_feature (155)..(155): n is a, c, g, or t
tcgaattcaagcttctaacgatgtacggggacatgtggagtggaggaagatgctgcccctgtggttgtgaancatcctggggntgacccccagacccaagcctcgctgggctgtctccgctgtccctcatctcttcacttctggacccaaggctngacatcctaataaaataactgttggattaga

SEQ ID NO: 591905 - DNA, 366 bp, Homo sapiens
gggttttgctatattagccaggctggtcttgaactcctgacctcaagtgatcctacacctgagcctcccaaagtgtagggattacaggtgtgagccacagccgctggccttaaaaaatccttttattagagacagagtctcactgtgttgccaaggctggtctcaaactactggcctgaagtgattatcctgtctcagcctccggagttgatgggattacagacataagccacaacacccagcctgctgttactgttaaatacattctttcccttattatcctagaagatgaacccagaatattgtccatggtcttgtatatgctgttggactacttgtgtagctcaatttatgtgcaattcgctt

SEQ ID NO: 591906 - DNA, 180 bp, Homo sapiens
  misc_feature (53)..(53): n is a, c, g, or t
caggtgtaacatacagggaatatgcctgcttcaaaaagaagctagcgaaggcnatgcacagtcttgggaagagaaatacatttcattttggccgctcaacaaatgatcccacaatagctcttggaggtctcccatctcacacaaacctattcctcattccctgcctgaaccagggagggt

SEQ ID NO: 591907 - DNA, 383 bp, Homo sapiens
  misc_feature (43)..(43): n is a, c, g, or t
tgtgacggcagctaagtgagctgtattgcaccactgcactccnagcctgggcaagaaagcaagatcctgcctcaaaaaaaaaaaaaatccaatttatcagcagtttcaaacactttgatttccaaactttatcccactgagaacagctcaaacagccaataccaattctaaaatcttctccaggaaagttgagggttaaacccccgtgagctttcctcctgaagagccctgtgttgtttaggctccttacaagttttgtgccggctgctgcagtttgctgcttgatggctccattttgcaactttctccgttctcaaaggaccaacggggaagcacccacggattcattaagggaacgtgtgtcccatttccacaagggcttg

SEQ ID NO: 591908 - DNA, 567 bp, Homo sapiens
gcagcgggtcaacgctgctgctgtaggtccagcacgccagtaagcagatcgttcgccgaacaagcagtacaagggcaatcagtggactgacattgtccgcactccccaatggagcagggctgtgctgtccttactggacgtgtgtgcaatcttgccaatcgtcattcgcatacttccccactcaagcacctcgacattactgccattcaaggactaagtacatagcacgatcttcctagtgggcgcgccgtgagaccaaggcatcatcgcaagttacttgagaggtactatatgccgagtacacacacttgcgccttccgggccggttgtcgacgcctgtgacgcgaccctccctctcatgcctatcagtgtaccccctgacttggattttctgcccaagaagacccggcccatggaccacacgggacccgtgcggcacaaccgctcccgcgacaaccagaagaccgccgaagtatccgcgaagagcccctgcgcggcagcaaccatggcccatgcgcttggaaacgaatccaaccacaaggtaccacgagccgggccaattccctg

SEQ ID NO: 591909 - DNA, 476 bp, Homo sapiens
ctgcaggattcggcacgaggaaacttgcgagacttcctgttggtctacaatcggatgacagaactgtgtttccagcgctgtgtgcccagcctgcaccaccgagctctggacgctgaggaggaggcctgcctgcacagctgtgctgggaaactcatccattctaaccaccgcctcatggccgcttacgtgcacctcatgcccgccctggtccagcgccgcatcgcggactacgaggctgcctcggccgcgccagctgtcaaaaagaattgctgtgaacctaggggaagaaggtaaaaccaaacaacaaaagcaggaagaaaactctacccccttaggctttagccactgcttcctaggaggtcagtgacaacagaacaaagacaagcctctaagaattcaggaatgttgaccatttccccaatttactctcttagtacttcctgcctttgtgaaattagcaataaagactttaaaca

SEQ ID NO: 591910 - DNA, 544 bp, Homo sapiens
ctgcaggattcggcacgaggaaacttgcgagacttcctgttggtctacaatcggatgacagaactgtgtttccagcgctgtgtgcccagcctgcaccaccgagctctggacgctgaggaggaggcctgcctgcacagctgtgctgggaaactcatccattctaaccaccgcctcatggccgcttacgtgcacctcatgcccgccctggtccagcgccgcatcgcggactacgaggctgcctcggccgcgccaggtattcctgcagaacagaccagagactcgccatcaggcagctagccgtccctggcccctggagagaagctgtcaaaaagaattgctgtgaacctaggggaagaaggtaaaaccaaacaacaaaagcaggaagaaaactctacccccttaggctttagccactgcttcctaggaggtcagtgacaacagaacaaagacaagcctctaagaattcaggaatgttgaccatttccccaatttactctcttagtacttcctgcctttgtgaaattagcaataaagactttaaaca

SEQ ID NO: 591911 - DNA, 151 bp, Homo sapiens
ttaagctctggcctcagagctcctccttctcctggctagttacactaggtaccaggttctagggcctgagagagcctctagagatccagggaactgtgagcccaggagttgccatctatggtatcattcctcccatggctctgctccctat

SEQ ID NO: 591912 - DNA, 306 bp, Homo sapiens
acaggatcttctgtgaccgagacgacctcccaaagtgctgtgattacacacgtgagcactacaccaggccggaagactggatttttgttaacagatgacagttacagaataagagtttatacttagtatctgaagttgaggttcatttctgcatactgtcccttttccactgactaccatgaaataagtagttgcttaattttataaaattactttcccctgcccaagcaacagtaaaagccaaaacaaaaaacaaagaatcatgtcaagcagaacttatgtaacagttcccaaagaaaacaaaga

SEQ ID NO: 591913 - DNA, 1075 bp, Homo sapiens
tgagatttgaacccccgttgatccttcaccagagcccatgctcaaccactgtagtgttctgatgcccctgctattgaccaaaaggatgtttcgtcccattatccttgcaggccaatgagtacaaaactggactcttagggtcagtgcgtgcgcgtgttgctttgtaggtcggagagagaggcatgagtgttgcgttggatggttggcgtgcttgtaccttggatctgtgcgcgatggatccacgtctcttgagcgccctgatgtgatgctagatgctctacctcctctgaagaattggctaatgttaatggcgtggccattgtgtattgcgattgtccaggcacgcaattcgtatgcataatactctgtgaagtgctgcctgatgaactgattgtaaatcactagacagtctctaaatcttccttgtgtaggattactgggctcctgaatattttagcagattgacttactgttcttgtattcctgatgcactatacttctacttgaataaacgatacacttgccctacgagacagactgtcgtatcatcgttatcttttacatactgtgcagtccctcattatttgctaagcgtaatcctattacaactcatatttctccgaccttccatattactcaaacaaaccccctagggagatgcacctcccataacggatcccgatcaggcgttccaaccttactacgtacatcagtatcttctccgttttgttcccttccttggtctccttaatgaaggttaagcactagttctgaccaggacctcttaatggactcggaaattgtaccctatggcaacccttggaagccctccccattggggcgggagatattgccaatcgtctcacaagttttgagccgtccggacaaattagaagcgttccttgctttgtggttaccacccgactttgtagccacgctgtttcaatagtttaattaagggtgtaaatattatatgggccccttactattgggagaaagctctccttgagggccgcttaaccaaaaccttgaactgtgaaaaaaaaaggtcgcgcgctccttttgttccattctt

SEQ ID NO: 591914 - DNA, 120 bp, Homo sapiens
gctcggtccctactcggctatgcgaagagaagcgcttataggagaagtagtacgggggagggggtcgcttagcgcgtggacacagcacaaaacacaacacgggcagccgcgtagtcagat

SEQ ID NO: 591915 - DNA, 369 bp, Homo sapiens
  misc_feature (58)..(58): n is a, c, g, or t
  misc_feature (67)..(67): n is a, c, g, or t
  misc_feature (259)..(259): n is a, c, g, or t
caggacctctccatgagggtccagtgaggagcctgtcacagagcctcgcccaggtggnatgcatggnggagtgactgggccctgacaaaggggaagtctgtgtgaggtagacccctggatgatccggcactgaggttcagtgacaggcagaaaaatggcggccgcatcataggtgtttcaatgggggattcacagcagagccatctccaaggccccacacaagctttcctggagacaaatgccagcttcagacggtccngccaagtcctgagtgcacaacgtcctattatatctggtcctattatataacccaaagactatgactattttttcctaagtcccccttcataggccaactctggggaggac

SEQ ID NO: 591916 - DNA, 190 bp, Homo sapiens
ccagacggttaatatctagaagataccatacatcaactagtggtttaaacactttgaagaaaaaacactggaacaggtagtgtacatggaccagtttctcttatacaagagtgctaaaacatgaaaaacacccaaaaccagcatagagcgttaccatcaaggtatgaactctagctaatacaacataaaa

SEQ ID NO: 591917 - DNA, 340 bp, Homo sapiens
  misc_feature (47)..(47): n is a, c, g, or t
gtaccctgcctcgatgtcctgctgcaagctgtccagagatacgccgntggtgcggatgtcgctcaccagcgcgtgaatctgcgcgatgctgccatccacgacttttttcgcggcctggccttcggcgtcagtctgctgcgccgcaaccgccgcgccttgggcactgcgggctacttcatgggccgcggaggacatttcgttgatcgcagtagccacctggtccgtctcgtgacgctggcgttccatggctttttccgagcgattggcttgctcgccgacctcgacatgcagcgcatctggcacccgctgctggtgcgctttggcgccaacaccctcaaga

SEQ ID NO: 591918 - DNA, 215 bp, Homo sapiens
ggagtttgagaccagcctgggctaccatagcaagacccccatccctttcaaacatatgtttttaatacttagcctaaatatggctggccggctaataccagtctactcaggtaggctgaggcttgttataatcgactttagcccagggacttggatggttacagctgagctactgattgctgtcactgtcactctcatcctaggtccatagagcc

SEQ ID NO: 591919 - DNA, 132 bp, Homo sapiens
tacatatacgaactcgagcttgtaccctgtgacttggggcacatcctggtaggcagaaggagccttacttggggaagtgagtgaggatgagggtctcttctcgggcaccaatttgtccttctccactcggaa

SEQ ID NO: 591920 - DNA, 318 bp, Homo sapiens
  misc_feature (286)..(286): n is a, c, g, or t
  misc_feature (294)..(294): n is a, c, g, or t
gagctactcacctacatgatggaagataccgtaacatcactccatgcatccatctactgttcatggccaagaatttggagcgaatcggcgaccacgcgaccaatatcgcggaaaacgtcttgtttcttctcaatggtgaacaaatgctcccaccacgggaaaagtgcgataacaccagcaacgtaaacctagattgaattttagattaaagaatgagctatcaactagagttttaaagcgttatttcgcaccatcctcgtttcataacctcgaaagagcttgtganaaaaagcncgaacttgaatgaattaccttcca

SEQ ID NO: 591921 - DNA, 171 bp, Homo sapiens
  misc_feature (35)..(35): n is a, c, g, or t
atacgcaattcctgctcaccgagatatacatgcangtgtcatgtgatgcttctagaaagatcttaaagttcggagaagcctattttttgccttcctcctcactgctgcagcaaatacgtacgtgacagcttgaaaggatgatctaaccaacatatatggaactttgcactc

SEQ ID NO: 591922 - DNA, 335 bp, Homo sapiens
  misc_feature (6)..(6): n is a, c, g, or t
  misc_feature (29)..(29): n is a, c, g, or t
agatantaacactgaaaaaaatgtatccngtcccctaaaataagttatcaaatcgtgtatttgtaccccattaatcaacttctccctcattctttccctcctctcaaacagtcctaccttctgttttcatgagatcccatttttttcagctctcacatgtgagtgagaacatgtgatatttgtctttctgtgcttggcttatttttcttaccacagtgaccttcagttccatccatgttgctgcaaatgacaaaatttcagtatttttaatggcagcatagtattccattgcatatatacaccacattttttttctgtatttcttctaaaaaaaa

SEQ ID NO: 591923 - DNA, 299 bp, Homo sapiens
tataggcgcctagtgtgtagggataaggcgtgaccacagctccttgggccttcgagagtagtgattactaccttcctgcgtgcatttcacccggcaaagtgaaatttgattaataaatttcttagtaaatttatttagaaaaagaactatcagccaaaagatagcacatagggcaaatctggagataaacagtatcatgatgtatatgagggctaacccattgtggtttacttaaaaattagtttaagtggagttagaagtgggttattttcctctggtgaaaattatggacatagctg

SEQ ID NO: 591924 - DNA, 422 bp, Homo sapiens
gtactccccgggtttggcgagtacggaatctggtacaggtgctgatgcagattcaggtcgcatggagccaaaaatggagcggctacaacagaagaggtcctgaaaaggctcaaagattatccattaagtccagcgttatcgctgcaaagtgaattgctcccgtgctggatcatgatctgcatttcccagaatatgctatttcccggtggattgggccacgccgccggctgctgtgatgatcgtgtggagaatagggtagtcgctactttccgacatgagcttatctgtgtccagcaggctatcctcctccctggggacgggcgtcttccatccatccccgtgtttttgcccctacagtgtgtcctcgtcctgcaccacgctgcagaggtcctcatccttatgctgtctgtgccttctcttga

SEQ ID NO: 591925 - DNA, 494 bp, Homo sapiens
  misc_feature (276)..(276): n is a, c, g, or t
tagcatatagaaccatgcctggcacttagcaggtgccagaccacttagctttcttttctataaaaggtttttaggaggaaaacaagatttttttttatctaaaatacttttcacaagggtttttaaccaaagggccaaatttggcctacataatgtttgtaaaaatcatatttgaagtaattgccaactttaaacatcagtaactgtcacataaaaatctgtatttctcacttatcttgaaaaagtgtattttctggcacagagcttccccagttntgcttggaactccaggcagaagctgagtattggctgctgctttggacacagcatttgctaaacagctcactgcagtgctttgaatgacttctctaggcctctgcacctggaacttcttcactatgttacccttttcctaatgaatcttcatttcatgatattttcaccaaagaacaatagaatctgtaaaaataaatacttgcagtgcttaaatggga

SEQ ID NO: 591926 - DNA, 473 bp, Homo sapiens
  misc_feature (57)..(57): n is a, c, g, or t
  misc_feature (171)..(171): n is a, c, g, or t
actcttcaggaatacccccaaaaattaaagttttttcttttttccaaaggttgcccnacggccacccccctatgtccacggcccttgaaagttagttatttgaggaaaagtcggtccccttttccccctttttcttataacccaaattagaccaggaaatggaagattctncctcgggggcctgaaaagctttcggggatgaataacttcctcctccttcaggcccagtcccaaggtacaaacttgcaccagcagcaagatagcagaggcaggaagagagctggctggaagacacgtaccccctgaagatcaagagggaggtcgccctggtactacatagcagtcacgttaggctgggacaattcctgtttacagaggactataaaacccctgccccatcctcacttgggctgatgccattttagcctcagcctgtctgcatgcaggcgctcattaaaacagcatgttgctcc

SEQ ID NO: 591927 - DNA, 223 bp, Homo sapiens
atagaggatccccctacagtcttctgcgggcgcacagcttcttcggacgatcggccaccacagacttctcctccggcggactgctacgcgcgcgacgacgtagagggcagctgcgcgtgagccttcaaggctaaggcgcgggtccgggatggagccgctcgcagtgtgcagatcttaggtggtagtagcagatattcaaacaaaaagctgtggcggccgggaa

SEQ ID NO: 591928 - DNA, 541 bp, Homo sapiens
tatgtcggcgtcggtagtgtcatgtcatttcgcggttcttagaagagtactagagctcgagctccgcagcgtcagaagttgctggagcgcgtaccatgctgtatatacgggctgaccggggcgctgcagttcggttactgtctcctcgtggggaccttccccttcaactcttttctctcgggcttcatctcttgtgtggggagtttcatcctagcggttggcctgagaatacagatcaacccacagaacaaagcggatttccaaggcatctccccagagcgagcctttgctgattttctcttggccagcaccatcctgcaccttgttgtcatgaactttgttggctaaatcattctcatttacttaattgaggagtaggagactaaaagaatgttcactctttcaatttcctggataagagttctggagatggcagcttgttggacacatggattttcttcagatttgcacttactgctagctctgctttttatgcaggagaaaagcccagagttcactgtgtgtcagaacaactttctaa

SEQ ID NO: 591929 - DNA, 1393 bp, Homo sapiens
gaagtggcatgagtatcacgatcgctacggcgacagccacttgtgttgatctgctaacctcatcctggatgcgcttgcttgctgctaataatcggtcgcctagagctcatgcacactatgatagcatatgacgcgcatagctttttaggagttcgtcatgctcctcttcaactcatgccctcacttgggacaacctgttgcctcgacgaactcgtatcctacgaggtgagagatagtgtgcctgtgttgattgatgcacttatgagcgaactcgtagtttacttggatcatttcgtcatcgcctttgaactcaagcgacctcgtctctcggtacgtacatgctctatctctatcatgttacaacttttcaacgcatcggtatgcatcattttcgtagggcaccatagtatgatagacatcggttatacgtcgtgtggacacctagaccaggacttcttgcgtatttctaccctaacgtattactttcgcaaagagggacataaggcggatatctagagcatggaacggacttcaccccttaaaggattatgttatcggaggcacatagggacctatcggaaggggttatggagcaccgtgacctgttaagtaacggattttctaagttaagcacatttttggggtaacggaaaccacacacaaaacggtttacacacgacgttttctcggaaatggggactcttaagctcccctggacgacacacaaaggcttattttctacgcatggcgagcttgcccccttatgtcataggacaaggcaacataaacttgggggttatgcgtttcgaaaggcctttcgaggtgggaaagcatttcggcggttggctaaataccaacgctgaataaagttataaggcctgtggtaaaatcttacttgtgggcggaaatttccgaacactttagtggggggacaaccaaactccgcggtatattagtagggggtatgcgcacaacactcctactgactcgcggttggttcgcattttggcccggaatatcgacagcgggggacaattttcagacgcgtttctctggcaggagtactggagaaccgcacaggccggttttcatgagtgtcgcccgcccagtatgggccaagttggtgtggactcccaccgttggtgtttgtccggtccacggggggcaaacaaccgatggtgggaaaacttctccccacccatttacattttggccgacgagagagtgccaaaataaggcttttcacgggcaccttaaagcgggtaaaggaccggcgacaggtatctccgcccaatatatattgggcgtacgggcggagcaaacgggaccagcgcgcaactatgatagggcagcagaggcagatcgtaatacgtaggggatacaaccgctaagt

SEQ ID NO: 591930 - DNA, 414 bp, Homo sapiens
cagcctaaatgcccatcattcaacgagtggataaatataccagagtttctttatccactcgttgaatgatgggcatttaggctgtggataaagaaactctggtatatttatcccatggaatactactcagtcataaaaaggaatagaataatggcctgcgagcacttgggataggttacagcattgctattgtgagtataatgtaacaggaatgtttatcatctcagcgtaagtaatcattcataaggggtagtttagaaataagaacgttaggtcacaacaatcccccagtttagttgtgctggtgcatacgtgtaaaggcagctggtttccaggcgaaggggtgtagacaaccagaggtcaccagttcgacgccatcatgcccgttatagtaaagcgccctctttgtataaa

SEQ ID NO: 591931 - DNA, 998 bp, Homo sapiens
  misc_feature (427)..(427): n is a, c, g, or t
  misc_feature (570)..(570): n is a, c, g, or t
cggcaactcggttaagtcttcccccagcgcccactgaaatcgctcgccccagccgcgagggactggtggtaggagtaggggcgttgccggtggtgagcctcgagaactcctagggtcagtacgatactctctggcctcggcactccgcgagacagctgggactaacacgcgtgcatgccagccgcccccggcgaatagaagatttgaacttagctcccttacgcagaacagggcaagacgggctgtctgtagaactcgcgacaggagtcgaacgcgtcttctgagctcgccgtctttgggtatagcagtcgccagggcgtgaagctggtggtagacggcgtggtccaggagagggcggtgggaattacggttgacgttcggagcagcagggtcagctggacaccatgaggactgcacgaagcgagtntagagcggcggaaatacgtgaaaatgcccgcttggcaggtaccgcagtccgcagacaggctcgagcatgacctgaggcgccttaatggcagaggatgcgagcagcgtatcaccgaggcggtagccaccagctgcggcaaccanggtcacacatccaatcctagagggtttggtgccggactgcataggggctagggggggcaaagacggacgcttaggaggaaagctgcgaaggcggttagaaggcacaaggggggcggttagaggaggggcctgattggcggagagataccgggggcagcggatatactaccaccagacacccggacagagggggggtgggaccagatcggagaaggcaggcgggtgacgccatgtcgtgtgccagaaagggaaggcgaatagccgacgttggcaggggtagccacggacgcctaaggtggggcaaaaatggccacggaagtggcacaggactctggaaatgggccgaaatcacctggcagggaaatagccgtaagcgcaaggaggtgcacaaggtacacagcacacagaccgttaggggcgcacaccca

SEQ ID NO: 591932 - DNA, 1182 bp, Homo sapiens
gattccactgatgacatttgataaataaacatcaggatcatgtttatgttggtttcagtctttgcactatattaccagtatatggtttccgaggaagattatctactgcaaaacaccactgtgggaaaaataggtatttttaaatggtttttaatctttttgggtgcttttaaacatgtttagcaaaaaccaattcagttccattccccgcaaaaaacccctaactttactctgaactttatggtatttggcattccatgaggttctgtattcagtcattctctaggtaatcgtcattttggtacacatatatttatataatcactgattgagatttaggacacacagcatttctaaagaatattggcttcccttagaactacagactcgacaatctttaaagatggtgcctaagcatctatatatactcaagttccacagatcttctgtgggcagcaaggattataaacacttccctaaaaggcaacattaatgccaaagtccccagatgcaataccaagtatcccgtggtaccacatatattcattgtgaagtgggtataggagcacattatctaaaccattggtagttccaaaagcatctaaattcttgagtccgaatttgaccggattcctgtagcggaccacgttagatagacttctgtacaaacggaaattgagtggacacgcgttccaaccaacgatgcggcccacacatcggggacattacaggctgtggctactagagcaatgcaactcaacggtaaatataccaagaacacactgtatttcgcccaactacataatgtacacacaagttataatcgatgatcattctctctctgtctctctcccgtctccttcaaaacaacattcgaagagagaagcagagtcagcaaagcaggcaagacgaaaacgcaaatcagagaacaagagagcagaaagacgagcaagaggacacacggaaaagcagacgagacagagcaacagaaaacagaaacaaaacagaaaaggatgcgaaaacgcgcacgacgaagccgagacattagacaagacagaacagaggacgacagagaggagcagtcaagacgagcaagtgagcagagcgagcacggagaacgacagagaaagatcataaacagcgagagagagagcaagagcggagacaagctagaaacacaac

SEQ ID NO: 591933 - DNA, 472 bp, Homo sapiens
  misc_feature (470)..(470): n is a, c, g, or t
gaagataactgaatcaaggagtttattatgatgatgtattatgaaaaaaatcaggcagtattggttatgaatcccatacagtactgtccatattttttccttcagttaaaggtaaatgtctgatgaagaatacattttttagcaaaatttgcaacatgttagcattttaaaatatctgacccataattcaacttttaaaaatcatattttctcatatacttgtaggattttcaggcatgaattttcaaagacacactgtgccactgatgagaaactaatggtttcctgactaatgctggctcattggaaatgctctattaagaacaatgggttcaggaaggggcacaaagtatgggtcaactggctctgttctgtttataatcttgccaccatccaaagaagaaaggaatctgggctgagcgcggtggctcatgcctgtaatctcagcaccttgggagaccaaggcaggngt

SEQ ID NO: 591934 - DNA, 861 bp, Homo sapiens
gctattcttttattacctttactttcctagttaaacttgctttcactttactcaccctgaattctgttcttgctcgaaatccaagaacccccttcttggggtctggatcggggccccgtttccggtaatatctttcttgcgaccactgaagagactatagtgccaaaaccacgaacccaaaggctaactttgggtgagtggtggggtctggtaatatctttctggtgaaccacagaagggacgatactgaagaacaacccccacatcgcccccctcccacccccgcaaccatctgaaggaaatagactgcagcactgattggctgactttggctgtgcatgcttatgaggccctaaaaactgcacaccttaacgagaaacttagaaactggtttctgataactttggaaaccgtgatattagaatagaggaaaaaactttcaggacgttcatggagagctgaaactgttcatgaatatccaacaaaacaggagttaactgcatggactgaactttaactagcacgcattcacagtaatctttttgactttttgcttaaaacgttgctaatccttcgtttgttttcagagccaggaaaacctctttgctttcggagactatttaccacgcttttagaccaattggagcttaacaggtattatcctggctgacaacaccgcaaccactcgagacacaagacttccgaagcactatggggcccctccaaccatctcacgggtgccggcaaaaccgcgtgcgtattggactgttcgccccctgtgtcacattaccggttttccccgtgaccccacagctttccgttgtgtacacagtgtgggtcaagcattgctccgggtcttcc

SEQ ID NO: 591935 - DNA, 381 bp, Homo sapiens
cgcgacctagtgacatagtttggatctctgtttcccacccataacctcatgtcaaactgtaatccccaatgttggagatggtgagcctggtagggaggggattgaatcacaggggtgaatccgttcatgaatggtttagcaccattcccttgctgctgtcttgtgatagggttctcatgagatctggttattcaaaagtgtgtagcagctctccactccttctcttgcccctgctccaaacatgttgaatgcctggctcccctttcgacttccaccatggctgcaagtttcctgaggcctcctcagaagccgagcagatgcctccatgcttcctgtacagcctgcagaagtacgagccaattacctttctttatagattac

SEQ ID NO: 591936 - DNA, 127 bp, Homo sapiens
gacttaggtacgccagttagaaccagaaccaagcctatttcacttttctaatacagttattgaagctgcggaacagaattatatggaaatattacacagattatctgttccgcaagctacaactcag

SEQ ID NO: 591937 - DNA, 768 bp, Homo sapiens
  misc_feature (15)..(15): n is a, c, g, or t
  misc_feature (115)..(115): n is a, c, g, or t
  misc_feature (160)..(160): n is a, c, g, or t
  misc_feature (162)..(162): n is a, c, g, or t
  misc_feature (168)..(168): n is a, c, g, or t
  misc_feature (179)..(179): n is a, c, g, or t
  misc_feature (182)..(182): n is a, c, g, or t
  misc_feature (187)..(187): n is a, c, g, or t
  misc_feature (195)..(195): n is a, c, g, or t
  misc_feature (210)..(211): n is a, c, g, or t
  misc_feature (267)..(267): n is a, c, g, or t
  misc_feature (281)..(282): n is a, c, g, or t
  misc_feature (295)..(295): n is a, c, g, or t
  misc_feature (368)..(368): n is a, c, g, or t
  misc_feature (401)..(402): n is a, c, g, or t
  misc_feature (430)..(430): n is a, c, g, or t
  misc_feature (462)..(462): n is a, c, g, or t
  misc_feature (464)..(464): n is a, c, g, or t
  misc_feature (468)..(468): n is a, c, g, or t
  misc_feature (475)..(475): n is a, c, g, or t
  misc_feature (542)..(542): n is a, c, g, or t
  misc_feature (577)..(577): n is a, c, g, or t
  misc_feature (580)..(580): n is a, c, g, or t
  misc_feature (585)..(585): n is a, c, g, or t
  misc_feature (593)..(593): n is a, c, g, or t
  misc_feature (743)..(743): n is a, c, g, or t
gggccttgatttttnttggttaggccggctttgctggtgacttcttccaaactctgcaggagcagtctaccccaacacacatcatcagtcccatataaaagaataagatggaaantttctcaatgtatttcatcagtttagcacatctctggtacaaaantncaaganaggtagcacanggnggagnggccaggnaagcttacatataannaaacatgcatacatcctaaatactagagaatagtacccaaatgaataaaacattgnattaaaggtataannggggtgtactganaatttaaaagttacaggtgaatactgcactgtaaatgctgaatactataatgggccacgccccacccttccanagcgctggtgagggtaagagaacattcatttgnntcgagagtttgctagtgctcagagagantgctgcgagggtagtgggcagtgggattaggntngggnagaggtntggggtggtggagagcttctctgtatcgggagggccaggcctgggggtttttcttaaagaccctggncaggaactccatgatttgcatcttggtgatttcgnggntggcncgggagcnccaaaagaactggtattggggcggctccacgtatgggacgcgctggtacttcaggtaattcatttggacgaactcctcagtgatgagcttccgcacgtccccgaagtgggagtgcttcttccagggccgcagcccaggatgcgcaccgtntccagacggcgctctctctggcgcg

SEQ ID NO: 591938 - DNA, 239 bp, Homo sapiens
ggatgtggagatagcactaccggaagctgctggagggagaggagagccggatcaatctccagcatccagacctactctgccctcaacttccgagaaaccagccctgagccaaacggcgttctgacggtccataccaagcaagacggctgatcatcaagaccatcgagcacacgggactggggcaggtcgtcagctgaggccacacacgcagcagcatgaacatgctctaacagacagag

SEQ ID NO: 591939 - DNA, 644 bp, Homo sapiens
aacggtgggctatcctttatccaaatcagatagtgtttaggctctttttcatcaaatataaaaatccagcccagttcatggctcgttcggcagcaaccctgagacactttacagccctagaccctaaaatgtcaaaaggccgtcttattctcaatatacattttattacccaatctgctcccgacattaaataaaactccaaaaattaaattccggccctcgaaccccacaacaggacttaattaacctcgccttcaaggtgtacaataatagaggcagccaagtagcaacatatttctgagttgcaattccttgcctccactgtgagacaaacctcagccacatctccagcacaaaagaacctccaaacgcctaaaccgcagtggccaggcgttcctccagaaccgcctcccccaggagcttgctacaagtgccagaaatctggccaccaggccaaggactgcccgcagcccaggattcctcctaagccgtgtcccatctgtgcaggaccccactggaaatcggactgtccaactcacatggcagacactcccagagcccctggaaactctggcccaaggctctctgagtgactccttcccagatcttctcggattagcagctgaagactgatgcatgccgat

SEQ ID NO: 591940 - DNA, 248 bp, Homo sapiens
tgattgggcacagaaattcccatgtatttcccccacataggcacagcctccctcatcatcagcatcccccactagagtggtatgttgttacagttgatgagccgacattgacacatcatcacctaaagtccatagtttacactagggttctctcttggtgttgtacatgctgtgggtttggacaaatgtataatgacatgtattcactattatggtgtcatacagaataatttctgtgcccatttcaa

SEQ ID NO: 591941 - DNA, 633 bp, Homo sapiens
ccccggaacttccccacggtggtttatcgggcgtcgtcggggctgggtcccctggacttgcgggccacagctcggctggggaggaggtgctcgccgccctcacccgtttctctgaaagcagtaaaatgcctccccgctcctcccagggccctcgggtccccaccttccgtaaatcgtgcttccccctcgggcactccggtgactgccgagagagacgccgagccagcaagtaagaatgctccctggtgggatttggtggtaaatatagacaatctctgcgctctcggaggagaagtgtcctgcgggggccgctcgtccgccggcgacgggcggacggagcggcggtcgaggatggtgcgccgtcgtcggctcgccgccaccttccctcacctgcgccggaacaacgggccccgcgccatgccctggcccggcgcctcccgcaggccgcgcctccctgcacgccgcgctgccggggcttgttccttccctcatgggcttttgccccctggaccgtcctttccaacattgggcaccaggtccgaccttcacagggcggaccccacggaacctcccagacccgggctcccgggccccgatgacccggcgcgccagtcgggccaggctcccggaccc

SEQ ID NO: 591942 - DNA, 448 bp, Homo sapiens
catctttagttggttgggccaaaaatgacctaagaaataatttgtattctgctttactaaggtaaaagagaattatatcctgggtgtttttttgctcttcttaaaagaaatgtgccccttttaaattttgctttatttgtaattacccaaaatattctatatatttaaatacttaatttaaatctactgaattgcctgttaagaaataatttttaaagagcactgtcgtcaatactaaactttatcttttctgatgtttcttactaagactatgggtactccataaacattgttattttcaagattgatttaatgtatgtaaactaaattccactatttattcctaaattggtaacagtgctatttgaaaaatagctttttgcctgtatcctaagatatgtatttaaagtgcttgttgctcaccagagtccagtttatctgtcctcat

SEQ ID NO: 591943 - DNA, 970 bp, Homo sapiens
ttcttatttttacggagggcttgtggccttagacgccagtatgcttatggaaatgaaacagaatagtccctgtccaaaaaaaaaaaaaaaaaaaaaaaaaaaatttgttgggagacctcaaaaagttaaaaccatttgtggaggcaccgagagaccaccacgaaaaggaacaaggatgaaaccacggagacacaggaggtgtaccaccaagagaacaaacgcggacgcaaagaaccagaagaggcaaggaaaaatcaaacaagaaaaaaaaacaggacccgagaggaaaacaccgacacggttggaaaacaatcacgaaagagaagataacgaaaaaaaaaaagagaaacataccaaaaagagagatgtccaacaagaggagacgtcagaatcgatacaaaatagaaacccacacaacagtcgaaaaaaaaagtgagagagagtagaagggaggggggagggggtagtgaggagtaagcggagaggggaagtagatgtgaatagagatataaaggtgaggaggagaggaaggggagggagatagaggtggtaggaggaggggtaggtgagaagggaaagggaggaacgaaggggttaggtaggtgtagggagaagaggagggggaagagaatgataagagaaggaggcgtggagggtgttgagagctaaggggggaatgactaggggagagaggagtggaaggggagaagggggcgggggggagggcaaggagggaggaggtgtgagcgagtggacggggcgggggggggggaggggagtgagtgaagcgagaggggaaggaagagagggggggagcgcggtagaagaggagggggcggaaggggaagagctaggggaggagagagagggggggggtgatagagaggcgaggagagggagagagcagaggggagagggggggaggaggggctgggcaagggggaggaaaggaggggggaggagcggagaa

SEQ ID NO: 591944 - DNA, 208 bp, Homo sapiens
ggttcatggagcccctgtttttttaaaaaaaaaagggggggggtttcccccaccaaaatacccattttttaaggggaattaagttgaagatcaaaaaagggaaaggtataattaaatcatacttagcaattttaacccatgaaatgtaacattggcaaagggagaatggggttccttttttgaaaaccattaaaagtttgagacctta

SEQ ID NO: 591945 - DNA, 1129 bp, Homo sapiens
ccacgcgtccgggcgggcggccggtggagacggggtggcggctgcagcccgggtagggacaggagacccggtccacgttatgcaaacgcatgccgaacgcccagtgccgaccctgtgcctgcccgagcgccgcgctgctgtccgctgccactcttctctgcgcgccccgattggctgttccgtggtgctggagggcccccgtgcgtcaccggctgctccatgcgtgctgctctgggtgacctgggcatggcatgcgccctgtggctgggcactgggctccagacgcggagactgcacgatcgacgcggcgcattcgtgccccgacgagtgccctgcgcagccgtgcgcagcggcgacattcagtgcgactaccacatacgatggggacagttcccctgacggccagacagttcgactcacagctggtgtgatcccacccgcaattcagtgcgttcatttagatgtacttctgatggatattgggaattctgaagaccaggttcagattcacacctatttcaagcccccgagttgccctcggaccatccaggtgtctgattagtgaggtacactacaacgggacgtacctggacggaactctgttagattcgagtcacaatcgcatgaaaacatatgacacgtatgtgggaattggtgggtgattcctggcatggataaagggctgctggggatgtgtgtgggtgagaaaggcatcatcaccattactcttttctggcgtatggagaggatggagaatggaaagaaattccggtcaggataacggatgtgaggtggattattggactcataagccaggaaggattccattgaaaccaggagactgaaagggtacggaaagcaacggggcaccaggacacaaacaggaacaatttggagatggcacctttgagtctaggaaacttggaagggagagtgaaaaaaatgggcagggagaagatagaacagaagaggaaaagcaagggaagtaaagaaggggagaggagacaagagagaagagagaggaaaaccagagagagataagaagagtaaagagaggatagagcaaaatagttagatatagcagaaacaatgaggagtagaagtgtgctattgtgtgatctcgagaaga

SEQ ID NO: 591946 - DNA, 282 bp, Homo sapiens
caaatacaacagactccaagagaagaagaaaaccgaagatagcaacgggaacggagacatataacacaagtaacgctgggaagaaaagcaggaggtcttttgacgggaggagaacgagtggcgtacggaagactaggaacaatgccgtccaaattcacaagaacggggagaccagaggcaaggctttggagacaaaatgcaaagagtagggtagggggagggtgcctaccatgtcgttcccgggagggtggcagcggagagagggctcataatagtgacgtt

SEQ ID NO: 591947 - DNA, 122 bp, Homo sapiens
atatgtggtgatactgtgattgtgatatggtggcagtgatagtggtgatggcaatggtagtggcaatggtggtgatgatggtgatgataatggtgatgatggtggtgatgatgatgtgatcg

SEQ ID NO: 591948 - DNA, 490 bp, Homo sapiens
  misc_feature (73)..(73): n is a, c, g, or t
  misc_feature (107)..(107): n is a, c, g, or t
  misc_feature (120)..(120): n is a, c, g, or t
cacgaggtcgacaaaccctacgtcatggtcggcgccaatgtcttcgccgcagacgaagaggcggaagcgcggnggctcctcagctcgattcagcaggccttcctcancctgcgccgcggnaccccggcgccgctgccgccgccggtcgaagacttcgaggcgcagctgaccccggtggagcgcgccgggctcgaccaggcgctgtcgaactcggcggtcggtacgccccgtcaggtgcgcgagcagctggcgaagatcgtcgagcggacccgcgccgacgagctgatgctcaccgcgcaggtctatgatcattctgcccgtctgcgctcattcgagatcgccgccgaagcgatgaaggccatgcaagcataagcatcgcgccgcgcgcgagtttcggctaaactccttgcggacccataagaaagccgaagatgggccgctcgctccgtatgctccccgtcgcccctctcgcccttgggatgctgggcgg

SEQ ID NO: 591949 - DNA, 348 bp, Homo sapiens
gcggttgaggtagtagttgcccacgtggtgcaggcgccagcggatagggtcgtgggtggtgtgtacccgggcattgcgccagaagcggtcgaggttccatttgctcagggaggaactggccccccacagcgagaagatgtcgctggagatcttcagcgaggcgctgtcggaatgggcccgggcggtggccacggacaggatcaactggtcctgcagttccttgttgtccgggtcctgctcgtgttcgtcgaacacccgtgcggcatcgcgcagcaaggattcggcagcacgcagggccacggcgtattcaccgatctgcttgatgatgtgcggctcttcgctggcgtg

SEQ ID NO: 591950 - DNA, 325 bp, Homo sapiens
  misc_feature (269)..(269): n is a, c, g, or t
  misc_feature (306)..(306): n is a, c, g, or t
  misc_feature (316)..(316): n is a, c, g, or t
gtggttataatgagctcaaagcctgtgccggtctggtctgtgaaagggcctgggtgagccaaggtcagggccctgggcagagccatcgggctgctctggccgtggcggtggtggttccaggcacgtctctgggttgtgaggaacccgctggccccggggctgggctccgactggggcccaggtgtcgatcactaaggtatcggggtctctgaggggcaccacgttggaggatcacacgggcatgtgcagctcgttgtattcatcctggncgtcctcgtcaaagtttggttcagcgtcttcagagtnccagcggctncagctccct

SEQ ID NO: 591951 - DNA, 697 bp, Homo sapiens
  misc_feature (16)..(16): n is a, c, g, or t
  misc_feature (26)..(26): n is a, c, g, or t
  misc_feature (31)..(31): n is a, c, g, or t
  misc_feature (35)..(35): n is a, c, g, or t
  misc_feature (53)..(53): n is a, c, g, or t
  misc_feature (142)..(143): n is a, c, g, or t
  misc_feature (161)..(161): n is a, c, g, or t
  misc_feature (309)..(310): n is a, c, g, or t
  misc_feature (368)..(369): n is a, c, g, or t
  misc_feature (427)..(427): n is a, c, g, or t
  misc_feature (429)..(429): n is a, c, g, or t
  misc_feature (446)..(446): n is a, c, g, or t
  misc_feature (474)..(474): n is a, c, g, or t
  misc_feature (697)..(697): n is a, c, g, or t
ggccaacaacctgccnggtgcgcatnctggncganctgagcctggtgggctgntacaacctgtccttcatccccgagggcaagcgggcccagctgctgctcgagagcgccaagaagaacctgcggggcatggccttcttcgnncctgaccgagttccagcngcaagacgcatgtacctgttcgagcggacgttcaacctcaagttcatccggcccttcatgcagtacaatagcacgcgggcgggcggcgtggaggtggatgaagacaccatcctggcgcatcgaggagctcaactgacctggacatgcnngctgtacgactacgccaatggacctcttccagcagctgctaccagtacaagcggcagnntggatgctgcagtggagcagcgcctgagtgatgccgctgaggagcgtctgctgcaccngngccaatgatggcactgncgcgggaggatgccgacgagccgggccngctgtgcccaccgaggactacatgagccacatcattgagaagtggtagtggcggtggtggccacggggaggcctcttggggggtgtgggggataaaacaggacagacgacaggtccacccaagactgtcaagggatgagcatccaaactgctccacagaggtagctgcgtctgaaaaaaactgagcacgatgtagtgggctgggcaggatggggcttgagaan

SEQ ID NO: 591952 - DNA, 219 bp, Homo sapiens
cgtttttttccccagggataatattcccctttttctctcctatttctgatatgtggcgctcttttaacaagcgcttttttgtttgcagggtaaagacacatgagtctgttttttccctgccgggattctcccattgaaggcccttggcaggggttgccaggtgagccatcccgctgagtcccgacctctgcgctgtgcatcctccctttttggccaccc

SEQ ID NO: 591953 - DNA, 214 bp, Homo sapiens
  misc_feature (195)..(196): n is a, c, g, or t
ggtgatctagaggatcggctttggcggcgcttttccctaggaagtcatactcaattctttcatcccccaattaatcattccctttagtgaactcttgaagagtgagtttacacactttagcaactattttctatggggtagtttttcttttcttttcttttcttttttgaagacagggtctcgctgatcacccannggatggagttacagtggt

SEQ ID NO: 591954 - DNA, 899 bp, Homo sapiens
  misc_feature (812)..(813): n is a, c, g, or t
  misc_feature (838)..(839): n is a, c, g, or t
  misc_feature (842)..(842): n is a, c, g, or t
  misc_feature (865)..(866): n is a, c, g, or t
ccgggcaaggaggtctggatgctgagggcggtccctgaggggcgggcggggcccgaccggcgctctgtgtggccgaggccatgaagccgcagccgcccggctaggccccgggcggctctagcccagggcggcccgcggggcgctgggcctggctcccggctccggtttccgggccggcgggtggccgctcaccatgcccggcaagcaccagcatttccaggaacctgaggtcggctgctgcgggaaatacttcctgtttggcttcaacattgtcttctggttctccgtgttcctcggtctcatcttcttcctggagctggcaacagggatcctggcctttgtcttcaaggactggattcgagaccagctcaacctcttcatcaacaacaacgtcaaggcctaccgggacgacattgacctccagaacctcattgactttgctcaggaatactggtcttgctgcggagcccgaggccccaatgactggaacctcaatatctacttcaactgcactgacttgaaccccagccgggagcgctgcggggtgcccttctcctgctgcgtcagggaccctgcggaggatgtcctcaacacccagtgtggctacgacgtccggctcaaactggagctggagcagcagggcttcatccacaccaaaggctgcgtgggccagtttgagaagtggctgcaggacaacctgattgtggtggcgggagtcttcatgggcatcgccctcctccagatctttggcatctgcctggcccagaacctcgtgagtgacatcaaggcagtgaaagccaactggtgaggcnncagaggccatggcacatgcctggcnnacncaggctctggggggccccccagnncctcctactatatcctgacgggcaggctgcaga

SEQ ID NO: 591955 - DNA, 857 bp, Homo sapiens
  misc_feature (770)..(771): n is a, c, g, or t
  misc_feature (796)..(797): n is a, c, g, or t
  misc_feature (800)..(800): n is a, c, g, or t
  misc_feature (823)..(824): n is a, c, g, or t
ccgggcaaggaggtctggatgctgagggcggtccctgaggggcgggcggggcccgaccggcgctctgtgtggccgaggccatgaagccgcagccgcccggctaggccccgggcggctctagcccagggcggcccgcggggcgctgggcctggctcccggctccggtttccgggccggcgggtggccgctcaccatgcccggcaagcaccagcatttccaggaacctgaggtcggctgctgcgggaaatacttcctgtttggcttcaacattgtcttctgggtgctgggagccctgttcctggctatcggcctctgggcctggggtgagaagggcgttctctcgaacatctcagcgctgacagatctgggaggccttgaccccgtgtggctgtttgtggtagttggaggcgtcatgtcggtgctgggctttgctggctgtgactggaacctcaatatctacttcaactgcactgacttgaaccccagccgggagcgctgcggggtgcccttctcctgctgcgtcagggaccctgcggaggatgtcctcaacacccagtgtggctacgacgtccggctcaaactggagctggagcagcagggcttcatccacaccaaaggctgcgtgggccagtttgagaagtggctgcaggacaacctgattgtggtggcgggagtcttcatgggcatcgccctcctccagatctttggcatctgcctggcccagaacctcgtgagtgacatcaaggcagtgaaagccaactggtgaggcnncagaggccatggcacatgcctggcnnacncaggctctggggggccccccagnncctcctactatatcctgacgggcaggctgcaga

SEQ ID NO: 591956 - DNA, 1097 bp, Homo sapiens
  misc_feature (1010)..(1011): n is a, c, g, or t
  misc_feature (1036)..(1037): n is a, c, g, or t
  misc_feature (1040)..(1040): n is a, c, g, or t
  misc_feature (1063)..(1064): n is a, c, g, or t
ccgggcaaggaggtctggatgctgagggcggtccctgaggggcgggcggggcccgaccggcgctctgtgtggccgaggccatgaagccgcagccgcccggctaggccccgggcggctctagcccagggcggcccgcggggcgctgggcctggctcccggctccggtttccgggccggcgggtggccgctcaccatgcccggcaagcaccagcatttccaggaacctgaggtcggctgctgcgggaaatacttcctgtttggcttcaacattgtcttctgggtgctgggagccctgttcctggctatcggcctctgggcctggggtgagaagggcgttctctcgaacatctcagcgctgacagatctgggaggccttgaccccgtgtggctgtttgtggtagttggaggcgtcatgtcggtgctgggctttgctggctgcattggggccctccgggagaacaccttcctgctcaagtttttctccgtgttcctcggtctcatcttcttcctggagctggcaacagggatcctggcctttgtcttcaaggactggattcgagaccagctcaacctcttcatcaacaacaacgtcaaggcctaccgggacgacattgacctccagaacctcattgactttgctcaggaatactggtcttgctgcggagcccgaggccccaatgactggaacctcaatatctacttcaactgcactgacttgaaccccagccgggagcgctgcggggtgcccttctcctgctgcgtcagggaccctgcggaggatgtcctcaacacccagtgtggctacgacgtccggctcaaactggagctggagcagcagggcttcatccacaccaaaggctgcgtgggccagtttgagaagtggctgcaggacaacctgattgtggtggcgggagtcttcatgggcatcgccctcctccagatctttggcatctgcctggcccagaacctcgtgagtgacatcaaggcagtgaaagccaactggtgaggcnncagaggccatggcacatgcctggcnnacncaggctctggggggccccccagnncctcctactatatcctgacgggcaggctgcaga

SEQ ID NO: 591957 - DNA, 1061 bp, Homo sapiens
  misc_feature (974)..(975): n is a, c, g, or t
  misc_feature (1000)..(1001): n is a, c, g, or t
  misc_feature (1004)..(1004): n is a, c, g, or t
  misc_feature (1027)..(1028): n is a, c, g, or t
ccgggcaaggaggtctggatgctgagggcggtccctgaggggcgggcggggcccgaccggcgctctgtgtggccgaggccatgaagccgcagccgcccggctaggccccgggcggctctagcccagggcggcccgcggggcgctgggcctggctcccggctccggtttccgggccggcgggtggccgctcaccatgcccggcaagcaccagcatttccaggaacctgaggtcggctgctgcgggaaatacttcctgtttggcttcaacattgtcttctgggtgctgggagccctgttcctggctatcggcctctgggcctggggtgagaagggcgttctctcgaacatctcagcgctgacagatctgggaggccttgaccccgtgtggctgtttgtggtagttggaggcgtcatgtcggtgctgggctttgctggctgcattggggccctccgggagaacaccttcctgctcaagtttctggcaacagggatcctggcctttgtcttcaaggactggattcgagaccagctcaacctcttcatcaacaacaacgtcaaggcctaccgggacgacattgacctccagaacctcattgactttgctcaggaatactggtcttgctgcggagcccgaggccccaatgactggaacctcaatatctacttcaactgcactgacttgaaccccagccgggagcgctgcggggtgcccttctcctgctgcgtcagggaccctgcggaggatgtcctcaacacccagtgtggctacgacgtccggctcaaactggagctggagcagcagggcttcatccacaccaaaggctgcgtgggccagtttgagaagtggctgcaggacaacctgattgtggtggcgggagtcttcatgggcatcgccctcctccagatctttggcatctgcctggcccagaacctcgtgagtgacatcaaggcagtgaaagccaactggtgaggcnncagaggccatggcacatgcctggcnnacncaggctctggggggccccccagnncctcctactatatcctgacgggcaggctgcaga

SEQ ID NO: 591958 - DNA, 110 bp, Homo sapiens
gatcctgtggtcatcaacagagtcttcaaggactgtgaagcctggtaggtgtcatcagactgcaggaactgtgtgggaggtcttggggtctgcagaatgatctacaagct

SEQ ID NO: 591959 - DNA, 162 bp, Homo sapiens
  misc_feature (7)..(7): n is a, c, g, or t
  misc_feature (145)..(145): n is a, c, g, or t
ggagaantggcaggtggcaccgatagccatcatctacctctgagtggtgtaccggcaacctggccagtgcatcttcctgccataccgagcagaggtgggtctgctggctccagttcggcatctggctgctcttgtggagctcttncagagctggcagatcct

SEQ ID NO: 591960 - DNA, 178 bp, Homo sapiens
ttatacgccaaaaccaacacaaaaacgactacgaaaacacaacaccaagtcccacagaaccatcaaacccacccaatacaagacactccccaacaaacccaggcatcctcgcccccccaaatcaataaacacacaaacacacgaaaccttaccctcctccatctctacacgaacgcct

SEQ ID NO: 591961 - DNA, 313 bp, Homo sapiens
  misc_feature (45)..(46): n is a, c, g, or t
  misc_feature (50)..(50): n is a, c, g, or t
  misc_feature (121)..(121): n is a, c, g, or t
  misc_feature (126)..(126): n is a, c, g, or t
  misc_feature (128)..(128): n is a, c, g, or t
  misc_feature (147)..(147): n is a, c, g, or t
  misc_feature (154)..(154): n is a, c, g, or t
  misc_feature (158)..(159): n is a, c, g, or t
  misc_feature (161)..(161): n is a, c, g, or t
cgaccctctatgtcatcacgcttcccttctggcagtgatccgtgnnaatngtactttgggaacttcctatgcaaggcagtccatgtcatctacacagtcaacctctacagcagtgtcctcntcctngncttcatcagtctggaccgntacctgncatnngncacgcgaccaacagtcagaggccaaggaggctcttggctgaaaggtggcctatgttggcgcttggatccctccctcctgctgactatcccgactcaatctttgccaacgtaagtgaggccagttgacagatatatctgtacccgttctaccc

SEQ ID NO: 591962 - DNA, 153 bp, Homo sapiens
ggggtggcacttgttggcgagtagccttgctccaatgtttcaaacatatgatgcctgccgggtttgtgctactgccgcacttttctggcgtcttctattttaaacccttccctcttccttccaatgttaactgcatcttcccagcttgctcca

SEQ ID NO: 591963 - DNA, 465 bp, Homo sapiens
tgggcatgtgcctctcacttagctacctgacaggctgaagcaggaggatccatgagccccggagttggaggttgcagtgaggtatgatcaaagcactgtatgcaagcctgggtgacatagcaagactctgtctcaacaacaacaacaaaatctggaacaaaacacatattggctaggcacggcggctcatgcctggaatcccagcactttggaacaccgaggcagttggactggttcagctcaggagttcaagacccagttgggcaaatggcaaaaccttgtctctacaaaaaatacaaatattaatggggcatagtggcacatgcctgtagtccccactactcggaaggctgaagtcgaaggattgcttcagcctgcgaagttgaggctgcagtgagctgagattgcaccactgtactctagtcagtgtgacagagtgagaacatttctcaaaaacaaacaaaa

SEQ ID NO: 591964 - DNA, 1168 bp, Homo sapiens
ggggggggggggcgcccctctgttttcttgttggaccccccccccctccttcttcattttgattctttctttctgtcggctcttccgctctgattgctcttttgtgttgagctgtgggtgttgtcgctcctctggtgtttctttcttcaatttgtgtgtttttttgtttctctcgttctctgtttggttgctgtgcctgtggtttgtagatggatgtagttcttggtgttctctcccacttcttctcgtttcttgtggttgaggtcgttttctttttgtgtgtttgtgtgtgtcttgctcgttgtgtttgtggtgtctcctcttcctattttctccctccttcctctcctcctgggtcttcttgtgtctgcctcggtctgtgtgtttttttttgtgttttcggctctgtgttattgtgatttaaggtggtattgccgttgtggtgtgttgctgttatagattaggttagtgggctttcctcattccttctgtttttagtatactgccctctccctaccgttcgggccttttttgttttgtctgtctttcagtttgagtgagagagtgagcgcctctcgtgtctattttttttcgtcgtcgctgtccgaggacagcattattggtttctccccgcgctgttctttctgctgtctctcgcctcctcgcctctcctgtctgtcataacatttagatgtcgactgtgccgggtgtgcggtgtgtctctcgtgagctctctagactcctctctctgtctgtctctttggatcgttctcttctttttggtctctcccactccgaatgtacgatgacgttgtcttgtctttttctcttctcttctcttctcttagatcgacttcgctcgcgcgcgcgcaccaccccccctctctctcgtgttgtctgttgagtgcgggagagagggctctggcgtccacccccctcctactttcttttctctctcctgtctcgccgtgccgcccagctcttttcttgtcgtcgtgcacggctccttttctggatcttccaccgctccccccccccctgcgtggtgtgcctccctcctcgtcgtggcaggggtcgtacctcttgctttgtgtggtggcccccccccccccccccccctcccctctcttgttttgaggggggggggggcgagaaaaaaaaattatga

SEQ ID NO: 591965 - DNA, 93 bp, Homo sapiens
gcctcggacaccgccatgtattactgtgcgagagtgtttttaccgcacgggcgggaagaagcagaagccccctttgactactggggccaggga

SEQ ID NO: 591966 - DNA, 426 bp, Homo sapiens
gctattgcttagtattgactatgctatgcttttaaatcattattttgaaagtgtactcttactcattaaaaaataaatgttgactataaagcatcctcaggcaggtccttcaggaagtattccggaagaaggcactgttatcacaggagatggcagctccgtaaatgttattgcccctgaatacctttcagtggggcaccatgtagaggcaggagacagtgatattgatgatcctgactctatgtgggcctaggataatgtgtgtgtttgtgtcattgcttttagaaaacacactttaaaaagtcaaaacaaaagtttcataaaggaaaaaagttacagtaagctaaggttaatttattattggcgaacattaaaacaatacctttattgtcactaagtctacagtgtttataaagtctatagcag

SEQ ID NO: 591967 - DNA, 1097 bp, Homo sapiens
tggtgcctcaagacaccggtttagtgggggacacgactctgcaatagggatgacaggaatcgtaccaaaaatagcgacgtctacggggccccgtgagtggggctagaagggtacaggtgccccccacccttcaccccttgtgtgcaacaattaaacttctcacgcctagtggaccagcaaagacgtggcagaggtggctcctcaacagggacacaaaccttctctgtgccagcccagggaccccgttcttgtgacccttcaccttctgtgccacttcataaggcacgtggtgacctccctttgggcgtggggtgggtaccgccagcccaccctcctataagcccgccgggcctttccacctcgtggtccgccgtggggcgtgggatcgtgggtcccagcgcgtgcccccgtgggtggcttctcttacccaattacctttaggcgctcccccgatccgggggggtaagctcactaagctaatcggcccctgagggcccattaccggttctgagccccccagcctgcctctccgggtctggacagccgggagccctcttccccttcctgcgaaggactgggaggggtctatccgtgatgggtactcgggccatagggcggggaacccgtaacacctgggagtggccgggggacccataacccggcggctcggaggtgcactcgcacggtgccagggccctgcactcagggcgcccacgtgccacacggggccagaacaagggacacgaggagagggcaccccaaggccaggatcgacttccgcgccctggccgcaggacaagggccagagttcggcccacacgctgaccgttgcacgcgtcacccaggatgggagctccaggggacgaggcagagcgaaaggggcgggaaatagagcccccacccgaggcagcgtgagaaaagagcgcgccaacgtggcgggaccccagagaaaaaagagaccaggttacgacgcgcccccatcccagagtcacagaaaacagccaggacccacgacgaaacgcaacgacagcactcaactgaggtgcaagaaacagaaaagcagaagcacaaaatagagaacggaagcgcgtcgccga

SEQ ID NO: 591968 - DNA, 111 bp, Homo sapiens
cattaccaataagtataggcgatagaattgacactgcgcaataatatagtaccccaaggtctagattgaaaaattcttacccccgcatattctagcaaggcgttaaccccc

SEQ ID NO: 591969 - DNA, 467 bp, Homo sapiens
cgcgcatatgtgaaaccccgtctttgctacaaatagaattaatagcctggcgtcatggcatgcgcttgtaatcccagctacttgggaggctgaggcaggacaatcgcttgaacctgggaggcgcaggttatagtgagctgagattgtgccattgcactcgagcctgggcaacaagagcgaaactccatcttaaaaaaaaaaaaaaaaaaagatacattcgggctcttataagatattgaaggtaagctaatttagtacttccagcactattagacagttcattttctgggaaataccatgctgacccccaaatccacgtgtcgatctccagacttgggaacataatctctattacagtctgatcccattctatatgtatgggcaggaaactaaacagctattagggcccttaaacataacgtaccattgataatagggctatatccgtgtaaagacaccatcagaat

SEQ ID NO: 591970 - DNA, 561 bp, Homo sapiens
gcacgaggtgtatgataatagctagaatagacatactgttgtaagtagaattctgaaacaacttcagattcatttaaacatacatcaattgacagttaagcaagctaagcttaagcaagttaacttgttttgccatttctatcaacgtaagaaatagggaattttacacgacagtaaccctatgtcaacatatgccgttttacaagacagtccaccttgacaatcaagccgtagtaaaacccaccgacctaacatcagttagataatgcaggcccacctctttccattggacctcgacagcccatatctccacatgtcaaaatggtaatcaccaattcctttccccttttcagtatcttcaaaaaccaagacacaaaaaggattttttctaactagaacttctagtttacctgatacatatctattgatttgcataacaaatatataagatagacttttaaatgtacaagaacctcataatttaataagttttattatcctaacataatgtaaacattatagcaacagtttaagtcaccatttgttataagcatgattaaa

SEQ ID NO: 591971 - DNA, 350 bp, Homo sapiens
gtggatgaggtatatactactcattgaagtttctggcacatgggtcatactataggcccgtatcctatacagtgtcgcggaaattgcaactggtgacccttgtgattttacagtgttaagaaatatgttgatcacaacacatcgcccgacttgcatgatgtctctgagataatatccactgatcgagcactatcgaatcatagaaactggccatgctggtgacttatcatggagttgataacaagaagaataaagggcagctcactaagagccctctggcacaaatggaagaagaaagaagggagcaagtagctaaaattaagaagatggagatggagatggagcaggtg

SEQ ID NO: 591972 - DNA, 414 bp, Homo sapiens
cacacatcacaaagtagtttcacagaatgcttcgtctaagttattaagtgaagatatttcattattgaccatcaccctcaaagtactccaaatatccacttacagattctacaaaaagagtgtttcaaagctgcttaatcaaaagaaatgttcaactatgtggagatgaatgcacacatcagaaagaattttctaagaaagattctgtctagtttttatgggaagttacttccttttccaccataggcttcaaagccctcccaatgtccattgcagattctacaaaacagtgtttcaaaactgttcaatcaaaagaaatgttcaactctgtgagatgaatgcacacatcacaaagaagtttcacagaatgcttctgtctagtttttatgtgaagttatttccttttccaccgta

SEQ ID NO: 591973 - DNA, 358 bp, Homo sapiens
tgcttcttgaaactctgaacaggtgataaaggaagctggtagtcttgaagaaacacaagttattaagaggcatacactggtcgttgcccagatgaaacgtgtgtccaggttgccagatctaacgccccccacagggtcaaaccgaggccagcccgtgccaggagagcttctgccattctgccaggagttctgggtagtgagaccctcagtaacgaatgtattccaggagtcagaggaagagaagcagcctgaggtcccttgctcgtgggccaaaggagaaagcctttctcttccctgggtcgctagctcaaccacagatgggactgagcaggtgattattgcaagaagcaggaactgg

SEQ ID NO: 591974 - DNA, 847 bp, Homo sapiens
ctactaacagaccgcagcctcaacaacaacttctgcgatcccgccggtaggaggagaccccatttctataccaaacaactattctgattttgcggtcaccctgaagtatagtattcttatcctacccaggcttcgtgaataatctcccaatattgtaagttacatattccggaatagaaaagaagcatttggatacataggtatggtctgtagctatgatatcaagtatggcttcctagggtgtatcgtgtgagcagagcatatatttagacagtaggagatagacgtagaggacacgagcatagttgcgacctgcgctacctagtaatcatctgatatgcccgaccgggcgtgaagggtattgtaggcatgatgtcgccaaacatctcatggaaggaatatgaatatgatctggtgcagtggtctggagccctaggattcagtcttactttttaagcgtgaggtggtctgagtggtatgtattagcaaactcgatcatagacatccgtattagaggatggtactagttgtagctcattccagtatgtgctatcaataggaggtgtattggcatcataggaggcttgattcactgatgtactctatgctcagggtaaggcctagaacagaatctgagcttaaatccagttcactatttatatgcatcggggtcaattaacttttttccagaaattttttggttatcggaagccgagtatttgataccgtggttaaggaatgaaattatattggaggattattctaagggagataaaatgcgattggaagtgtcaagaagttttataaaccttaacggggttgttgcccaaaatgaaggttttttaag

SEQ ID NO: 591975 - DNA, 281 bp, Homo sapiens
  misc_feature (30)..(30): n is a, c, g, or t
  misc_feature (201)..(201): n is a, c, g, or t
  misc_feature (223)..(223): n is a, c, g, or t
cagctcgtgacggcctccgagacgccagcngccccttctcggctgtgtggcttcgacttcctgattctcccacgacgtccctggccgggagacccgctggactctgcggctggccaaaaggggagggggagccccgcgtcctgggggcccctagcggaaggggcgggggttgcgctgggcatcctgtctggggcatctgtntgggactctgttggtgcctctnacctggcgaggggcctgtggtgtgggtaggggggaagtccctgccatgcttggccaag

SEQ ID NO: 591976 - DNA, 104 bp, Homo sapiens
aggatccccagtccgaacccccgactcatattctagatttattttagtttgtatgtagctgttacctaaatatattttataatccaggttgactgatctagtca

SEQ ID NO: 591977 - DNA, 151 bp, Homo sapiens
gcgtctgcgctggggctcccggaataccccgcccgtccctacgctccttgtgtatcctcgcatccccctcctcagtgaaagactgaccaggatacacaagccgcttcatgtgccgcggcttgtgtctttcctagggaagctatactcactg

SEQ ID NO: 591978 - DNA, 165 bp, Homo sapiens
atctagaggatccctttgcaggctctctaccttgggacagcaggtgagacgggaggccaggagaggaaaggcaagctgaggagagggctctgagccagagaggggcctgaggagtgtgggacctgagagctagcagacgcactttacgtgcttatagcctcttcc

SEQ ID NO: 591979 - DNA, 188 bp, Homo sapiens
gtgcacagaaaatttcacccgcatcgtggacagattgctcgatggttatgacaacaggctgcgtcctggatttgggggtcctggagcagaagtgaaaagtgacatatatgtcaccagctttggacctgtttctgatggtgaaatggaatacacaatggatgtgtttgtcaggcagacgtggattgaca

SEQ ID NO: 591980 - DNA, 785 bp, Homo sapiens
gcggcgttggagtccagatggaggagtacgcgcgagagcctgccccatggacgaattgtggattgactgtggtggggcctttatcgatgggtaccattggtcgggtggctatgctttcaaggcaactgcaaaggtttacggcagttctccagctgggagtaaatcacagactacgagggtagtttgatcagctattaaaagcagggctccactaggttaggaggtagctttgcagtttggggagggctgttttccatgattgactgtagtatggttcaagtcagaggaaaggaagatccctggaactccagtcacaagtggtgccttaacgggagccatactggctgcatagacatggacctagtggccatggttggagtcatgacctgcacctgggtggcattctcctagctttaattgaaggagctggtatcttgttgaccaagatttgcctctgcatcaggtttcccaatggtcctcaggtttgctagagagacccctccgcagttgcctttgaactcagattacctgtcctcatctttggagactatcgactatatcagtgaggacttctttcctaggatttctttaacagaaggagttgtggtgcgagaaggatttcagaagatcacgtgacaggctgtttttaaaacgcgataggtgggacagctatggccaataggtataaagagacatttagcacttttctatttaaggaactagcggggaagggtgcttacagattaatacgttatttattcagaacttgaattggcttgtgaatc

SEQ ID NO: 591981 - DNA, 880 bp, Homo sapiens
tgagtacagcgagaagtgggaccttgtgtgagcgagctgaggggcgcaggaagaactaaagcgagccttgggggaaggtgaaaaatatgggaaaccaaaagtgtggtcaggcagaagatcagaaagaggatggttcggacctagaagctcatagacttctcacacaggatatggtccattctcacaatggatttcctcgtgcacattctcagcgcgtgggcagattgggcttctcaacaccagatggggcggatcttggcctgtgccagggggtccggaggaaaacctggaaaacccagggaaggaaaaaggcttcttctgtccgcaccagaaatttgggatccatagatcccaggcctacaaaaatcgctctctaccaggagcccagcaaatatgtgtgcaaaggatccccaaggatgatgacgactttgaaactttgtgtccccacaacaacaatgtgattgcttcccatctcgatggccagcttgaaggggcgcaatgaatagtgactgtgcttatgagctttgggctggaacaattgtccccgaggaggctgtcacaggcggtggtcaatgcggggaggaaatcaccttaaaaagatattagtgggggtcagtggggtcagaaggaacgttatgcggacacaggagtgggcatttaaatatgcttgtgaagagaagtgtggccccgaagccaaaacctggagagtatgtgggtaggttacaaacttaataaaacgtcaaagttaatgtcctgtggtggcaaatcatcagttttaccacccctggtgtgttgtggcaggtggcttgtggaatggcgggacaactgttttgtcggagagagaatattgagacggggggggaagccaacattggtgtgc

SEQ ID NO: 591982 - DNA, 712 bp, Homo sapiens
gtacttttcctttctgctgccaagtgaagaaggatgtgtttgcttctccttccaccaaggttataagcttcctaaggcctccccagccctgcggaactgtaagtcagttaaaccactttcctttataaattaccagtctcaggaatttcttcatagcagtgtgagaacagaccaatacacttctgaaatatactgattcatcaaatcccatttgactgtagaccaaatgcaaactcagtgtttgtgatccccaggtttcaattagcatggctctgtgtgaggaatatgaaggccgctaaaacatggcagaacctctttcttctacaggaagaccttcttttgatatgtataatcttagaattgtaaccatttgaatcacctttccaacaatatcactaaaggatatatttcttgatcagagaaactaagacttaaaactataagatttgtttactctattaataatccccataaagaaatatatttctctcacttggttatgtagactatatgacatgtagttaattaagaaagacatgtaacaggcccatttttataaacttattttcttctaactatatgttttgccccattaaccaacctctctttatcctttccagtacccatacaccctcccagccctctagtacctatcattctatggtctaccttcatgagatcaagtttttaatcttttccatatgagtgaaag

SEQ ID NO: 591983 - DNA, 923 bp, Homo sapiens
gaaaaacgaccatcagcagggcagtccactcctagccccggatcctgctctagggcccctcatgccccaggtgagcagctctcctaggtcacagcctgctgggctgggtcgcgtagccctagtggtggaggcagaacgatgctgctgtggttagccctttgcctttcatgcccatgcttgattcttgcacctcagcagctgaaggtctcagagcacagtaatcagaaggcatccgatgcattaagtgtgcagcgcttgacaagaccatttaccaactaggccaggattagccactgtggaagggtggacaggcaatgttcagtggcctgggcttgtggcaggaactccaagtgcccaggccttcttggggcagcttagggccctgccttctggtttcatgattgcatgggtcattggtcttggggtgtcctaatcccatatggagaagaacaggggctctaagttctgctctgacttcttggggggtctctgtacctgaggaaaccaggccctgggtgactttgcagatctgtcaccctcggtgagcacacaggtgtcagcatgcaagcaggacagaatggtgactggggtgccttggtgagctgaggtatttcctaaggcaggtagcacactgtgggcaaactggggctacataaaaacttatgtgcgcaccgccgccacaaagaaaaacacaaacattgtgggccgcactcacccaggaaaaagttacaacacactgtggggcgccgccactgattagcacagtgcctacgttccaaagcacctgtcagacatcggttgagtccacacacaggcggggacgcggttgtcaacccaaggatgcgccatggtccaacggacaggccacaccccccgcgcggaccacaaacacacacacaacagcaacgcgacggcaacgacga

SEQ ID NO: 591984 - DNA, 505 bp, Homo sapiens
  misc_feature (55)..(55): n is a, c, g, or t
  misc_feature (76)..(76): n is a, c, g, or t
  misc_feature (189)..(189): n is a, c, g, or t
  misc_feature (211)..(211): n is a, c, g, or t
  misc_feature (254)..(254): n is a, c, g, or t
  misc_feature (275)..(275): n is a, c, g, or t
  misc_feature (324)..(324): n is a, c, g, or t
  misc_feature (429)..(429): n is a, c, g, or t
  misc_feature (481)..(481): n is a, c, g, or t
atttttggtcccgaggagggtggcccgggtatcttcgatttttgaggaaagaaanggggggaggggggaggtgaanaggttggggaagttagaggttaaattgggcgttaggggacgttggagttgattagtaagggttccggggaggtttgggggcagtagagaaggggtttgggcggggggcttganaggttaggggtaagcaggagtnagggtggggggttcaggttagagaggtaaggggttagttgganaggggatggggagacggtttnacggaggttaggggtaaaaaggaacagggttgaagcgttagggttcganaggttaggggttggcagaggcggagtggggcaatgggggtaaggggtaggggattaggggggggtagggtgcattggtagattgcgcatgggatttcagttttgngagttgttgggagcttttggacggtggacttgcgcttgggaccgcgttcgtnttgtttgcagcgcatggccgggaa

SEQ ID NO: 591985 - DNA, 575 bp, Homo sapiens
  misc_feature (26)..(26): n is a, c, g, or t
  misc_feature (62)..(62): n is a, c, g, or t
  misc_feature (65)..(65): n is a, c, g, or t
  misc_feature (80)..(81): n is a, c, g, or t
  misc_feature (88)..(88): n is a, c, g, or t
  misc_feature (109)..(109): n is a, c, g, or t
  misc_feature (132)..(132): n is a, c, g, or t
  misc_feature (178)..(178): n is a, c, g, or t
  misc_feature (182)..(182): n is a, c, g, or t
  misc_feature (199)..(199): n is a, c, g, or t
  misc_feature (245)..(245): n is a, c, g, or t
  misc_feature (290)..(290): n is a, c, g, or t
  misc_feature (297)..(297): n is a, c, g, or t
  misc_feature (300)..(300): n is a, c, g, or t
  misc_feature (303)..(303): n is a, c, g, or t
  misc_feature (362)..(362): n is a, c, g, or t
  misc_feature (398)..(399): n is a, c, g, or t
  misc_feature (402)..(402): n is a, c, g, or t
  misc_feature (414)..(414): n is a, c, g, or t
  misc_feature (554)..(554): n is a, c, g, or t
gcgaaaaaaaacaccagccgaaaccnaccccccggaaacccccccagaccacgaagcacccnccnaacccggggccaccnnaaaaccncgccccccccgccccccgcanaaaccaccaccaccccaacccgnacaaccaacaaccccaccgccgacccccaaaccacaccacgcgaancccncaacaccccacccaccncccacacacaacccaccccccccaaccacaacccacaaccccaccncaacccacaacccaaaccccccacacaggaccccaccaaaaccanaccccancanacnacaccacccaccccccccacaacaaccccacccacccccccccccacccacacccaccnccacccccacccccccccccacacccccccaaaaanncancacacaaaagcnaaaccaccacacccaacaacccccaccccacacccaccccccaccaacccaccaccccaccccccaaaaccgaccacaaccacacgaacccacacgaccaccaccccaccaccccaccccccccaacccgaaccccccanccccaagaccacccccccccc

SEQ ID NO: 591986 - DNA, 1140 bp, Homo sapiens
agcggagccagtgcggcagccgcggccgccccttgtccagcctctggcgcccggtgacccgatgcgcgtcgctcgcctgccgcggagccgcgcgtagcctgtgagcgcctgggcgaatggcggagcatgaagaaccaacagccggccgcgcccccgatccacccttgatagagcccttacctgcctgccaagaagtcccaagtttgaacacttaaaacttgtgcaccaaaagagccaaacatagtgggaaagcaaaaatcaaccttacagggaacaagacacccactattacgcaattcgtggaaccaggtcaaaccaacgggagccaacccaagtgaaaggcaaccttacccacatgtgaaacaacttcgctaacgcaaaccccagcggataaattaccccgtcgctaattcatcaaaaacagatggatcaaaaactaacaccatggaaagaaccgcctatagccaattagaaaaacactccaaggccaaacaatgggacaggcagaagcccctaaacacccattgcgcaccagcagcacttgccaccacacaaccattaacccacacccgggggtaccacccacaggacacacacacaccagacttaaccacaaagaggccaccctgagtcacaacacacaccaatatcgacagctaaaggacaaaaacccccccatagcagtggcaaaaacacaaaatgatccacagacataatacacactaatgtcacacagcacctatgggaaagtggaaaacaacactgtgccaattaataacgaacagaaggcctataaaacgagcaccatgtggggctatcgcgagccacacagacaacaccccatttcaaccacatatgacatgtgaaacgcgccagagggatactacacccaagatacgcaccacgaccggaaaaaacaccgaggacacaacataacgatgtgcggtgaaaccagacaacaaccaacacgacgctgttaaaataatcaaaggcacgaaacagcgaacaatacaacattcttacccaaatgataggcagcagaagaaacaaccctctgttgagcgaacaaaatcatcacgcacacgaaatactatacagcacaagccatccccccacgttgagcagaacacgcgctcactt

SEQ ID NO: 591987 - DNA, 170 bp, Homo sapiens
gagagtactaagctcttgatctaaggtctatgcaactggcactcactgcggaccaggacattcaatgccagacagcggtagggctggtactgggcggaatgccagatcctgggcaacagctagcctttctgctcatggttctctggtagaccacgacgatggcctcttgc

SEQ ID NO: 591988 - DNA, 253 bp, Homo sapiens
atatgaatgtacctcaagctattttatattaaaaaaaaacaacaaggaaaagagacaacagtgcctcatgttttaagaaaactactgctcagtaaagttgtttaaaccactttctggatagctacatgacaattttatattaacatggtatcctaaccttaaggtgaacactgatttttattagttgtttcacagtacaacatacttgtattggtatttttaacttgcagtattccccaatgtcagcagtaat

SEQ ID NO: 591989 - DNA, 465 bp, Homo sapiens
cgcgagctcgcggcttggtgccgggggcctgtcctgagggtagaggatgtgagagggatgttggccattacggggtgccaccacctcagtctctgtccagctctgggatcttatttggactccagctgcttctggtgattcagctctgctatgtccttctggagagactcgcagaggttgagagcagagcacacctccccaggacggctcatttctcctttaatgatgtccaggatgacaaggaaggtaagaatccactatctccttgcataaagcaaactttttcggtatcgcgaaggccagtcacaggtccttctccaaggttaaacaaggatctcctcctcaagttggcattgtccttcagcatatcaccagctgcggtgaccacatctttgcatatttcgcccgggaacggatttccactgttggcttaggtccgaacggtctggaaggccgtgcaacccg

SEQ ID NO: 591990 - DNA, 124 bp, Homo sapiens
cgctgcccgatctgcgctgacgtgcggtgaccgatctggtcgagccgggttcgacgatgaatgccgctgaccattgctaccgcgctgcaggccggtgcggtgaccaaggacaccatcatcgata

SEQ ID NO: 591991 - DNA, 220 bp, Homo sapiens
tgtgtcatgcagctcgcaaattactgactctggctgagcacagtggctcgcacgtgtcatcccacaatgctgggattacggtcatgagccaccgtacctggcccaagctcttgtctacttctctactacataaactcacagaccaaacctgacgccatcgggagggttctgggacaggacggggcacattatggcctcaccctttcccaccccttatgct

SEQ ID NO: 591992 - DNA, 450 bp, Homo sapiens
ttatgcatggttcactccctgtctctgctgtggacaagacttcgagagaatgagaccatgacttactatcactaatgacacgggccgtttgagcaaggaatacattgaacgtatggtccaggaagctgacataggtacagcgctgaagataacaagcagcgggacaaggctgctcgatccacgaattcacttgaatcctctgccttcaacatgaaagctactgtggaatgatgagagtctgcacaggccaagatgaacgatgaggagcaacagaagattctggacgattgtactgaattgatcaggtggcttgctaagactcagacctggtgagaaggccgaatcggaactactctagcagaataggagctcgggaccttttgcaagcccatcatcaccaagctgtaccagagtgcaggaggccattgcatgagcgcaatgccgggggta

SEQ ID NO: 591993 - DNA, 875 bp, Homo sapiens
  misc_feature (87)..(87): n is a, c, g, or t
  misc_feature (169)..(169): n is a, c, g, or t
  misc_feature (176)..(176): n is a, c, g, or t
  misc_feature (184)..(184): n is a, c, g, or t
  misc_feature (193)..(194): n is a, c, g, or t
  misc_feature (208)..(208): n is a, c, g, or t
  misc_feature (213)..(213): n is a, c, g, or t
  misc_feature (218)..(218): n is a, c, g, or t
  misc_feature (241)..(241): n is a, c, g, or t
  misc_feature (243)..(245): n is a, c, g, or t
  misc_feature (247)..(248): n is a, c, g, or t
  misc_feature (268)..(268): n is a, c, g, or t
  misc_feature (272)..(272): n is a, c, g, or t
  misc_feature (284)..(284): n is a, c, g, or t
  misc_feature (305)..(306): n is a, c, g, or t
  misc_feature (324)..(324): n is a, c, g, or t
  misc_feature (328)..(328): n is a, c, g, or t
  misc_feature (339)..(340): n is a, c, g, or t
  misc_feature (347)..(347): n is a, c, g, or t
  misc_feature (352)..(352): n is a, c, g, or t
  misc_feature (360)..(360): n is a, c, g, or t
  misc_feature (370)..(370): n is a, c, g, or t
  misc_feature (375)..(376): n is a, c, g, or t
  misc_feature (489)..(489): n is a, c, g, or t
  misc_feature (495)..(495): n is a, c, g, or t
  misc_feature (510)..(510): n is a, c, g, or t
cttgcaagaaacaataacaaacgggaggaggaagcgattctggggtttctgtgttgaacggttctgtccgcgaagatgcgcttcggnctctgtcaggggacttgaacgggcttagtgggcttcagccagcttttctccaccggttccccacggggaccccccccccccnggccgtngaaagggngggcgtggnngccggggggctacncggcnggagntcgtgccaccgccagagtgcccngnnntnngagccgagtggggaggagtncacnagatccgctcanttaatcggccgaatccggccnntgggcggagaaaaccggnatcngcaaaattcgnncgcccanggacnggcagccnccattggccngtganngtacaaagcttaccgtttcactccaagagtccacgagcctgaatgaccctcggaggcaaggaccagagtgacgatcgggatatctgggactacagctagcaaaattgggggancttcanggatctactctgaanatccctggggtaggacgagcaaaagtccgggaactacctgattctgctttgagacacacgatggttttgccagcaagcggaagggttctggcaaacttgggtccccccaaagaagaacagaatgtggctccctaacggtgggttagtccgccatgggggagtactcgtgccagggaacaagggacaccggcggaccctcctttgtccgaacagtacacaattattttgaaacaaccaacttctgatagcccctgatgtgagctttgacccaagtctgcgggtgttgtagcccccttatgggcttgttcacaaatctgctctaattttcgaactctttcaccgaaacaccgtggtcgaccgtaagt

SEQ ID NO: 591994 - DNA, 544 bp, Homo sapiens
ttttatgagctccacttggcctttattacaggcagatttttaaaggcaaaaaaggagggggacaaggattggactgatacaaagttctgccgcggattctcattgatttacagaaataacattgattagtgattggctacccattgttaagccttagagtgtgggatgttgtgtccagtgaggtgttattaggttaattcatagctacttgtggcaatagcaggcagttttgacagatgaatacatagctctaaagggggagaataagatgtgattgccgtatcatttgaatgcttctctgggcctaataatttgaaagagcccacattcctcgataaaagttcttttctttccttgggattaagttagatgataaatttacaatgtttagcatgccgatttatatgtattaagtattcataaagtgttattccatgtgctgagcgaggggaacaccctcccacgtgctcccatgagccctatttctggcagatgtaaagattttttttaaatggctttttttggccacatctaggaagtaaga

SEQ ID NO: 591995 - DNA, 797 bp, Homo sapiens
taactggatctgatctgtagctctttttaagtggtgaaagcaactgcattatgggattcttcaaattcagacatgaatgtgtattaaaatgtgtgtgcttacctttaatcctctccccaccgacaattaggaacacgtttcgtccgaattactgttggcaagattaccaaagaaaagttgtgaattagaatcccagcaccgggcacggggctcacgcctgtgatcctagcattttgggaggtcatagcaggtggatcacctgaggtcaggagttcgagaccagagggactaacatggcgaaaccctcgactctactaaagatacaataaattatgccaggcatggctggtgggccgcctgtaattcccgactactcgggaggctgtaggcaagtgagaattgcttgaacctgggagtttggaggtcacggggagctgatatcacgccagttgctactccagtctgggcaatcagagcaagaactctgtctcaagtcaatctatccatcaagcgataagaaccccagaattgtataagctacatgtgtttagccccctttttcaaaaggtatatgtgctcgcttggtagttatttcgaacattctggagttttgctacatatgcttttatcaagcctctttaattaaacatcattggcctgatttgagagataactggcgtgcttcccgataggtgtttgaatgtactgtcagtcgggtcacatcaacgcgtttaccggacaaattacaaaaaatacacatatttggggcgtcagctagaaattgaaaccaatggggg

SEQ ID NO: 591996 - DNA, 846 bp, Homo sapiens
tcaagggaaatcaattcttcaatgattgaaaaatctcagggccatcgggggccggggggtcccggaccggggggaaagtcgccagtatttgatgaggggctgaaaggttgcgttcccaaagttcgggtaagagctgggaaaccgctggccggcggggacgggggccccccaaggctggtcggggcccaggggctggctggtccgcaaagagcgcacaaggaagtgtacatgacgcgccgatagaggtccaggccagccgccacgtatgtacgccatcgctggccagaacagaacgccccgtgagccacacggaggatcatccccacgtattgggtacgccatctggattgggccacgcagggtcgaaaagtggtggcctcagggtacactggccgcacgggggtgccaggtgtaagaagggcccaagagatcgcgggggccaggacacctccattaaccaccacagcacacagctgctggtgttggcaccacagggcccaggacacctccggggagagaaacccttttctgagaatttgcccacgtggccatcccagcccagggaggccagggtaaggtaagagaaggggccacctcgggggggactaacttaaaagggtccaggggcgccagataaaagggaccatagccggggggggggccacgacgaagagcccataacgaactgcggtacagggcaaatcacccataaacatcgatgctgttaaacgggcaaaaaccacagcacccaacacttcatgggccacgtataacggttggggaccacaacaaaaaaaatccttcggatttcgcacaagaacaaacaagggcagtccctgtgacaat

SEQ ID NO: 591997 - DNA, 182 bp, Homo sapiens
aatatcgagccggaccggttgaccgtggcttgtgggttggacttactgtctgggagtagcagagatggaagaggtagaggaggtggaaggagaggcaggagaagccaacacactcagtgaatttgtttttatttttttgtagagatggggcctcagtatgacagccacggctcaaccctggt

SEQ ID NO: 591998 - DNA, 117 bp, Homo sapiens
ctgcttgtgacttagaggatcccgtctagcctcgccgtcgacgcgggtttcgtgttaagtgctgaccgctgtgttcccctcaacaacggctgcggctgctgggccaatggcacctac

SEQ ID NO: 591999 - DNA, 415 bp, Homo sapiens
tctgaatacctcatattaaatagaatcattaaatatgtgaccttttgtgtttagcttctttcacttagcataatgattttatggctcatccatgttgtagcatgtatcagtttttcattccttttcatggctgaataatatttcattgtaagtaaataccacaatttgtttctccattcatatgttgatggacatttgggctctttccaccttttagctattgtgaatagtgttgctatgaacatacaggtacatgtatttgcgtactagttttcatttcttttgggtaaatacctaggagtggaattgctgggtcatatggcaactccatgtttaacttttagagtaactgtcaaactgtttttcacagcaccttatatgtatactttacaataaaaaatttttaaaaacccaa

SEQ ID NO: 592000 - DNA, 732 bp, Homo sapiens
  misc_feature (245)..(245): n is a, c, g, or t
attgcccttcgttctctctttagctcggcttatcctatgggtgtgtttcgtccagatgcacacacgagtgaggtggctgatcgtgttatagattagggagacgacaatatcacagcctcggtgtggattgactttgctcaatatcttcagcagagatcattagaagatcttgtataattagcgagtgaagtatctgaatatgcataatcatgtgttgatgatgagtcagctgagactagtgacanatcactacatacactgtgtggagacaaatgatgcacagatgcaactctgcgtgagtgctactcgcatcacaaagatgacaacccatacctccctcgattagggagaccatatgttgatgagatgtgcactgcttttcatgacaatgaagagacatttttgaataaatacttatctgaaatagccagaagacatccttacttttatgccccggaactccctacctctgctaagaggtatcaagctgcttttacagaatgcagccacgctgctgataaagctgcctgcctgttgccaaagctgcgtgaacttcgggatgaagggaaagctccgtgtagcaacagagactcaagtgtgccagactccaatagttcgaggagctatcatagcatgggcagtagctggcctgagccatagatttcccatagctgagtttgcagaagttttcgagctagcgacagatcttaccatatccacacggtgctgact

SEQ ID NO: 592001 - DNA, 272 bp, Homo sapiens
  misc_feature (38)..(38): n is a, c, g, or t
tctacaggatccttgagtgggtccctgcatatcgtctngggagataaattgctgtatttcctgaattgggggacggcctacgcggccatcgaaataaacaaaaatacgcgagagaggttgctcagccttaggctgcggcagcttctttttgctcgcgaactgcagccagagtacgagccagcttgctggtagcgccttgaatcacgctcatcagctgcgaaatggcttcgtcgcgggtcggcagtgttgccagtacgtcgatttggttagct

SEQ ID NO: 592002 - DNA, 321 bp, Homo sapiens
ctatttccacaggtctaggtaggctcacacaaaaatgagtgacatatgatgcaggagaacatagcaggattatcatcacacagaacgacaaatggaataaaggagagagatacaattcaaaaaaataaaagatagtaagtaagtgataaaatggccattggtaaatccacggatttggtatcacataaacttacagcaaatagaatgataaacagttgtacaatttacacatgatcggacatttaaaatttcttgcatcagtaactggaggttctttcatatccccgtttaatactcaacttcttctagagtttaatggac

SEQ ID NO: 592003 - DNA, 119 bp, Homo sapiens
aacaaggcgcggggtccccttatccgtgtttgaccggctgacagggctgtccgcggtaaacgacatcttgcagtatttgtcagaactgtccggtcgtccggtgacgtcaatataccgca

SEQ ID NO: 592004 - DNA, 1015 bp, Homo sapiens
agggtctcactctcacccaggctggaatgcagtggtgtgattgtagcacacttggccaccaactcctgggctcaagtgatcctcctgcttggcctcctctgagaagctgggattactggtgcacaccaccacacctggctaattttttatttttttttatttttggaaatagggtatggctatgtgccttgggcccgtcatgaactcctagcctcaggtgaccctcccacctcaggcctcccaaagggtgggattacaggagtgagctactgcactgggccaacatgttaatttttttttttttttttggaaagtggagtctcccaggggggaatgcaagggtgcgatctcgatttcacgggaatcttcacctcccgggtttcgagcgattctcccacctcagcctccgtgagatagcgttgggattacaggcaccgttgccatcacgctcggctaatttgggtgatttggagcagagtagggagtttcaccatgttgggccaggtgatctggcactcccattccccccacatttcccaaagtgcggggattacgggcataagccaaaagccacctcacccagccaaattgttacatcttaattctgggatttctcacggcagggtgggggggcgaaataaactcttcaaaggctaatctgggatccctgtgaatcaataatctttacacaactgcggttcaaaatccctcctttcccttttccgagtaattccatccatcttattagaagggaaggaataggctgtgggtctgtacccctgccatctttcatccgtgtgaagggttgccgggatatagggggcttcagcgaaccgctacaacggctaaaaagggaggccggaatggtgccggaccacgtgtcggtttcgcttaaacgcgcgcctcgaaagcggcagccgcggttcaaccccgcgggcacacccggtcgcagcttaaaggggagcaggccaggagaggagggcacgggacctcccataaaagcgactatagtgcg

SEQ ID NO: 592005 - DNA, 213 bp, Homo sapiens
caagccctcgcgcagggtcgaccgggtggagaccacggccaggggcgcggcctcggcgatttcgctggcgagcttcagcgccgcggcccgcagctgatcttgcgccaccagctcatagaccaagccccaggcgagcgcctgttcgccagtgatgcggcgtcctgtgtacatcatcagcgccgcttctgctcgcagatcaggcgcggcagagtc

SEQ ID NO: 592006 - DNA, 135 bp, Homo sapiens
acgacacgggccgacgacggaacgacggactactggaacgacggacacgacacaaccgactgactgactgaccgactgactgactgactgaacgaacgactgagggctttacctgactagactgaccgactgacc

SEQ ID NO: 592007 - DNA, 1427 bp, Homo sapiens
ggcgcagcgcagcagccagtcgacgagatgcctatcgccgggaatggagtagcattactcctaggtgtgcagcgcaaggagcaatagagattggcgacatggtagtgagctggagacgtagccgacccacgtctgaacgccctggcacctggagggaagcctggcgacgacctcgaccgacgggaggaccctaggctgtcgcgaggacctagcgacccaggcgaacgcaccagtgtacccgtgggcgatccaccgcgaccttaaccacagagagagatcttgtgactccattggaggatgctgtgggcagtgacgtgcggcggcgatcgcctctgggatccgcgttactctggatacagggcgtcaccacaatcatcgtctatggcccctgagactgacgcgcgttgccgcatcgagctgggccacgtcatgatctactatgagttctggacgtctcgcggggctaccgcacaatagagggaagcactgccaaggatgcaagcctggcgagagggaacgcacgagagggcctcaggaagagctggaagcccccatgggcaggaatccccccggggagtgtttcctaactctattgggcacccaccgagggcacgagacgcaagagaacaacgttatgtgaccgaactctgcgtgcgtatgcgggggaacacaaccggaatactatgcgtggggcacggtacaacgccgcgagtcatggggagcgcgacgtaggggaccttggggcacaaggtcgcccgcggcgaagctccacccttgggccacggcggacacgaaagacaggcgctaagtgacgcaccagtgctccctatgtccccgattcacggccgaaccgaacgatagagcaacacagggcaggatctgtcgtgtcgacacccattcggtccggagacgcaatcatcaccgcatccacaagggcagacgacatcggctaacgaagggcgagcaaaagccccctgggccttatccaagcacccaccacatcgtgaggaacacggccggccaaaatactgcacagtgcgccatgtgtggaacacagccacgcgattcccaccaatacaaatggaacctctaacagcgacaagatgaacacccacacgccgacgagcgacggccgaagaacgggcacacatcaatcaggacggcgagcagaacgaagggaacctagcaccaaggaggtgtgacacaagggcgccattccggacttgaacggagctagttgtgcgcagggaaaaagtgtattacgccatactatccggtacacagttgtgtaccgccacctcgggatatgccatatgcggcgactgaccgaccaacaaaaatcgcacacaaggggggagcggagctccccaagtgcagaagttagtggcaacgaggcacagaattccaacgggcaatggcacaccatg

SEQ ID NO: 592008 - DNA, 598 bp, Homo sapiens
actaactgataactttcatttcacttttgaatttttacacttttcctgatcattcgtgtaaggtgaaactagacacgtttaaaagacatacacaaatctagtacatcaataaccggggatttttcttttttcgctatactatttacacaaccacgggtgtgcttgctaggcaatataaccatcacagaagcaaacgttaggcagaatagtggtaagaaaaaacaaagcaagaaaagagctaccagatatacagacaggcttggttccacattcactactgcattttcaagcgccaagtattaactgcacattttggttcagctagaaaggagggattgttttggtttggttttattctttacttttgggttagtttaacatcagtgcataaatttttcttttctcatttcagcagatggacaaacagatggactctacagctaagtggaatatcacaggtagaggggtgatactgtgagactgataggcctgactattctcaattctccccagtgcagtgttcacgcaacttccctgaatatagggtctccttaacacatctgggcactgcctggatgcgtgcactggaaaacctggt

SEQ ID NO: 592009 - DNA, 296 bp, Homo sapiens
tacacggatacccagccaatcaggacacagtgcacctctctgctccctgtgccccagctagtacatatgtctcttcttgctaggccacaggggcccagagaggattagtatcgacagtttcatcgatgaactgtaacagcatttacaatctgccctgcttgaccttcatcatctatcgtttgtcgttccctctgccaccttcctcctgtatccacagaaacaactgctgactgcaccgtgggaatcgagcccgtctaacctatcctcaattggctaggtaccgagctcaaacttcc

SEQ ID NO: 592010 - DNA, 932 bp, Homo sapiens
gtggcgggataagatgcggagcagttggtcggagatgtggcgagcggtgcagttctgtcatttccactctgctctgcttgcacagacaggcataagttccctggtcgtcccctgctgtgttcttcagtgacgaacacgtcagggggtcttcctccaatggttctccagaccccagaccacctgtgagagcgacaggtgctctctatctgcagtgtagtagggggcgccccatggctcctcgtgaggcctcgcttatgtcatggtcatgatggcacagtgtgagacagaggacgtgatgcagtgcttactgtgtgtggatgtgacattggggcgtcttatgagccaggtactctgaacggtacgggctgcatgatcgtccctgtgacctactggttgtgtgcaccaaattgttgtcgcttcggaggggctggaacgacgaaacatgaccatgtgctactttggatgtgtgactgtctctgccgttgttcactcagactgtggactgtgcttagaattgcgccgtggtcgagcaagcggagcccgtcaagaccaaactggcggggccatcttaccgttgacacgcattggtgcccacggggggctgtggtggcattctcattccagagcccgacctttgttgtacccacaccgcgaagattattaacgcccagggaactccattggcctgccgttgctttagaagcggacagggggacgcgcccttcagattaccgcgaagggtctttacccaaggggaagcggattggcgaagtaggaagcgttagggtagaccctctcgggagggggaacgtttcacaaagtgaccccaatccacacgcccaagtgtagggcattccttttgcccaactggtcaggttttctgtagactttacgccaagaaacagaactgttggcgttgggcacgggaccaa

SEQ ID NO: 592011 - DNA, 156 bp, Homo sapiens
tgctgagattacaggcgtgaggcactcatgcccagcccatgcctggctaattattgtatttttcatagagatggagttttgaaatgttgctcaggttgctcgtgaactcctgagctcaaaactctctatctgccttggcctcccaaagtgctggga

SEQ ID NO: 592012 - DNA, 217 bp, Homo sapiens
cccccccccaattttgggcccgaaggggaccccccccgggggggggggggaaattcccaaaaacccccaaattccccccggggggggccccccctttttaaaaggggggtggttccccggaaacccccaaaaaagggtttttttttggtttttttttaaaccctttttcccaaagggggggtccatttttttttaaaaaaatttttttttcccctta

SEQ ID NO: 592013 - DNA, 205 bp, Homo sapiens
ccccttctgtgtcggggttgaggcgtgagccaccgcacccgggcccttccttcgtcttagtcaatcctatcccacctcttcttccgccagtcccctcaccctgatggtcccaacatcttcatcatccagccatcgtcctggagggggtaccccgacggtgctccgttggaggactctgtctcattcttgtcagtgcgcgttgatc

SEQ ID NO: 592014 - DNA, 195 bp, Homo sapiens
ttgacatgatagaatcgagctcggtacctgttttgctacccacccaggtggtgccacccatatactctcctatcctcaataccttcctccacaacccattattctgttctagataaacctagctgaccccataaatcctaaatcctttccccactcccctttccattccttaaaaaacagccctaaaagctgctc

SEQ ID NO: 592015 - DNA, 171 bp, Homo sapiens
acggccaggagtacctgtgataacggggagtctcacgtggtggtgacttgaacgacacctgacagctggaagtacctgtgtgacggtggtctcaggtggttgagtgactcgacacacagtgaccgctggtagtacctgtgagacgttggtcctcgagtggtaggtgactcg

SEQ ID NO: 592016 - DNA, 625 bp, Homo sapiens
gaccccggtttccggcgggtctttcccgggttggtttgggccttgggctgttgtgggccccttggggggggtcgctttctgccgggcccctgggcctgggcccgtggttggcggtttgagttcggtctcccttagacgttgtgcttttgctgtgcggtggtgacgttagggtcgggcgccgttcgcctggtactgttcgttggctcctggagtcggccgtgcctgttgtccgccctccctggacttcgcgctcctttcattctcttcatttgcttcgagcacattgggttgtgtttccatcactcaccgctctttgagtcctctgctgccagggttctggtgccctgcgcagcgtctctccggttttcggtgtcagatccctcggttttgtgggatgctgccacgtccctggctcagcctgctgtgtccacgtctttgagtctcggagagcgagggttgctcccgcgtctggtgtgggttctcgtatggtggcatcgtgttgcccctaggcggagtgctgcgtgctttccggtggatcagtcgtggtgctccggcctagcctgctgtcccgtcataggtgcctgtcgcatatgtgcccgcccaaattctccaccgtccacgtgtc

SEQ ID NO: 592017 - DNA, 354 bp, Homo sapiens
ccggaagataggacctctgaaaattcaaaaagaagtcaactgactatactcaaattacatcacagttaatgaaacattaagctcacacagatgaaaaagaaccatcatgagaactctggcaaatcaaaaacccagggtgtcttctttcctccaaaagactgcactagtttctcagcaagggctcctaagcggctgaaatgacagaaacagaactcagaacatggacaggaacaaagatcataaagattcaagagaaagttgaaacccaatccaagaaatgtaaggattacagtaaaataatagaggaggtgatagacaaaatggccatgataagaaagaaccaaactgatctaa

SEQ ID NO: 592018 - DNA, 245 bp, Homo sapiens
ccccactcctgcagcagtgagatccggatcaccgaacatttctggaccccaagtgtcagaccattcacgtaaaaacttgagcggtctggcccatcagtgacacccacctcagctggcgtgatgttgacgaacgtcctcctcggggacggcggcccagacggagggcgactccttgtatcccacgatggccgcgtcctgacaggtcccgtccgccatgacgttgtcgatgataccgttgcactccg

SEQ ID NO: 592019 - DNA, 763 bp, Homo sapiens
  misc_feature (341)..(341): n is a, c, g, or t
actcttgatttttactgtaggttcatttctgaaagtagcttgtcgggcttgggtgaggaagggggcacaggagccgtgacccctgaggaggcacagcgccttctgccacctctgggcacggcctcaaggtagtgaggctaggaggttttttctgaccaatagctgagttcttgggagaggagcagctgtgcctgtgtgattccttagtgtcgagtgggctctgggctggggtcggccctgggcaggcttctcctgcaccttttgtctgctgggctgagggacacgagggcaaccctgtgacaatggcaggtagtgtgcatccgtgaatagcccagtgcggnggttgctcatggagcatcctgaggccgtgcagcagggagccccatgcccctgggtcgtgagcttgcctgcgtatggcgtggtgtcatggagcctcatgcccctgggtcgtgagcttccctgagtatggggtggtgtcatggagccccatacccctgggttgtgagctctcctgcatattcatgatctgtcatggaacatgccaagtctagtcatcattgaaccccattctccttggacatgaacccacctacttagaatgctttttatcaggcttctacacgctgtatatagtcgttttgacacacgaattcacaatttacacttaccgacacataaatcacatgttatcccatcctaacccagcttaaagacatccacatttgtactacttcccaagcacttcttttccattacatccacc

SEQ ID NO: 592020 - DNA, 934 bp, Homo sapiens
agaccagcttcttcacaggttccacgagtcatgtcaacacatgcgtgtggctaacacactcaacacagacaatgggtccacgtcctgcagctgcacgccgctgcagctactcctgctgtccgcaccgtctccacagctataaatatgctgcaggagttcgcaatcctcagcaacatcttactgcacagccacaagcttacaactgcaccagcctgctgctccatgtacacggctcaggaaccttcggactgcttccacgctcggccatctgcccctcctcacgagcacacagccaactgtccgcggtgaacgcgcctgtctcacctacattattcaagcccactgccaccctatctctctgcatggctcacacactccacatgcgccatggtcgctcgtgcagactcgcatacctcgcagagactctctgtctctctgcctcgccgctctctcggccgctcccctccgtcctctcctgcgctccgcctgcacgctctctctgcctgtccctccccagctcccacgacagcctctctgaggcgctgctctctacacacccgcacgccatacaccacttgtcctacttggcctcgttccccaaccttgttcctctccgcttggcatctaccgtgactcatgcctcccgcacccccttgcacgcattcactcttgcaccttccccactatcctctactcaattttgccaccaaccttcgaactctctccattcgcgcacgcactacaaaactcgggacgccagcacaacacacccccaccctgcctgcaccacaggccgcacggcaaccgctgcggaccaccccacgaataaacgagtgcccctcagccccgagccactcacccccaccatagagagaacaccgcagcaaagacacccccggcacccgtacaccccaagcgaccggccgaaacgcat

SEQ ID NO: 592021 - DNA, 107 bp, Homo sapiens
cacgtatcagggtactcctatacttgcacacgtctttgatgtcaattcttcttttgtagcccagaatgggatcggtttctcaaatcgaattgcgtgcacagaagtgc

SEQ ID NO: 592022 - DNA, 298 bp, Homo sapiens
  misc_feature (39)..(39): n is a, c, g, or t
  misc_feature (115)..(115): n is a, c, g, or t
caatcccttctccggtctggttgatgcatagcgatcgtnttggctatgaaacgcttggccgtatctggcagtggctaaaaggttcgtcaggcgagccacggcaagagtgattttnatgccagatcgaagttgcgccgactaaatcgtccggtattaaccagttgcgcaacttcatcccataacacatacaaccaacgccgccagatgaacgactccgccactgggcgcgttgcaggtaactccagagcaaatcttccgccagagaattatccattagtcggaacagttcgtattctcg

SEQ ID NO: 592023 - DNA, 682 bp, Homo sapiens
  misc_feature (28)..(28): n is a, c, g, or t
  misc_feature (94)..(94): n is a, c, g, or t
  misc_feature (105)..(105): n is a, c, g, or t
  misc_feature (125)..(125): n is a, c, g, or t
  misc_feature (162)..(162): n is a, c, g, or t
  misc_feature (187)..(188): n is a, c, g, or t
  misc_feature (201)..(201): n is a, c, g, or t
  misc_feature (204)..(204): n is a, c, g, or t
  misc_feature (207)..(207): n is a, c, g, or t
  misc_feature (210)..(211): n is a, c, g, or t
  misc_feature (219)..(219): n is a, c, g, or t
  misc_feature (245)..(245): n is a, c, g, or t
  misc_feature (279)..(279): n is a, c, g, or t
  misc_feature (294)..(295): n is a, c, g, or t
  misc_feature (367)..(367): n is a, c, g, or t
  misc_feature (387)..(387): n is a, c, g, or t
  misc_feature (407)..(407): n is a, c, g, or t
  misc_feature (425)..(425): n is a, c, g, or t
  misc_feature (444)..(444): n is a, c, g, or t
  misc_feature (507)..(507): n is a, c, g, or t
  misc_feature (511)..(511): n is a, c, g, or t
  misc_feature (574)..(574): n is a, c, g, or t
  misc_feature (588)..(588): n is a, c, g, or t
  misc_feature (632)..(632): n is a, c, g, or t
ccagttagcccacttccacctggtttgngaagacaacagagtttgccttcctcatccattactattgttaaggttcctgttgccagatgttccncctctccagtngggtcaactataagcaaagngtcatcaaacacagcaaaggaagatgcaactggatgngttctaatattcaaataactttccnnctttaaattaacnccngcnaanncagtttcntcatttatagtaactccaggcaactntccatttttcaaagccgctagcaaagcaaatgtncaggcatccaaaatnnttccatcgtagtcgaggcaaatcacatcacagtatagaacccagacaagctttcctggagacatgcataagncctctttctgaattatctgngaattttcaatgacatctgnaatgaattggctagccanttgggcctcttctccaggnggtccagatcggaatctcgatgaatacaggggtggtagatccacattaggtacaacggatccnttancaggggcatctgttgatggtgctgcaaattctgctttaactccacagattactgtagtatttnccaacttcactaangcagaaccatctgcggtactaattgaaccgatgttgacagtggnggttctgaattcaccaagttctcttccatcaggacggcagtcctctttca

SEQ ID NO: 592024 - DNA, 146 bp, Homo sapiens
aatttacgcccccgcccttgggaggatgataaatagggatcggtcagtgggaattccgtgcgaaaaagtggtgctgcgaaggactgagccgtcggtagtaatcaaactttagtgcacgccgggtgcgctgtctgcttgcttttttg

SEQ ID NO: 592025 - DNA, 260 bp, Homo sapiens
ttgctggggtactctagagatcccgtgcgccagatcatgctcatgtagcctcactggagggcattgcccggaagatcaagtcgtgctctggcaggcgcgccctggaggatgaggcactctgggccagtgcggggtggaggcctgataccctggagtagcaggcgatgttggaggtaaagtcatggttcctggcccgtgctggaaaagtgagaggtcagactcctaaggttggcaaacaggagaagaagaagaagaagaca

SEQ ID NO: 592026 - DNA, 230 bp, Homo sapiens
atcctagaggatcccagcaacatgggatcgagtcttcagtgttataactgcccttgaagtaagctggctaagcagaggaaaacttgttctgtgtatctttttaacccttaccccctgcacataatcacatctttacacttctttttttttttttttttttttaaaagaggggaagtcggattctcgctctgtcgcccaggttggattgcaggggggccatctcggtccat

SEQ ID NO: 592027 - DNA, 259 bp, Homo sapiens
  misc_feature (37)..(37): n is a, c, g, or t
  misc_feature (92)..(92): n is a, c, g, or t
  misc_feature (173)..(173): n is a, c, g, or t
  misc_feature (239)..(239): n is a, c, g, or t
ggacattaaatctagtatgtatacatgggtgggcatngaagagtaagcttcaaatatctacaaatttcactcacaggggagagaaaagttantgccttcatttatccatatgtgggttcaaagaaggttggacaggtggggtgtggtggctcacgtctgtaatcccagcactnggggaggccgagaggggcggatcacgaggtcaggagatccagaccatccgggccagcacagtgaanccccgtctccacagggtacc

SEQ ID NO: 592028 - DNA, 1297 bp, Homo sapiens
  misc_feature (510)..(510): n is a, c, g, or t
  misc_feature (745)..(745): n is a, c, g, or t
  misc_feature (747)..(747): n is a, c, g, or t
tggccgatctgatcccaattccccgaggagggtcttatattttttcttttccaacatcctgtcctgcggtctcccttggctcttttgcgcccgtatcgccagaaaacgccgggctgttggcacggcgccatacggaaactagcagaaggcttggaaattcttctcttcctcagtgatagactcgagctttctccttcttataaactgtcccgagacgggcatacaccggcccggtcagctggtgtggccatgttaccagtgtctctttcagcaagaatcgtgtctcccctttcttgggggcgccagagggctccctggggagaaagagagatgagactgtttggaacgcggaacttccttcagccgtctggcactgttggcgcctgcagggaactcccgtggaactttgtcccggccttcctctcggatttccaccaaaaaatgtcgccgatgtggtctccgggccaccttctctttggtgaattgccggcgccaccccgtagagcctcncctccaggctatgaaacgccggggccaggcgccgccacctttcgttgtgtggatacacagaaacccgttggtggcacgccgcaacaagattagtgcgccgtgagaagtgtgagcacccccagaacacgctggagtgcccgcttgtgtgagccagactagcgaggcagcgcgccttattggctttttgcccaggcggccctatataaacagtcatcgcggagacctccttatacgngngcgccccgggcttgtttttagacccccacttttggccaacgggccgccctggtatgccacaagtcccttttgtgtgacaacacgtcgtgggggggctttcaaaagacccccatttggcaaatatcaccccaggatatgtatggggccccccaatgatgatatgccacttaagcagggccccgtgggggggacacccagtgaccgccagggaaaaaacaggcccagaagcggaaaacagtgttgtgggccccggccccctcaccagcgggggtaaaccattctcaaaaaaaggcccctttggttgaaacacaagtaaaatcacgcgccggtagagaaaaagaaggaaatgtgccccggcccaaaaaaaaaaagaggcacgccaaacgcacgtagaaaacaacaaggcctttgtgctattagcgggcccaaaatattgtcaagagaaaccccggggaagaaaagagagcaacgttgagcaccaagaaattccctgtagaaagggagcgaaaagactattgaaccaactgtgtgtgacacaagttgcaacaat

SEQ ID NO: 592029 - DNA, 176 bp, Homo sapiens
ggtcgatctctagcaggatccccgtatcccagaaagctatgggacctcttataactaatgatagtcacccctgttcaccccaggattttatcggcttatcaattctgtacaacactatgatgataaattaatgataaagtataattcatgtaatgttcctatttgacttcactaga

SEQ ID NO: 592030 - DNA, 328 bp, Homo sapiens
ccaactcaccagaggcagtttgttttgagaacatgacaaagcctcatgacaaaatgaatgggggtggggccaaggaactgcatgaagaaaccagaaggttgtgtggaagtaagagaaaggatagcagcctagggctttaggaccgctggaaaccaagttgagttttggaaagattaagggtaaaaatggttcaggacctcaccgaaagatctttgtagacaaatgttaggctctccacatgggcttctgcggcaggactcaggtgggattctttggtgaggctctgctgagatctgcaccacctggcccccgtatctccctccactcg

SEQ ID NO: 592031 - DNA, 597 bp, Homo sapiens
ggaggccaatgtgggtggatcatgaggtcaggagttcaagaccagcctagccaagatggtgaaaccccgtctctagtaaagataacaaaaaattagctgggcttgatggcatgcgcctgtaatcccagctactcgggaggttgaggcaggagaatcgcttaaacccaggcggcagaggttgcagtgagccaagatcgcgccactgcactccagcctcagcaatagagtgagactgtctcaaaaaaaaaaaaaaaaaaccggccaatttttcaaacataccgtaaagattatttccagggtgccattttatagtatagcagcagggctttaactctgtgtttgcccagatgcagtctgggggcatggttggtggtgctgggactttctcaggggccatcatcagtatgcttatgggatttggatgacaggcatagcctggggcatatcacctcatggctaaaggggctagagcctttcttttttatgggcacttcttttttggagataggggtcttactctggtcacccgtggctgtagtacacgtgttacaattcacggctcagtgtaggcttaacctccgtgggctcaggtgtatg

SEQ ID NO: 592032 - DNA, 193 bp, Homo sapiens
aagaaggagatccttgagaccattcagctccccctgagcaccctttactattgagcctgggcctgaaacgctcaggccttttgctccatgggccccctggcaccggcaagacccttttggccaaggcagtagcccctgagtgcagccttaccttccctcaggtttggtactcaataaatcggtgtcccttcca

SEQ ID NO: 592033 - DNA, 286 bp, Homo sapiens
caaagtagacgccacacccggctaatttttgtatttttagtagagatgggggttcaccattttggtgaggctggtgtcgaactcctgacctcatgatccgcccggctcagcctcccaaagtgctgggattacaggtgtgagccaccgtgcccaacctgtattttttttttttccctctggggaatctggtagaatatatttggatctcagggctctgaaatttcatggggggggtgtctactttgcttagcatgggacattccttttcaatctagaaacccttgta

SEQ ID NO: 592034 - DNA, 631 bp, Homo sapiens
gttcctcgtctcggaggcagagaaattaactgaaggccatcagccggatagctaggctgatcacaaagtgctaaggttctgggttgcgaaaagagaatgaggctggttcttaaggaaaagactaccagagttaatctaatataccttcgtgtagagaagtgtttgctctaggtagatgttatcacagtatataagcagacctaaataatgagggatagatttgatgtaggaatcttttatagccaaatgagagaatgaaggggttgagggtgaggggggctgtgatggggcatgaggaagagggtcaatgagagtggaagaatgataggtccatagcaatgaattggtattgttgcttttactgctagccctttgtagtaacttcgccgcttctgagtgaaagatcagcaaggaaggacggatcgagtggtgtattccaaagtcaatatggaagctgtcatgtttactggctctcagctaagcaggcaaggatccatacactggatgttctcagaatgcctattggatgctcaggtgagtcggtaaacgatctagcatagggggtactgcgggtagttcctgtaagacagcagattagtgccatcacgcaatgatatggaaaagccctcag

SEQ ID NO: 592035 - DNA, 298 bp, Homo sapiens
  misc_feature (82)..(82): n is a, c, g, or t
  misc_feature (224)..(224): n is a, c, g, or t
agctagcgctgatagctcagtgctcagtacttactgttaatggggtaatataggactactcacaggcttcttagaattaatntatgatacgtaaaacactaagaatggtgtaagcagtgctggcactataatcctagtgctttgggagacccaagcgggaggatggcttgaggtcaggagtctgagaccagcctaggcaacaacactacaagaacctgtctctnaaaataaaaaataaaaaattagccaggcgtggtggcatgcatctgtagtcccagctgctcaggaggcagaggtg

SEQ ID NO: 592036 - DNA, 915 bp, Homo sapiens
  misc_feature (419)..(419): n is a, c, g, or t
  misc_feature (595)..(595): n is a, c, g, or t
catgtttagttggtccttatattccggttcagggaacagatgtgcatgattctcactggtccaggggtgctgccaaacacatggcatcgtacagtactctgaaattcactcacatgagagagagagccatgtgtctccatctgtctctgatcatctgcttgatatcatggtgtcgtgaacaagtaccagtacatgtaggaagggcagtctttcctcgttgtccttatactttgcgtgtctactagcatgtcgtcagtataataagttaccatgcgaattgctgtaaggagctaacctgcttcaagatggcttgggtctaacttttgggacgctggaaggaactccgtatgatcgagtgatcgtcactaagtagtctgaatatgatgaagtgtgcagtggggttgctcattgcgaatgtngagtaggtaaattctcttcagacgtatcatggaacgatgagtggacaggcgagggtacactgcagggttgtactcgtagtactagtcctgaactcagtgagtcgagtaggtattcttgctctcagagcacttctggaaagatcataatcgcatgagtgtagccgtgagagtcacancagtgaaatagtcatgataggtcagtacatgtgtcgatgtaggagcatgggctgaccaatggtcactttgaaggagtctagcttgccatagtgtgtgtagggggaaatgggaacaccactaacttgttgaatctcagtggtgaacatcatttacattcgaatttagtgagtggaacgcatattcatgtaaacctggtggcgtgaattagggtcaggtactagagggttagggttggaccattattaagggaagtgtggttagggattccttttccggtccagagttaattctctagaatagagattggatctgtgatgag

SEQ ID NO: 592037 - DNA, 437 bp, Homo sapiens
tgagtatatctgaagtatgttccacatctttgcattcaaaagacttttcaccagtgtgacatttctcatgtcggtggaagtctgccatttgaatgaaatatctgccacattgtccacattcataagatatctgaccactaggatttgtctgatttgtagtgagttgtgtgctgacgctaatattttttcctaatttctcaaacttctctccattcttgacctcataggcctcatggtgcctggctgaggtatctgtgaaatgtctcctctttgactttgtcttaattatccaatgaccttgtggctgctctaggctgctcccaaagtcaaggtgctgggaaacattccctggcaggccccccaccatcagtctgaaggactctgtttctttggacacatgatcctttggagttaatccttcctattagaactggctt

SEQ ID NO: 592038 - DNA, 401 bp, Homo sapiens
gctgttcttactcagcctgggtaatccagcccccatgtagtccttggctggaaaaggagaggagtgtcagattaattctgaggaggagcggagaaggagctcgcccctgagcctgaggagacctgggtagtggagatgctgtgtgggctcaagatgaagctgaagcaacagcgagtgtcacccatcctccctgagcaccacaaggacttcaacagtcagcttggtaggaggataccccagagagcacctccaatcctgttctttctaaaaagaggaaacttccaataaccacacttttccaatgggaaagatacgcccccagtggctgagctctccacgcaggaggactcagaagtgatcactcatgagggacacttaggagacgatagaggactaggcta

SEQ ID NO: 592039 - DNA, 221 bp, Homo sapiens
  misc_feature (195)..(195): n is a, c, g, or t
cctccattctgagtgacagagcagactctgtctcaaaaaaataataatttagctggtcatggtggttcgtgcctgtagttccagctacttgggtagggactgaggcgaaaggatcacttgaggccaggaggcagaggttgcagtgagctgagatcacgccactgcactccagcgtgagtgacagagtgagacccntatctcaaaaaaaaacaaaaaacaaa

SEQ ID NO: 592040 - DNA, 297 bp, Homo sapiens
atcgcccaagggagtgcgtgatgtgatcatagctcacgcggcttgacctatgggaggctgaggcagagacgataaatgtcttgagcctaggagttcaagaccagcctgggcaacatagcaagaccccatctcttaaaaaaaaagttagatcacctgagcaatacatgaatatgtgccttttattaacaccaaatgcaaataatacatataacatcaaagtcttcctgcaccagggctaccaggttctatcccttctctgtcgtactgaccagtggttatctgcgggggatcctctag

SEQ ID NO: 592041 - DNA, 194 bp, Homo sapiens
ctgttactttttaaaaataggcatttcatcttccaatatttctgttgtaggtaggatcttttcttcagcagattttctgacctgcggttgcagaatgaaatttggggatctctctgtccctctctgcatgcatccacctggctcccagcgtcccagctccttgctggtctcactgtcccttctgtcgtcttctc

SEQ ID NO: 592042 - DNA, 779 bp, Homo sapiens
gggcaactacacgccgctagccactgacccactacatgagcccacatgacgaagcatcggagagacagcttgctctgtgttgtcagaagggagattgaagaaggtgggcccagggtgctgttgacagtataggctcatgtgctgttccaaggtctcatctctggctcttgcctggtctggacataccatgtccacatccgctgtacttaggacttcctctgggcaccagggcagtggcctcaccaagacctggaggcctaatgatgaacatcatactggtgttcgctgtggcttgtacattcccatcagcagacatccgtgtacgggcctgactggccaacagggaagctccagcggaggcacacagtataacgctgcttggcggctacggaggatcagctggaaccctcttgttgaactctgcaccagtagctgaatgccttcacccatggcatgtattccctgtgggtggggagcgcgaacgctactgcagacctgacccactccaactgactctcccacacggacaaccaccagcacctcttagcagaactccctcttaaacacactccgctgagctgctgcccactgggtagtctgggacattcctccctgagcatacacggaccaggacagcccctcaacctctgctatccttatggcgctctcccagaaccctacccaggcccactggcggtgacgtctagcacgcacatgaccagcggctggtgaacgccgccatcctgcttaacctggccacttccccccgccgacccccg

SEQ ID NO: 592043 - DNA, 785 bp, Homo sapiens
taggcagtacgagctgggtggtgaaagggtgagaggggcggtggggctagggtggagagcaaagcacggatgttggacggaaccatcagccaggcaagctggacctggtggatccaggaagactcttctggaagaggtctctgacccctcccgaggcatacatgccgcagccccacgtgagcccaggagtaggggcctaagggcagggtaacctgtgaatgggctgtgtggttctgcaagaaatgtggagccggtggccacggaccaaggaggatgctggccctggaaggggacttcagaatgctacggggactagcagaccactactgggacctgaccccactaaggcccggcctgcatcctcatttgcccagcatccccaactacagcaaccttctcctctcaggccatcataccctggcttgcttgatagtggacaccatcaggggtgtgtccgggattggggtgaggcctgttacatatgcgcctgtatgactatgagggctcgaagctgaggatgacctcgccttcaccagagggcgagaagttccactagtcctgaacgatactgatggtgactggtgggaggctcggtctctgcagctccggagaaaactggctgcattcccggcaactacgtggccgctgtgtgactctattccatgctggaggagtggtactttggaaagatcgggagatggatgcaggagaggcagctgctttcggcatgcaatccccaggggggcttactcatcgggaaagcgagaacagcaaagggggctata

SEQ ID NO: 592044 - DNA, 668 bp, Homo sapiens
ggggcgagaagactcgttcctcattttagggagagccacacttatcactgctcacaatgagaggcgcaaagattaccgcttggcatccaggatctctattgtgccagacctggctaggagcctttggtgaagatcattactgttggagcggcacagcgcaggatgagcacatgcagatactatgatgacgaggacgaataggtgctgtctgtcctacggtcccacatagggctcctggagaatatccacatggagcaactgcccctacgccttgctgcaaggttgcaagggtcttcatggagactggcctatagctcgttagagcacggtaccaggtctaagacgctctaccggaaatcggtatcacttgacagctcggtcctattggtcatgaaggatatggttaatcagatattggtagcatatgcaactcatgctttaaagctcacagaccactattggcacatgcgaagcttggctctacacattcagccttcatgataagggctttaagtggagtgtgaagactctatactctatcactggagacataagttctttagaacttggtgctggatgtggacgatttgcctatggctagatgctgaattataccacggacgatacagatcttgcagcactttcaataatgacattctttccgtagg

SEQ ID NO: 592045 - DNA, 100 bp, Homo sapiens
aaaatgaaaattccccattagcgccttttgtggctacacttaggaattagaacttgcgggatcggctggtccgcgtgatgaacactcacaggggaacact

SEQ ID NO: 592046 - DNA, 583 bp, Homo sapiens
ggtcccacactcctataatcagtgtcccagtggggactctataggggtggtcaaccccacatttcccctctgcactgccctagttaaggttctctgagagggctctgctcctgcagtaggcttctgcctggacatccagagtttttccatacatcctctgcaatccatccaggtggaggcttttgagcctcaactcttgcgttctttgcacccacaggcttaacattatgtagaagctaccaaagcttagagcttgcaccctctgaagcagtggccgaagctgtacctggaccccttttagccatggctggagctggagtggctgggatgcaaggagcagtgtccagaggctgtgcagggcagcaggggctgggcctggtgcaggaaaccattcagtccttctagcacttcaagcctacgatgggagggtgatatggtttggctctgtgtcctcaaccagatctcatcttgaatggtactgccacaattcccacatactgtgagagggacctgatgggagataattgaatcgggaggcagtttcccccatactgatctataggagtggtgggggatcctctag

SEQ ID NO: 592047 - DNA, 213 bp, Homo sapiens
  misc_feature (103)..(103): n is a, c, g, or t
  misc_feature (118)..(118): n is a, c, g, or t
  misc_feature (120)..(120): n is a, c, g, or t
  misc_feature (125)..(125): n is a, c, g, or t
  misc_feature (131)..(131): n is a, c, g, or t
  misc_feature (143)..(143): n is a, c, g, or t
  misc_feature (152)..(152): n is a, c, g, or t
  misc_feature (165)..(165): n is a, c, g, or t
  misc_feature (177)..(177): n is a, c, g, or t
ctgagccactgtgtggggggattcggccagcgtcctgcgccactctttgggggggtatcggcccagcgtccctgagccactgtttggtgggtattggccagcntcctgcgccactgtntnggggntatcgnccagcgtcctgngccactgtntggggggtatcgnccagcgtcctgngccactgtgtggggggtatcggccagcgtcctgagc

SEQ ID NO: 592048 - DNA, 160 bp, Homo sapiens
  misc_feature (23)..(24): n is a, c, g, or t
  misc_feature (27)..(27): n is a, c, g, or t
  misc_feature (29)..(31): n is a, c, g, or t
  misc_feature (34)..(34): n is a, c, g, or t
  misc_feature (36)..(37): n is a, c, g, or t
actaccgcacgagttcggagttnnggntnnnggnannaggagatggagctgtgtcataggagaagggaggatggagctgtgtcataggagaagggaggatggagctatgccagaggccgaagggaggatggagctgtgatcagcaggagaagggaggatg

SEQ ID NO: 592049 - DNA, 206 bp, Homo sapiens
ccagcccaggaaggacccaggacacccggaagccggaaatggactcagtggcctttgaggatgtggctctcaacttcacccaggaggagtgggctttgctgagtccttccagaagaatctctacagagatgtgacgctggaaaccttcagaacctggcctcggtcgaatccaatggaaagaccaggacattgagatctgtacaact

SEQ ID NO: 592050 - DNA, 1357 bp, Homo sapiens
aagctcaaacttgggaaggaagatgacagttcctcagcacagttttgaacaatttggcacagcaagaatcccaatgcaaagtggtcagcccattttgcaccctggtatttgaagttgaagcctaaacatctcataacgataacccagaggcaacatgtactgacaggtaattccctgcaggcatgcttccagcacatcgtgcagtgcagcacagctcagcacccacacaacagcaggcatggttccaaacatcacggcacacacttcattccattttgcacttgcaggaacccacaccaaactcaatcgcacaatagcatctcgcatcagtagcacggtatagcaccgaaagcacgcatgtacagttcgcagatagcgcacacaagcacggatgcattctttcccatacttgcagcagctcggcgccttggcatccaccaaccacagtagtccaagcacctataagcagcgcacacattcaccctggcgacaacatgacagacccacgagacaccatgcgtcctgaccgatcgtcctatccccacaaaggcgaacgcatgcacacaggacagcacgctacagaccacgactagccaacaaaacaaacagggctacccaatgcacagggtgaccagcagcagaccagtttgcacactcggaacgcaactcagtatcgcttcactggggaacaacagttgcaagcgagtacaacggtctaacgcgaacccagtcaccacgctgggacacaacttgccttctgcacacactgcatgtaagagctttatctcaaaccccacagaattaggacagctggccacgacaattcaacccaacaaattggaaccacgtagcacggcatagcgggagcaccaccgctctggaccacagctatgcacttttcattgcgacgtaaacatgaaagccccatatgcattggcacacccttataagacccggacactataaaacttggaggcacgtcccaactccctggccatatttatatccatggatacacccatgagacaatacggcgcaaaccaaggcccgtgaagaccactgtaaacacgagagaaccaccacaaggagcaaagcaaaaacgtgacaataaaaccgacgaccatacccaatgtccaaacacgcacgggcacaagcacaacaaaaagcccacaacaaacccacaacacgtacaaacaaaaactcaagagcaaccgacaaaaagacaaacaccacacaccaaccaaagaacacacgaaacaaccacaaaccgaaacaagcacacacaaaaaaaagccaacacagacacacataactacgcataaggagacccaaacaacacaaccaacaggcagaaaaa

SEQ ID NO: 592051 - DNA, 221 bp, Homo sapiens
gctcgacttttttttttgacagaatctcactctcgacgcccaggctggagtacagtggggtgatctcagctcattccaacctccgtctcccaggctcagttgattcttgtgcccttagcctcccaagtagctgagactgcaggcgtgttccaccacacccagctaatttttttgtgggtttgttttgttttgttttgtttttgtagttttagcagtcgacg

SEQ ID NO: 592052 - DNA, 130 bp, Homo sapiens
gcccgatatgtgatgtgaaatcaggcagcggtacagtgagatcccaggatgctttgtggtgctatttcacctttgcatctcccatgaggtccacgtgtacggttcggctctccaactaccatcagcttgg

SEQ ID NO: 592053 - DNA, 137 bp, Homo sapiens
cggaaatttgaaaatatattcacgaagatataacctctgaagacatttgagaaatcttatttgcaaaatctttttatgaagaatcttttttcatgtacagaaaacaggcaaataaataggaactaatcttaaaacat

SEQ ID NO: 592054 - DNA, 888 bp, Homo sapiens
gtgctgtgtggtccgcccgggtggggcgcgacgagtagcccagttctggtggcgggggatgggaacccaggagcggggtgaccccgtagtgactgccgtggccctccctctccccgtacttttcccccttcccagtcatttcttctgcggaacctccaccccctccagtgggtgcagtgtgaccctagtgcatgcatgtgccatgggcacctgccagcatctgacattggagtggccccatggaagacagttaactgttgccaggacatgcaaaaagtggaaaagccaggtagccatcttgtgtgtggtgctttgtgtgccagtggagtctccgtgacaagcatgagctgtgtgaggcttcaatcgtgctgcgttggaccaaacattggacatatagaccacattagaccaaagtgggcatttcacaagacactgcaagggccagatcaaattgagatagacacaacaaaggataaagttgggctagaatccacccaagaacagtaggacctagggcacaaacatgtatatcattgcatctcatgtgaatgattggtgaggagtgaaatgtttgacaccccacaaaacaagggaagacgggaagcaagacacagatgatagtgcatctatccttgtgctgtagaaagccacacaatcatcccctaccatccctgtgattgaaataagggcgccagacaatttgaggacctgacaacatagcagagtgtccatgagcggacgagagtcaccaatcaatggctccaatgagaatgaagctgttcagagtaacaggacaaacacaaagggacaacacgataatagaacaaaatccaagacgaagagaggacaagaggccactcgagtataaaaagaagcaaaccagataag

SEQ ID NO: 592055 - DNA, 1111 bp, Homo sapiens
  misc_feature (598)..(598): n is a, c, g, or t
tcaggaaatgccagcagcccacaggtgcggggcgaggcggggcccctccccttctccgcacccaggccgagcagccacaagatggaccaaggagccgcaagagcattccctgaacccttctccactgggccgtgattctcggcagcgagcctccaactgcggcaaccctcgagtctcagtctgacctccgagcccacccagagggcccgggcgactgcaggagggccactgctcctgcccgcggagctggagtggggcccagagacagagactggggtgtccaccaggagactcccaaggctcccagaccggagctccgtacaaaccctggagggcaaagcggggagagggagccaagatgaagagcccaggagcctggagagcaggaaccctttgtctgaggaagctccaaggaaacggaggggactccctgaagtagattccttcatgtcttcagggtggctttttatgctaagccccacctgggatgctggtgtgctgaagcatttagggagctggcccagcagagaggatgcagggaaagcctggggatggaggccaggagaaccacagaccccaccatctgagagcctgaaancaacaacaaacttgtggccaaagcacagtgggtactgggtttgtaccaggagtttctggctgtataacaacccacgcttgtgggaaataatccatcccctcaagaactaatccagtctcgccagagcaagatctcactcacgaccaggagaacagcaccaagcagcattggggaagacccaaccccatgaacccaagacctcctgtcaggcgccactccaaaacaacacatgggggatcccacttcacccagagtttgggggggcgcacaaaccttattcaaacatggcatggcatcggcgaaggccgaaatggaagcccagagggcgccctaaagtaaggcccgttcgccgcgacaaatcaccgagggacgccccctggtgttgaccttggagacacggcacgggaaagacggtgaaataagaggagagggaaaggcggacacagccgccgcaaacaaaaaaacgtctgtgcgcgggggagggagagtggcccagagcagcggagagcaggc

SEQ ID NO: 592056 - DNA, 192 bp, Homo sapiens
gcctccattctgcgcatctgagatattccttgtagatgcttcctgagcctcgaagagcttcttcagcttcttggcttgccttttggctgagtctttgccctccatgtcatgtgtgggcgaccatgcttacattttcatcaaacttggagtatttgtcggtttctgacaagaacatctcattgtgggggaagg

SEQ ID NO: 592057 - DNA, 418 bp, Homo sapiens
agatcgctgggactacaggcagttcgccacacgctggctcatttttttttttcagtggagacggcatttcaccgtgttagccaggattgtttcgatctcctgacctcgtgatccgcccaccttggcctcccaaagtgctgggattacagacgtgagccaccgcgcccagccaatgaactattattgaatgaatacctcattttccctctgggcatcacacctgagattgcctgattggtacgttgtcctcagagccagcatttattacattgcatttgagagtcgctaagaccaggcattttccacacgcttttcctgtttaataagtaccttccaaccttgattggctgataacagccgttggctcgtatataatgctggccttcgcaatgatacagcaaatggaatctgggaggaa

SEQ ID NO: 592058 - DNA, 81 bp, Homo sapiens
  misc_feature (1)..(1): n is a, c, g, or t
  misc_feature (16)..(16): n is a, c, g, or t
ntaagaaagcagtcancaaataattaccaagggcaagtcagaagttgtttataattacaaataaggcatattatgactctc

SEQ ID NO: 592059 - DNA, 164 bp, Homo sapiens
gacaggaggcgggagaccccccctctttcccctggttgccaggtgttctccctctgcaggctcctgggacagtgctgattagcagagacttgccgtctgacgcggggacttggattatggcaaaggggctactgggaagccggttcccctgagtttgaccagtt

SEQ ID NO: 592060 - DNA, 1878 bp, Homo sapiens
gtgactagccagggttgtatattgtgaaacgcaggcagtgagttattctccgtgcctgctgtcagtaggtctatctcattggaccaaccacgacagtgatcgttcacctctcactaacgctagcaagcgcaattgactataatactctgatgcgacgcagatgtcatcacctagtacaatactgacacatcaacacatctcaaggtgcactccactatcaagcatgcatgagcaactgtcggactacccagacactcaatgctaccagacgcagcacatggtcctaaacaaagcattagggtcgctacaaaccgcactagctcagaatatgcaaattggcatgtgggaagacatttacgtgactagggaaactggatagatatacagattataaattaacaatatggagtaaatataggatatcattcatagtatcgaacttaaagatggcaataggtgcgaatataacgagcataatacaggaacttaatggaaatgcagcaggtaagatttcaacactaacttacaaatccataacaaggcgcaacagtatataagaaagttcacacctacaccgtgagaaccaccgaacgattggacaacatacgcacatgtacaacaccccatttaacaagcaccatgcgataccccccacaaacagccatctgaaaaccttacccgatgcaatcggatacaacaaaaatatccgccgatttaacagtcacctccagctcacatacaccccatataatcacggcacgtgagaacagcgggccaactcacacggaggatcaactccaccacaaccatcaactaacaatcccacactcacacgcaaccacacagcgacacggccacactccacccacgattcacaacattaaccacagcatggccaaccaacagaccagaacacaccacacgaaacaacgcgcacactcatagccgacaccatctcacccagcttacacaactacaccacagtcacgacagaacagccggccaacgacaggcgactgacacaacagacctatcgaccaccgagccaccacaggagacgaggcaccagccgcatgtcgactgacggacgacgcacgactaacagacgacagcagagcagcaacgaaccaccacgacagacgacgacacacaacaaccagaacaacacatcagccacaaccacacaacaactacgatcaacaaacgacacacaatagacacgtgaagataagccacgcataacacagcaggagaatgaaacacacaacaacaaagcaacaacacacgacaccaagctagcaacaacacaccatgcacggtgccagacataacgcagaaagaggactacccactaaacacagcggaacaaccgctcagagcatacaactcacgcccaacaacacaacgtagcaccatatccgcgaacagaaaaaatacagcccaacaagacacaagcacagcacaaaaacacacctacggaagtcaacatgaatacagcacacacacagtgaggagcaagcagaagcacagagcgaccaaagagagagccgaacacacacaagcgaacaacacgactggcaagcaaaacagagcaaagcagcgcaagccacaagcacacacgcaaagcacaaagcagcgaaagaacgagctgcgcacacacacacaacacaccaccactgctgaccgagcccgacaagacaacgcgacacaagcctacgcaccacacaccatccgaacacgaacaggagcgcaaaatacaacagcagcgcagcacaacataaccagctagccacgcgcgacagacacgacacgaacacagcaacacaaaagacaaagatgaagagaaacacacgcgagactacaacccactaccgagct

SEQ ID NO: 592061 - DNA, 318 bp, Homo sapiens
gggacagacagggagaaatggacagttgaaagtacaagtctagacaggcacagtggctcatgtctgtaaccctagcactttgggaggctgagataggagaattactagggttcaggagtttgagacgaacctgggtgacatagtgagagctcatctctacaaaaaataaaattagctcggcatggtgctgcaagattatagtccctgttagtcgagaggctgaggtgggagaaccgcttgagcccaggagggaaagcagcagtgaaccgagatcacgccactgcactccagcctgggcgacagtgagaccctgtctca

SEQ ID NO: 592062 - DNA, 661 bp, Homo sapiens
  misc_feature (15)..(15): n is a, c, g, or t
  misc_feature (69)..(69): n is a, c, g, or t
  misc_feature (76)..(76): n is a, c, g, or t
  misc_feature (86)..(86): n is a, c, g, or t
  misc_feature (194)..(194): n is a, c, g, or t
  misc_feature (222)..(222): n is a, c, g, or t
  misc_feature (259)..(260): n is a, c, g, or t
  misc_feature (262)..(262): n is a, c, g, or t
  misc_feature (278)..(278): n is a, c, g, or t
  misc_feature (296)..(296): n is a, c, g, or t
  misc_feature (301)..(304): n is a, c, g, or t
  misc_feature (318)..(318): n is a, c, g, or t
  misc_feature (321)..(321): n is a, c, g, or t
  misc_feature (337)..(337): n is a, c, g, or t
  misc_feature (360)..(360): n is a, c, g, or t
  misc_feature (416)..(416): n is a, c, g, or t
  misc_feature (424)..(424): n is a, c, g, or t
  misc_feature (488)..(488): n is a, c, g, or t
  misc_feature (505)..(505): n is a, c, g, or t
  misc_feature (564)..(564): n is a, c, g, or t
  misc_feature (576)..(576): n is a, c, g, or t
  misc_feature (578)..(578): n is a, c, g, or t
  misc_feature (644)..(644): n is a, c, g, or t
ggttggaggctcagngccccctccggttagcccggacgtcccccccaccccgcccccgccccgcatgcnctgactnctttggggtntgaagtgcactgccccgcacctgcgccccagccccgcccagcgcttctgccgtggttccctggtgccgcctcccgcttgccgaagcgcaggccgaaggagtcccagtngtagttcggcagggccttctcccgctgnaccagcgccgcgccctggggtgcggggatctgggggnngngggggggggagagggncgggtgcggggggctccnggagnnnngggggggggggganagngagggcccccgagggntcagcctgggagtggcagcgggnttcctctgggtgcacgggagggtctgctccccgggggccaggaggcccagggattntagctgcnggcctgtgggtgtagaattccccacagaggccaccttttctaatggctccccaaagtgggtggnacaaaggaaaagcagtngctgccaagaaaccagttagtgcatcttggtgagaagaggcaggtgctagaagtgcctngaggcttgcctnanttctggcctgggcaggagtttggcggagctccttaggtgacgagaccacctggctgggtgaatgtncagagggtgggcagctg

SEQ ID NO: 592063 - DNA, 605 bp, Homo sapiens
ttaaatattacatctaggctgggcactgtggctcatgcctataatcccagcacttagggaggccgaagcgggtggattgctagagcccatgagttcgagaccagcctgggcaacatggtgaaaccccatctgtactaaaaataccaaaaacattagccaagtgtggtggcctgcgcctataatcccagctactcaggaggccaagatgggaggactgcttaagcctggaaagtagcgtttgcagtgagccatggtcacgccactgtactccagcatagacgacagagtaagaccctgtctcaaaaaaagaaaacaagccgggtgcagtggcttgtgcctgtaatcccagcactttgggaggcccaggagggtgaatcacttgaggtcaggagttcaagaccagcctcgccaatatggtgaaaccccatctctactaaaaatacaaaaattagccaggcatggtggtgcgtgcctgtaatcccagctactcaggaggctgaggcaggagaatcacttgaaccaaggaggcgcaggttgcactgagccaagattccaccacaccactgtactccagcccaagcgacagagtgacattccctctccga

SEQ ID NO: 592064 - DNA, 447 bp, Homo sapiens
  misc_feature (330)..(330): n is a, c, g, or t
  misc_feature (423)..(423): n is a, c, g, or t
  misc_feature (434)..(434): n is a, c, g, or t
aattcgcgccatttctcctgcctcagccccccgagtagctgggactacgggcgcccaccaccacgcccggctaattttttagtatttttggtagagatggggtttcactgtgttagccaggatggtctcgatctcctgacctcgtgatctgcccgccttagcctcccaaggtgctgggattgcaggcgtgacagccgtgcccggccgctaattttttgtatttttagtagagatggggtttcaccgtgttggccaggatggtctcgatctcctgacctcatgatccacccgcctcggcctccccaagtgctgggattacaggcgtgacancaggcgcccggccccgcactcttcagttcttgagagatcagggggctaaaggactctttgagtttgtagagggattcagggttttccagtgtnccctttcgtgnacccagcatttta

SEQ ID NO: 592065 - DNA, 1563 bp, Homo sapiens
  misc_feature (1563)..(1563): n is a, c, g, or t
cagaactgctgactagagatgcatacgtgacaacacacacttgtcccaaatgagcacagtaatgttcgtctcggaccctgctccatgtctctggtgtctgtgtgcatgatcatgttactggtgtggtctgtctgtcttggtgggtactcaccgatccaaggcactctagtacacaggctgttggtatcagtctggctggtcttctctctgctcattctgatagtcctccttcgattcaaccaataactagcagttgatgatatgtacattaagtcaagatataagagaagatatatagagacatatgcgagtgcgtctcgcgatgcgagggtacgctctactctccactgtccacggtgtgtcccaaagtccgatatccccccgagtcatgctaagcctttctttcgcggtctcacatctgagggccccgctcaggacgccggcacgtactggcaatgttagataaacaggttggtagagacccaagggcgagccagggggtcggctgctaaaccatatcggagttgcaggttccccggtgtgtgtcacaccaactctgagtgccctttccgagtgtcaaacctccctagtgttgggacaccgggtgacacactgtgtatcttgcgcgtgagtgagggcctgaaacacgtgaaactctgttgtgccccttatacacctttccatctctgggatacagtataaaaggatgttaaataaggccgggccatccaaagaggaggagccccatagattgaggtgaaacaattgggtgctggtctccaggaactggcagtggtttttataaccgctgcgtgtggtggtgcaacacaacgcatacgggttttccaacgattgatggtccgctccaagatatgggttcttaaagccataacaaagggtctctttgcgaaataatatctttgcgaaaagacttatgttagcaatggtgcctctccttaaaccacaataatgtacacaaccactccgggcaaggagggacctcattatttgacctgaggagaactaggggaactatctggcgcttttttaaggggctttacccccccattccttggggaaagggctgttggtccccccaaatttggacctatggggttacttaggggagcagaaacaagcaaagcaaccccttattattccttggacatttttatggcgcctttttccaaaaccaaaaaaaaaggttaacacatgggttgggtttgtacctcctcgttttattaccgccccaaacaccacccagtattgtggcccgattgggaaaagcccccgattccacaggggagaaggattccacaagcccattaggactattatccccaatttcccacattgagggggttggtggagggaaaacagaccatcttcacaagagcaacaccacacactggcggaacacagggcactttcaacattcatcttgtggatcacaagggaggcacattttgttgttagtaaacacaaggaggctctaaaattcaatcggttgctaactcccaagggtacccaggcgcatccggttacaggaggtttctcccccan

SEQ ID NO: 592066 - DNA, 108 bp, Homo sapiens
  misc_feature (37)..(37): n is a, c, g, or t
attccggcggctggctgggttctttggggttatttcncgcatcatcctcgtcttctccctcctcgtcaccttctaattcctctctctctccccagcacaacctgggac

SEQ ID NO: 592067 - DNA, 332 bp, Homo sapiens
  misc_feature (57)..(57): n is a, c, g, or t
  misc_feature (174)..(174): n is a, c, g, or t
aaaccctttttaaaaaagacccccccccaagttttttggttggaagggccccccccnaaggttaaatgttcccggaatttaaaaaggcccccggagtttttatgccccaaagccctttttttcctttttttgaaaaccacatggggaccaaccgatcggaccgtttttaaggtnctgggggggggaaaaaaccctctttcttttttcccaaaagctgggcctctattttgggatggaaaatggggttggggatttacccctttattcaaaggaactttttttgggatttttttgcctttgaccccccctgttaataaaaaaaaaagggttga

SEQ ID NO: 592068 - DNA, 121 bp, Homo sapiens
gagagatatgttggtggaaatgcaggatgattaaagggggcctcatattctctaaaccagctctttcatcagcacttactgacatacgaggtttaagagtgtgcataccactatagtctat

SEQ ID NO: 592069 - DNA, 161 bp, Homo sapiens
tgagcacagaccactgtggaatgagacaccaaaggggctgcgttgtgtggtgttgatgagagatggagagaaacagggagagatggtgagagaggcagagacagaaggagagagacagagagagacaaggagagagaaacagacagggagagagagagact

SEQ ID NO: 592070 - DNA, 169 bp, Homo sapiens
tacaaaaagttttaaaaccaggtatggtggtgccctcctgtggtcccagctactcgggagtttgaggtgggaggatcaccttagcccaggaaacttagggttcaagtaaggtgtgattgcactattgctctctagcctggaaaacagagtgagaccctatctcaaaaaa

SEQ ID NO: 592071 - DNA, 726 bp, Homo sapiens
  misc_feature (250)..(250): n is a, c, g, or t
agcgggggttctttccatcgagcgtgctggaacggaggctgcctaccggaggtcggcggggggatgtaacccgttgactgagctggcgggtcggtgtgcgctagggcttcggacgggtgggtgcggcgaataatctgccatggatcgatgcgttctatgatattcccggctcttctggggcactgggtcgcacgctaaggtgccacgatctctgttgctacgctaggtcgctgacggcgtccaaccgagncggtgagctgtcgacaaaaggtgcgaccgagtcggacggttgcgccgaagctcctcgattgggcagcggcgagctgaatgccccagccgccccagctcgcgctcagccgtgacgccgtggggctgaatattctggatgtgggagagagtcgacaatttacatgcaacctcagtgaatactctcccaagatatggtattggtccatgatgtatcgcagggttcttcttcagcgagaatatactatgcgcctggtaacagagtctacgataattgggggatatatcagtttgattgatatatggtggaaatatatattgcaatagcatacagagatgtacgtggtagtaagcttgctatataagtgttccctgtggaaggagatttgaaaatctcagaattttgaggaagaggatggggatcgtagtcgataacgttaacatatgagggtgggaccagaggttgaatcaaaggaaggg

SEQ ID NO: 592072 - DNA, 404 bp, Homo sapiens
ggtcggcccgataccgtgtatttccttctgtcttgctgtgctccccctgttattagtccattctcacatgctataaatacctgagacagggtaatttaaaaagaaaagaggtttaactagctcgcagttctttgtgctatacaggaagcatgatgctgtcatcttcttggtttctggggaggcctcaggaaacttacagtcatggtggaaggtgaaggagaagcacacatctcacatgactagagtgagggcaagagagagagcgaaggggggaagtgccacgtactttgaaacaaccagatcttgcaagaactcactatcataagaacagcaccaacacgatagtgctaaaccattcatgagaaatacgtccccatgatcttgtcacttcctgccaggaagta

SEQ ID NO: 592073 - DNA, 258 bp, Homo sapiens
  misc_feature (190)..(190): n is a, c, g, or t
acagaatcacttatccttaaagttctcttctggtctttggattataaaaggcttatgttagcatagcttaagagcaaactctgagacttgagtccctactaagataactgaccacctgtttaggagtgtctagctatctggatgtgcatcttattccctatagttcttgtcgtgtcactagttctagccntgtttctggtttatagccctaggagctcacttacaaaggactcttaggactgtacttttgcttactag

SEQ ID NO: 592074 - DNA, 816 bp, Homo sapiens
gaggaagaaacagcggcccaccccttgaaccccatcgatagagccacgtggaaatgagcggagagcccgggagggagcataaggggaagggagagaaaaggaaacgaggtaggcaaagaatgagaacaacggaggaaaaagggggaaaaaaggggagaaaaagggggacaaagaggaaacaaggaagaggacggaggcacgaaaaaagaaagggaaggaaaagaaaagagaaagggaaaagagaaaaagagagaacaagggaaagaggggagaaggaaggaaagcagacaaagggaaaaaagaaggagggaggagaaaagagagagaaagggaagaaacagaagagcagggagaacgcacggaagggcgaagagggggcgagaaacgggagacggacaaggcaggggggacaacagacagaaaaacccgaaaagaaaaagcgaaggagagagaggagcaagggaggggaagcgaaggaaggggcatgagcaaaaagagagcgaacaggcataaaaggcacaaaagcaaaatggcagaaagaggagaaccgaaagacaggggggcgacaagaagtaaggcgaggaggaaagagaaggctgaaaagcggggggaagcaggagaaagggggaagatggcgcatacagggcgaaatagaaagacagcagagacacccagaacagggggaaaaagcgaaagaagacagccaagcaagaaaagaagaaaacaagcggatagagaggggacgaggacaaaatgacaaagatgaaggcaaggggatgcagaagcgacgagaaaagcaacgagagacgggaccgc

SEQ ID NO: 592075 - DNA, 574 bp, Homo sapiens
ttccaggactgctgcgcttcggggcccaggtttcgacagactcttcaaaatgccatcccaaatggagcacgccatggaaaccatgatgcttacgtttcacaggtttgcaggcgacaaagaccacttgacaaaggaggacctgagagtgctcatggaacgggagttccctgggtttttggaaaatcaaaaggatcctctggctgtggacaaaataatgaaggacctggaccggtgccgagatggcaaagtgggcttccagagctttctatcactagtggcggggctcaccattgcatgcaatgactattttgtagtaaacatgaagcagaaggggaagaaataggccaactggagcactggtacccccaccctggtgcgtgttcacccacggggtcacttgaggaatctgccccactgcttcttgtgagcagatcaggacccttaggaaatgtgcaaatgagatccaactccaattcaacaatctgagagagaaaacttaatccaatggcagagaagcttctgagttttatattgtttgcatcccattgccctcaataaagaaagtccttttttt

SEQ ID NO: 592076 - DNA, 312 bp, Homo sapiens
actagggaaattttaaaattaggaaatgctgatagctcatattataaatttttaaatcctaggaaaaaacgcttggagggcttttgaaaaaacaaaagttccctttaagggcaagtttccccgtagatggatcaaaaaactacccactgtaaattgagatttaattccccaatgtattttacttgttttaaaacaatctgtccccaaaaataaaactataagtaataaattgttattttcgcccaatgggaatttttaatgtgaaaatgtattttatgaaaaaaatttttttaaataaaatgttatataata

SEQ ID NO: 592077 - DNA, 187 bp, Homo sapiens
  misc_feature (133)..(133): n is a, c, g, or t
  misc_feature (161)..(161): n is a, c, g, or t
tacaatagtccatagtatttattctgtagaagttatcaataaaaaattgatactaaaaggcctttacatagagtctgcgttcataaaaccttgtgtgtttttttgtccatttggtttttaggtgtttacattngaaaagaaaatccagtccatccccttangtttacatcatttatcaggaatcgtg

SEQ ID NO: 592078 - DNA, 362 bp, Homo sapiens
gccctttccgaccggccccctgggtccccaggttttcagctttcccctgggcccctaacccttctgggccggggtgcctgtttgacccccgggcctagttgtggctttcccttttgtttcctccccgggtccccaatgttttcagtgggggggccccttttggggcccctcctttgccctccccttaagacccccccccccaaccctgaatgttccctgggcctgccccctcgggccccccttggggccgggttttactcaactcagctccttttacggtaatttttccggccaaatcccctggttggggtttgttttttcccctggtacgcctgccatccccattaagcctttaaagtcca

SEQ ID NO: 592079 - DNA, 595 bp, Homo sapiens
agcggaacttaatactacgcttcaaagcataatgaatgggataccttactttcagcccaaatcggaagcgccttaacatgagagaactgagcccccacaccaaattttattccctaacgccaacacgcccacatctttcccgaaattatcccgcatactgatgcccaactttaacgcaaaccctatcctgaccactctttcacctgacccaaaccaccatacctgctccgaaacagacttaagtcagacaggctggaagctacatgacgctgaatggtagggaacgtggcaaagccaacaatatagggagacacgtaacagttcttacgtgacaagggaggactgcaggaactagtgctacatgactgtggaaaacataaaaaagagctgcattctggccagtacgtaatcacctacctagcgagatgcgatggaaatgggcacacatgctaactgttgtcaactgacactatgcctctagaggagctgcagattgaggtcctgaagcatagaaaagcaaccggacatattgatatgcactaccagcttaggctacactatgcatactctgatgactggagagatgaccaatgtg

SEQ ID NO: 592080 - DNA, 1629 bp, Homo sapiens
gttctcccttgtctcctttgcttcgtcttcctttcccctttccctgcctgtcttctcgtctcttttcgtgtgtgggcctcgttctcctttttctttcgtttcttctcgcgttgtgttcttcgtcttttgttctgctgtggttgctgttcttctgttgtttctctgcttttcgtcctctggcttcctcctctctgtttctcctttcttcttctgtgtgcgttcttttttgcttcgtgctttgtcctcgcgcggtttttttgtctttcccttctcgccattggtctctccagtcgctgtcttctctcgtgcgttcccgctctccttgttccctgtctccctctccttcctctgtcctgccctcttctgtctctgttcttcctccgtccttcctcttcctccttctcggcctgctcgctcgtctcgtcagtctcgtcttcctctcttccctttcttctgtcgcgtctgcgtcatcatcctgttctcgcctgtgtcctgttctttgttgttttcctcctttctctttgtttcttgttttttcgtcttgtctctctttcttgtgtctcttttgtcttctttgtttgttttttgtttttcgtgtgtttgtttctgtgtctccgttcgtgatctccggacgcaggaggaccagaggcgacgacgcacagggatcatgaacagtcggctctgtcacccatctgctcttgtcccacaattctgccatgtggggcctacacacaatctgtagtggtgtgccgtcctatttcccccgatggggcgcgcacaaaattgtgtgtgaggccattgaatgtgtctccgccttccagcagggaggtctcatttagtcgccatgcaggtcccgcgttcacagccggatgcttctgccgtgcaagtcaagcctgaccatgactcggaggcaatgatacgacttcaggctgctcgtcaacgccagtgaagcgagtcctcagataatctggtgcaaagcagcacacgaaggcttcagcctttgaagagcaggcagaatgagacactcggtggtgaaagagaagatggttggcggcattgctcagatcatcgcagtcacaggaacaatatgcttcggaaggaacgagagctggaagaggcgcggaagaaaccggcccagatccgtcagcagcagtacaagtttctgccttcagaggcttcgagatgagcacctacagaagcctcttgctatttaagtgcagacccggcccagagactgtgcgtgccaactaccaaagccttctggagcatgtacggggcccaaccatgcgccaaccccagcacttccccaaagtgcatgccaaacctcagggcctggccaccgcaccagtcccgcagtacatccccatgtcccctccccaaccccaagtgccgtgtcatgcctatagggccccccaagtgccatgcccctccctcagagtattaacgctccaagagtattattaacgcgtgcctgtacctcgatctgaatctgcacggggccccagcccactccaacatgccagcagcttccagccagtccccacagcctcatcagctctcttcaccgttttttgatactatcttcccccacccctagcctacccaagtaggggcatgcaagagttataa

SEQ ID NO: 592081 - DNA, 558 bp, Homo sapiens
tcaggctgtccaagaggatccccttcagcccattagtcactatacatcaaaaggataaaatatttggaaataagtttaaccaaaaagtcaaatgataatcccctgaaaactacaaaagatggctgaaacaagtaaaagacaatatcaatatatggaaacacatttcatttccagggatgggaggaatcaatatggtaagaaagataataccccaaagtgagtggcgggatccaatgtaacacctaacagaatcccagtaacatttttggcagaattagaaaacacggtcctaaatctcaccggacaggctcttattaatgacggccacaacagatacacggagaaaaagaggcaccatgaaagggtggaaagtcctgatgacatagaaaatagcaatcagcctttctcacatcccagggccttcaaaattatccaagtgcagctgggccagtatggaatccaccgaaaactattcaccaagctagaaaaggggtgagagacaaaaaaggggcaagaatatcttgggctaatcacctcccactttggcctactaaatgt

SEQ ID NO: 592082 - DNA, 449 bp, Homo sapiens
  misc_feature (239)..(240): n is a, c, g, or t
  misc_feature (249)..(249): n is a, c, g, or t
  misc_feature (254)..(254): n is a, c, g, or t
  misc_feature (258)..(258): n is a, c, g, or t
  misc_feature (260)..(262): n is a, c, g, or t
  misc_feature (271)..(271): n is a, c, g, or t
  misc_feature (282)..(282): n is a, c, g, or t
  misc_feature (284)..(284): n is a, c, g, or t
  misc_feature (289)..(289): n is a, c, g, or t
gaggaatgatcatgaaatgcccttatatatcatgctaaggagttttaacattatactctaggtgatagttttaattgtggaatctgtataatcaaattgacattttataataactgacagcaaggcagattagaagttgagttagaagagaataataccattggcaaggagtctaatcagaaagctttacaggcctggtgctgtggctcttgcctataatcccaacattttgggaggcnnaggtgggtngatcncttnannncaggagttngagaccagctngncaacntagtgagaccctgtttctaccaaaaaattttaattagccagacgtggtggttcacaccagtagtcccagctacttgggaggctgaggcaggaagattgctttagcccagtaagtccaggctgtggtgagccatgatcatgccactgcacttcagcctggg

SEQ ID NO: 592083 - DNA, 351 bp, Homo sapiens
  misc_feature (239)..(240): n is a, c, g, or t
  misc_feature (249)..(249): n is a, c, g, or t
  misc_feature (254)..(254): n is a, c, g, or t
  misc_feature (258)..(258): n is a, c, g, or t
  misc_feature (260)..(262): n is a, c, g, or t
  misc_feature (271)..(271): n is a, c, g, or t
  misc_feature (282)..(282): n is a, c, g, or t
  misc_feature (284)..(284): n is a, c, g, or t
  misc_feature (289)..(289): n is a, c, g, or t
gaggaatgatcatgaaatgcccttatatatcatgctaaggagttttaacattatactctaggtgatagttttaattgtggaatctgtataatcaaattgacattttataataactgacagcaaggcagattagaagttgagttagaagagaataataccattggcaaggagtctaatcagaaagctttacaggcctggtgctgtggctcttgcctataatcccaacattttgggaggcnnaggtgggtngatcncttnannncaggagttngagaccagctngncaacntagtataacccagtctctataaaatacaaaattatttggagcccagcggcgatcacgagtca

SEQ ID NO: 592084 - DNA, 746 bp, Homo sapiens
  misc_feature (127)..(127): n is a, c, g, or t
  misc_feature (161)..(161): n is a, c, g, or t
  misc_feature (180)..(180): n is a, c, g, or t
  misc_feature (184)..(184): n is a, c, g, or t
  misc_feature (187)..(187): n is a, c, g, or t
  misc_feature (191)..(191): n is a, c, g, or t
  misc_feature (195)..(195): n is a, c, g, or t
  misc_feature (213)..(213): n is a, c, g, or t
  misc_feature (224)..(229): n is a, c, g, or t
  misc_feature (243)..(243): n is a, c, g, or t
  misc_feature (245)..(245): n is a, c, g, or t
  misc_feature (282)..(282): n is a, c, g, or t
  misc_feature (336)..(337): n is a, c, g, or t
  misc_feature (470)..(470): n is a, c, g, or t
  misc_feature (486)..(486): n is a, c, g, or t
  misc_feature (488)..(489): n is a, c, g, or t
  misc_feature (491)..(491): n is a, c, g, or t
  misc_feature (503)..(506): n is a, c, g, or t
  misc_feature (570)..(570): n is a, c, g, or t
  misc_feature (577)..(577): n is a, c, g, or t
  misc_feature (580)..(580): n is a, c, g, or t
  misc_feature (592)..(592): n is a, c, g, or t
  misc_feature (651)..(651): n is a, c, g, or t
  misc_feature (670)..(670): n is a, c, g, or t
  misc_feature (674)..(674): n is a, c, g, or t
  misc_feature (696)..(696): n is a, c, g, or t
  misc_feature (720)..(720): n is a, c, g, or t
gaatgacccgactggaatccactctaaccaatcgcacttaacgactcgggccaccactggggggggcagggggaggggtccaccatgatttctccatataattttgatcataggccggagtgagtcnttctacctgcacctttctgtacaaataataattnaattttaatgtcttaagtnattntantaanaaanatgatcttctagctactnccaaaaacaannnnnnaatactgctctccnantttcccttgctgggagtagccacatgctcttgccccnaaacccttgtatatggggacagtggggtcagtgcagctaccctttctttccaanngcggaacagcggacccagcaagagcatccacatcctcactttgttcggagtggtctttggtttgggcggtggggcagaccttgggaaggggcttaggaagggagaggcagctcttccttcagctggctctcancaggctgcagcccccncnncnctcccacctccnnnntgggaaaccacagcattatcacagcattattgtgacagccacgaacccattgcccacaaccccnccacccncgntcaccccaaccnctggctttgagccctgttttgaccaaatcattaaaaggatttttgggggtgggtgggtnaaggggggaagggaagggnaccnaaccatcttttgcttatttgtnatgtaagtttttttccaacagtanaccaatcagtatcttgtcaattatag

SEQ ID NO: 592085 - DNA, 1363 bp, Homo sapiens
tgggtgtcctcagcagccagtgttaacaccacgtgttcacgttagtgtgttacagatttcatctcttttatatgtgttattttaaagttaactccatacttagtgagttgggattttctccctgtgccaccatttaatttcgtggcactcagaactacagttttgtggtgtgtgtagaagtctcatacggtggtggttgtgacacccagagacaccacaacacctagtgagagaacccgtgaaagttaaagagaaataagaggttcacaactatacactatttattgtgaagtataacacgtgtttctccgtgtggagggcccaaatcgtggtgtttatgccttattagagaaggttcttacagagaatgtgctttttatattttgtgtgtgtcatatataacacaacacacagtctcgtggtcatttatatttctctgtgtgtgtgatataaaccacattgtgtgagacacaagacgtgtgagggacccgttttgtgcctctgtgtgtatatctctctccctatatgtgtgctataaaccatatataacactctcacagtctcatattagacgcccggcgcgcttttttacaaaaatataaaagcgcaccttcttgtgatatagactctcaaaaaaagaaaacaacacaacaaaaaaacacaaaaataataaaaacaaataaaaataacaaaaaacaaaacaaaaactaaataaaaaaaaaataataacaacatcacaaaaacaatacaacgataataatcaagctaaactaaacgactaaatactagagcagactgagaattagtggagggcggcagccaagtacggaggaaaagagaagagaggaaagcggcgaacagcgatgcggagaacgcggcagcacggcgcaggaagaaggaaagaagaaaagataaaatacaagaagaaggaggcaggtcgtggcgcgcctgtcagcagacacggagcgagcagagcgacgagaggaagagcaaggaagaggaaaatcatagataaaatgaaaggaggaagaggtagtagaaacaataaacaacataaagtaacctaaaacaagcataataaacaaaagagacaacgaaacatgacagagaggcgaagggagagggacacagaaaataaagagaagacaagaagagaaaagcaacgaacctaagagagcgaagaaaatgagaagaggagggaaggaggacagaagcagaaaagaagagagagagcgtaagagagagaagagagagggaacacgagagaggcgagaacagagcgaacacgagaataagaggaggagccgcagagtaagcaggacagacagtgaggaataagagtaggcgaagacgatctaagcgg

SEQ ID NO: 592086 - DNA, 285 bp, Homo sapiens
tagaggatccctgggatgtcgcgtgcatgtgataaagttgaggatcttgagatgggagattacctgatgtgctgatgtatcacaatggtccttataagaaggatgcaggtgagtcagagaaatagtgtagagttggaaagcagagatttggagtgatgtgactacatgtcaaagaattgcaacagtctctaaaagctaagaagaaacaagaaacaaattgtccccttggaggctccagaaagagtccatttcttggtgacacattggaatattaggccctggtga

SEQ ID NO: 592087 - DNA, 306 bp, Homo sapiens
ggaaaacctgccgcggctggagcgggggaccccagcaatcagtttcccaaacttctatggatgtagccgccaaccttcaccatgggcgcgtgacaggcaggagcctggagcgcctcaaagacggacgtggcggcatagccctggacgcaatcacgggcggtgacgatatgtagcacacggcaccacacctgctcacatcacgtagtagcacgcaatgcgacagagagctgaggactggtgccacgtaccagctgcagtccacgccagacttgtcgcacaggatgaccaacttgaggacgatgtcct

SEQ ID NO: 592088 - DNA, 356 bp, Homo sapiens
  misc_feature (42)..(42): n is a, c, g, or t
  misc_feature (73)..(73): n is a, c, g, or t
  misc_feature (75)..(75): n is a, c, g, or t
  misc_feature (79)..(79): n is a, c, g, or t
  misc_feature (85)..(85): n is a, c, g, or t
  misc_feature (106)..(106): n is a, c, g, or t
  misc_feature (112)..(112): n is a, c, g, or t
  misc_feature (129)..(129): n is a, c, g, or t
  misc_feature (135)..(135): n is a, c, g, or t
  misc_feature (143)..(143): n is a, c, g, or t
  misc_feature (145)..(146): n is a, c, g, or t
  misc_feature (151)..(151): n is a, c, g, or t
  misc_feature (157)..(159): n is a, c, g, or t
  misc_feature (161)..(161): n is a, c, g, or t
  misc_feature (179)..(179): n is a, c, g, or t
  misc_feature (207)..(207): n is a, c, g, or t
  misc_feature (219)..(219): n is a, c, g, or t
  misc_feature (223)..(223): n is a, c, g, or t
  misc_feature (225)..(225): n is a, c, g, or t
  misc_feature (255)..(256): n is a, c, g, or t
  misc_feature (260)..(260): n is a, c, g, or t
  misc_feature (291)..(291): n is a, c, g, or t
  misc_feature (293)..(293): n is a, c, g, or t
  misc_feature (300)..(300): n is a, c, g, or t
  misc_feature (306)..(306): n is a, c, g, or t
  misc_feature (309)..(309): n is a, c, g, or t
  misc_feature (313)..(313): n is a, c, g, or t
  misc_feature (316)..(316): n is a, c, g, or t
  misc_feature (323)..(323): n is a, c, g, or t
  misc_feature (331)..(331): n is a, c, g, or t
  misc_feature (334)..(335): n is a, c, g, or t
  misc_feature (344)..(344): n is a, c, g, or t
  misc_feature (349)..(349): n is a, c, g, or t
gataaataagggttgtcgcttcactgattaagggaataaacntcaataaacttaacaacaacaaaaaaaatcncncgcngccgcngtttaagttttaacagatgtntttcanatacagcatggggtacngggggncacaagcntnncatcnctgggnnngngcttgcaactgccgggcngttccgtgccgccgccggggcggaaccnggcatgactganctgngncatgtgttactttcccggggatggcgttgnnaggngggggggcgcgtggtaggggcgggtctcggntncgggggngggcgnggngggngcnttagggnggcgagtntcnntcgcggggngtggntggcgag

SEQ ID NO: 592089 - DNA, 160 bp, Homo sapiens
gcggccgcctactactactactactgctcgaattcaagcttctaacgatgtacggggacatgtaatctcagcactttggaaggctgaggcaggcacactgcttgggcccacaagtttgagaccagcctgggcaacatatcgagactctgtctctaaaaaa

SEQ ID NO: 592090 - DNA, 164 bp, Homo sapiens
ctatttctccacatcctctcagcacctgttgtttcctgacttttgaatgattgccattctaactggtgtgaaatggtatctcattgtggattttgatttgcagttctctgtatgcagcttatacgaaataattgttgttctgttaacccgagcgctaccagggt

SEQ ID NO: 592091 - DNA, 151 bp, Homo sapiens
gaggggttcctccgtggttgcgaccatgcgtgggtccacggtcctacttcaagtgttgcaggtagtctacgtgcactcgtcaagtttggggtgggaacgatggatgtgtgcgctattttcctaggcgccccactctttaagtttatggtgg

SEQ ID NO: 592092 - DNA, 254 bp, Homo sapiens
tcctgaaattctagaagtcgcatcctcttctgtaggctgattgagattagtgtaccatttcgttccttgggtccctcaaagatggtctctaaacacctgtttgcaggcggagatttataattctggtaggtctttatctcttctaaactaaactccttcttctttacacctttggggtcgagcaaggcccatgggggtaagattaggcatctggcctaggcaatggtttcccggatggggtcaccgagctcgaa

SEQ ID NO: 592093 - DNA, 108 bp, Homo sapiens
  misc_feature (68)..(68): n is a, c, g, or t
tctggtctgcatcttcccaggctggacacaagcgtcagactcgccacactagatatcctgcaccatgntctgctgccttacacaactccttggccttgccatatgcaa

SEQ ID NO: 592094 - DNA, 824 bp, Homo sapiens
actcactacagcctcgaactcctaggctcaagcgatcctcccacctcaacctctagaatagctgggactgcaggtgcataccaccacgcccagctaatttttgtattttttttgtagatacacggtctcaccatactgcctgggcaggtttccaactcctgggctcaagtgatccagcagccttagcctcccaaaatgctgggattacaggtatgagcactgcacccggccacattttttttgtttttgaaacagggtctcactctgttgcccaggctggactacagtggcacaatctcagctcactgcggccttgaactcctgggcttaagtgatcctcccacctcagtctccctagtaggtggaactacaggcatgtaccaccacacctggctatttagattaattaagagacagggcctatgctatgtggcccaaggctggatctttaattcctgggctcgagagagcccaatcatccccatatctcagagatgtcagggattacagccatgagccaaccatgcccgggcaaacttaagaccttgaatataacgcgatctggccatatagtttaccatctgtcacaagtaatcggccatcaatataatcgctttaaaattggcgctccaagtgatacagactttcaatggaaaattcatgcggcacccgcgactcataggatctcccaatttctggtacactggtgaaaaaccaggatctcactcttgccctccaataggacgcgatacgcgcgtgcacacactacgttacacgttacacgcaacctgaaagaataacaactacaacagaccaaacgcacc

SEQ ID NO: 592095 - DNA, 293 bp, Homo sapiens
gccagccgggagccccagccctgccactcccaattgggtgactggggatacatctttcaatattccaggcctcagcctccccattttggcaattggggaattatgttaagccctacctgccagtgttgtcctaaggaataagcgaaatccttcataaagggcttttaacccggggcctggcccaaagaaaaccccccccccaagttgggtgtgatttttttttttgttggatcatccagccccttcctgtttcccagaaatgtcagggtgattccccttgcggtgaaacccca

SEQ ID NO: 592096 - DNA, 153 bp, Homo sapiens
ctgatccgtagcttaagccatcctcttgtctcagccacacatgtagctgagacggcagttgtatgttactagaccgggctgttcattttaattttggtgtgtatatggtcttgctatgttgtctggtctgttctcaaactcctggtcttaagc

SEQ ID NO: 592097 - DNA, 114 bp, Homo sapiens
agactgggaagatgcacaaccaaggggttacaggcatcgcccatgtctcctcacctggtatttcgtaactcagacaactaaattgctttgtacagaaaacagaaaaagcaaaat

SEQ ID NO: 592098 - DNA, 256 bp, Homo sapiens
cgtgttatagacgatcaatcatgctgcatggactcactgcatacacagtagggttccatttcttcacgctgcatggatacactgcattcaaacacgctgcatggaatccactgcattcaatcgagatccattgggccacgctgcatggaatccactgcattcaatcgggatccatttaaccccgctgcatggaatacactgcatcaatcgggatgcattttaccatgctgcatggaatccactgcattcaatgaca

SEQ ID NO: 592099 - DNA, 285 bp, Homo sapiens
  misc_feature (220)..(220): n is a, c, g, or t
  misc_feature (230)..(230): n is a, c, g, or t
tgtttaggagtatcttgaagtcacctgggtatcaaagtattcagggggaaataaggaaccatcgcaattcctcacaagttttataaaacagtttaataaattcctagatctgtttacatgctttcattcaagcaggcactggtcactataagctaagggtggccttccttacagccatgaagacatgcttgtcctgtgtgtctgaatcacatgctcatgncacatacttntacaatcacatggggaagctttcacgggaacacacatcatggctactttcatacc

SEQ ID NO: 592100 - DNA, 790 bp, Homo sapiens
cagagtgtagcttaatacaaaggacccaagttacacttaggagattgcaacttgaacttgacctgttctgatagtaagaatctaggcccaaggacctcacttgccaagcctttactaccagataaacttaggccaagagccgatttaccgcaaagtaaaggtataggcgactaggaagggtggaacatgcctggcgcaaataggatatcgtaccgcaggggaccagatgaagacatttatatccaagcataactatagcagggactaacccctataccttctgcataatgaattaactagaaataacttgtgcaaggagagccaaagctaagaccccccgaaaccagacgagctacctaagaacagctaaaagagcacacccgtctatgtagcaaaatagtgggaagatttataggtagaggcgacaaacctaccgagcctggtgatagctggttgtccacgatagaatcttagttcaacctttaaattgtgcccacagaaccctctaaatcccctgtgtaaaatttcacctgttagtcccaaagaggaaccagctcttgtggacacctaggaaaaaaccttgtaccagagagtacaacaatttaacacccatagtaggcctaaaaagcagcaccaaattaagaaagcgttcaagctcaaacccaagtacttaaaaatccaaaatttaagtgaatcctcaacccatgtggcccatctatccctatagaagacttatgttgttacgtaccggaaaatttctcgataacctgggccgataaaacatggatgc

SEQ ID NO: 592101 - DNA, 408 bp, Homo sapiens
cgcggtggctttcatctgtaatcccagcactttggaaggccgaggtgggcggatcacctgaggtgaggagttcaagaccagcctggctaacatggtgaaaccccgtttctactaaaaatacaaacaattagccaggcatggtggcgtgcagcacctctaatcccagctactcgggaggctgaggcaggagaattgcttgagcccgggaggcagaggttgaagtgagccgagatcgcgccattacactccagcttgggcaacaagagcaaaactccatctcaaaaaataaataaataaataaatccaataaagccaagatactctccactttgggaggccgagatgggcggatcacctgaggccaggagttcaagaccagcctgaccctggagccccgtctctactatc

SEQ ID NO: 592102 - DNA, 445 bp, Homo sapiens
  misc_feature (335)..(335): n is a, c, g, or t
ctaccttccttggccagcacatcctcggggttacgcagcgggcagtcctccagtgacaggcaaccgcaaccaatgcagttgtccaggctgtcgcgcaacgcctccagcgtgcggatgcgggcattgaggtcttcgcgccaggccgtggtcatctcgccccactgcgccgccgtaagcttgctgttgggcgcataacggctgaatgcctgcttgatgttctccagcggaataccggtgcgctgtgccactttgataatcgccagtgtacgcagcaccagtgaggggtagcggcgctggttgcccgccgtacggacgctggcgatcagccccttggnttcgtagaaatgcagcgcagacaccgccacgccactgcgtttgcccactcagccactgggagcttccgcgggtggtcaacgccatgcgtgttgacctcatgtcaagtgga

SEQ ID NO: 592103 - DNA, 197 bp, Homo sapiens
gagagcgaagaaagcaaagacagccaaagaagggatagaggataacacctagagcgtaatcagaaacataatacaggtatgaagaaaaaggatcaagataagatgcaaaagagtgaagacaagtgtacacggattcgatgcaagttaaaaaggaaaggataagagcccaaacagaagatatataaagaaagaaacac

SEQ ID NO: 592104 - DNA, 771 bp, Homo sapiens
  misc_feature (29)..(29): n is a, c, g, or t
  misc_feature (38)..(38): n is a, c, g, or t
  misc_feature (104)..(104): n is a, c, g, or t
  misc_feature (123)..(123): n is a, c, g, or t
  misc_feature (127)..(127): n is a, c, g, or t
  misc_feature (142)..(142): n is a, c, g, or t
  misc_feature (167)..(167): n is a, c, g, or t
  misc_feature (172)..(172): n is a, c, g, or t
  misc_feature (177)..(177): n is a, c, g, or t
  misc_feature (211)..(211): n is a, c, g, or t
  misc_feature (213)..(213): n is a, c, g, or t
  misc_feature (216)..(216): n is a, c, g, or t
  misc_feature (218)..(218): n is a, c, g, or t
  misc_feature (231)..(231): n is a, c, g, or t
  misc_feature (243)..(243): n is a, c, g, or t
  misc_feature (247)..(247): n is a, c, g, or t
  misc_feature (251)..(253): n is a, c, g, or t
  misc_feature (257)..(257): n is a, c, g, or t
  misc_feature (278)..(278): n is a, c, g, or t
  misc_feature (286)..(286): n is a, c, g, or t
  misc_feature (288)..(289): n is a, c, g, or t
  misc_feature (321)..(321): n is a, c, g, or t
  misc_feature (325)..(325): n is a, c, g, or t
  misc_feature (327)..(328): n is a, c, g, or t
  misc_feature (334)..(337): n is a, c, g, or t
  misc_feature (346)..(346): n is a, c, g, or t
  misc_feature (349)..(350): n is a, c, g, or t
  misc_feature (353)..(353): n is a, c, g, or t
  misc_feature (355)..(355): n is a, c, g, or t
  misc_feature (358)..(358): n is a, c, g, or t
  misc_feature (362)..(362): n is a, c, g, or t
  misc_feature (379)..(379): n is a, c, g, or t
  misc_feature (392)..(392): n is a, c, g, or t
  misc_feature (395)..(395): n is a, c, g, or t
  misc_feature (403)..(403): n is a, c, g, or t
  misc_feature (452)..(452): n is a, c, g, or t
cttcgcgtctgccagcctggctggcagtnccgtctgtncatcccgccgcgccggggcagtctaggcggaggggggctcaggcggcggcggcctcgacgcgagtnagtgtcgtggttggggtgntggncccagagtgcctacnctcgccttcctgggcctcagtttcnaaatntgcanaatgggggtgaccatccctgccctgctggctgcnangancngctgtgagttttnaggcgtggatgnagcntggnnnaagnaatagggcgctttaaaaggcntggccttnannatggcgggagggagaccgcatctgaagaggantttntnnataatnnnntgctttgtnttnntgnantangtgntgctgggcattgtgatnctgcttgcttaangcntggagttnacggacaccttccctgtgcacacccagggattcttctgctatgacagtncctacgccaagccctacccagggcctgaggctgccagccgagtgcctcctgctcttgtctacgcactggtcactgccgggcccaccctcacgatcctgctgggagagctggcgcgtgcctttttccctgcaccaccttcagccgtcccagtcatcggggagagcaccatcgtgtctggggcctgctgccgcttcagccccccagtgcggaggctggtccgcttcctggggggtctactccttcggcctcttcaccacgaccatcttcgccaacgcggggcaggtggtgaccggcaatcccacgccacacttcctgtccg

SEQ ID NO: 592105 - DNA, 308 bp, Homo sapiens
gtaaggaattacacaaagttgaaggctacattcaagataagaggtaaaatttctcttttagatgttgaatagtatagattttgttcactagatgaaatgtcggtattaaaatacattgtcggctgggcacagtggctcacacctataatcccagcactttgggaggctgaggtgggcatatcacgaggtcaggttcaagaccagcctggccaacatagtaaaaccccatctctactaaaaatacaaaaaaattagccaggcatggtggtggacactgtaatcccagccattgggaggctgaggcagga

SEQ ID NO: 592106 - DNA, 699 bp, Homo sapiens
ggaagagtggtaatggcgtctgtatgatcttcgagagcctgctgcatcggacctcggccagtcatataaatgatgacaagcagcagctcaggccaacctttgaaccgtgccagaggtggaaggggaaaaggagaaggtgatttgagccaacatttcaaatgcagtattcaagcagagacctaccctctcatacagagataaatacggacagactactcaggatgcccctgaagaggttcgtaaccgtgacttcaggagagagtctggaagaacagagagagagctgctgcaagagagaaagactagggatcgtccaacccgagtaagcatacaatctcctcttcagtgtctaaaaatagccacggttagaccagattcctgccgcgcaaccttgatgcagatgaccctctgagcagatgaggaagatgacagattttgaagaagcacagtgatgatgatgatactgcggctcttcttgcagtaagctggaagacaattgagacgaagcaagagagctgacagagcaggccagggaacggaaacaagaacaataaagctgaagaagagaggattcgtatggacatacattctgagcggaaaccctctccttagtctcactggcccatcccagcctcaggacaacttcaacgttaacagaaggtgggatgatgacgttgtcttcagaactgtgcgaaggtg

SEQ ID NO: 592107 - DNA, 429 bp, Homo sapiens
gattaatcttttttggtattccattttatatatatctccctctttttagctatacttcttcttttggttttgtttttgcttatagtggtacctgtagacaatgggctgcacattttttatattgtaaaaatccagatagtaggccgggtgcagtggctcacacctgtaatcccagcactttgggaggctgaggcaggtggatcacaaggtcaggagatcgagaccatcctggctaacatggtgaaacccccgtctctactaaaaatacaaaaagaattagctgggcttggttgtgggcacctgtagtcccagctacttgggaggctgaggcaggagaatggcatgaacctgggaggtggagcttgcagtgagctgtgatcactccactgcactccagcctgggcaacagagcgagacaccgtctcaaaa

SEQ ID NO: 592108 - DNA, 901 bp, Homo sapiens
  misc_feature (663)..(663): n is a, c, g, or t
  misc_feature (828)..(828): n is a, c, g, or t
  misc_feature (901)..(901): n is a, c, g, or t
aactgattactgcaaaaattcaaaggattattagagactactatgagcacctatatgccaaaaaaattggaaaacctagaagaaatggataagttcctagacacatacaacctaccaagattgaaccatgaagaaatccaaaacatgaatagaccagtaacaagtaatgagattgaagctgtaataaaaagtctcacagcaaagaaaaccttggaatctgatggcttcactgctgaattctaccaaacatttaaagaagaactaataccaatcctactcaaactattctgaaaaatagaggagaagggactacttccaaattcattctatgaggccagtataccaaaaccagataccaaaaccagacaaagacacaaaagaaagaaggaacagaacaaaagacagaaggaaagaacagacaagaaagaaagacagaaaggaacagacagagagacagagagagagagaacgacagacagaccgcaaagacagaaagaagagaacagaaacgacagaaagaggacctacagacaatatcttgatgatattgatgcccctgaagattccaccgaaaactattagagcgataaccacttcggtacagtgcaggatacaaatcaccaagaatcagtacttcttttgccacagaccactacaggtagncagtatataactcttcgggacattataatacccgcataaccaccaggcaggggacccccgcaacattaccggccggaggaggcacccaggtagaggcagcggagataatatcagtacaccacacagtcgcaaaaatgatgctataatcatctactcatccgaaantagtaagcatcatcgtctctgcagcatcaccgctctagctaacaccacacccgacaaaggcagacaccgcagn

SEQ ID NO: 592109 - DNA, 179 bp, Homo sapiens
cgaggtacgcaaagagaagcacggtggcttcacacagaccgccacatgctgcacacgtccagtgtgccacatcgcatgtgcccacaccctgtgaaaatgctagtgtgtttgtctagccaacccactctctgtcagtgcatcttgcctgtctacccctctgtgtaaactacacgtatgta

SEQ ID NO: 592110 - DNA, 651 bp, Homo sapiens
  misc_feature (163)..(164): n is a, c, g, or t
  misc_feature (191)..(191): n is a, c, g, or t
  misc_feature (197)..(197): n is a, c, g, or t
  misc_feature (208)..(208): n is a, c, g, or t
  misc_feature (212)..(212): n is a, c, g, or t
  misc_feature (216)..(217): n is a, c, g, or t
  misc_feature (223)..(223): n is a, c, g, or t
  misc_feature (227)..(229): n is a, c, g, or t
  misc_feature (231)..(231): n is a, c, g, or t
  misc_feature (239)..(239): n is a, c, g, or t
  misc_feature (242)..(242): n is a, c, g, or t
  misc_feature (245)..(245): n is a, c, g, or t
  misc_feature (250)..(250): n is a, c, g, or t
  misc_feature (255)..(255): n is a, c, g, or t
  misc_feature (262)..(262): n is a, c, g, or t
  misc_feature (274)..(274): n is a, c, g, or t
  misc_feature (277)..(277): n is a, c, g, or t
  misc_feature (281)..(281): n is a, c, g, or t
  misc_feature (285)..(285): n is a, c, g, or t
  misc_feature (289)..(289): n is a, c, g, or t
  misc_feature (292)..(292): n is a, c, g, or t
  misc_feature (295)..(295): n is a, c, g, or t
  misc_feature (298)..(298): n is a, c, g, or t
  misc_feature (304)..(304): n is a, c, g, or t
  misc_feature (306)..(306): n is a, c, g, or t
  misc_feature (313)..(313): n is a, c, g, or t
  misc_feature (320)..(320): n is a, c, g, or t
ccgggggcgagattggcgcgggagtgtggccgcgccccatcagatgttctcccttcaccagcgggagcttgatatcccttgtctgtaacatagacccgggtactgcgggaggggagggctgctggggaggatggggggatgttatataaatatagatataatnntattttcggagctaagatggtgttatntaaggntggtatgggtnagcnctcnngcccangctnnncnagacttcngcncangcatnaacangacttgnccatctttccanccnctgnggangcanttntanctnacttgngnaggacanagcttancacagcctctactgcctgccacaccgctgggaaccatacaccagttaccggaggaagtgagaaggattcactatgtgcatgcatttgccaaaggcgaacttagctcgctgtgctaggacagacacatgttcatactgtgatattgatgtaattgagttctttaaaggctaaaatccggattattatctattgcaaattgcgttcatttttcgaccctgatggtactcgcatttggatactatagctggttgatgaccccgctgggccattgagacctttactttagtggtatatttgactttcatcaagggttggaatttgcgctttcccg

SEQ ID NO: 592111 - DNA, 768 bp, Homo sapiens
  misc_feature (599)..(599): n is a, c, g, or t
  misc_feature (759)..(759): n is a, c, g, or t
gcttgaatggaacgagcggatgaacaccttgcaggcccatctggatgatgcgtaccccaaggatgtcggtgagtaggcaacatggaggatgttcgtaccgtgtacgtcgcgcatggcatcactgagcaatgcgctccgctaacatcgcgcgtgcgaactatgagagacggatcgtcggccgcctacaacattcctgacagacagtcttctagcggtgtggccgcacgagtgagaaccagtccagtggtttgcatgtgcagaccgggcgagcttggagactcccagacgggttgcaacatggataacaagaccagtcgaaaacgtccatctaatcgctatgagacgaaggtccacagcgaacatcgcgtgcactcgataagtgtgcgtgcaggcttatcagtccggaggtttgttggctggtacaggtgtacggacgattccccatgtaaccttcaggtccgggagcctggtgacaagggagagtcgcacctcaatcaggtgaacaccttcctgagggacgtgtctaaccacgccatgacgggctgagtccaatactctcgttcactggaaccatgagtagagacacagaggatgctgangcaaagtaatgctcatgtatgttatgcaatcgattgacggggccctgcttcacaatgcgtgggagcggccaatctggtgccagccagccgagccaggaatcgaggcagggtcacagggcagggacagaatagcaggaagctgactgtgtcgcctcaacgngagaatctc

SEQ ID NO: 592112 - DNA, 597 bp, Homo sapiens
aattgcggtccagcctgggcaacaagagactccatcaggaaaaaaaaaaaagattctggtctcgaaggccacggcacctatggtcggtaggtgtaaggttcccgttcagttaatgggaggtaataaccccgggcttacagggtggtttggcagattactttaaataattaaggtataatcctgggcagggggatgggcacataaggggtatttaactataagtggactttccggggtacctaaaaaagaggagggtcagggaagatgttggtccttggcttactccttcctttcccagacttggtgtaagatacctcttacttcccaggctctttactctcccttcaaaccaagatcttgacgggtgcatctctttggtggcaggagaatgtgatccgagaatgtaccttaaaggagctataccagggggccaagaaattatcaagggcgggagacaatatccctgaggagcagcctgtggtttcaacccccaccacagtgtcggatggggaaacacgagggtaaataagatcctcactgtggagtgttcctctctgtcattcaggttcttcataacaaagctgaggtgagcgggac

SEQ ID NO: 592113 - DNA, 1045 bp, Homo sapiens
ggcaggcactgcccgggctggacgacgtctggcctggctcccgtgcgaagtgtgcagctggaggagcggcccagagcgcgcagctagtggcacatggctgaagacccctgtgtgacatgtccactctcctgatgctgtgtggtgctgtgctgcatgatgcatgtcccatcccctgtgtggtccctgggcgctggctgactgccggctggttccctgcgctgcagtagctcccctgagcctggtgctgcaccggatggctggcgagatggtcgcgcgctgtcggcctcctgctgcgcgcccttgcagctgctactgtgtgggccacctggacgcccagcccgcggagcgcggaggccagtgagctgcgcaaggaggcggaggcattcctagagaatgtactgtgatagcctcaagtgaagcatggtccccaaatgctcccacctccactcgattcagctgatgccatcagagctgtttcagtgggtgtcccagctaccctgtcagctggcgttgtttggacctgcgccaccctgcgccagatgactcgtccccgctgcggggttacagataccaacagttatgcgtgcctgggctgagaggatcagtgacttgtatgctagacaccggaccaaaatgaggcgtaacgaaacgctttgcaaagcagggtaacaaattggtacaagcaagcacctctcctaccggcgtgggtgaactggcctgagcattctgccggagccggcagttcggggcgcccgtgcgcgccggcgttccagttgttggggcaacggtctcagcgctggagttctgggaggacccagccatcaggcccgctgactccgggtcaccttctccacgggaccacacgatggctggggtaaagtccttttgattggccagggtgcgccctgtacagcgcttcttaccgaccgcggtgcatggcaattcgaccagataagccatgaccgtggacgacgcagggaacaactgttgtgagtgtggccggaaatgcacagatgtgccactgatcggcgagcgattggccaaa

SEQ ID NO: 592114 - DNA, 362 bp, Homo sapiens
  misc_feature (263)..(263): n is a, c, g, or t
  misc_feature (279)..(279): n is a, c, g, or t
cggccgatcatgctttattagttcaataacagatggggggaaaaagtaacataatcagctgggcccggtggctcgggcctataatcccagcgctttgggaggccgaagtgggtggatcatctgaggtcgggagttcgagaccagcctgaccaaacatggagaaaccccgtctctactaaaaatacaaaattagcagggcgtggtggcgcatgcctgtaatcccagctactgaggcaagagaatggcttgaatctgggaggcanaggttgtggtgatccnagatcacgccactgcactccagcctgggcaacaagagcgaaactccatagttggcgatatcaggtggtgcatagccatcattc

SEQ ID NO: 592115 - DNA, 256 bp, Homo sapiens
attcacaatcttacttgatatttatcattgagttaaattgcacataccattaaggtatggttaaaaactcatctctgctacaggcagacagactttcctgtcgcaactctccacttccggctataaacaccccctatcaaactaaacaggaagtaacttctatgtgcacaactatagcacaactactacttgaaactcaaagcctttcctccttaattataatatcttccgactgcttttctctatatagattctc

SEQ ID NO: 592116 - DNA, 470 bp, Homo sapiens
  misc_feature (358)..(358): n is a, c, g, or t
  misc_feature (443)..(443): n is a, c, g, or t
cacgaggcatacgccggccaggtcctggttgaggtaatggcttggcgtgatgtgccagcccttcatcttcttgtgatgcacgatgatccggtgccaccaaatggtggggatgatgtaggacttgtcgagcacgtactgctccagctcccgcaggatcttgtagcgctccttcttgtccagctcgcccgactgcttgtcgtagaggtagtccaccttgcggtccacgtagcccgagtagttgatggtggagcggtccgcggacaggtacttgagcagttgcaggttgggctcatccatgaaatcgcagttgaagtccagcgccgcgtcgtagttgccctcctgctgccgtgcaaggtanaggcgggtctcaagctgctcgtgctccacctgggcgcccacctgccgccactggtcgatgaggaacacgcccaccgggggtgtanggcatgggcacgttgcggttggtgagc

SEQ ID NO: 592117 - DNA, 299 bp, Homo sapiens
  misc_feature (124)..(124): n is a, c, g, or t
agttactcagggtcgagtttcatatatctcgggtatttattgttttcaaatacagtgtttgcaaaccagttggtgtaagagatctaatgtgttttaatataccgacacacattatgtatattantatacatcttaatgtacatttctctaattcttgcaacagttctgaagagtatatatagtaagcgttatctcctgtgatagagctgaagaatctaagtcttagtatagatagagtaacctgcttactcacacacacagaaggagttgcagagctaatatacacacacatatatctc

SEQ ID NO: 592118 - DNA, 317 bp, Homo sapiens
gagtgtgctgtggtgatctagaggttcccttggggctccattcaggtatggaaggcaagaccatccttccagcggaggtggaagttctgcacatggacgttcttatacggggctgtctttctcgggcaccagagaaggagcccttcctgggccgaggtctcttccacggagatgtccgggatggcgaacctaaggatgagggtccagatcattcccagggtcatcttggcgtggccgtccacaatctcttcggccccgatggagaccagctggacgccttggcgggcaataaagtccagcgcttggttcacatggtg

SEQ ID NO: 592119 - DNA, 388 bp, Homo sapiens
agcccgggccttcatgcagttgatttctagtgggagagtagcaaagcagccaagagaaataaataaaatgtcatctgttaggaagcccattctaaagagaagagagaccaggtgtggtggctcacgcatgtaatcccagcactctgggaggctgaggcgggcagatcacctgaggccaggagttcgagaccagcctgccaacatggtgaaaccctgtctctgctaaaaatacaaaaattagccaggcatggtggcaaacgcctgtaatcccaactacttgggaggctgaggcaggagaatctcttgaacccaggaggtggaggttgcagtgagtcgagatcatgccattgcattccagcctaggcaacacgagcaaaacttcctctca

SEQ ID NO: 592120 - DNA, 697 bp, Homo sapiens
cccatacattgggacagacctagttcaatgagtctgaggaggctactcagtagacagtcccaccctcacacgatacttcacctttcacttcatcttgcccttcatgatggcagaccctaggcagacatccacctcctatatcttgcacgaaaccgaggatacaaacaacgcccctagagaatcagctcccattccgatagaatcaccttccacgcccttactacaacaatcaaagacgccctcggctaagcttctcattccttctctccttaatgacattaacactattcatcaccagacctcctaggcagacccagacaattatacccatagccaaccccttaaacacccctccccaatcaagcccgaatgatattacctataacgactacacaaattctccgatccgtccctaacaaactaggaggcgatcctagccttataacctatccatacctcatcctagcaataatcccccataactccatatatccaaacaaacaaagcataaatatttcgacacacataagcaatcactttattgactcctagacgcagactcctcatactaacctgaatcgggaggacaacagaaagataacccttttacatcatgcacagtaagcatccagtactatacttacaaaacaaaacataatacataaaacaatatcacctaatagataaaaaatatcaa

SEQ ID NO: 592121 - DNA, 171 bp, Homo sapiens
attatcattacatcatgccttttttgtccagtcatatttctacacagctgtccattccgcagcgaacctaagcttaagaatatgcacttctccctgggtctctgggtcttcatttctgagcgctcccatgtgatggagaattttgatgaaaggaatgttgtcttgggggag

SEQ ID NO: 592122 - DNA, 355 bp, Homo sapiens
tccgctgggacaaggggggagggatgatgaacactgtgcttagttgggaacataaagagtttgtaggcataatccttgacattccaagtggtgcgtagaccttatatctagggcatgggatgctgaggatgtcataggggtggaggaggaaacttgggctactgggaaggttgctggagcagcacggtgcaggatgcatgaaaaggggagatgaatacttggtgtcagggtagttcagcggggttgctggtgtggtccagtagagagctagtcggaggagggcttgcggagcagtaggcctagaagggaaagggaatcatgaaaggtagaggaaagggaagtaatcatctcagtt

SEQ ID NO: 592123 - DNA, 484 bp, Homo sapiens
  misc_feature (59)..(59): n is a, c, g, or t
  misc_feature (64)..(64): n is a, c, g, or t
  misc_feature (86)..(86): n is a, c, g, or t
  misc_feature (144)..(144): n is a, c, g, or t
  misc_feature (207)..(207): n is a, c, g, or t
  misc_feature (212)..(212): n is a, c, g, or t
  misc_feature (247)..(247): n is a, c, g, or t
  misc_feature (265)..(265): n is a, c, g, or t
  misc_feature (305)..(305): n is a, c, g, or t
  misc_feature (476)..(477): n is a, c, g, or t
ggctctggagcccaaaggctaaagccatcaatatcccccctgggccctgcacggtatanacccnagatggcctggaaagcaactgnaaggatcccacaaaaagaagtgaaaaataggccaggtcctggccttaaactggatganattcccacccattggtgatttgttccctgcccccacccctaactgatcaattgaccttgtganaatanaccttccccacccttgagaaggtgctttgtaatantctccccacccaccccangcccgcacccccggacccttaagaaggtattttgtaatantctctccgccattgagaatgtgctttgtaagatccaccccctgcccacaaaaaattgctcctaactccaccgcctatcccaaacctacaagaactaatgataatcccaccaccctttgctgactctttttggactcagcccacctgcacccaggtgattaaaaagctttanngttcaaa

SEQ ID NO: 592124 - DNA, 195 bp, Homo sapiens
cttagtctccccagtaactgggattacaggggtgcatcaccgtgcctggctaattataggatccttaggagagacaggcttaaacataactgacacaacggtcttgaactcctgacctcaggggatctgcctggctcatcatgcctggcctctccctcataatagacagacatctttttggggaaataggtcctc

SEQ ID NO: 592125 - DNA, 326 bp, Homo sapiens
ggggggaggggggagggatagcattaggagatatacctaatattaaatgaagagttaatgggtgcagcacaccaacatggcacatgtatacatatgtgacaaacctgcacattgtcacatgtaccctaaacttaaaatataataataattaaaaaaaatggttagatggttgtctagtcagtttggctgccataacaatttaccatagactgggtggcttaacagcagtactcattctcacctggatctggagtccagcctttagacctgttaggaataattttgtttcttagccgctagtctatggtatttcgctatacaacctc

SEQ ID NO: 592126 - DNA, 400 bp, Homo sapiens
cttctgtctctgtagagcatggaggccacttgccgtgttcagtctcctagcgatgactgagcacgtcagcgctgctgcccaaggccactctggacgctataagctcatgaaggcaggtggtgagaagcatctacctgccacgtggttcattgctatgcgaataagctgatgagaggtgaggatttcctttggatacctgcctaagatctcaacagagatggcaacttaaaaatgaagtctgtgagttgccggaacctgtgatgggcagcctccccacactgacagcctccagtccctgctgggcacaggtctcagcatggcaaggcttgacactaaggtgctgctactgccctccagatgccagcactactcctggggcatgggagcgagggctctgggg

SEQ ID NO: 592127 - DNA, 573 bp, Homo sapiens
accagagcagagagagggcgaacaaagggcagcaaggctacggagaggctgaagaagaagctgtcggagcaggagtcactgctgctgcttatgtctcccagcatggccttcagtggtgcacatgccgcaacggcaatgagttacactgttcctgcatctcctctagactatgatgcgtgcagcagtggacgggagaacatcctgggagcagcagcaagaagtgtttcgagaagcttctccctgtacatccgtgtgagctgcagaatgctggaccaactctgtgttgtgaaactctcagactgtccacatgcattccttttgagcattcaataaggaagcatgatgagtctccggtggctctatgggggtttctggaaatgtcatcgtccactcagccactggattttaagcagaggttcaaatctgtactgcacccttggaggtggattcctttggggtatcttgtgaataaagcaaagacgcgcgtctacagggacacaggtgagccaaagtggaacgaggaatttgggatagagctggaggggctcccagaacctgaggatacacacgggt

SEQ ID NO: 592128 - DNA, 424 bp, Homo sapiens
tcattatagattagccttcctcaccaacattgttttctaaaatgttatatattactaaagggcaccagggaagaccccttccctcttccctgttgatctttattatagattaacttcctcttatctttctcacaaaaaggctttatggttatcacattgtcttcagatggaatattaaaaatactcttttaaattggaaaggacatgaaaacaagctgtatggaaaacaaaatgaactataactaattaaatgtttataactcaaaaacaagctttgtatagaaaatgttatatataatcctactctattttctgtctatataagaacctttaacttcagagccctgaccccatttctctggagtctgtgtcttttaaatagccattcccagcttttcactttaataaactctttataacttga

SEQ ID NO: 592129 - DNA, 225 bp, Homo sapiens
gtcccactaaaaatttcattagcctggtgtggtgacacgcacctattgtccaagctacttaacagcagaggcaggaagatcccttgaacctgggaggcagaggctgcagtgagccgagatcgtgccactgcactcctgtctgggtaacagagcacgactccatctcaaaaaaaaagttgtctgcttattaatagtcttactcatttggggaatactactttaaaa

SEQ ID NO: 592130 - DNA, 309 bp, Homo sapiens
cagatgaatatttcagtaaaactgagactaagttgataattttttccactgaagtctgtattccaattttttttttttggataccgggttttgccccaggctggatcacagtagccccaccacggttacaaagcctcgacctcctgggctcaagtaatcctcctacctcagtctcccaagtagctgggactataggcatgtgtcccagttatgtttggcttccagtctttttaatattaagggataatgattttggtgaattatctcctctttttacatcctctaatcagttacaattttaccgggggg

SEQ ID NO: 592131 - DNA, 406 bp, Homo sapiens
atatctacgcgcacacgcaacttgtccgcctctcggcttcaagatgattctcggtgtctcaacctcctgagtaagagaataactagtcagcgccaacaacaacagactgatgaagtatacaatagcaaagactaggtgattagagaacaaaagtaggaccatggtttggcacaagagaaagtacatggacaactccgtagtgatagagaccgacatcaagaacatagccagaagtgcttaagctccacagagcgtaagttccacgcatagagcgaaccgatctgcagagattcaacagcaagcaagtatgggatacaattaaggtagagctacatgacaaacaggggcatgcgaggacttccacgcagatgaagactgtaaggcagaaatctatcgtgagtacaga

SEQ ID NO: 592132 - DNA, 477 bp, Homo sapiens
gttttattttttctaaggtttgagggggaatgctggagatggtaatgggtatggagacctatcatataagtaatgctagggtgagtggtaggaagttttccataggaggtgtatgattgggtcgtagcggaatcgggggtatgctgtccgaattcataagaactgggaggttaacaagtagggtctggggtgaccaaaactatgtggtgtacaagcttccagggggaaagtgcgtaatatgtggtccctaggaagaattgtaggtggtggacgggtgtcatctactacagacctgttcgggggtaatcacgggattattgaaacaacaaggggccaaaggggcgcctagcaggctatattcagatcgttcgaagctcctgacaacctaagtcacgtaccctccccctcgctggcacagcgaccacagggggctccaggtaggcccctgaaacgtgtaggagaaactcatattatggc

SEQ ID NO: 592133 - DNA, 669 bp, Homo sapiens
ttgattctagcggatccttaaacaggctgatcctagaggctccgacccatccggcatggccaggaggcaggctgcgcacgatgactggtgctacatggggcttggccctatcccggtggcgtggcagcccagatgctgcagtaacactcattcccaggcttcactatgggcactggccgacatcccacaatccagaggctcaacactaaagacatcggctaatacatagcaagatgtgtgcaaagttctgggggagcccagcaggtggctccacctgactcccactctgggtggggcaggtgctgaagctgcagggctggccacgaccctttgtactgtcaactctggcttcctttacaagaaactaggagcacttctagcacattccttccttaccctgctctctcaaaaccagcctgacccccatggcccctcctggaaacatggtactcagaaaagcagggaccaccagtggctggcaaagtgtttggggaaaaaaggaggtgcaaagtcagcaagaaaacaaatgcgcgctggtcccgccaaggcagggtgtgcctagtcgcgggggatgttggggggcgggatctgcaggtcgtagggctccacaccccagatctccgtgcatactccgtgatggtccggcactgagaactgccgagagcatgt

SEQ ID NO: 592134 - DNA, 599 bp, Homo sapiens
ggtaaagtgactcatcatcttccttggcctgtgtatctagaataatcagttcaagtatatagtagagtactcttattcttgaaatctgggaaatatcatcaacagacatttttcctttgatctgcctttactgccttatcccttatgtccttatcaagcctcacaaattcttcctgttctttcttctgcagggtataagctctcttgtagtaattttaacttacaggggccctgatgttacatctgatgttatttctctttctcttcttcttcttttaactgggaagcacatttcattgacatttctatacttgtctgtttcttccaagcttcaactgccaatttctgtttctttctttgttcctctttttgcttttgattatcctcttgtctataatgaaaaagcacaggtgtgtggtctgccttttcctttaacttgaaaatttcctcccttggtggctgcttcttagtttaccaaatctgaatggactctttatttctttctactagaagcagaaagtttagataccatttatcattgctgttgaacttcatcttgtgtcaaccaggaaggtgtctagaccttctccatagatgtg

SEQ ID NO: 592135 - DNA, 248 bp, Homo sapiens
  misc_feature (86)..(86): n is a, c, g, or t
cccccccaaaaaaattttggggcccttttttttttttctcaagggggggggaggggggaccctcccccccgggttttggggttttncccccaaatggggggggttttttttttttttttcccccccccccccccggggggggggggtttggggggggggtttttttttttcccccccccccgggggggggggggggggggggggttttttttttttttcttttttttaaagggggggttttgggggga

SEQ ID NO: 592136 - DNA, 101 bp, Homo sapiens
atcctcccacctcagcttcccgaatagtaggactacgggcaacaggccaacacgcccggctgatttttctattttttatagagacaaggtttcactatgtt

SEQ ID NO: 592137 - DNA, 311 bp, Homo sapiens
agggcagtggtggggtttggagagaggagatagctccattaatacacatgtttaaaagatggaaagttcacgcctgtaatcccagcactttgggaggccgaggcgggcggatcacgaggtcaggagatcaagaccatcccggctaaaacggtgaaaccccgtctctactaaaaatacaaaaaattagccgggcgtagtgacgggcgcctgtagtcccagctacttgggaggctgaggcaggagaatggcgtgaacccgggaggcggagcttgcagtgagccgagatcccgccactgcactccagcctgggc

SEQ ID NO: 592138 - DNA, 232 bp, Homo sapiens
cgcgggttccgttggctgtggcggcagctgtacgcttgtgtgcggcggtggcttcggggtgggccgtagcatggtccacatgcgaggcgcatggtgcccccttaatgcgttgcgtgtgagggcgtggcttgtggcagcagaagctggcttctgtgctactccagagataacgtggagctagggctagatcgtggtagtgggcctggccgatcgggctaccggcttacccccg

SEQ ID NO: 592139 - DNA, 113 bp, Homo sapiens
cacgagggggagcacaatatttgaatattaggcgctgctatcaaatctgttggcttcacgccataaacatgagcttatgaatccataatggacgacattttcttcagttgttg

SEQ ID NO: 592140 - DNA, 430 bp, Homo sapiens
gtcggagttgattaatacactgacagtacaatgtatcattcatgactgatatttgactgtaacttttcccaacgtcagtgtgcatgagcatatggacttgacagacatctctcacccagacgcccagtgtgaacacacccacattcacatctctgggtggaaacagcctagagtggggacgacgctaatggtgttgctatagaaccgtctttgcttaccctattagactcgtgatttgtatgagacaccattgcacgaaaatttatccctccagaagtatttattactaaagaacacaagcaaaaaaagctaaattgcactggttaaagtacagtttccaacagctgtccttcctcagtactctaatgtccactcgaccgcgagtgcacgtcactgttgtgtgtacacaggtggtcccaatcaaaactcc

SEQ ID NO: 592141 - DNA, 320 bp, Homo sapiens
  misc_feature (53)..(53): n is a, c, g, or t
gagaaccagaacaatctaacggttacaaaacaagggcagcgggcccggcgcgntgctcacgcctgtatctcagcacgggaagccaaggcgggcgaatcacttgaggtcaggagttcgagaacagcctggcccacagggtgaaactctttctctactaaaaatacaaaaattagcggggcgtggttgcgggcacctgtaatcccagctactcgggaggctgaggcaggagaatcgcttgaacccgggaagcggaggttgtagtgagccgagatcgcgccactgcactccagcctgggcgacagggcgagactcccgtttcg

SEQ ID NO: 592142 - DNA, 349 bp, Homo sapiens
tttaaaaaattaaatttccattccccattccaaaccgtaagctgtctttccgaaaatttttggaggataaaaacctgaaggaaaaaagtggcccgtgtaggtgggattccctacccaggacttttagttggatcccccccagaggttttgaagtttgtgatcaaggtttggatattatccccaactttattaagaattgttttttaattgggtataccctttttccattaatagtttccaacccaattgtttatcccgctgtattaaatggacataattttcctcccttggttttttggtattgggccagtttttccccaccacttgttttctagagttaaaatcccca

SEQ ID NO: 592143 - DNA, 747 bp, Homo sapiens
ttttttataaaaatatatattttgtccaagaaaaaaaaaagcatacatatgtgattatggctaaatcaaaggtaactggaatgtatatacttttggctaatgttccagcaacactgctattatactatccaaatttttattggtaacaaaacctctttaagcaatgggtgattggccatgggacttttcccatgtcttctggctgtaattatcctgtgcagaactaggaagaaattttttcaggactggctctatggtttcctttaaaagaaaaaacttctggtttggtttttagcagtcattatttacaattgggcagtgattaactgggcaaggcttccttccgtgtttatccctgtagccatcatttaagtcaggaacagtcagaaaaatatttattttattttttttggggtggtctgcaaaggtaaaaatccattaaaaccttaagttaaatataaatgttacaactcaatgttgggtttaagattttatacagtatgggtgtgggggggttggagggtatataatgcagcattagcaatatggttcccaatagaggagttaaatatatttggtcacaggagacctgtagcagtcaaagatttatggatttatgacaaggaacttatgaaatgttgtgtttcttgggaatcttgataaggtaacatgacataagattctaagtggatggaaattaatgtttacctcaagtggaatttaaataatacttcttagttcaatttc

SEQ ID NO: 592144 - DNA, 310 bp, Homo sapiens
acacagtgagactcctgactcctttaaaaaaaaaaaaagaaagaaagaaaataaaataataagtgctggggaggatgtggagaaactggaagccttgcacactgctgctgggaatgtaaatggtgcagccactactgaaaacactatggtgtttcctcaaaaagctaaacagaaatatcatatgatccagctgttttccctacacataattacattcctctccctactatataaacccctgattttcagttcgtcgaaaagacagatttgagactgatctcccttctcctcacctgacatcacccgaatt

SEQ ID NO: 592145 - DNA, 873 bp, Homo sapiens
tgggcaagtggcagcaacagaggggactagcagctgaatatactttacaccaaatctcagaagattcagaacttagatgagtggggcccatggacatggaaccgatggagccttggaagtgcggggagccccatctccccagaaggagcatgtgaaccccatgcatgagagtgggccttggtgtatcactgtgagtgaaatagacctgccaagggaaatacactgtcttcagaaagaaattctagtgtggcttcaagcagactgatcaacatttgtgcagaggaaaacagcctacacctggtcctctttctcttcaatacaaaatgagataataggggtctggaacggcacaaaccttcaagacctatggaagtcagttgcagccagctcatcacatagaggtgcaggtgaggtgtatatcatcacggtggacaaatatctggctgcttcatctccatctctagagcccaatattggagctatacaatacaaccgctatggactcaaccaacaggccccaacgaaagaattgacatggagggcaagccacctgctccaaatgcctgagcctgatgacgaacccagtaagcatcaactgtggacacagcctactgccagttgagtatcaacagagttctttaaaaacccaaggccaacagcaactgaagccaggagaaattctgctggtcccagtgaacgaggctccaaagcaaatggataaggcctccggaccccaacaaaggagcgcggcgacgccctaacccagaaacagcccaccaaaagagcaaaggccacaacagaaatggcacaggatagaggacacacgcagacagcaagaagcaccatagaacaggggacaaaccaacggggaaa

SEQ ID NO: 592146 - DNA, 372 bp, Homo sapiens
  misc_feature (82)..(82): n is a, c, g, or t
  misc_feature (253)..(253): n is a, c, g, or t
  misc_feature (260)..(260): n is a, c, g, or t
  misc_feature (294)..(294): n is a, c, g, or t
aggcccaagatggggggacgtgcgttactcaccggccccccgtctgagccctaagtctggggccgaagtcgaagccggcgantgccgcggagcgccgggcgccggaacgacaggaggcgtggcgccgccctcgtagatccagtaacgacgcaattcgcggaaacgcctggaacacaccgagcgccagttccgtaaccgccggcaagatactgatccggggcctcccgggggacgtgaccaaccaggaagtacnatgaacncgtggctcgagtgactagtcgcagctcaagatancgtgttttgtggacaaatacaaagggacagccttcgtgaccctgctgaatggggagcaggccgaggccgcaatcaatc

SEQ ID NO: 592147 - DNA, 863 bp, Homo sapiens
  misc_feature (25)..(25): n is a, c, g, or t
  misc_feature (77)..(77): n is a, c, g, or t
  misc_feature (120)..(120): n is a, c, g, or t
  misc_feature (168)..(169): n is a, c, g, or t
  misc_feature (226)..(226): n is a, c, g, or t
  misc_feature (247)..(247): n is a, c, g, or t
  misc_feature (258)..(258): n is a, c, g, or t
  misc_feature (300)..(300): n is a, c, g, or t
  misc_feature (305)..(306): n is a, c, g, or t
  misc_feature (320)..(320): n is a, c, g, or t
  misc_feature (330)..(330): n is a, c, g, or t
  misc_feature (335)..(335): n is a, c, g, or t
  misc_feature (339)..(339): n is a, c, g, or t
  misc_feature (374)..(374): n is a, c, g, or t
  misc_feature (377)..(379): n is a, c, g, or t
  misc_feature (384)..(384): n is a, c, g, or t
  misc_feature (398)..(398): n is a, c, g, or t
  misc_feature (405)..(405): n is a, c, g, or t
  misc_feature (408)..(408): n is a, c, g, or t
  misc_feature (448)..(448): n is a, c, g, or t
  misc_feature (451)..(451): n is a, c, g, or t
  misc_feature (456)..(456): n is a, c, g, or t
  misc_feature (467)..(467): n is a, c, g, or t
  misc_feature (534)..(534): n is a, c, g, or t
  misc_feature (536)..(536): n is a, c, g, or t
  misc_feature (542)..(542): n is a, c, g, or t
  misc_feature (548)..(548): n is a, c, g, or t
  misc_feature (579)..(579): n is a, c, g, or t
  misc_feature (585)..(585): n is a, c, g, or t
  misc_feature (587)..(587): n is a, c, g, or t
  misc_feature (590)..(591): n is a, c, g, or t
  misc_feature (610)..(610): n is a, c, g, or t
  misc_feature (644)..(644): n is a, c, g, or t
  misc_feature (677)..(677): n is a, c, g, or t
  misc_feature (684)..(685): n is a, c, g, or t
  misc_feature (694)..(694): n is a, c, g, or t
  misc_feature (703)..(703): n is a, c, g, or t
  misc_feature (707)..(708): n is a, c, g, or t
  misc_feature (732)..(732): n is a, c, g, or t
  misc_feature (741)..(741): n is a, c, g, or t
  misc_feature (743)..(743): n is a, c, g, or t
  misc_feature (749)..(749): n is a, c, g, or t
  misc_feature (752)..(752): n is a, c, g, or t
  misc_feature (838)..(838): n is a, c, g, or t
cacattcgcccacccctgcgtcggngctccccactcagggttgggccggggggggggcagcgttggtctgggagcgnttttgcgctcgctggtgtgtgagcagttctttaggtgacatgntgtttcattggtttatctctcatttcgggcttgctgggttttcttccnntgtgtagttattggccagctgcaggtgaggcctgcttggtacgtctcatctcttaantgcttggttggccagtcattntctccgcatanggtcacctttcattgagctgggggaatcgtgtgactagttgnttctnntaggtgtggatgtntaagggcttntgttnctcntgctcctggagtagaggctgtactttgtcctcccngtnnntgttncgttggttttgctntgtttcntgnttaaatttttgggaggtggcgtttaagagctcctcattcnttnttacnagttcttcgtngctcagggtttttggttttgtgttttggtcagcggtttccctggggtttgttctttcgggttccttntnttcctntggttntagtttttcttttgttgctctctggtcttcnagggantnctnnaggtggtcctcctctgcangccgcagccactgcttagccacctccctcctctntagcttccggagagtttccaactgctccttcangtgtgtnnagtacaggnttttttttntttnnaaaggacggaccctttcgccgaanccgcctgcngncggcanggnccgcaaaggcagccaggtaccactggtggaagtcctgcagcttggcagcgcccttcctcttgcgcttctgtcccagagcctcctcnacacagggggggacagagtaaggcc

SEQ ID NO: 592148 - DNA, 1276 bp, Homo sapiens
ctggtgagatcttcccacaggagggccagcgctgtggaccttacaacgccgagtgcactgcagttcttctgtgccctagatgcacggtggggacccactgctcggtgcgcacctgtgctggtgacatcacggatggttgcatggagtgtcgccgttgttctcagacctctgccagctgcccaaaacaagccaatagagcctccacaccagtagaccggtgagagaaccagtgtcccgtaggcgaattcgttggttgcacacgccttcgccctctttctaccagctgagatcacactcctctgaagcccaacgaaggtgcaactgtgaatatggaacttgtttgacgtggtcaacagatacttgagctggtactagtggtacgtcgagtcaccacctgtgggcgcggacatgaggcatcgagctgtgtgcacccacaaaatgtaccaccccgattggcctatgaagccagagtgagtgggatcacgtgaccctaatagggtatagtctacagaggtgagctccctcagagcggagtatgcatggatggtgattcaagaaccattagactagacgaaacgagacacttacgtacaccggagagaggacccctcgtagacctgtgcatttgcctaatgctcttgtcagatctctttgtgcaatgcccttccatctttcccatatgtgacccactagggagctgtgaatccatccgcagacgaaagggttgcatcgatatcgcgaaactgcgaaactattacgaccagggctaaatcacggggacagaaccgttcattggcctggagggactaccacttggtgacattggggggggccaccaggggacggggcgaattcccttccactacccagcaagcacgggtagggcgccaaccaacattctccttggtaacacggacggaggatatgtctggggacaggacttaccaggacgcgcacgaatggcccacctttcttcaacttcaaaaacaaattaacgcaagaactaaaggcccttcaggaatagtgacccccagtaggacagtaacccttggagaagaaacccatgcggaacgggaggcgacccactttgaagactggtggaacctatagcgcctcggggggccccagtgacccaaaacccgtagtccagagcatgaaccacaacagcgtatatccaatgcgactaggggcccaacaacagctgcacgacagtgagcaaaaccatggggacacagaaacacgcttggtgctctgcgcccagtagcacacatggtgg

SEQ ID NO: 592149 - DNA, 172 bp, Homo sapiens
gtgacagtcagtagttacaccattctgccttatggtatcatcatctgctcatcttctcttcctgtcctagcattgaaactttatatgaggtcatggaaactccataattgattttacacactctttttcttgtattctccccactgtatggatgtgagtaccaccatgatgg

SEQ ID NO: 592150 - DNA, 127 bp, Homo sapiens
cctccccctccccccccccccccggccttcagcttccctgggaaggtccatgggcgttcctggggaaatcgataccccttcggctttgttagaataacgcgaaaccttaaaacccagaaagggttta

SEQ ID NO: 592151 - DNA, 315 bp, Homo sapiens
gtctgtaggacggtcgcagagtatgcagtggcggtggacctggcaggtcggctgcgaggagctcctgcggacctgccgctgagaacgggctcgctgcagtacctgctgcgtcacctacgcaggatcgtggaggtggagcaggacaacaagatgacccccgtggaaacctgggcatcgtgtacgggcctacgctgcttcggccacggcccaccgaggccaccgatgtcctctcctccctggtggattatccccatcaggcccgacgtcatcgagactctcatcgtccaaataacggactggtcttcgaggcggagc

SEQ ID NO: 592152 - DNA, 265 bp, Homo sapiens
ttgggggttccctgcccccccttcctgcagccccccttcttgaagtgtggtggcaggggacccgattcttaggggccctccaaagccaagcagcttgcgatttttggtacaaaaattagccggaggggggggggggcccatgtggtcccacctgctcgggaggttaaggggggaaagtcgtttgggcccggggggtggagcttccagtgagccaagttcatgcccctgccctttagcctgggggccaaaatgaggttttgtccca

SEQ ID NO: 592153 - DNA, 660 bp, Homo sapiens
tgactctacggatgcttatgcatacccatcactgcaatctgtatcattccgaacaagctggggatcaagccttcgtacgaccagaagaccttcggcgaacaggagaagcgcggcaagctgcgcgtggtggtcagtcccgacggcgcggaaggttcggtggcgatccagcaggacgcgcgcatgtatgccggcctgttcgatggcgaggaaaccgcggagctgtcgctgggtgacggccgactggcctatgtgcatgtcgtgcgcggcaaagtcgatgtcaatggccgccgcgtgtcggccggcgacgcgctgatgatgcaggccgagccgcaggtgcgcatcgccaacggcgacaaggccgaagtactggtgttcgacttgccggaaaccggttgggaacccaactgatcggcggacggaagacgcaaaaagccccctggaatgggggcttttttgtgtccgccttgcatcttcgcaatccgcggacacaagaaggcccgccagcctgaagtcgtaatggggaggggagcatacgtgcttcggcggctggcgggcctgcagtgaaaattaccggctcgcatgctgctttgcaacggaaaaatgcccttattcatgcaacgctgatgaccgtattcccgcattcagcgactgggtttgcga

SEQ ID NO: 592154 - DNA, 905 bp, Homo sapiens
gaactaatcatatgtgatagtctgtcttcgaaaccacaattatccccaccttggtatcatcagccgatgaggcaaccagcagaacgcctgatcgcaggcacatacttcctattctacatcctagtaggttcccgttcccctactcatcgcactggagcttacactcacgaagaccctaggctcactaaacatgctactactcaatctgccactgcccaagaacctatcgaaactcctgagccaaacaagctgaatatgactagcttacagcaaggagctggacatagtagaaggatacctctttagggactccatgaaatgactccctaaagcccgatgtcagaagcccccatcgtctgggtcgatagatacgttgacgccatgatcctcttacaacgtaggcgggtatggtactaatagcgcctcgaactcattctcaagccccgtgacggaacagcatagcctacgcccttccttgtactatcgccgtatgcggcataaattataacaggctccagtctgcgtacgacaacacagacctgaaatttgtcatcgatatcttcaatccagccgcataaacatcgtaagtaacagaccattctcgatacaagaaccccctgaagcgtcacgagcgcagtcattcggcataatcgcaggggtttgacattcttcattactattctgcttagcaaactctaactacgaagggcaccacagtcgcttataatcctctttcagacttcaacattcaatcgagtcatagtagacgaatctaagcaagcctgacattctgattaacccaacatacacacgggggaacctagggagaacccgcctcggacaactccccacacgaccaacacagacacgattcactaattcacaacgggctcccaagacaacaa

SEQ ID NO: 592155 - DNA, 336 bp, Homo sapiens
gtcaacctttagctgcaacctcctaacccccctaagccggaggggggttcagcttatcccggcctaaaatattcataatgggtggggtcttttgaatgaattcatgtccaaaatgttattcagctgggggaatttctctaaatggaccctgattctgggggtgtgatttttaaaggagaacatggttccagccagtccctgttaaggccaacttttgatttttcctttatttttaattttcttaaaatggggtttttaatttttttttaacctttgggtttagcctatttctttggggctttgtttttttcttttaaaatgaatcttgcttcccca

SEQ ID NO: 592156 - DNA, 431 bp, Homo sapiens
ggatgcgttgccgtctctctccgtcgctgttctctcccgcgtgttcgcctgtcacggctctggcttgtcctgtctcgcctgcgtgcggtgtgcatctatgggacttccactgtcgccgtggcagttctcgtctcgtgggcccatgtccgtccctgcgcgtggtatgccaatgatgctagctgctcgtcatcaatagcaccgcaatggcctatgtctcaaggcacgaacgtctaagcatctctcttgggtgcggtgccacacatcccaatagcacttgccattgttgcctggcatgaagtgcggtgcgctatccagcttcctcttgctccaatccaaacgcttgtggaatggcctttccttgcagttcctggcagcactgtggatgccttggcatgtcccaattggtcttagaccatgtgaatgcatggttg

SEQ ID NO: 592157 - DNA, 274 bp, Homo sapiens
acctgctgattagcaaagactgatgagaagtagacttttttgggggagatagagtctcactctgttgcccccgctggagtgtagtggtgtgttcttggctcactgcaccctccgcctcctgggctcaagcagtccttctgccttagcctcctaagtagctgagactacagacgtgcgccaccacacccagttcatttttgtatttttagtagaggcagtgtttaccatgttggccaggcaggtctccaactcctgacctcaagtgatatgttca

SEQ ID NO: 592158 - DNA, 1391 bp, Homo sapiens
agcgggcccgagcgagctgttctgtgacctcgcacccctgcgctgcccctgtgccgctgcctgcctgccggcttttgtttgtctcctgcctcctctgtgcctgcctgcctgcctctggacctgctgagcctgctgctgctgcctgtggacctttgtgctcttgcccttctgctgttggctgtggaacttgctgcagtgaccctggccagtgatcctgagagaggctgcgggcttgtggtggcctgtgtgtgtgctgcctcctgtgcccctgccatgtgatgtctccctggtggccctgatgtgcttgtgttgtgcattgctacttcgttgctgtgcctgccaggcaggcttgtgattcgacccttgtctggaccactgcttggtgtggatcccctgtgacacaagacaaatagagcacctgagaaggcttggcctgggcagaatgtgtccctagcaccatggagtcgtaggctgtgacggcccaaaagtgattgcctttccaggaccactttgaaaggcaggagcaggttggcccacccaaaggggcagggggaggagaaatccctctggcggggataggaagggccaagcgcgatggcgtggacttccgttgagtccgcaccctaggtggggcattagcagacaccccgttagccggtttgacagacagccaggacgtgtagggagttgagaaggcggacagaaagagcccgttggggcccaagagagcgggcacatgagcccatattggctcccggacagacgttgcggaacaggaaaacacacttgggagtggcaattccacaggtggaggcagcacagctgagccaatagacgcaggacgcgagatcagccaatttgaccaatgatgcgcgcccaaagtttgcgcagatttggcaccagaagcgcagccgtagggagcgatgggcgaggccaacggagattatctatgaacatagaacgaagccaacagcgtaatacgcacaaagaggcgcgagagccaccgttggcggatggggagagcatcgcacgtttccatggcggacagactccgtcgggagcagcggccattgggagccacagatgagcacgacagcatcgtgttattgccgcacgaccccgggggacacgagacccgcttaatcgtgcggatgagtgaaagcaccgattggtgatagccagacgtgaccgagggcacaacgcgacgcggaacgggtacggcccagttgatcgcacgtggtggcagaccgcttggagtgcagcgttgacaagccacaagtgcgatgttcgacggtcccgccgtgatctagacgcttgagccgccgtacaggtggcgtgtgtgacagaaacagagcggtgagacacaggccgtaggagacagggccagaaac

SEQ ID NO: 592159 - DNA, 840 bp, Homo sapiens
ggggaaagaggtgagagggccaaggtaggctgtgtgtttgacgtcagggaagagggcctcgtgatggaaaatgtgggcaacataagcaaaaaccagaatcaggaattgtacatcaggtggcacttgtataactttaaaaactgacataatgtgttatgttttccctttgtaggactggtataattcagaaaaaccttgtgtgtattggctgtcaggtttctttttcactcaggcctttttaactggagctatgcagaattatgccagaaaatataccacccctattgatttgctaggatatgaattcgaggtatagtaactccttaaagtcaacagtatatcattacattaagtcatgtatttaaaccgagtctatgtatgtaacccatggtaagcaagttttacttcattctttgtgtcgtacgaatattgtcttgctatcccgttagaacttgcactatattgcacactatctgatttacgcgtaactccaacggctgttcttctactttagcaaacaattatgagggtacagtacaactctggctcacctacgttcaggaacgcacgtactttgtatacctcgttacaacactaacggctgaacacaatgtatagccttaacaagctcattatacaatagagtatccctgcaccgtggtctcgaatctaccggctcatggtgctccctactgcaccatcaagtcaggtccgcaaaacggctcccggccaactgtgtgccacatccccttcacgcgtaatccaccatccgactacatgcgacacagcatccccagaaacatggcgctaatatcccacggcaccggtatctccgacgaa

SEQ ID NO: 592160 - DNA, 164 bp, Homo sapiens
acatcatcaccataatctgacaggtcaacatgtcctaccatactgtctactccacctcaaaggctgtgcaaaactctacagagtataacgtaataaatagctatgcagaaaattctccacaagaaaacagggggtaccagaagcatcagaaattcagtaaatcc

SEQ ID NO: 592161 - DNA, 730 bp, Homo sapiens
  misc_feature (682)..(682): n is a, c, g, or t
acgccaccagggaggcgcggtccttctccgtatagtggagctggtattgatgctgctgctccccacattaattcttggcatcttcttacatctgcccatgaactctcgcaagggcctgctggctggagatgctctacgactctgcccttgattggcgcgtacgagacttacgaccatacttgagacactgtcagcctgcgcagccacctcaagagcacagactctgatggccatattctctaatccaaataggatgcttccacggggaaatgtgcctctacacactgaagattatgacacgtttcacatgagtcaagcgagacccgcaacatgtctgagacccgaccaactacagttgatatacatgatacacctagaggaggcgaattatctcgactagatagcacaagtttcgtctctctctgcattgaaagacgatatgcgacgcctataagacctttgagagaatatacgcgacgagatgagatacatcaagaacttagaagagtagatgcgtgctgcctacctgataacaaacacatctgtactatacttgaggatcttacgaatgttgctgttccttgcactagatacctgcgaggagttctacctgctgagcttcttctagccaacaaattgattgtgtatcaacgatggatattctctcacagcgtgtccacgngaccgcgtagtctattgtccatattttttcggggggggacgaggtggc

SEQ ID NO: 592162 - DNA, 428 bp, Homo sapiens
ggtcctattttcacggggtcttcatctctctctttctcggggatccctattccctaagacacaacaatattgaaagtaggccagttaataaccctacaatggcctctaagtgttcatgtgaaagaaagagtcacaggtctctcactagaaatcaaaagctagaaatgattaggcctactgaggaagtcgtgttgaaagctgagataggcccaaagctaggcctcttgtaccagttagccaagctgtgaatcaaggaaaatgttcttgaaggaaattaaaagtgctactccagttaacacacaaatgataaaaaagcaaaacagctttatttgctgacaggaaggaagttcaagtggtctgattagaagatcaaaccagccacaacattcccttaacttcggggggggggggggggggggggggggggg

SEQ ID NO: 592163 - DNA, 141 bp, Homo sapiens
gggggggggtctccgtggtggtggtggtgatgggtgtcatggttggggtctgtgtgccggtgggtgtaggggtaggggtcactgtagtggtggtggccatgggtgtcgggataggggtctgtgtgccgtaccggggtgttg

SEQ ID NO: 592164 - DNA, 112 bp, Homo sapiens
tagttcttccaccactgtcctttttctgtatcaggatcttggtgaaggccaccagaaatgaagacttgttccaccagatgctccagacagataattaagcttcagtagttag

SEQ ID NO: 592165 - DNA, 133 bp, Homo sapiens
taaacgggaggggcgagacgagacttaacatccggggctgtacccaggcagaggagcgtagacccccaccctgtttggaagggagaacccatcagaatcgcctggggtgtagatgaaacagaaataaaagaat

SEQ ID NO: 592166 - DNA, 243 bp, Homo sapiens
  misc_feature (33)..(33): n is a, c, g, or t
tcaggctcggcccgctctggtggtctctcctangaagtgcacttacatataaataacttgcatctaggctgggcgtggcggctcacgcctgtaatcccagcactttgggaggccgaagtgggtggatcacttgaggccaggagtttgagaccagcctggccaacatggtgaaaccccatctctatcagaaatacaaaaaattagctgggcgtggtggtgggcgcctgtaatcccagttactcg

SEQ ID NO: 592167 - DNA, 568 bp, Homo sapiens
  misc_feature (455)..(455): n is a, c, g, or t
cctgaggacgccatccctgttggagagtggcgatgaggacgatatacgaccctgacgaagcgcatctcgatctgctcctctgtacaaacgcaattgcgctgtgaggcaagagttctccgagttctgaacgaggagggagaggggggccggcaagaactcttccaacgttcaaaaaaagccaagacgagtcaaagacagaaggatgaaaacagagagagacccagagcgagaagaacagaagtcaccgaacgaggagaaaaccaaggaggagaagccagaagccaaaggggtcaaggaggaggtcaagttggcctgaatggacctctccagctctggcttcctgctgagtccctcacgtttcttccccaacccctcagattttatattttctattactctgtgtatttatatcacaatttattaaatataaatattcccaggcacagaaaccaagngcccgaagctcagggcagctgtgctgggtgagctctttcaggagccaacttgtcacccattctttccgcacttaactatgaaccggcgatgcggcatggggtaccgagctcgc

SEQ ID NO: 592168 - DNA, 969 bp, Homo sapiens
  misc_feature (1)..(1): n is a, c, g, or t
  misc_feature (473)..(473): n is a, c, g, or t
ncaggaagaggtagagagcagcaagagaaggggcaaacaagagacgtgagcagactacgctgacacacgttgagatgtgcgcagccagccggaagtcatagcggcaatgttgcacccagcataggtggaccacaagagaagatagcgcttcgcggatgccccgggtgtgaacctgtcctcgggcggcaaaatggcacacattgccaaccagggggccacacacggctcgaagacctcgcatatgttccgcccaattgtcgttggcctccaggcgccacgaagggatggcgcccccacgcggccagggcccgtctatcgcacgctgagagggggttcttttgttgtaaattaccgcctgccggcccacggttttcaagcactcctcgagtttgtgagagtgttcatacaacccaaggggtcagtacacaactgtggtgggttttttccggaaccgtccacgcatccctgagctnccgatgccgcatttgtgtggcttggccaccacccacaaggagaaccccttggtggggggaccacccgtcttccatcccccggtggtgtaattacatggcacccccaccagtgagtgcccttgccccttcgatttaagcgtcactcagtgacacatctgcggggcacttctaggcttcacaccacggtcttataagggggattctttttcacggcgcgccgcgagtgcccccaaatttgatggaggcttattctggaccctccatagaaagaaggcgcccgaaagagcccctggcttggattaatgcaccacaaccacagtcacgaggacccgttttgaacgttctgattatggcccggaagcattagtatttgtccgccgggatcccgttgtccgaagttcacaccctcaacgcccggctacatcactcataacccagtaaaagacagatttttcacggggttccccaaagaattttgggcacccacaaaaaaaca

SEQ ID NO: 592169 - DNA, 144 bp, Homo sapiens
  misc_feature (46)..(46): n is a, c, g, or t
cacgagggcggggaaaggacggcttaatgccagaccgggagttggnggtgtccgatctcgagttgggatccaacaaggccttctcaaccagtcaacacgcacaaccaccttccaacaaagatttgatgcccggcaaaagattgg

SEQ ID NO: 592170 - DNA, 125 bp, Homo sapiens
cctgggctatgcactctactagtacccacagctgggggccaggcgtgccccctactactccctacccagcacctcatccctactccacgtacacaacagatacccccaagtatagctgtgtgagg

SEQ ID NO: 592171 - DNA, 857 bp, Homo sapiens
ctagattttaagtcccattgaattctctcacttttgcttatgttatggatcaggtcttttggggaccagctccttgattccaatctctctcttaccagcacatggaaaatgctggggccttctagctgcagtgatgttcttgtgcctgtgcattccacaggaaggctttgtgctaaccatccataatggggagatagatgcacattcaattggtctctttcttactgttttaataagcaggcaacaatttgtgaccaaaattcagcagtttaaataattaatattctggctgggcgcagtggctcatgcctgtaatcccagcactttgggaggccgaggcaggcagatcacctgaggtcaggagttcgagaccagcccggccaacatggtgaaagcctgtctctactaaaaatacaaaaatcagccaggcatggcggcacgcacctgtaatcccagctgctcgggaggctaagacaggagaatcgcttgaacccgggaggcggaggttgcagtgagccgagattgcgccattgcactctagcctgggtgacaagagtgagactgtcaaaaaaaaacaaaaaagattctagatatcctttcccacctgcatcctctgggaaagtccactgtccccaatggggtaccaggactctccagtccggcacgatgaagcacacattccggcacggtgatcagcgtacccaaacagtacatggtgctacggccactgaaacgttccttcaacaatggccgtcccggcgcttggcgcatcaaggccggaaaccacagacattggcaaggcccagtgcgcggatcaccgatccggacttcaaccagcggcacccgcgcagagcccc

SEQ ID NO: 592172 - DNA, 118 bp, Homo sapiens
taccagcgtcttgcatatctctggcatctacacttacacgctctgtagctttgccatgttctccctctacttctgtgtgtgtgccttttacctttcttgactggatgtcttttgcacg

SEQ ID NO: 592173 - DNA, 394 bp, Homo sapiens
catttgatgccccttgatgctgtgtaatggcctttctttgctctgactttctggagactgctgtggctcagtggctgctagctcagttctggagctgggccgaactctggtttaaggccttctttgcctctcatgagttgtgtggctctgggctgtttccttggttgtcgtgggactaatattgccgatctcacagtcctacggagaagataaaacaggacaacccattagctattcccagcacagtgtgtggcatgcaggaagcgggagtatcactaaatggttcatagaaatatgaggccatgccttgctattcctttaaagaagttcaaagatttacaatcacatctcaggaagggccttatgaacaaaaaagggaaccttggggattctg

SEQ ID NO: 592174 - DNA, 228 bp, Homo sapiens
gcaggtgcctacaggactcacgtatatgtacagtctaaataggaataaggcatctggaaagacgaggagcgcatgattgaagcaatatacatataggaaaatagcgagaaatgaagtcagtgaggtacagtgttagcaaattacaaggttaaagaatttggattttatcctgctatagtaggattttatttatggaggttcatgaacggtgttgacaacgatagtgag

SEQ ID NO: 592175 - DNA, 1290 bp, Homo sapiens
gtggcccagcctctcctcacgctcgctgcagtctccgcgcgcgagatctcagtctgcagctgcaggactgagccagtgcaccctggaggagacccctctgtgaggatggctgacaaacttctgcatgtgcctgctgaccctaacctccgagcccttgtgcactgcatgcaatgtgaccagactgttccttgccccctgactggctagcccatggtcctgtgcccgagtgctccttgcagcgtttacgcatgatgttctcgtgaacggagacatgactcagacggaccgcagcttttcagcagtgctgcatctgcggtgcgacgctgccactgcagtggctgtgctcggcagtgcgccctcaccatcccttgccactgtccacgtaccatgctggccaaccagccgacgcctgccgtgtgctagtgcctaggtgcatcatcctgactggagtcaaaagtggacctttccatgatccctgggggccaggagaggcacgaggtgcttggtggactgctggtgggcagtcgctagcgtcaagggtgaacctgaggacctacccggttaccgcgtgggcacatgcctggcagtacccagctgtcgactcaccgaacgtcattccctgagcgctagagacgaagctgaatgccccaaacgactcagggtatctattctggctgttgcggtccagcacggcattcggcttgaaccagcaggcgacggcatgtggacacggtcaacggtcaacaggggtcgactatctcttaccccgaacagggctcattgcacctgctaatgcctttacgtccattatactggtggagaccaacagacaggaccttgttccctcgactttagagaagccccacaattcacgccacacccggacagaagacatataatgcacgacttacactataggagagctatcaaccacctgtaaattctaggctcggcagtatcagagcacaaaccgggcgctcaggcatccccaatccaagaacccccagccacaagacccgtttaccgcagaacacggcattgcaccacccgagcagccggacacaatacgtactggaaccataagcaccacaccatcagccaggacgagaggacaatcggcgacagcagggagtacaccgaaaagagtaggacacagaggacacaacacagagaaaaggcaagccaccataatcgagagcacactcaaccggcgaaaagccgcagaaaaagtgaactcggcgagccaactcaagcaacgaacataaacagcaagagctgcgaaccaaaaag

SEQ ID NO: 592176 - DNA, 697 bp, Homo sapiens
  misc_feature (644)..(645): n is a, c, g, or t
  misc_feature (697)..(697): n is a, c, g, or t
gttttctgttcctgcgttagtttgctgaagataatggcttctagcttcatccatctccatgcaaaggacataatcttattccttttttggctgcatagcattccatggtgcatatgtaccacattttctttattcagtccatcattgatgggcatttgggctgattccatgtctttgctattgtgaatagtgctacagtaaacatacatgtgcatgtatcaataatagaattatttatattcccttgggtatatacccagtaatgggattgctgggtcaaatggtatttcggttctagatccttgaggaatcaccacactgtgtttcacaatggttgaactaatttatatttccactaacagtgtgaaaaagttcctatttctttgcagcctcgccagcatctgttgtttcttgactttttaataatcgccattctgactagcatgagatggtatctcattgtggctttgatttgcatttctctaataatcagtgatgttgaacttgtttttatatgtttgtgggtcacataaatgtcttctcttgagaagtgtctggtcatcggctctgcccattttttgatggggttgtttggttttttcttttaagtttgttaagtattctcttccctctatacttagaanntctttctcaccagggctctcatcaccccctctgatctggctgttttctgctn

SEQ ID NO: 592177 - DNA, 201 bp, Homo sapiens
  misc_feature (103)..(103): n is a, c, g, or t
  misc_feature (137)..(137): n is a, c, g, or t
  misc_feature (139)..(139): n is a, c, g, or t
gctcttgggaaagacctctgtccgccaggccttggcagacagtctaccacctctcccagtcctgggccccgaagcccaaaggccccgccagcagccgcctggnaggaacaaaggcttctcccggggccctgggcagncncttcaccctcagcttcccacccccagggcctagacacgacccccaagtcacactgaggtgcc

SEQ ID NO: 592178 - DNA, 216 bp, Homo sapiens
  misc_feature (22)..(22): n is a, c, g, or t
  misc_feature (139)..(139): n is a, c, g, or t
  misc_feature (149)..(149): n is a, c, g, or t
  misc_feature (157)..(158): n is a, c, g, or t
  misc_feature (182)..(182): n is a, c, g, or t
  misc_feature (208)..(208): n is a, c, g, or t
gattaggaaagcaatgtctcanccaatacagaatatcaataaagagattgaaattgtagaaaagaaccaaatagaaattctggagttgaaaagtattataactaaaactgaaaattcactagaggtattcagcagcagnctggagaagncagaaganngaatcaacaggcttcaagataggncaattaagattatacaggctgaggancagaaagg

SEQ ID NO: 592179 - DNA, 126 bp, Homo sapiens
aattcacagacggttagaagatacgctgttctagaaagaatacatttagaatcttacctttaacaaaaaaaaaagtccatacgtcgtccgtgcacgccaggaggggtctcaggagagatcgtccgg

SEQ ID NO: 592180 - DNA, 479 bp, Homo sapiens
aaacacatcataatgaaatcaacaccatattattacaaacttctctttcatatttatctggggtcacaggtttctcaaaggactgtgggcttgaaaatatagtgtcaatggagcttcaatgccagtctaatggtgatggcaatgacccataagattctggagttgggactgggtgtggtggctcatgcctgtaataccagcactttgagaggccaagctaggcgggagtttgagacctgaggtcaggagttcgagaccagcctggccaacatggtgaaaccctgtctctgctgagaatgcaaaaattagccaggcatgatggcccatgcctgtagtcccagctattcaggaggctgaggcaggagagtcacttgagcctgggaggcagaggttgcagtgggctgaaatcaggccaatgccctccagtctgggcagcagagcaagactctgtctcaaaaaaaaaaagaaagaaagaaaga

SEQ ID NO: 592181 - DNA, 111 bp, Homo sapiens
cgtatatgtaaccaagttggatttttgtgaatattgctttgcatcagctaggttcttatttgattttatttgctctgcagctgtgtgtctgtctcatgtgacatagtacgg

SEQ ID NO: 592182 - DNA, 313 bp, Homo sapiens
  misc_feature (165)..(165): n is a, c, g, or t
ggggggaaaggcccccccccctcttccccccagggggggggtttaggggcccccccccccctttgagggggccctctcccccctcgggggggggggggggggggccctccccaaaccccttaagggaccccgtttttggcccttcccccccagttttaacccccntttttgcccccggccctgggggttccccccgtctttttggggggtaaaaaaaggccttttttagcctgggcctaagtgaaatcccccaaccccctgggggggtgtgttgaaggcccttcacaaatgcctaaccccgttcccttgttta

SEQ ID NO: 592183 - DNA, 329 bp, Homo sapiens
  misc_feature (224)..(224): n is a, c, g, or t
ttgctctgtctccccagctggagtgcagtggtgtgatcttggctcactgtaacctcttcctctagggttcaagcaattctcctgcctcagcctccaagtagctgggattacaggcatgcgccatcatgcccagctaatttttgtgtttttgtagagatgaggtttcaccatgttggccaggctggtctcaaactcctgacctcaggtgatccgtccacctcggnctcccaaagggcttgggattacaggcatgagccaccgtgcccggcatgaaaagtattttcttttgtttgacagatcaacttttgggcaaggtgccgggattgcaa

SEQ ID NO: 592184 - DNA, 146 bp, Homo sapiens
tgagataagacaaatggcccggcgatgagatcgggtaaagatgaggggaggggagcgcgagcggccggggagggcggagaccccaataagagcaggccacgccccctcccctcctcccgttcgctgccagcggtcggtggcggccg

SEQ ID NO: 592185 - DNA, 554 bp, Homo sapiens
  misc_feature (82)..(82): n is a, c, g, or t
  misc_feature (87)..(87): n is a, c, g, or t
tcgacctgcatgtccgcaaatggctgcaaaagcccagcaagtactgatactggagttagaaataaattttagcaagaggtanattcncacatacggagtctgcaaaaaatgagaattgactattatgtgtgtgtatattatatatatgataaaaaacaaaagaatgataaaaattcccaataatgtttactttggtggtgagaagaggatggcaagtaaaataagtctgtattgttatcagcaattatctagtttgaggttggacagtggtttcatcataggtattgattatattataaatagcccaacctgaactcatgaccatagtgtggtgttattacttagcgttattctagacttattagccattgtatttaaacaagaggaaatagagacattgaagataaagtggagccaggcacagtggctcatgcctgtaatcccagcactttggcaggctgagatgggttaatcaagaccagaagttcaagaccagcgtggccaacatggcgaaaccccgtctctactaaaaaaaagtcgacgcggccgcgaat

SEQ ID NO: 592186 - DNA, 232 bp, Homo sapiens
aagggtctccaatttaatccttgggttgttttaccacttctttcgtaaatttatcaagatttctttcgcacaaatactctagcgcctcacaacaaacctgaccttgcgcaggaagtcgaccatcagcaccccctttacaacatcgttcatatcacaattgagaagatgatgaatgaagattcgcttccaagttccaagggcagatttattcctttaactgacatttccatga

SEQ ID NO: 592187 - DNA, 302 bp, Homo sapiens
tgactcattgattgttttaggaacgtattgtttatccaggtgtggtggctcatgcttgtaatggtttacagtgtaatcccagcattttgggaggctgcggtggggggattgcttgaggtcaggagtttgagatcatttcaggcaacaaagcaaaacttcacctctaccaaaaaataaaaataaaaagttagctggctgtggtggcttgagcctgtggtcctagctactcgggaggctgaggtgggaggatcacttgatcccaggagttcagggtgcagtgagctatggttatgctaccacac

SEQ ID NO: 592188 - DNA, 859 bp, Homo sapiens
  misc_feature (384)..(384): n is a, c, g, or t
gaaatggattttgaattatatcaaaattctttttgacatctctcagggttgtatttttttcctttaactcatatgtcaccattaggtttttaaaatccttttaaatattttatttctagtgtaccttggagttccctttttcctcctttttggggaaagttttgaaaatgttttgtttttgtgtatgaaaagaatagctcaccaaggaagaaggggagtgtttttggtgaaataggaaagaagtctgaaactgtaggagaggaggggaatatggccgctgataaaaagcactagaggaggggggaaatactcttccataggaaggcttccagctacaaagatttgaagacatttttctggggaagtaaaacactaaatcagcantattttccaaagcccagaaaataacttaatagattgtttttaaattactgttttaattcagcttgtgaagatattctgaatagttcatgtagaatatcttactattttgcagatacttttgtataaatagttgccagtgagaaatgttgcaactgtgtcttttcaaatgaagtaaataggagagctagtatagcgcctgaaagaagtaagtgagttatattgtaacttcttgctctacctcagggtaagcactccttttagcatttattaaactctcattatttgtagagaaattatttagatgtaggttgagtattcctaatctgaaaatctgaaacacaagatgctctaaaattcaaaacaggatgctcaaaggagatacttgtttgagcatttcagacttcagattttcagattagggatgctgaactggtaagtataatgcagatattccaaaatctggaagaaaaaaaaa

SEQ ID NO: 592189 - DNA, 103 bp, Homo sapiens
agcggggtcgccgcctcctcccttccccgcctccgccggcgctgcctcctccctccgcccagaatccttgactccaacatgaaacgcaaaaacatacagcacc

SEQ ID NO: 592190 - DNA, 193 bp, Homo sapiens
cttgtcgcgctggggctcgaggcctacggtacctaagttggcgcaaaaagaccccgcgaccctcgaccctccctaaaatcaccctatccagccaaacggtgtgtgtcgactcccgaccgccctgtataagcaaaggcaaaggggacaagcatgcgaattttgatagccgaagacgccacatcgcgacatgggt

SEQ ID NO: 592191 - DNA, 233 bp, Homo sapiens
cgcacagtgtgctcgggatgtggaacacagagtcaaaggggataatttaaaagctttaagattaaatgactgcccggtagggtttcagggaccggtaacccctttctttaagccaattcctcccttcgggaaggggaatgcttacccaaagcctgtaccctcactgctatctggaagctcactacctggtctgccttcccgggctcaggggtggaaggagctgagtctcagat

SEQ ID NO: 592192 - DNA, 361 bp, Homo sapiens
gggggggcggatcgggtggctaacatctgcaatcccagcaacctgggaggtcgaggcaggcggatcacgaggtcaagcaatcgagaccatccgggccaacatggtgaaacctcatctccactaaaaatacaaaaattagctgagtgtggtagcacgtgcctgcagtcccagccactcgggaggccgaggcaggagaatcacttgaacccaggaggcggaggttggagtgagctgagatcgcgccaccgcactccagccggggcaacagagcgagactccatctcaaacaaaaacaagaacaaaaacaaacataaagttggcacagaaaagggaccaagttaaaaaaagggcgggcgctggg

SEQ ID NO: 592193 - DNA, 328 bp, Homo sapiens
caggactgacacatgacatgtgtcctccagtggaggggagacacacaggcagatgaggattgccatgcagtagctgctcagatgtgccagcttggctgtgtgggggagtgggatcgatggtgggagcagagtggtcccccttagcctgacctggaccccgtggagggggcatcagagtgaagctgtctctcccgtctctgtctgaccacctgcctgtttctgggtctggcctccttctgtctctagccttttgtgggcctgttccaacttccttccttgccttcttctctttttccatctctctatctactccaaccttctctctgct

SEQ ID NO: 592194 - DNA, 1099 bp, Homo sapiens
gtggcgaatcagcggacgtgcacatctcacggtctacaggcacgactctcgcctgctacctgtctggacgcacacatggtacatgtcagagcactatgcacaattattcgatgatgccataggggtcgagggcgcagcacctcgtgtgcatgaagaggtccagctgtcgtccgccacactgtgcacagaggcgataatggcactgcaaggttgccaagagtctcgctagctcaaaccggatgattccagtaggaagctggagggccagcagcagcttggtgccaagtcatggaacgaaaggtcgtgtgaaagccaggcatgtttattatggagatccgttgcaagatacttacaagcttcaagattgatgagtcatgttgtttgtagtggacgccatctcgccagaggaacctacgttccatgcaccgtgtgagacttgcgcttcagatcgatcgactggcgtcagactgagagtgcggaaccctgtcagggattgcgttatcgatgtggtaccatgtggaaagatgaggacgtaaacttccgcatagaggatccagtactattcacagccgacaggttggtctctggcatatcatgttttcagagccgtctgatgatagcgtcctgatcgatcaacaattactcacagcaggcctgggtgtgctagaaggactcagtgaccaagattaggggtggttggcttttgcaagggggttgcaaggttaacgtgcggtctacctcgtagcatgaaggaaatgggtacgagaggtggtagagactaactcgtgtggaatagctcaggccggggattgccatgtgactccggtcgagaccaatctagtctaatgaaggaaattggcaccttgccattcgatgatgaacaagcgtggtcccagaaccgatggtgcacctctgaaagttcgttgtacacaaggaactctcgccgcttgaaggggcctcgaatggactgtcgttcaaagacacaatttcgagagtggggaacaacaacgttcccaggggttctccagttggggggaaaccatttttaaatttcgcgagtggaacacagtttttcctcggacggttgagaacagattac

SEQ ID NO: 592195 - DNA, 269 bp, Homo sapiens
  misc_feature (36)..(36): n is a, c, g, or t
  misc_feature (88)..(88): n is a, c, g, or t
  misc_feature (111)..(111): n is a, c, g, or t
  misc_feature (159)..(159): n is a, c, g, or t
  misc_feature (183)..(183): n is a, c, g, or t
  misc_feature (192)..(192): n is a, c, g, or t
  misc_feature (206)..(206): n is a, c, g, or t
  misc_feature (218)..(218): n is a, c, g, or t
gcccccccccaggatgccgccaggtgtccctctccntcccctggggcacagagatatattatatataaagtcttgaaatttggtgtgncttggggtggggagggcaccaangccttgccctggggccttttttttattttctgaaaatcactctcgggntccgtcctcgcttgttggcatatncccagcccnttgtccaccccttnttgttcctgggnagggggaaggggggcacgggtccttgtaattattaaacatgaattcaatta

SEQ ID NO: 592196 - DNA, 888 bp, Homo sapiens
agcgtggttccctccgtttaggtcggctgccaaattatgtcctccgtcggttttccgcagtttttccacacaacatactagcagagggaaacatcctgatatctagctcggactttatgaaacgtttcctgcgcactggctcgcacagggggctggtccgttccgctaagacctactacaggtatctgtgtccctgcccggcctattgccggtggataacctagaagctggtggagcatactgaaccaaggggcaacgtggttcattgacaaacactgtgcaactacacagacccggcttggacgtaagtactcgcggtacgcctggtcaatttgcgcaccagaagacagggtgaagctctcagctgaggatgcctgactgtaggtaagtagacaaactagccttgctgacaaatgcgtgacttaaagagagcaagtgcggtgattccacattgtgcaaggcatacaaacacgtagcatgatacacttaatttcaacgcgcagatggactgcccctagaaaccatcattatgcaattaccagcgaattaatataaaagtggaacgcaatacacatcctacgtattccccaaaatgggagacacacttacgaacagcgggtcaattcacccacacgagatgtgcgatcggcccggtcatggtatgagctagattccatttcaagataacccgcaagggttcacagcggatttttccctgaacttaaggaccatcagggcccttaaatcgattcaggaattggaaaacgcagccatggagaccatgtaaagcaatgtgaacccatgaatgattccgaggctaataattagcgcattacttaagttatacatggccttttccgtccatcggaagccttgtgtttgtgggcc

SEQ ID NO: 592197 - DNA, 248 bp, Homo sapiens
cccaactccaaatcttttcagactttctggatcatactttaaatccctctattcctttcatccctttagcttcctgatctcactcttattaaacagcaaatgttccaccttcatatttgcatcattcacctctcagtggggtctttggaccttctctctctggccacaccacctattctgaccgttttaattgctatgagacacaggtcttaggaacctgagggacagacacctaaaacctgcagtgt

SEQ ID NO: 592198 - DNA, 369 bp, Homo sapiens
ttccttacagtagtgtttgcaaactggtgttctcctcaggatcacctagaaagcttatgataacagactgctggacactacccgtagagtttctgattttagtaagcctgggatgggcttgagaatttgcctttctaataggttcccagatgacactgatgctgctctccagggagcacacattaagagcctctgctctacaccagtggcataccacccttttcaagttaaggcaacatataaaatgataatttgtgtatgataccctggactaaactgcagagctcattcttagcttgaggtaaatagcccaaaacaatagaccttgtaactgaggaatcagtattagtccatgaggggaacctcaac

SEQ ID NO: 592199 - DNA, 177 bp, Homo sapiens
cgatctacggatcttagctcccactggtttgcatatctggggtgtgacataattcaacccataatatgcaacaacgtggataagggcgtatgctgagtgaaaaaaaagccaattccaaaaggtttcatattatacaattccatttatgtaacatacaccattgggtggtggccgggg

SEQ ID NO: 592200 - DNA, 821 bp, Homo sapiens
aaaccgggttcaacaatggccaagccacagatgttttcttgggagactgttgaaggggaaagagttggatttcgcccgcttttttggggtaaaaaagagcttgggaagatggcccccctgaatattctctgtaaaaattctggggtggatagctcgcccccctggtggataataggggtttccctcggggcacagacccccactagtggtgctttgtgaggagagctcttctctcacgagagctcatacgcacccccctttttgggggtctgcgcttttgtcctgtttctgtgagataatggaggagcacagacccacaggttttccgcgtgtggtggtctactcccaaagcacagtggaggcacacagaaaaggcgttgtcgctgggagagactgggcaaaaggttgctacacccacagtctttgcccacaggagataaagcctcactagagaaggcgttaaaatggaagatatttaatcccctctatacctcgccaccccccacctctttaaatcaacagctggtgtgagagagagcggctctcacgagactgtgttgtgtttccaattggcccacatttatagtttatgtagtataaagaactgggttgtaatgagtaaccacaaagcactcgtgtaaccttctcacgaaaggagaaaggagaaatgttttgttggagaccacaccttggtgttttttttttgggtgtggcagattttaagattattagttttttaaatcagtgactttttaaagggaaccaattgacccaaaaattgtcaccaggattttgagaccccatttaaaaagtttaatgga

SEQ ID NO: 592201 - DNA, 468 bp, Homo sapiens
  misc_feature (21)..(21): n is a, c, g, or t
  misc_feature (23)..(23): n is a, c, g, or t
  misc_feature (53)..(53): n is a, c, g, or t
  misc_feature (120)..(120): n is a, c, g, or t
  misc_feature (155)..(155): n is a, c, g, or t
  misc_feature (160)..(160): n is a, c, g, or t
  misc_feature (164)..(164): n is a, c, g, or t
  misc_feature (171)..(171): n is a, c, g, or t
  misc_feature (173)..(173): n is a, c, g, or t
  misc_feature (177)..(177): n is a, c, g, or t
  misc_feature (224)..(224): n is a, c, g, or t
  misc_feature (229)..(229): n is a, c, g, or t
  misc_feature (270)..(270): n is a, c, g, or t
  misc_feature (279)..(279): n is a, c, g, or t
  misc_feature (292)..(292): n is a, c, g, or t
  misc_feature (317)..(317): n is a, c, g, or t
  misc_feature (337)..(337): n is a, c, g, or t
  misc_feature (344)..(344): n is a, c, g, or t
  misc_feature (466)..(466): n is a, c, g, or t
cgggcactcagacatcatgantnggtccttagcaccccgcggaatttaaatcnctacttctatgctacttttatttctctcttcaacatgtgtagcacaagttgctaccagagacaactnctgcatcttagatgaaagattcgtaagtggatttntaagnttcnccctttntntgtnaactggagaggggcagaggaaaagaaaaaattccctcaaaaaaatanatctngcacttgtaactttttaaaaacaaagaacaaggtttaaccnatttttcanaaaagaatttaanagtagcatcagtctacatttttaancactgtaaaattaacagggnagttatngtccaacaacctgtggcattgcagatttcctgtctacttatcaaaccaaagtagacaaggatcaacagactttggaagacaacaaacaacaagaagaaaacaaaacatcagaagtcaaacanct

SEQ ID NO: 592202 - DNA, 566 bp, Homo sapiens
tcacacgcttagcagttctcaatttcccctccacctagctcctggacaattctagctttctagattctatgagtttgactactttagttacttgatataagtagaattaagcagtatttgtccttctgtgaccgatgtatgtcacttaacataatgtcctcaagggtcatctaaattgtcccatactgcaggattttcttttttttttttttttgggggctgaataatatcccatggctggtatgtcccacattttctccatccttctgtcagtgaacgttaagtggtctctacatctgggctatggtgaataacttcgatgaccatgggagtgctaatatctcttggccaacgggactttttaaaatattaaggggaatagggtgaagaatattattttatcaccccatagtaggatttttttgtaaaccttcggagttatcttcggggggggtgtgtgaggggtaggctggtgcatgggatggccgtgtaattatttcttactagggtccccagttgaagagtttgaagggcacagtctcagatttatttatcccaggaggtga

SEQ ID NO: 592203 - DNA, 751 bp, Homo sapiens
  misc_feature (9)..(9): n is a, c, g, or t
  misc_feature (172)..(172): n is a, c, g, or t
  misc_feature (208)..(208): n is a, c, g, or t
  misc_feature (271)..(271): n is a, c, g, or t
  misc_feature (322)..(322): n is a, c, g, or t
  misc_feature (338)..(338): n is a, c, g, or t
  misc_feature (367)..(367): n is a, c, g, or t
  misc_feature (371)..(371): n is a, c, g, or t
  misc_feature (376)..(376): n is a, c, g, or t
  misc_feature (380)..(380): n is a, c, g, or t
  misc_feature (387)..(387): n is a, c, g, or t
  misc_feature (390)..(390): n is a, c, g, or t
  misc_feature (401)..(401): n is a, c, g, or t
  misc_feature (404)..(404): n is a, c, g, or t
  misc_feature (407)..(407): n is a, c, g, or t
  misc_feature (412)..(412): n is a, c, g, or t
  misc_feature (424)..(424): n is a, c, g, or t
  misc_feature (427)..(427): n is a, c, g, or t
  misc_feature (429)..(429): n is a, c, g, or t
  misc_feature (439)..(439): n is a, c, g, or t
  misc_feature (480)..(480): n is a, c, g, or t
  misc_feature (488)..(488): n is a, c, g, or t
  misc_feature (505)..(505): n is a, c, g, or t
  misc_feature (509)..(509): n is a, c, g, or t
  misc_feature (524)..(524): n is a, c, g, or t
  misc_feature (528)..(528): n is a, c, g, or t
  misc_feature (578)..(578): n is a, c, g, or t
  misc_feature (586)..(586): n is a, c, g, or t
  misc_feature (589)..(589): n is a, c, g, or t
  misc_feature (595)..(595): n is a, c, g, or t
  misc_feature (603)..(603): n is a, c, g, or t
  misc_feature (682)..(682): n is a, c, g, or t
  misc_feature (742)..(742): n is a, c, g, or t
tggcgtgtnttggggggtgggtgtacttgctagtgctatcttcgctcttttttttttcagaagccaatgttctctaaatctgcagcttcattccacagctttacagaatcataatctcttgaatatttttccaatgttattaaaaaataaaaaatcatacaagatatatttngcacattaaaacttaagaggttacagtttaactgtnccgccctccaggtacccctgaatacttttccagtacaaagaggccaatttgttagaataattnattctctgtttttgcttttattaaaaaggggtttttggtggtgggagcaantaatctctcatttgtngcctgggatcctaaaatagggtcgttggnttcngggcntgcnacctgcngcntggccgcctgnccnacntgccngccttcctttcngtngngaggtacggngggcgtgggagccggctgacgatagatgaatactcggcggnggcactcncaaagggctgcctacgngtantttggggcacaggcnaaanattttttgtctctccttgatgcttggccctagcctaaagccttgggggtngcgcgtgngcncccgcntgtcatcntgtttgctggagtgtggttgccagagtagggcatcaacatcatggcgcaaacagaagcagggcatttctttaggatccnctatgacagagaaaaggttctgggttgcttccaagattcaccacatgagtagtttttaangtactgccg

SEQ ID NO: 592204 - DNA, 414 bp, Homo sapiens
cgtctattctcatgaaggaaaaatcctgtagttttctcgtaatgtccttgtctacctttgttatcagggtaatgcagagctcataaaacaagctggtcaatgttctttactcactattttctaaaagaggttgtgaagaattggtattatttcttccttaaaacgttggatagaattcaccagtgggaatcaggtgggcctggacttttcatgggagaacttatacatgactaattcaatttctttcctttatacagatctattcaggttttccatttcttccagaaacttttgataatttgtctttcaaggaatgtgtcattttatgtaaattgtcacatttatttgcataaatgtattcatatttccttattatcatttaaatttatgggatatgtattcatgtcaccgctt

SEQ ID NO: 592205 - DNA, 234 bp, Homo sapiens
tctgccttagcgctcatatagtcctctgttgccctctgctgagataacgaattcccttaacatgtatataatccacgccttgcaaatagctactggccgtcgtatcacaaaccatttgcctacagaatttcattcagtctacactttggcattctctctggcgatggagtgtggctgggctgaccgcaaaaggtgccttacacactgcccccaccctcagccgttgcccctaga

SEQ ID NO: 592206 - DNA, 943 bp, Homo sapiens
  misc_feature (24)..(24): n is a, c, g, or t
  misc_feature (33)..(33): n is a, c, g, or t
  misc_feature (43)..(47): n is a, c, g, or t
  misc_feature (52)..(52): n is a, c, g, or t
  misc_feature (61)..(61): n is a, c, g, or t
  misc_feature (63)..(63): n is a, c, g, or t
  misc_feature (73)..(73): n is a, c, g, or t
  misc_feature (88)..(88): n is a, c, g, or t
  misc_feature (95)..(95): n is a, c, g, or t
  misc_feature (98)..(98): n is a, c, g, or t
  misc_feature (101)..(101): n is a, c, g, or t
  misc_feature (104)..(104): n is a, c, g, or t
  misc_feature (109)..(109): n is a, c, g, or t
  misc_feature (120)..(120): n is a, c, g, or t
  misc_feature (134)..(134): n is a, c, g, or t
  misc_feature (138)..(138): n is a, c, g, or t
  misc_feature (142)..(142): n is a, c, g, or t
  misc_feature (146)..(146): n is a, c, g, or t
  misc_feature (152)..(152): n is a, c, g, or t
  misc_feature (168)..(168): n is a, c, g, or t
  misc_feature (182)..(182): n is a, c, g, or t
  misc_feature (203)..(203): n is a, c, g, or t
  misc_feature (205)..(205): n is a, c, g, or t
  misc_feature (247)..(247): n is a, c, g, or t
  misc_feature (251)..(251): n is a, c, g, or t
  misc_feature (263)..(263): n is a, c, g, or t
  misc_feature (267)..(267): n is a, c, g, or t
  misc_feature (281)..(281): n is a, c, g, or t
  misc_feature (288)..(288): n is a, c, g, or t
  misc_feature (290)..(290): n is a, c, g, or t
  misc_feature (295)..(295): n is a, c, g, or t
  misc_feature (341)..(341): n is a, c, g, or t
  misc_feature (391)..(391): n is a, c, g, or t
  misc_feature (400)..(400): n is a, c, g, or t
  misc_feature (429)..(429): n is a, c, g, or t
  misc_feature (434)..(434): n is a, c, g, or t
  misc_feature (449)..(449): n is a, c, g, or t
  misc_feature (458)..(458): n is a, c, g, or t
  misc_feature (461)..(461): n is a, c, g, or t
  misc_feature (468)..(469): n is a, c, g, or t
  misc_feature (471)..(471): n is a, c, g, or t
  misc_feature (474)..(475): n is a, c, g, or t
  misc_feature (492)..(492): n is a, c, g, or t
  misc_feature (500)..(500): n is a, c, g, or t
  misc_feature (504)..(504): n is a, c, g, or t
  misc_feature (508)..(508): n is a, c, g, or t
  misc_feature (520)..(520): n is a, c, g, or t
  misc_feature (523)..(523): n is a, c, g, or t
  misc_feature (527)..(527): n is a, c, g, or t
  misc_feature (553)..(553): n is a, c, g, or t
  misc_feature (625)..(625): n is a, c, g, or t
  misc_feature (821)..(821): n is a, c, g, or t
  misc_feature (876)..(876): n is a, c, g, or t
  misc_feature (931)..(931): n is a, c, g, or t
ttctcaaaccccataatgctggtntccagtgcntccgttctcnnnnnctgangctgatggncnccagattgcntgtgaaggtgaaggntattatngcnganggnaaccnaaataaaaganaaacagctcctggnagtnaccnatgngaaggncagataagagtttgangactgtggatgtgnctgcttgttccctggttgacncnctgaagaagaaatcatgttgattcagagttggcttggaggcnaganataatggcggcngctncgggggatcctggnctctctnanctgcngtttgccccttttagtagtgccatatagagatgttgggttttggcntgagttgaccccgaagaagctgaacgagtatcggctggatgaagctcccnaggacattnagggttattactaccatggagtgctcccnccccngcccgttgctgcccngctattggnacnctgtatnncnccnnccccctcgagtctttcnagactgcngatnagangctccttttggnacnagcngccaatgagatatgggaatccctaanatcaggcactgctcttgaaaaccctgtactcctcaacaagttcctcctcttgacatttgcagatctaaagangtaccacttctactattggttttgctatcctgccctctgtcttccagagagtttacctctcattcaggggccagtgggtttggatcaaaggttttcactaaaacagattgaagcactagagtgtgcatatgataatctttgtcaaacagaaggagtcacagctcttccttacttcttaatcaagtatgatgagaanatggtgctggtttccttgcttaaacactacagtgatttcttccaaggtcaaaggncgaagataacaattggtgtatatgatcctgtaacttagccagtacctggatggcnttgaggattttt

SEQ ID NO: 592207 - DNA, 149 bp, Homo sapiens
tccgcgccgcttcctgcttctgccaccagaccctgcttcctgcttcgcttcctgcttctgctgcttcctgcttctgctgcttcctgcttctgcctgcttcctgcttctgccctaagcaaagagaacaaagctgacttcaaactatacta

SEQ ID NO: 592208 - DNA, 338 bp, Homo sapiens
ccccctccccggttacaaaagcctttcaatggaggaagattagccttttcaacaaagggggctgctggagcattttcataaacataagcaaaaaaaaaatgaccctcattttaaacttcacacctttggccaaaataaattaatcttagttttaaaggtaaaacaaaaccctgaaaccttttaaaaacaggggccccaaacccacaggccaggggccagtcccggcccatagcctgttaggacctgggcgcggggcaggacatgaccggccgcccggtgagcattaccacctgatttccgcctcctgtcagatcatggcagcattagattctcacagg

SEQ ID NO: 592209 - DNA, 115 bp, Homo sapiens
  misc_feature (85)..(85): n is a, c, g, or t
ggccggaaccacactggctggctactccatcagtacactgctcttgaaatcatccatgtctgtgtgttcagtagttgcttctttncttactgctgaataatatggcattatgtgc

SEQ ID NO: 592210 - DNA, 353 bp, Homo sapiens
ggggtccccgttatcactagacactgtaagcatccagtaggcaggaagatggctttgcgcagtgtctggatcgagagcagatatgagatacccagctccggaccgaggtcatcttctacaggttcttccttcactgagacaatgaattcaggctgatcatactctgaggggctgagaggtgcttcctcgattttcactaccacattagcttggctctctgtctcacagggtatctctcagactaggggcttggtatatattctaagtcaaaacgaattagttcattaattcgcttccagcattggctgaatgacgtccctcactgtacaagagaaacgggagcgctggataag

SEQ ID NO: 592211 - DNA, 335 bp, Homo sapiens
  misc_feature (9)..(9): n is a, c, g, or t
  misc_feature (55)..(55): n is a, c, g, or t
  misc_feature (163)..(163): n is a, c, g, or t
  misc_feature (178)..(178): n is a, c, g, or t
  misc_feature (219)..(219): n is a, c, g, or t
  misc_feature (254)..(254): n is a, c, g, or t
  misc_feature (261)..(261): n is a, c, g, or t
  misc_feature (286)..(286): n is a, c, g, or t
ttggcctcnttccgtgtgaccagaaagttagatgagtagttttaagattgagtgncctaactccgggagtattcttacctccactgtcataggtgttcatgtactaatgtggaatatcaaggtggttttttttttgtttgtttgtttgttttttttaagtttncagaggaaatagaanccacatacctctaaactcaaattgccccaaagatcaattcncagggaaatgagtggagcatcacgaagacatcaancttcctncctagttaccactgacttgctagtncctgctctagctgaataatgaggttaccaactcacggcagcaattttat

SEQ ID NO: 592212 - DNA, 917 bp, Homo sapiens
  misc_feature (722)..(722): n is a, c, g, or t
  misc_feature (795)..(795): n is a, c, g, or t
ccgcgccagtgtcccgccgcctcccgcaagcggaaatagttcccggaacgcctgcggtcccgggccgcctcccagactccaggggagccgtccctccaactcccgggagctgccgagggaggggcggatccgggccagctcctctgccagagcccagcccagagagggtgaccgggggacgcagggccgggtttccagccccacgagagggatggtgtagggaccggggcgtcgcggcgagacgcctttcctcgggggggggtgcgggggggcgcccacctcctccgtgtcggccggagggtctgcaacagcgggtggaatttttagcacaagcgagggaggaggttggagcgacgagaggcgggagcggaaagggcgcggaggccggggctgcagcgcgctccaccgcccagctgcaggtggcgcctctcgccacccgcaccccgctgcgcccagggaagggccgatggcgcgccgtcctccctcctcccttcgggaagcctgcgacgtcccatcccctccgacgcaggcccgggaaaggctcaaaaggttcgaggtcgcgttcctgctatcccgcgggcttctctcactcttagatcccgcaccagaggaagcggatctccttgagtgggcaaagcaggggtgaggggctgggggcagttccactgacaacgggacgggggcgagaggggtttacccagtacatacagaaacagcacganaagaaatctatttttaatggcttaggctttatagcacgaaggcaggcaccctctcgttacaaggacacagtcntctctatctgcccacctcctggggtccttaaaatcgagtcctgagttccagaggggtcacgtgccagggcagcagtgaagggagaagggtcacagttcacttctgtgacgtatcggacaccc

SEQ ID NO: 592213 - DNA, 393 bp, Homo sapiens
  misc_feature (135)..(135): n is a, c, g, or t
  misc_feature (171)..(171): n is a, c, g, or t
  misc_feature (304)..(304): n is a, c, g, or t
  misc_feature (317)..(317): n is a, c, g, or t
  misc_feature (374)..(374): n is a, c, g, or t
gtgtagtgcattgaacccaatgaacaaaaagtagccacttttactatacaaggcccgctggtgcagaaaaaaacctatatatttttggaaatcccagcattttatactttcaccgtgttataaaaaaaaaagccnaagaacaaagaaaccctctatttcattaaatgattncttctggtggttgtcaagacacaaaagaccaaaagagcctttttgtctttcttttttattttttaagtattggaataagtctaaagaaaagaaagtgccttattttccttcatggttcattcagtcaagtgtnctcctgaaagatnagctcctcccttcagaatacaagttaatgcatgttactcagtcgcccagttatgtgnaaagaaggtatgtgggagt

SEQ ID NO: 592214 - DNA, 802 bp, Homo sapiens
accttgtcaagaattcaataagaattctcaggctgtctgtattttcttttaggaccttggagatctctcaagttgtactgttttctaagtattcctgagtatattcctttggtaacgtgaaacgtaaatagtttatattgatgattttttgtttttttggaaacggatcttgcctgtcacccagggttggagtacagtggtgaaatcccggctcattgaagttctgcctccggggttcaccgccattctcctgcctaaccctcctgagtgctgggactacaggagcccgccaccaaaccgcgggaactttttggtattctacgtagagatggggtacccgggtgttaagtccagggtggttccatctcctgaaaccttgtgatccacccaccttgggccttcccacaaggtgctgggattcacagggcgtgagcacacagtgtcccgggcctgtattgggcgagatatttgtaccgaatgtttctacttggaccatcgagtgcttcaggaatggatgtcaaccgatctgtacatccgttgtgtacgaccttcttctgcatatgctatcttggctctggacgtaatccctagtcgtgttgtcttacatacccgttttcagttgggtctttcaccgcgttgctggttctgggctcccgtttagcacctgtggtttgctcatcattatttcgagacggctgtgttcgcctgtccgtcgtttcctgtgtttgccatgcgtactcccgtttgttgtcgccctgacacccttgagtttccgtttcgttcttcccaccccttacgttct

SEQ ID NO: 592215 - DNA, 885 bp, Homo sapiens
gatgcgctccccggcgccagcagcagagggcaccgtcccagaaatgcatgcgacgatccccttctcccggacccaggagccgggcccccgccctgtagggttacgatcactgattaaaaagagggactttttcaaatacttgtgcactttggatggtgtatatggataccaaggaagagaagaaggaacggaaacaaagttatttggtcgatgaaaaagaaaaaacaagccaaacaaaatgcagagacagcctcagcgtgtaggtacaaggactcatacctggaaggaagataataatacagtagttttagagccagacaagtgcaacattgtgtggaagaggaatatatgacttgatgagaaaccaaacgagaaaacgtaatcagttaaggagatcaggcgtacagaactaaaagagatattatagtattgatggacactcaaaaaaaaaaaaaaaaaaaaaaaacaaaaaaaaaactttttgggggggctgggctgaaaagatttttaaaccaacttttgggggggcggggcccagtgttataggtacaccgtggcccaccggggctccaagggaaacccgggcaatgcgactcgtcgctgggcttctccccccaattaaaaaaagcgcgggcggacccgggcgccgtttggaccaactcagagggcttcgggggtccatcgggctctacacagagggcccagcgaccgatactagccccgcgcggcgtgatggaaaaaacaggaaaagaacaacctgagacgagaagaggagagcagcagggagagacgagcgagagaacaagaacgcgaggagagagacgcgagaacggaggacgataagagagagaacgcagaaccaaagagagagagagcgacgcacac

SEQ ID NO: 592216 - DNA, 963 bp, Homo sapiens
  misc_feature (697)..(697): n is a, c, g, or t
gagagctgccgtggactcgttaatagtctgaggcctatagagcatggatgctgatgtggatgcctaccatggtccggtggtctcagctgtccctgctaggtctctgtgtcctggcctgtccatgacacctgaccatgtgccatggttgctggacatcactgtcctggagtgttgagccgtgtgggtggggcctggcacggggcttcttgtttgagagggcttcatcctatgtcttctcgaggtgcttgctccgcgttcctgtgcgcgagcggggccccggggtgccggttcgcgtgaggcgaggtttgtcacttgtgacagaagaggagatacgctggcgtctccccgtaggaggcgcacctgggaggagggctaggagccgacgggggggagcccagacatgggaggacgcgcactgagcagcaccagaggtgattgcggtagcgacgaacgagagggggccctgctctgggcaaggtactacaggctgcggtcgtggcgggacgggggaccttagtagttggccaacgagaactcatcgcgtgagtacgcgggggggttgcttttcccctgggatgcgtgctgtgagcggaacaatcccaattctcatcaccatgggctcgcggcattgtgtgttcagttcccttctccttgtaaggtagtcgcccttgccttggttgtgatcattgggacccancgagaaccgttgcacgttggggtgtgcctttggtggacctccggtggatctgttggcatgttgctaagttggcctggggcctggggcctttctgtgggttggcttacccttgtccttaggtttcgccgagagcctggggggcccccggcgttaacgcaaggagcggacggttgctttccgttggcgatgggttcccccgcctgggggcgctagagtttccttggacttgggggggaacttggaccctttttccacacgcccctggg

SEQ ID NO: 592217 - DNA, 282 bp, Homo sapiens
ggtgtggagcaggctggggctggcccctcattagtttcccacctgattacttaggtggttggcatctttatcaaatttggacttgcactgatttgcccaacgtttcccctttctacgtcgggggcatatagaagggggttcttttgctgagttaccttggtctctactagtggggcactgcctcttcttatgacctggctctccacacagaaaccaatttggggttttctcccttttcacttcaggagactttattgccatggccaatattttggctttgtg

SEQ ID NO: 592218 - DNA, 873 bp, Homo sapiens
  misc_feature (3)..(3): n is a, c, g, or t
  misc_feature (5)..(5): n is a, c, g, or t
  misc_feature (41)..(41): n is a, c, g, or t
  misc_feature (58)..(58): n is a, c, g, or t
  misc_feature (82)..(82): n is a, c, g, or t
  misc_feature (104)..(104): n is a, c, g, or t
  misc_feature (108)..(108): n is a, c, g, or t
  misc_feature (115)..(115): n is a, c, g, or t
  misc_feature (132)..(132): n is a, c, g, or t
  misc_feature (139)..(139): n is a, c, g, or t
  misc_feature (152)..(153): n is a, c, g, or t
  misc_feature (155)..(155): n is a, c, g, or t
  misc_feature (167)..(167): n is a, c, g, or t
  misc_feature (182)..(182): n is a, c, g, or t
  misc_feature (194)..(194): n is a, c, g, or t
  misc_feature (198)..(198): n is a, c, g, or t
  misc_feature (202)..(202): n is a, c, g, or t
  misc_feature (204)..(204): n is a, c, g, or t
  misc_feature (207)..(208): n is a, c, g, or t
  misc_feature (234)..(234): n is a, c, g, or t
  misc_feature (249)..(250): n is a, c, g, or t
  misc_feature (252)..(252): n is a, c, g, or t
  misc_feature (288)..(288): n is a, c, g, or t
  misc_feature (335)..(335): n is a, c, g, or t
  misc_feature (359)..(359): n is a, c, g, or t
  misc_feature (377)..(377): n is a, c, g, or t
  misc_feature (379)..(379): n is a, c, g, or t
  misc_feature (456)..(456): n is a, c, g, or t
  misc_feature (480)..(480): n is a, c, g, or t
  misc_feature (484)..(485): n is a, c, g, or t
  misc_feature (504)..(504): n is a, c, g, or t
  misc_feature (517)..(517): n is a, c, g, or t
  misc_feature (523)..(523): n is a, c, g, or t
  misc_feature (572)..(572): n is a, c, g, or t
  misc_feature (654)..(654): n is a, c, g, or t
  misc_feature (668)..(668): n is a, c, g, or t
  misc_feature (670)..(670): n is a, c, g, or t
  misc_feature (699)..(699): n is a, c, g, or t
  misc_feature (714)..(714): n is a, c, g, or t
  misc_feature (741)..(741): n is a, c, g, or t
  misc_feature (777)..(777): n is a, c, g, or t
  misc_feature (787)..(787): n is a, c, g, or t
  misc_feature (802)..(802): n is a, c, g, or t
  misc_feature (810)..(810): n is a, c, g, or t
  misc_feature (824)..(824): n is a, c, g, or t
tcngnggggtgtacattttattggaaaccttaaatactgtncagaatcaatcaaggcncttgtgcagcctacacagaaaaangaagctttttgggttaggggcnaggngagaganagtccagaggacaaagnccccccncgatgaatgcccnncngccagcttatcngcttttgccacagcntcttcaatgggncccnccananagnnggcctgtcctgggagagggtcatatncccccccccccatcnncnggaatcctttgatggtctccttcaggggtaccagcntccccatatgacctgtgaagacctcagcaacctggaatggctgaganaagaaacgctgttttttccgtgcncgggacagggtcaacttntnttcctcagaaagttcatccatacccaggatggcaatgatatcctggagggatttgtagtcctgcaggatcttttgcnccccacgggcaacatcgtaatgcncccnnccaacaatgttgggatccntgacacgagaggnggagtntagaggatccacagctggatagatgcccagctcagcaatggcacgcganagttcagtggtagcatccaaatgggcaaacgtatagcaggggcagggtcagttaagttatcagcaggcacatagatagcctnttcagaggtgatanancccttcttggtagtggtaattctttcctncatagtacccatgtnagtggccagggtaggctgatagcccanagcagaagggatttggcccaataatgcagaaacctntgaaccagcntgggtgaagcgaaanatgttatnaataaatagcagtncatcttgaccttcttggtctctgaagttttcagccacagttagcccagt

SEQ ID NO: 592219 - DNA, 233 bp, Homo sapiens
aatgtacatttgaatcatttataacagtaggccagtgaagagccagcagatggtgctacccacattgacatgctatgatcagagaccaagtggattatgtaaggaaaagtactgctcaactacagagggtagccttaaaacaaaagcaacgcttatttaaaataggaaagactgcagcttttacaaattggtcttttcagtcctatccaggtcagtaagaagtaatatcattg

SEQ ID NO: 592220 - DNA, 128 bp, Homo sapiens
tgatgctgaggtagacgtctagagatccccgtggtcggctctggtctttatatgctctctcatattccaggaattgacgttatttatttatccatctacctctcatagcagatatttgagaaaactaa

SEQ ID NO: 592221 - DNA, 148 bp, Homo sapiens
gactgtgatttatttggagtggaggccttgttttttagaaaaacatgtcatgtttgttgtctataaaattaaatgcgtttaaactctaaaaaaaactttcttctctcctttttcttctttccttccttttctcttctttctcctagaa

SEQ ID NO: 592222 - DNA, 218 bp, Homo sapiens
  misc_feature (211)..(211): n is a, c, g, or t
cagcttatagaggcacaaggaggggcatgatattgttgcactgaacctccacctcctgggttcaagtgattctcgtgcctcagcctcccgagtagctgggactatgggcgtgcaccaccacacctggctaatttttgtatttacgtagacgatggagtttcatctatgttgcccatggctgctctctgaactccctgagctcaagcaatcntacccac

SEQ ID NO: 592223 - DNA, 791 bp, Homo sapiens
  misc_feature (451)..(451): n is a, c, g, or t
  misc_feature (480)..(480): n is a, c, g, or t
  misc_feature (502)..(502): n is a, c, g, or t
  misc_feature (522)..(522): n is a, c, g, or t
  misc_feature (533)..(534): n is a, c, g, or t
  misc_feature (537)..(537): n is a, c, g, or t
  misc_feature (551)..(551): n is a, c, g, or t
  misc_feature (554)..(554): n is a, c, g, or t
  misc_feature (567)..(569): n is a, c, g, or t
gctgtggtagtctcggagctcttgcttttcgtgcctggcgcgtctgcggcttattccagtcttccttgcctcacgtggatgcgtgatcaggtgactgtcggataccgtggggtttccctttcactctcattctagtggacatgtcctctctgccttggtgtaaaccattcttgggaggacactttttgccaatgcagactctttcccctagctgagttagtgtctaatggatatgatcctatatggttgcccttttcctttgactagtacactgcctggtatggatagtcagagaagtcctgtctgtacttcatgcgaacaagccaatatagagagctatacagtcctagtagtattcctctatttgttcagatctcatagatgacccccaggtatggtctttcgacatccagcagtccaaggtattgagacatattactggaagtaaganatattactataattgagaactacagcttntaagattgtacttttatcttanaagggtggtattttccctanatacttattanngtnagggtcattagacnatntcttgaatagacnnngaatttatgaatggttctttatcagtttcctcttcccccttctttggcatccgtggcgggcctccagttcttaggtccatgctagtttgcttctgtaagcatacgggaacacctgtctgagggggctctcttccactcatgtatacttcaagtaagatcaagaatctctcttgtgaaattatagaaatttactatgtaaatgcttcgatggaatttcgttcc

SEQ ID NO: 592224 - DNA, 188 bp, Homo sapiens
ctgtgcctctgctatgatgcccaccccatcatcgcccacagtctcctgtgctggccagactcccagaaaatgctctattttcttacgtaacgacttccccctattgggggacccctcaatctggaggccccattctaggactctggcgatcccaaaccctagagcacacacgtccgcttgtactcttt

SEQ ID NO: 592225 - DNA, 81 bp, Homo sapiens
  misc_feature (51)..(52): n is a, c, g, or t
catggatttgctggtgcagtacaactaggcttaataagggacatgaggtgnngcaagaaatgggctacattttctacccca

SEQ ID NO: 592226 - DNA, 427 bp, Homo sapiens
  misc_feature (147)..(147): n is a, c, g, or t
  misc_feature (284)..(284): n is a, c, g, or t
  misc_feature (330)..(330): n is a, c, g, or t
  misc_feature (355)..(355): n is a, c, g, or t
  misc_feature (365)..(365): n is a, c, g, or t
  misc_feature (373)..(373): n is a, c, g, or t
  misc_feature (381)..(381): n is a, c, g, or t
  misc_feature (398)..(398): n is a, c, g, or t
  misc_feature (423)..(423): n is a, c, g, or t
taaatcgtctggatgcgggttctgtcgttctgtattgtggtcagccggtcgccgtcccagccgtaccaggtcacttgcggtttccgtgacagcgacatccagcccgtcaggtcccgttcacgccgccacacccgttttgccaccctncggcccagcgggtcgtaaagatagcgactttcgaccagcggctcttcatattgtgtccgcgtgtagtgcaccagccggtgctgactgtcgtaatggtaccggtgagtccgctcatcatccgtgcggataaccccttncgggatgaggtcggttttctctgtcagcctgccgtgacggtcatancggtaaagatagtgcgcgtcaaggngcgatacggntatccggncacattgntgagggttgctgtcccnggtgcaagttccgggtcgtgcagtnggtt

SEQ ID NO: 592227 - DNA, 307 bp, Homo sapiens
  misc_feature (10)..(10): n is a, c, g, or t
  misc_feature (225)..(225): n is a, c, g, or t
  misc_feature (239)..(239): n is a, c, g, or t
  misc_feature (262)..(262): n is a, c, g, or t
tagtggctcncagagggtggtttcaactgggaagtgtactcccccttgtgattcggtaatgcaaaccaaggttcctttcggcccggttccagtgatgagccaattctctcaccaacgcactgggcatttggttgggcttcaggtaacaagggcctttaaaacatcggtcgtaagaactgatatcgagcgcccaactacactaacttacggcttattagccagatngtgtctccatcacngcttgccggagatttgatggagnctgaaatgttgacctgacagaattccagaccacctggtgccctac

SEQ ID NO: 592228 - DNA, 487 bp, Homo sapiens
tactgaggaacagatgctatagatggcatacggtttaccgtggcgtatctctttctccgggtccccctttccctcctggctctcctgtctgaccaaggtccctcttgagcctctggtcctgctggtccccgaggcccccctggctctgctgttgctcctggcaaagatggactcaacaggtctcccatagccccaattgggccccctggtcctcagcggtcgcacattggtgattgctggtcctgttggtccccccggacctcctggacctcctgaaccccctggtccatcccagcgctggtttcgaattcagcttcctgccccagacacctcaagagaagtgctcacgatggtggccgctactacctgtggctgatgatgccaatgtggttcgtgaccgtgacctcgagtgtggacaccaccctcaagagcctgagccagcagatcgagaacatccggagcccagagggcagccgcaagacacctg

SEQ ID NO: 592229 - DNA, 319 bp, Homo sapiens
atacggccacacattatatgttcccaccagggagtgtgtaagtgtctcaagtttactccacgttccttggagaacacgttgttattgtctgtctttctagatagccatcttagcatgtgtgaagtgatattccacggaactattggtccaggtgaccaatgatggtaactatgttaccagtgaccggagatggtgagtatcttatcatcaacttattgagcatttgtatatctcttctggagaaccaatatctcccctcaagcctcacaaatcgcagcttgactataaatcccttgtactgcttgtatgtggaatcaag

SEQ ID NO: 592230 - DNA, 866 bp, Homo sapiens
  misc_feature (63)..(63): n is a, c, g, or t
ggagaggacgggcagaaggaacgtgacttccacgaggcagccgctgggtggggggccccacgntcagggttgtgtctcggtgaaaaaaaggcacgcccgaacgctgggcagggattacccgtgcggacccgggaatggaagggggctcgaagacgccttagccccccggtgaagaaaaggcttccctccctcccagtccaaatacggtccctgtgatctgagaacattacgggggcatagagtcgtcttttctttaatggcgtgtagtcgcggacagccagagggttactggaatggccttaaacgtatgcgttgaaagagcgtaccctttgtgtaccggagcaagtcacctgtggagggaccacgcaggtatggcaagcccggttccagcatgttagggcgagggtgtgctccatggggaccttgccttctgatccgtttaaccaggcatatatttcacaaacgctgtgtctttcctttccaagtattcacatcttgtctatgaccacaaatcagatttaattcaactcaccatttatggaacaagctagccgtgttgtttaacatttattcctgaaacagccgagtgatagaagggattactaatccagtttcacaaacgataaaattggaggtgcactgatgtaatgagtcttcaccaactattcgtacttgaaagcgttactacggtgggaagaataagtagcaagaatttgctttgaggggggaattaaggcacaggtaatatcaggatgaaccagagtttgggtgaaagaaaggggagatcagcagtaggaaaagtggccggaaaaagacacaggtggggggagattagaggggaaaaaaaagggggggaaatggggaaa

SEQ ID NO: 592231 - DNA, 396 bp, Homo sapiens
gtctacctagaggatcctcgcttagtggagatatggacactgcaggttctggggagacccacagacagatgttcgctggatgtcagagactggcatcattgacgtcttcctgctgctggggcctccatctctgatgttttcccagcaatatgctagtctcacaggaacccaggcgttgcgcccactcttctccctcggctaccaccagagccgtttgaactaccgggacgaggctgatgtgctggaagtggatcaggggctttgatgatcacaaccttgcctgtgatgtcatctggctagacattgaacatgcttgatggcaagcggtatttcacctgggaccccagtcgctttcctcagccccggaccatgcttaaggggatcaggggggaccgg

SEQ ID NO: 592232 - DNA, 151 bp, Homo sapiens
agcctccgtggcctccagcagttccccgccttgacctaccaaatgtgctgggattacaggcttgagccatcatggccagcctagatatttttttggtcagagaaaaagtgagaaggaggaaataaccataaagaatgcactacgttgacta

SEQ ID NO: 592233 - DNA, 560 bp, Homo sapiens
  misc_feature (13)..(13): n is a, c, g, or t
  misc_feature (40)..(40): n is a, c, g, or t
  misc_feature (58)..(58): n is a, c, g, or t
  misc_feature (81)..(81): n is a, c, g, or t
  misc_feature (91)..(91): n is a, c, g, or t
  misc_feature (124)..(124): n is a, c, g, or t
  misc_feature (139)..(139): n is a, c, g, or t
  misc_feature (204)..(204): n is a, c, g, or t
  misc_feature (254)..(254): n is a, c, g, or t
  misc_feature (257)..(257): n is a, c, g, or t
  misc_feature (267)..(267): n is a, c, g, or t
  misc_feature (270)..(270): n is a, c, g, or t
  misc_feature (348)..(348): n is a, c, g, or t
  misc_feature (449)..(449): n is a, c, g, or t
  misc_feature (526)..(526): n is a, c, g, or t
ataaaaccttccnaaggccccttggagtttcaatttcttngggttcttcctggctaangaggggtcacggtggaggagacnaccattgtcntggatggtcccaagctggagggaatccgtcttnttggtctcccagccntatcacaggaatcattcctgggtttctgtccctctgaggctcaccaggtgtagttggccttgttntttgggggtattagcccttttactttctttctcacccaccctgtaccctnttntgtgtgtttntgntatccccctttcctcccaccacccatgtgcatgagcaaatgtgcaacaaaaccctgggactttgcagtcaaatgaagntgagcttcccacatcccgtttttcggtttgccatgagacgatgtggggtttccactgtgtgtctgtcatcacctctttgtctttttttcctaaccctgatntcatacttgtatagagtaataacaacagttgtacttccaccaaaggcatgtggcatatttaccaatgtcatgtattntgaacaaaggcaaaaaatacaaattcctaccatt

SEQ ID NO: 592234 - DNA, 246 bp, Homo sapiens
cccctgtccaccctggtctcttgccagggcaggcatagaggtgcttcagatgtctcttgcccgccactctaggcctcgacgcttatacagtgagcagcggtctctaccttccaacaggaagtgcaaactaattcgaagtcacacttcaccaggagggagagatggtcttggctgactgcactttaatcagggcgcaaacccagggccggagtttgtcttctcgttactctgataaatctagacacc

SEQ ID NO: 592235 - DNA, 127 bp, Homo sapiens
ttaccagagtagctgtgagtacttgtgtaatgtgaaaaagggcttgtatatcagaaactcctgtggtttcctgttaaaaaatcttaaagccccaactttggcatatatgtgccccaaaaggcggatg

SEQ ID NO: 592236 - DNA, 875 bp, Homo sapiens
  misc_feature (370)..(370): n is a, c, g, or t
tagtaaagttcccatctttccacaggacactcgtcctccaaacaattccgccagcgtttgccacagaccacatgttaggcccactactggtctcgcaaatatccccccgggttccaactccaacccagatgtttcaatcttcatcggagtaaataaacagcaagacactcttacaacgccgtattttcaaagcctctgccacaaattactaagagtcgcttcatccccatcggaagtttgttaaccccgccccgtcgtcgccccaaaaagccgccgcttttatacccccctggcacaaaacgcttttcctctcacccccattaaaaaggttccgaatattatcaaccaagtaataattgtttcgttaacnatcccccggcaaacccccacgtataatatttgacatgctccacaccccaaaagttctcttatccaaagccacccggaccacttttccagcatacttttccagatctcaggtctctcgtcattttacaatatagtacagccctatacggttctttaatccaaatggaatgttccccgcctagtgtggcctaacaaagctgtaatccccccccattgtgaggacgccctgtgtggaggagatgtcttgtcgtgcccccgggggttccatgcccccccgttggccaacacacaaactgggaggtaccttgttttttgcaacgacacacctatactattatcgtgtgagcccctgcgcaggaccaccctcttttatcaacccctacatgggccgactcagttgggaggctaactcctgcgacgtcggtcagcggcggcgcgtcagtgagcccccgtgttgcggcccccccccctttccccgggggccaaagcaattcgcccccatgaca

SEQ ID NO: 592237 - DNA, 231 bp, Homo sapiens
ttgctgctgcaggtcgtctagagatcccccacgtcctgaatcctccatgactagcacggtgtatcatgcgccggtattcttaatagaccacctgcaccaacagcaactgtacctgcccctacagtctccagttactaaccctcttttcccccgtgctggacaggctcaggcagctgtcctcggacctgttggtacatatttcaaacccttaaatagtacccatcggcgtgg

SEQ ID NO: 592238 - DNA, 297 bp, Homo sapiens
  misc_feature (167)..(167): n is a, c, g, or t
  misc_feature (196)..(196): n is a, c, g, or t
  misc_feature (225)..(225): n is a, c, g, or t
  misc_feature (236)..(236): n is a, c, g, or t
  misc_feature (275)..(275): n is a, c, g, or t
ttaggagacccttcttagttacgatacgatgctaacgtttctaggtaagtatggataagatgttttgatctgggaacttttcgggttgcttaggtttttttgggggttagaagactttgtttctgtttgcccttccgtttttatgtgtcgggtttccgttatcgttnggggctatgtcttagggctttataggctngcttactatgtttacgctttagactcttngggtgggtatngtttttatatagttgtctaatttccgattttgggcgttngctatcgccttttgttcttggg

SEQ ID NO: 592239 - DNA, 285 bp, Homo sapiens
acgcaaatatgatcacaggatcaggaccacagcaattatgtggctaaaaaatactccaggaagcagaatgtaattttaatgtaactaattttgtttttattttggagacaagttatttccaaggaaccagacaatgtggcaagttacaggcatgtgttacatcattggagattaatatacttgctaatctcagttgtggaaattctcaaaaagtcgtcggggttatggtcttgaatatgtgtctgcatgtgttgcggtcttggatgtctatatagatgtctatat

SEQ ID NO: 592240 - DNA, 809 bp, Homo sapiens
  misc_feature (332)..(332): n is a, c, g, or t
  misc_feature (807)..(807): n is a, c, g, or t
gttaatgatgttgagcatctcgtcatgtgtttaaaagacaaagccatttatgtaccttctttgttgagatgtctaataaaatttttgccttctttttttacttgggttgtcttattttttaaaatatatttattattaattgtaaaatatacgtaacaaaaaacttttattttctttttctttcttttttttggagacagagtttcactcttgttgcccaggctggagtgcaatggcacgatctcggctcactgcagcctccgcctcccaggttcaagcgattctcctgcctcagtctccccagtagctgggtttataggcagatgccacanagcccagctaattttcgtatttttagtagagacggggtttcactatgtcggtcaggctggtttcgaactcctgaccttgggtggatcttggccacctgggcctcccaaagttgctgggattaccaggggtgattttttacatttctattttgcctgtgaaatcaggtctccttttgttcccagggctggtctcacatttggcgggtcgggataatcctgggtcggacctctatgtgtccgggtcccgggtttagccctgttgccagcccattttgtgcctcaggacgtcgttgagggacccctttcgctttgtgcacatcacacttttctctttgtcccagagaggctgggtggcgcaaaaatggtccacggcgagaaatccccggggtaacaaagtgtctgctgagacaacagggagggaggctctataatgagaaaacctcttgtttttgttttgctatttttttatttatantc

SEQ ID NO: 592241 - DNA, 367 bp, Homo sapiens
cagagcaaaacataaccaatacacagggagcagagactctatagctaaagacaagattcgcaatgaaagaatcagtgccacattgcatcagtaaagtgtcccatctccctgtaagtggttatgtgtccagcggttgtaactctcgacgataatggtgtaggtgtatcaccccactcttcatgtcgacatcctgcaggattccagctgtccaatcagtccgtcataggctgggcgcgtttaaaaaagactccttgttcaccaaatgcaccatttcctgagacttgctggcctctccgttgagtccacttggctttctgtcctccacagctccattgcaacacggtctctcagggtaccgagcacgaat

SEQ ID NO: 592242 - DNA, 271 bp, Homo sapiens
  misc_feature (97)..(98): n is a, c, g, or t
actccatcctcacttattctaaaactgtgcctccaacagaggggcagggctcttgtagagagcactccctggcccagcgacagcgcagcatgccaannatcgtaatttatctcactgagggcctttgagaaaaacgcttctgggccaggctcagtggctcatgcctatataatcccagtactttgagaagctgaggcggcagatcacttgaggccaggagttcgagaccagtctcgtcaacatggcgaaaccctgtctctacaaaaaaaaa

SEQ ID NO: 592243 - DNA, 286 bp, Homo sapiens
  misc_feature (31)..(31): n is a, c, g, or t
  misc_feature (33)..(33): n is a, c, g, or t
  misc_feature (65)..(65): n is a, c, g, or t
  misc_feature (96)..(96): n is a, c, g, or t
tacccgttaatgtctgacatcagttagttangncataaagcaagcatgtgaaagtgtgctttggnggcattacgaggaagcccttctctgcttggnaagatcagggagactgaaagatgcttagaagtcatccaccaggcgggctgtgtttgagttcctgagctctcctaccccatccatctgaaggcctgcgggatgccggacaggatgtcacttaggagggagacggaggctgggcgcggtggctcccgcctgtaatccgagcactttgggagcccgaggcggg

SEQ ID NO: 592244 - DNA, 144 bp, Homo sapiens
gtccctttggttttttttcccaaaagggttaaacagggacccagtggggaagctttccagcttccaccccttgaatgtgaagggtcattggcatgtttggcagaagtttttcattccccccccaataaacccccttggatccca

SEQ ID NO: 592245 - DNA, 120 bp, Homo sapiens
catggagaggcacagatgttgtaccaggtacacggcccacgttggccaggccccagttcatggaagaggaaaaatgtgcttggtggtagctgtcagctcgcccgcatgagttagtcagct

SEQ ID NO: 592246 - DNA, 408 bp, Homo sapiens
gatgaataaggaccagaaatcgtgagatgtggattttgaacccaactctaccttttattttgttaagaccaatcacagattgtgcctcagatcatccacctgtgtgagtccatcactgtgaaattgactgtgtccatgtgatgatgccctttgtcccattatttggagcagaaaattcgtcatttggaagtaatacaactcattgctggaattgtgaaattatttaaggcgggatctctggtcctttattttaatgtaggaaaccctatggggtttatgaaaaaaacttggggaacattctttgaatgggctaaggaagagggaggccctgccatgccatgatggtggggttattttattggtaaagcaataaacctggggggactctaggaggtgttctatttatgc

SEQ ID NO: 592247 - DNA, 299 bp, Homo sapiens
  misc_feature (83)..(83): n is a, c, g, or t
  misc_feature (154)..(154): n is a, c, g, or t
ggcgggtggatcacttgaggtcaggagttggagaccagtctggccaacatggcaaaatcccatctctactaaaaatacaaaanttagccaggcatggtgacaggcacctgtaatcccagctacttgggaggctgaggcaggagaatcgcttgantctgggaggtggaggttggagtgagccaagattgtgccactgcatttcaacctgagctacagagagagactctgtctcaaaaattaataataataactaaaaactcacattcttactaactttgatgtgtagaaacagcacaacc

SEQ ID NO: 592248 - DNA, 275 bp, Homo sapiens
catacgggccagactggagctgtagtggtgtgattcttggctcatgtaatctctgccgcctcaagacaatcctcctgcctcagcctaccaggtagttgggactgcaggtgcacaccacaatccctagctaattgttgtatattttgtagacatggagttttgccatgttgtccaggctggtcttgaactattagactcaagcaatcctcccaccttggcctctcaaagtgcttggattacagggagaacgtgtgcagtgggcacacattatggag

SEQ ID NO: 592249 - DNA, 195 bp, Homo sapiens
ctaattctaacaagctccatctgctacgacacacagacctaagaatcgctcattgcatactcttcaatcagccacatagccctcgtagtaccagccattctcatccaaacccccataagcttcaccggcgcagtcgtcctcatagtcatcctcggaggtacgtccacgttatgattctggctagcagactcagac

SEQ ID NO: 592250 - DNA, 1014 bp, Homo sapiens
cgggtcggccgggcttcggggtgcccagggcgccgctgctgccaccgccatctaacgctgcgcccttgaggcccggcgcgcggattgtgccggtgcggctcgggtgttgaaacgggtgtcccctccccctcctcctcacccacagatggatgaatctacccataacaaaactagatcaggaaagagcacaatgctactacaaagaaagaaatcaatacacaaaacaagaatcagaaaacatgacaagatgtgatacaatactgaaatgaatgaaacaaaaaagctatagaaaaaaaacgatacactaaaagaaataaaaaaattactcacaaaagaactaataagtcgatagactaaccacaatccaaacaacttgcagcaaatagtattagagatacgacgaaacgtaccagaggacatggacaagaagaaatgagacgagatagaaataacaataaatactacaataggtctcacgagcaacgaacaattaagaaacgcagaaacagttaaagcaacaattaacgcaaattaagacaagaaaaagacgaatgacaagaggaaacaagagagatagttagaatataggagtagagagggtagaaaaagaaagcgagaagagaagataatagataaggagaggagaaagagaaaagagtaggagacgatatgaataggagaataaggataagatacaaagggaaacgcaaaattaataagaaacgagaaagaaaagaagggaataaatagaatagaaagacatgtaagttgagataatatgaatataagagagaatagaacgaaaataagagatgaaaataaagcaaaaagaaaataaagtgagaatataaaaattaaataatatactgataatatagagattaaataataaaagaggatagaaaaataagagagaagatagagaaagagacgaagagaagagagaaaaagaaagagaaagtataagcaataagatagatcagaacgaaaaagtaaatagaaaaatagagagag

SEQ ID NO: 592251 - DNA, 344 bp, Homo sapiens
cggcactgttcggatgcggctggtatgcccgtaggattcattcgtgccaggagacggggagcactgtgctgttagaaaaattgcagcacgtgtctgcagcccatcccggtgtgatcagccgtcggaattggggatgcaagtcgtgttcgggtctctggtcagtgccttccacgaggccacacctttgagccttgcagagtttatcattgatacccgcgatgcaggctatggtgggctcacgctgtcccattgaggggcccagcaaggtggacatcaacacagagtgccttgaggacgggacgtgcaggggtcacctactgccccacagagccagggaactacat

SEQ ID NO: 592252 - DNA, 138 bp, Homo sapiens
caacgctgataacatagtaataccagatccatattagataacgataggtatagaataatactaaacctaggtaacactataacagacatacacaaatacccttaataataatagtacaacaaacataacttataccct

SEQ ID NO: 592253 - DNA, 301 bp, Homo sapiens
ttcacagatctcaagcttaccgcatctgggcattatagtgagatccatttcttaaaaaaaaaaaaataattatccaggctagggggtgcactcatgtagtcccagctgcttgggagttaaagtggggaggatcgcttgagcttgatagatcgaggctgcggtgagctgtgatggtgccacttcactccagttggggtgacagagactctgtctcaaaaaataaacaagaaaaggagagaagagtgggactcaacttaaactttgggggtccctacgtttcagcggggtacggagctcgaat

SEQ ID NO: 592254 - DNA, 361 bp, Homo sapiens
  misc_feature (43)..(43): n is a, c, g, or t
agatcacactagtaagtagtagagataggagtccagccagacntactgatcctttacattatatcaacagtgtatccatggtaatacatggtaaggtatattggaaggtaccatggtaacggtgtattgaattcctaattttttttatcaggtccttataaatttgggaaatgagggtataatacccattattctcccttagtcttatcaagtcaattgattgattaagaccaccacacatccagtttaatgacaaatttgggggtgactggatggggagtggaactttaattaatggaaaataattgtaattgacacccaactccaggaagcaatgaaataatgtgcttatttgacattt

SEQ ID NO: 592255 - DNA, 232 bp, Homo sapiens
actgaccaaccaagacatgagaatttgcaacagtgtgagaaaaaaagaaccaaaacttccaatgccctgctattttttcttaaaagtactttaaaaaggaaatttgttttgtattttttatttacattttatattttttgtacatattgttagggtcagccatttttaatgatctcgtgatgaccaaaccagccttcaggagcgttctctgtcctacttcttgactttactt

SEQ ID NO: 592256 - DNA, 382 bp, Homo sapiens
cttttataaatctctctgtcctggcagatatcctattcatggtacagttaaataagatggtaatgtatttttttccagattgtgttccagtgtacatatatgactccatcagttacaaatcactaaatctattatatcctacatatattgtaataaaatatgtattgccatttgcagaagcatactcaaaatcatattcagaatccaagaaggaacagaaagccataggaaattgctatttaaaaggaagtgtgctttctttccagacatatttcatgtcattagggagactatcctgcacatacaggcacagtaatctttttcttccttgccaactgttagtgcacatgtgctgcgtcagaaatggcacctggatgacaga

SEQ ID NO: 592257 - DNA, 104 bp, Homo sapiens
atcactgagtgtgataacgtcaagtactcacctgtccacgggcacactctccaacctgacatgcaaaacagcaagaacaagaccctggcacactgggaccaggc

SEQ ID NO: 592258 - DNA, 916 bp, Homo sapiens
  misc_feature (279)..(279): n is a, c, g, or t
  misc_feature (916)..(916): n is a, c, g, or t
gctccgagtgtgcttagcgatggcctggaaatccggcggcgcagccactcggagctaatccacaatctccgcaaaaatggaatcatcaagacagataaagtattgaagtgatgctgctacagaccgtcccattatgcaaaatgtaaacccatacatggattctccaaatcaataggtttccaagcaaaaatcagtgctccacacatgcatgcatatgcgcaagaattctatttgatcagttgcatgaaggagctaaagctctgtgatgtaggatcctgnaaagtgaatccttactgcatgttttgcaccgtattggttggatgtacttgaaaagtcataggaatggatcacattaaagagctagtagatgatcaataaataatgtcaggaagggacgatccaacactttctgtccttcagggagagtacagcttgttggtgggggatgaaagaaatgggatatgctgaagaaagcccctttatgatgccattcatgttgggaagctgcagcccctgttgtacccccaggcgctaataagatcagttaaagcccggaggaaagattgatcatgctgttggcctgcaggcggaaaccaaatgttggagcaggtatgacaagctacaagatgggagatcaaaatgaagctctgatggggtgaataacgtgcttaacagataagaaaagcagtgtcagggtgaatggaaagcacatctgctgccagttaaatcaggggtggccatcagctacagttttgaacaaacacacaagtgttggattggaccggattcacaaagaggtgcaggtgattacagacacgaagtgaaggagaaattagttataagatgagaaaaggagagaaaagaaggaggctcttattcatctaatggtcgtataaggttattttgtgtttggagn

SEQ ID NO: 592259 - DNA, 122 bp, Homo sapiens
tgctccgtgacatggaacgggagcgactttttgagatactacgagatctactgcggctgctcctgcgactcctactaacgtgaccgtcttctagatcaaagagcaaatctaagcccaagtct

SEQ ID NO: 592260 - DNA, 159 bp, Homo sapiens
cgttggaaatatgacatatgggcggctgcccgcgtaacgacgacgagcgcaggaggtagtgagcgaggaagccggcgatacttcgtatgcatacatatacgaagtatagtcgacggtacggacattgccggaatcggctccgagaagcttctaacatcg

SEQ ID NO: 592261 - DNA, 685 bp, Homo sapiens
gcgggagcttgcgtgctgctgggcctgagctgtctgtctcgtttcttgtccgcgcgccctgcatcccggccccgggctgcccgctggaggtcgcctgaggagccacagggctgactggttccttgtggccccggaagctcgctggctgggccctgcgtggagtgcgtgcatgctcccgctggaggctgctggcctgctggctggctggggacgctggggcggggtgcctgctggcgcttctggccaatcagtgccgcttctgtcacgtggcctgcgctgtgctggctgcgcgcatgcagatcgctgcagctctacggcctgcctctactccgagatgctcactgcctgctgttctcctcgtgcctgcctctggctgcctgtgcttgcaactggcctgtcctttgccatagcctctgccttgatgtgctggctgttatgcacggctgtctatctgttttgtggacgatggatgatggatccagtgatggacgtgacgtttgcagaagatctattagatgacgatgaacgcgcgtgtgggaagaagctgtcgaaagtagtgtgtcagggagctctgggagtcacaggaacagcccttcgcagaaccaaacaagcccaactcagaacgggcaattgaacgattcgaggagggcaagagagcaaacttggggaaatggtgatggataag

SEQ ID NO: 592262 - DNA, 228 bp, Homo sapiens
gctcgacccattacattccattccactccacccggttttattccattccattccattccattccattccattacatttgatcctattttattaaattgcattctattcgagtgatttccattcgagtcctttccattcgattccattcctttggattccactccattccgctccattcacatcaattccttgcgattccattacattcgatttcttgccgtcgacgcg

SEQ ID NO: 592263 - DNA, 488 bp, Homo sapiens
gcgggcgggcggtgggtgggggggtggtgggggggccagagccacaggatggcttcccctctgagtggacgaggaggaggaggaggaggagattggtggtgtcggaggaggaagaagaggaggaagaagagggcgacgaggaggaggaggaggaggtggaggcggcgacgaggacgatgagggaggacgacgacgagggagtactcgggcgcggtgccgggccacgacccggggccgccgaccgcctacagtcgccccgcctggcttgctcaccttcttccccgcccggtgcgcgtctgcctgtctgccgcttcgcctgccgccgctggcctggggtgtgctcccccgcgtcccgcctactcttccccctctcgccccactccgtctcgccccgctccggtcgtgtctcccctctgctgggccgctcccgacgcgtccacggcccgcctgtgtcgctccctgcccccccttcgccgccccccccctcc

SEQ ID NO: 592264 - DNA, 622 bp, Homo sapiens
ggtgtagaaaagcaggaaaggggttactggggctcagtccttctccagctggaagagccaagcccagctctggagagcccagcaaaagcccggtgtccagagaggcagtgagaagtgtaaggcagagaaaaacgttttctggtaacagcgaggccgataggcccgtgaggggggggctgaaaggaggtgggggagagcatgcttgatgggtggctccaacatctctctccagggggcttcaattggccccctgatgccaggaggaagagtccaaacccgggctaccaagagaaggggcttggtggcgcaggagccaggtccagagcccgctggggtccgggcttggaaacagccccctttgattgatccagaaaggacttggtaacaggtgtagatggggattaatggccttaagggtgatggccgcattcttggcccacaaaggtaagggccagaaaacaacagccaggtaagtgtgggtcatcttgtcctggtcactggtgtgcagaaatctggacccaggaaacgcagtcaggaaagaagcaactggtaaactcctcggaagcgttggagacctgcagtgtcgtgcacctctgcttactcatgtgaggaagccaccaat

SEQ ID NO: 592265 - DNA, 422 bp, Homo sapiens
ctatatgaacccggctgcggcgaagaatggcaggcactcaaggtgacggttgcagtgcagtgagatcgtgccactggactccagcctgggcaacagagcgaactccatctcaacaataaatacatattggggcctggcatggtggctcacacctgtaatcccaacactttggcggccaaggtgcgagcattgcttgagaccaggcatttgacgactcacgcctgggcagcatacgcgagacaccatctctactaaacaataccaaaaacttggctgggcgtgactggcactgtgcctactactcccacgctacttgggacggctgacggcccggacgaactctcttgaacccgggagggggcggttgcagtgagccacgatcacatcacctgcactccagcttacggcatagcgcaagactc

SEQ ID NO: 592266 - DNA, 166 bp, Homo sapiens
taccctttccatcgtttcatcgactttacgtttgtctttcctgccctgtgccctgttttcattttctctaaggatatccttaggtacctcaatgaccgctgaacagctccagacatttcgtgatatttccagacatataaacacctctcgtcaaattctcgtacag

SEQ ID NO: 592267 - DNA, 281 bp, Homo sapiens
cctccctggttcaagggattctcctgcctcagcctcccaagtagctgggactacaggtgtgggcgccaccatgcccagctaatttttgtatttttagtagagatggggtttcaccacgttggccaggatggtctcgatctctcgatctcgtgatctgcccgccttggcctcccaaagtgctgagattacaggcgtgagccaccatgcgcagcccaagcagggttcatttctaatatctgtcatattgcagtacacaagaaatggtcccaggggccacttcc

SEQ ID NO: 592268 - DNA, 553 bp, Homo sapiens
cctgactcccttaggctctactttccttcgatgatggcttctgcactaaatggctgatcgcagttaggtgaaagccctgtcatgttcagcctccaactggttacgtcgagataacaggtctaaggaattacaaaagggaacattaatttgtgcaagaatatttaaaacatctattgagtatcaggcatgggcttcagagagcctaaagagtctgtagcataaaagagaaatgaagacaagcacaaacaggatacatgtgatagctgaggatggataacatactatagagcagtggttctcaaactttctatgcccctcatcctcctggagagcttgctgtcaggatttgaaacctatgtgctactgagtggcgttcttcatgactggatctggtcagcacacccctcccccagcttccaaattcaactcaaaccaagacagactatctgcagggatggcctgttcaactctgcaacaaggcctgtgggcggagcaaacaagataatagcctacagtcccagctacttgggaggctgaggtgggaggattgctg

SEQ ID NO: 592269 - DNA, 210 bp, Homo sapiens
ttagaggatcttgtactaatataggccgggatatgcagtacttcgtcagctacctgctcaggaggtgaggggtgatcagagctgtccagagtgagctagctgaatagagagctgaaaatatctgtcttatcatttcctggcagaggaagtggttgaccttctagttattggacctggtaatcttcattttgggtagcgagtaattcggaa

SEQ ID NO: 592270 - DNA, 120 bp, Homo sapiens
tccatgaaatgatcaccgggattgcaaatctaattgggaaacgagttgagcaaacagcttggactgtatggagttgttgccttactttttaatatgtatttataaagtattgccagcgct

SEQ ID NO: 592271 - DNA, 134 bp, Homo sapiens
gtcaaggctcccgtttgcccatcatcgatgtggcccccttggacgttggtgccccagtaccaggaattcggcttcgacgttggccctgtctgcttcctgttaactccctccatcccaacctggctcctcccacg

SEQ ID NO: 592272 - DNA, 102 bp, Homo sapiens
tgggaagagaaaagaggtcggctgctctaacccgcaccaggcaggtacaggtgcacagtgattcatgcggagataaaccagtgcgctggtctgtaaccgtga

SEQ ID NO: 592273 - DNA, 212 bp, Homo sapiens
atcagtgctactgtgtgtacctctattcattaatttctatgggtcacccctttactagggaatgacagcttcaaggtaatggataagtgacagagcttgaagggtcagcaattcagtcatgccactggtggtagttttcacattgaagtgagaagaaaagctgtgacggatgttggtagggcagccgagagttcagacctgaatagattaga

SEQ ID NO: 592274 - DNA, 313 bp, Homo sapiens
ccaagaattcggcacgaggatgagatgcagaccgaggctgatactatgctgggggactggagggagaaatgttccacatgggagacggtgttcgcagcacgaacgtcctggtggcaaggctcacatgcagcatgccctgtgggcaacgcatgacggtaacctttgttcccccatctgaaaaaaatcacaaatgagagtgaccccagagcacagtggctcagggcccaagttcttttaacacagaacctgacccaggatttctattcataaaatattcactattaaagaaataaaataaggcagagacataaga

SEQ ID NO: 592275 - DNA, 349 bp, Homo sapiens
agctcaccggctccttacagaagtggcagatatgcaggtgctactgggaaagcaagatataagataatcctagataacacatctgtagtatctgagaataagaaagtgcgcaccacaggtgatgcaggttgaaagggcgcagatgccatcttgtgagagtcccaagggtcaaagcggaagactgatagctagggatagtatgggattataaatcatggaataaaataaacatctatgagtccatatcgatataaataattgaataaatagaggagagacagggagtcagtccttcttaccagagaggaatcccacgcctaatgggccaggagcgggggagcaagcatgt

SEQ ID NO: 592276 - DNA, 958 bp, Homo sapiens
  misc_feature (363)..(363): n is a, c, g, or t
  misc_feature (377)..(377): n is a, c, g, or t
  misc_feature (431)..(431): n is a, c, g, or t
  misc_feature (442)..(442): n is a, c, g, or t
  misc_feature (457)..(457): n is a, c, g, or t
  misc_feature (464)..(466): n is a, c, g, or t
  misc_feature (470)..(470): n is a, c, g, or t
  misc_feature (488)..(488): n is a, c, g, or t
agcggacggctgcgatccgggtgtctggaggctgtggccgtttggtgttcttgggctaaacagtcggcgggagtgaggcgggccggcgcggagcgacgaccgggctccggaaccactgtgacgacggggctggatctgacctgaaaaaaatgtctggatttcgtagagggcttgagatgctcagcaatgcacttgacgtggggggaaaagcgcaatactagttgcttgccagtgtgctggcatgggatgtagctatcgtgtatgtacacggctggtggattcatcagtagatgcagctgttcatttatcccaccatgaaagattgcgaacgcactcataccatgcctgtggtgttatagcaancatagccttcctantgattaatgcagtatcgaatggacaagtccgaggtgatagttacagtgaaggtngtctgggtcanacaggtgctcgcatntggcttnnncgtnggtttcatgttggccttnggatctctgattgcatctatgtggattcttttaggaggttatgttagctgaagagaaaaagacatagtataccctgtgaattgcatgtatttttccagaatgccttcatcattttttggagggctggtttttaagtttgggcgcactgtagagacttatggcagtgaacacatctgatttcccacagcacaacgaggcctgcatgggtttgtgatgtattttttactgcgtcactcccaacctttggtaatgccattattctaaacttatttctgagtgtagtctcagcttaaagtggtgctaaatactaagaatcacgagaacacctaatacaagaattcaagaaatcgtattgtggtatgcactttgattaagcttagtaaaatgttaggaggaaacttttcacattgaataattgtcgtcaaatttttatcatgggtataattgtgtggaacaagtgtaacagatac

SEQ ID NO: 592277 - DNA, 585 bp, Homo sapiens
  misc_feature (12)..(12): n is a, c, g, or t
ctaacccttttnaaaaagaggaggtagttttttttttttatttataaaaaaaaaaaaaaaaacactctccgtcggcggccgccaataaaagaaaaaaaaaaaacccccccctttttttttaaaagggggggggggtttttttttttttttttttaataaaaaaaaaaaaaaaaaattgtgggggggggcccccccccgggggggggggtgtttttttttttataaaaaaaaaaaaaaacaccccttttttttttttttttgaaaaaaaaaaaaattttctccccccccggggttttttggggggtttttttaataaaaaaaaaacccccccccccccccctctttctttttgggcgccaccccctttttgggaaaaattttggcgccaatttttaaaaaaaaaaaaaaagacccccctttttttttttttttttgttttccaaaaagtttttggagagtgtttctaaaaaaaccccaaaaacccttttaaatattctttgggcccccctgggccatttaaaatggggccttaaaccccacccagtttctttaggggagcccatattgaccatgcttcctgatagg

SEQ ID NO: 592278 - DNA, 257 bp, Homo sapiens
ccttcagtgggatcctaaagtctagagatcaggactctggcagttgagagactgttggagcctcttgttacacaggttacaacccttgtaaacaccaatagtaaagggcctctaataagaagagaggtcgttctaagaaggcctgttttggctgctctgttgacaagcaactgagattttttggagaaggggttaaattgcgggaggccgtttcacaggagggctgtgctgctgtgagttcgaacagtattatgagc

SEQ ID NO: 592279 - DNA, 296 bp, Homo sapiens
atctgatagaattcagcacagggcacatctcatcagttcctggttttcatgcagcacacacttttcaattcattgcattccagccttctatactcactcatttggcacttgtctttttcacttcattttcatttgttccatttgcttcaatttatttatcagatttatccaaacatcatcccctgcaagcattgttaggttgggtgggcatcctctagcagtctgcacctgccagtgccatgcacagctatgtgccacttggcctgtctgttattcacaactgtctgaaaaaattg

SEQ ID NO: 592280 - DNA, 162 bp, Homo sapiens
ccttacttgcttatataacccctgtcactcttgctccgggataggactgatactcttatccatcggattgggagacatacgcacatataggcaagggagctgggccaagtcacacagccactaagtggctgatgggagccaagatctgaacccacagctaac

SEQ ID NO: 592281 - DNA, 308 bp, Homo sapiens
caagagctcttggtaagcaattggctccacaaagtcaacctgaaagccatctggtcatagctgattctatgtgcatcatcctcaaacaggacattccagtccaaaccttggtaatagaaccagtgtttccaattgtgtcctgttacaaggagaacagattcttatggaagttattcaataactatatggccatgaaaatagaatactcaataatagtttctgattttgggaggggtcaggccggaagaaaaagataatggcttcaatttggtttagagaagtatcatttactataatattacgagtca

SEQ ID NO: 592282 - DNA, 313 bp, Homo sapiens
  misc_feature (250)..(250): n is a, c, g, or t
  misc_feature (253)..(253): n is a, c, g, or t
gcctggttatggccgcactctcgctggtggcggcctgttggggtagagcggccgttgacgatccagtccattttccggcggctccaggtagcagcgccagggccagtgagacgatggtctccgtgactatggccacttccgagtggatccagccctttaaggaagccggcattcctccaggacctgccgtcaattatgccgtgatgtttgtggataataggattcagcagagcatgctgctggatctcantanggcgataatgaatgacctgcgcgtgtccgttccgcggggctcggtggggttcctccgccc

SEQ ID NO: 592283 - DNA, 197 bp, Homo sapiens
atgctatccgtgtgtcgagtacactgccccttccttaatcactctgctgtttacaggacctgggtgtgctgacaccctcaggcagtcagcgattgagctcatcaaagctctagtctgtaacctgctgagccctattcgctgccagggttgcagcacgacgtaggttgagtgcaggggtgagatagcatgcttggaca

SEQ ID NO: 592284 - DNA, 133 bp, Homo sapiens
  misc_feature (18)..(18): n is a, c, g, or t
taattataattatcctgnaacagctctttggtgctgctggtgtcatggctattgagcatgcagattctgcaggtgtggaagcctaactcttgttaaaggtggtgaaatcgcctctacctttgatcacccagaa

SEQ ID NO: 592285 - DNA, 174 bp, Homo sapiens
  misc_feature (88)..(88): n is a, c, g, or t
  misc_feature (154)..(154): n is a, c, g, or t
gaaatgctttgaatacttacgacatggccgctcacactgattgccaagattgacagcactaaccatcgccttcacttgttccagggtnaagcccctagtcaccccgctccggggcacctcctggaaccccggcggcaaacttctgccgctctgnctgcccccacccgggcggga

SEQ ID NO: 592286 - DNA, 111 bp, Homo sapiens
ctaattggttcttcgatgacgcttccttccgggagaacaggacctctgctctgaggagatgggaactgcctgctccggtacgatgacacccgtcatcgaagaaccaattag

SEQ ID NO: 592287 - DNA, 1365 bp, Homo sapiens
  misc_feature (319)..(319): n is a, c, g, or t
  misc_feature (522)..(522): n is a, c, g, or t
  misc_feature (524)..(524): n is a, c, g, or t
  misc_feature (843)..(843): n is a, c, g, or t
  misc_feature (1213)..(1213): n is a, c, g, or t
cgtaaacagcttgaccttatattggtcccaatctcctgcaaaatcgaggtgatctcactattggtactgaacttcttgcccggacatccctcaagctgtgccccttatcatcacgtggagtaactagctccaccttggaggcaggaccagagctctcctatacttatgttagatagaacaccacctgtgatggtgatgtgtgcccggtgcgcggctggctgtcactgccgtgatataatcttcctatattatccattagtgagtatccgagtgatgtggtggagtcagccgtatgggtcaggatgaatccaaggtccantctcatgtgaactacagcgatgcgtgaagaccaccgagtcgtttaccgtacagacaattacacaaaacatttaagcgctgtgcttcgtcgtgcttgtaacacccgtcgccttatgtttacgcttcactacgcctgacctcgcggtacgtgcgttgattagcgtaggggaaggagcattcgaagcatgtcgaagagcacatcgngngttatggcagccgaggtttggccaccgttcgcacgcttaaagggatgcggacagccctaactttcgcccatcccccatgcgcctggccggccaccgattgaagcaccacatggaacttctactatttctcccttccccctctaaagcaaacaacattaacgacgagcatgttagtgcattgcgtctgacatataattaccctatggagaggggaccgaattcaccaaaaatttttacaaatactaaccaaaaaccatgagtttcactaacctaggtggaataacaattaaaggcacacacccactttagaaccgattcnacaatctacccaagattgaacgcacaagaaagtagcgcacgcgtaccatttcgggtcatagagcgatcccccggaaacgcgtatgaatatgatacaaggcttgtggccattattcccttgaggcttcacaatcgcggtatattacatctgtcctccctcacggttctctccctgaagagcaattgtggggtcgaggggagaatttaacattaaaatggtcttgagtcgtcaacttcaacgacatggcctggaaatatacacattctcactggatgccaattgcctagttcagtcccggaaaaacttcaccgagcgaagcaagggaaagggaaatggaattccacgagatatatacttattttaccgccanaaaagggcctaagtggtcgtcggacttgtaagttgccgaggtaccattcaacattagaacacgcgcttatggacccacatttccatagaggatagggggtcaattgcatatggccacattgtcagggtaaatttctgcaattgtacggccac

SEQ ID NO: 592288 - DNA, 353 bp, Homo sapiens
  misc_feature (12)..(12): n is a, c, g, or t
  misc_feature (62)..(62): n is a, c, g, or t
  misc_feature (104)..(104): n is a, c, g, or t
  misc_feature (163)..(163): n is a, c, g, or t
  misc_feature (269)..(269): n is a, c, g, or t
  misc_feature (319)..(319): n is a, c, g, or t
agcgggcaaggntgaaaaaccccccagtgcaaaatcctccttccttccccaaatgcccagcnccccaccctctcctggtctcccaccctgcccctttggttacncccctagtgtccttccaggtagttccttgtatttttgtcccacagtttacacatgttancaatgggaggactgggccccacagtagctactcaggtattaattgttgtagctggacatggtggtgtgcacctacagtcccagctacttaggaggttgaggtgggnggactgcttgagcccaggaatcctaggctgcagtgagctaggagtgcacnactgcactccagccagggcaacagactctgtccc

SEQ ID NO: 592289 - DNA, 241 bp, Homo sapiens
ctaggagtatcccggcacagcacgcgctaacaaacgattaaaacaaaaatatagcaccaggattctgagcagttctatggtgagtatatcagcagaaataggtgtaaatgctcttgacctggttgctatgcaacacatgctcaatgagtgactacgctccagtgtcttatacatttttctcttttatacattgtttcctcttggaaagtatggcagatattgtagtggaagacgaacgctg

SEQ ID NO: 592290 - DNA, 697 bp, Homo sapiens
cattaagcacataaatattgttgggtgaccatcaccactatatagctctagaacgttttaatgttttccaactgaaatgttttgtccattaaacaataactatcccctccccctagctcctggcaaccaccattcgactttctgtctctatgtatttgtttaagtacttcacaaaagtagaatcatatatagtctttgtcctctcaggactggcttatatcactcaatgtcttcaaatttctttcatgttgtagcttatgtcagaatttcctttctctttaaggtggaatcatgtgtgtttgcatgtatatatatgatgtgtatatatatgatatatatgatatatatcatgtgtatgtatgatatatatcatgtgtatatatgatgtatatatcatgtgtatatatgatatatgtatcatgtgtatatatgatatatatatcatgtgtatatatgatatatatatcatgtgtatatatggtgcgtatatcatgtgtatatatgatatatatatctcatgtgtctatatcatgtatatatatgtacacataaaatagcatgcgtatatcactttcatccatctcgtgatatgacacttgttcgcttccacattctggctattgggaatagtactgctgtgaacaagcttgcactatttgcttgagttgctgatttaacccttttgcgtttatgcccc

SEQ ID NO: 592291 - DNA, 445 bp, Homo sapiens
gggggggggtaaaaaaaaaaaaatttaaaaaaaaaaaaaaaaaaaaaaaaaaaaaaaaaaaaaaaaaaaaaaaaaaaaaaaaaaaaaaaaaaaaaaaaaaaaaaaaaaaaaaaaaaaaaaaaaaaaaaaaaaaaaaaaaaactttttggcccctttggcccaagcgatttttaacttgggcaatttttttcttggggcccaattttgggcctctttggccaattcccccttttggggggcgttttaaaattcaatggcccgttttttaaaacggttgaattgggaaaaccctggggttccccaatttaaaccccttggaaaaaatcccctttttccccgttggggtaaatccaaaaaggccccccccaatggccttttccaaaatttggccacccttaatggcaaatggaaatttgaaggcgtattttgtgttccgggttttttt

SEQ ID NO: 592292 - DNA, 1039 bp, Homo sapiens
ggcaacgcgtgggtgtgtacctcttgtgttgggagcagccaccggacttcttcaagccagaggtatagacgatcctaaatgtgtcatccatccgaatcgccgaggtgtcttgctgactgtgcatccatcgcctcgaacatgttgacaggctccctggaaactgggccaattgcagtcaccagaggccactcgctaagcactccgctgactcgatgtgcacgctgcatgctgttggggagatcgagcgctgtcgggaactcgtggatcgtgcagcatcgcaggtattgcctgccctagtgtaggtgtgttgcagacaaagaaaggctatggcggtgatgccgggggagctttgacgctccgaggggctcgaccgcttgtgtgcctctgagggccgttacctacctaggggagagtctcggagaatgtccggaccggtgaggtgaggtaatacgtgtaggaccctgggattttagcccaaccgatttgtagaacgacagagcttttgggcgagcattcgcttgtgagaactttgcgcgatcttgaaggctctgggtatttgccacgcaattgtaggaccccccgttatataagctttcattccaagtgaacagcttagattcgacgacggattgggcccttatttggttcgcttaggggcgttctccaaccgcaggggacaacggtggcaagtaccatttcttaatactgagcaaagagtttacgccgctgaggcctttttggtaagacagccgttgaggttccccctgtggcgactcccctttccatagtggtcccgcggacgaagattcttcgcttgaagcacattttgcaacgcgggtggggacacttaaacgcgaatcaggggcacggcaatgcaatccaggtttcaggtagacacccattgaccagatcgatcctcgaataggccccttggctgtacaccataggtggcacgaaaaacgtggtttgggatgatatctggcggagcatcccattccggactatgtatcccgtttaggcccgtcacttcacgagggcc

SEQ ID NO: 592293 - DNA, 182 bp, Homo sapiens
  misc_feature (1)..(1): n is a, c, g, or t
ntgataatagtaccagagcttgaatgaacaggattccacccaggcaaccacacaacaatgcccagcttgctggcatgttgttgaaatcgatgaagaaccagtcagtaaagcaaaacagagtcggagtgaaaatgaaggcacggaagcgtatgtccaaatgtgggtcttcggcaggttacatg

SEQ ID NO: 592294 - DNA, 909 bp, Homo sapiens
gtcgtgcgtgggtctgcggcggagcctccttaaggaaggtgcgagaggttggcagcttcgattgaagcacatcggtaccggcgacagctagccaggagctcatgcagcgacagccgtgcgagacagaactacggccgagcgggaatcccgttctgcttccaggaagtggaagtgctcacggatcggtggaaatctgcaaggcatacccctgcaaggtctctggctctcggtaagggaagaattccatgggccgttaccaagagtcgaataggtccatgcgttcccagactcgtagacactctcagggatctatggatcctaagaaggaagcgtcccgagaagggcacttatgacccgggtcgagccaggatcttcgcgtacccgtctctccagttagcaccgggatcacggtaagcaggtgcttacgagtctgaggatttatctggtagactggcacatgggcacaggcgcattctcccaatgtcttactcagcaggcgtcatgctctgggaatcgggcaaactcctgagtcctaacatgttgatcctttgggacgttacttcttgggctgatgcttgtagcagccatcacgaaatgagatctaaagagtaacgtgttctctaaagtactggtcccaattgccgactgttgtctattgtactatgaccagcagtctaggcgttcaagaggatttgccgtttggtatccttttgcaaatgtagatgactgccagggaagctaacagaacgtgccactggagtggagcttgatgggccgtagactccgcaggtagatctctcgtatgaccccaaagagcgcataagcctacaccagaactttacactgggggagacgtaactatgggagatcttgccgtccggattctatgacggaggatttgaaccgggc

SEQ ID NO: 592295 - DNA, 336 bp, Homo sapiens
  misc_feature (195)..(195): n is a, c, g, or t
ctgcctccctcttcatccatctaaaacacttacctttgtgtgtttattacatgtatattgggggtgagtgactggagttttgttaggtgcgtgatcaaaagtttggcgactggtcggacttggtggcttatgcctgtaatcccagcactttgggaggctgagacaagtggatcacctgaggtcaggagttagagnacagcctggtcaacatggtgaaaccctgtctctactaaaaatacaaaaattggccgggtgcgatggtgcatgcctgtaatcccagctactcgggaggctgaggcaggagaatcgcttgaacctgggaggtggaggcagcag

SEQ ID NO: 592296 - DNA, 202 bp, Homo sapiens
  misc_feature (22)..(22): n is a, c, g, or t
  misc_feature (182)..(182): n is a, c, g, or t
atagacggggttttgcatgttnggcaggctgtctcgaactcttgacttcagatgatccatctgccttggcctcccacagtgctgggattacaggcgtgagccaccatgcccggcctctttctctacctttacaccgtgtcttcttatccgtcacatcgtgttttcacaccattcagcctctngtggggatcctctacgagtc

SEQ ID NO: 592297 - DNA, 161 bp, Homo sapiens
tggagggggggtatttatagcacttcatatttttttttgtctctcccaataaaatctcccccacttcccccgaggggttcatttggtggggaaccctctaaaagtcgccctgcgggcttgcaggttggacatgggcggtggttaaccaaggtggtgctggg

SEQ ID NO: 592298 - DNA, 186 bp, Homo sapiens
atcctacctctataactctaattcattaatcttatcttagatactttatgtgtttacccatctcgactttgtaggcttagtcgtcgctcatgcctgtgtgtcactgtctgcatgcttcctttgtcgccactctgaggcgcctgcctcagctttgtgccccagcctattccccttttcccgagcctt

SEQ ID NO: 592299 - DNA, 455 bp, Homo sapiens
  misc_feature (412)..(412): n is a, c, g, or t
  misc_feature (420)..(420): n is a, c, g, or t
  misc_feature (448)..(448): n is a, c, g, or t
atgttcttgctgctgtggggaagaagaagaaagatgtgatcctggctgacttactgccttccttggctgtttatcttcgaactctggctcctgggctcttcttcagcctcatggcctccagggccagaaaagagcggaaatccaagaactcctagtactctgaccagccagggccagggcagagaagcagcactcttaggcttgcttactctacaagggacagttgcatttgttgagaagtttaatggagactttgtctcacaacgtgggaaagtactgaagaaacagcatctcggtgcagatcatgctggcagagggacaaatcaaaacacgagcaacaacgcttctatcccaggagtgaggaggaaagcaccttaaggacataaactatggatgctgggcgtttaacacntaaaaacntagaaataaacactcttcaaacagtganaaaaaaa

SEQ ID NO: 592300 - DNA, 342 bp, Homo sapiens
gggagtccctcatgactggagcagggtttttctttctctctgggtctttttctttagctgggggagtttggctgtgatcgaccacgctggactgcacacgactacatctaagatctcaccggaacctgcgtatcctgggttcaagcgattctcctgcctcagcctcctaagtatctgggattacaggcatgtgccaccacacctgggcgattttcggatttttagtgaacacggggtttcaccatgttggtcaggctggtctcaaactcctgacctacagatccaccctcctgggcctcccaaagtgctgggattacaggcatgagcgcatcaccgggcggc

SEQ ID NO: 592301 - DNA, 868 bp, Homo sapiens
  misc_feature (141)..(141): n is a, c, g, or t
  misc_feature (160)..(160): n is a, c, g, or t
  misc_feature (166)..(166): n is a, c, g, or t
  misc_feature (175)..(175): n is a, c, g, or t
  misc_feature (177)..(177): n is a, c, g, or t
  misc_feature (180)..(180): n is a, c, g, or t
  misc_feature (190)..(190): n is a, c, g, or t
  misc_feature (193)..(193): n is a, c, g, or t
  misc_feature (227)..(227): n is a, c, g, or t
  misc_feature (325)..(325): n is a, c, g, or t
  misc_feature (354)..(354): n is a, c, g, or t
  misc_feature (359)..(359): n is a, c, g, or t
  misc_feature (377)..(377): n is a, c, g, or t
  misc_feature (411)..(411): n is a, c, g, or t
  misc_feature (428)..(428): n is a, c, g, or t
  misc_feature (516)..(516): n is a, c, g, or t
  misc_feature (537)..(537): n is a, c, g, or t
  misc_feature (553)..(553): n is a, c, g, or t
  misc_feature (566)..(566): n is a, c, g, or t
  misc_feature (594)..(594): n is a, c, g, or t
  misc_feature (606)..(606): n is a, c, g, or t
  misc_feature (608)..(608): n is a, c, g, or t
  misc_feature (624)..(624): n is a, c, g, or t
  misc_feature (678)..(678): n is a, c, g, or t
  misc_feature (681)..(681): n is a, c, g, or t
  misc_feature (689)..(689): n is a, c, g, or t
  misc_feature (736)..(736): n is a, c, g, or t
  misc_feature (801)..(801): n is a, c, g, or t
  misc_feature (860)..(860): n is a, c, g, or t
ggcgggatagcgcgccgccgagccgagaaagaggtcacgaactctgaccccccagaaatacccaaacacagaaagctctctccgccgtgaatctcgatcccacatcccgtcgggtttcttcaacctctcttcccggagggncccccaatccacgagtggnagccgngggactgtngngtngggggccgangcnggggtcagcagggggcaaaagcgccgggtagatnatgggaaccatagaagaaattgcacatcaaattattgaacaacagatgggggagattgttacagagcagcaaactggggagaaaatccagattgtganagcacttgatcataatacccaagggaagnagttnattctgacaaatcacgangggtctactccaagcaaagtcattctgggcaggnaagattccactccgggnaaagttttccttacaactccagatggaggaggtgtcaaccagttattttttaccactcctgatctgtctgcacaacacctgcagctcntaaaagataatttttcagagnaagaaccaaataaggnttttgatctttgngtagtatgtgggagacaaagcatcaggnggtcattatggngnagtaacttgtgaaggntgcaaaggattttttaaaagaagcatccgaaaaaatttagtatattcatgtcgnggntcaaaggnttgtattattaataagcaccaccgaaaccgctgtcaatactgcaggntacagagatgtattgcgtttggaatgaagcaagactctgtccaatgtgaaagaaaacccattgangtatcacgagaaaaatcttccaactgtgccgcttcaacaggaaaaaatctatatccganaggagctt

SEQ ID NO: 592302 - DNA, 227 bp, Homo sapiens
gtctcttagagtatccccggcgcaggggaagtatgtatggatttgaagattcgtccgccgtattcggtgtactcgtaggttcagtaccattggtggcctaattgatttgatggtaacgggagggatcgttgacctgcgactccttcacgttaacgatcgagtagtactcccgatcgaaacccctacgagccacccgtatgagccacgcgtatgagccaccctacgag

SEQ ID NO: 592303 - DNA, 964 bp, Homo sapiens
agcgggtgtgcgcccgggacgcggacgcaagccgccgacggaggaggccttgttaactaacggcctcatccactcgaagaaacacaaatgaacaatgatgaaaagtcagttaggcagggtgcctctcgacaggtagtgaagacaaggatgaaaatagtaagtgaaggaatgtgatattgatagaataagactgaagtgaaagaagaaccggagcttcaaacaaaaagggacatggacgacagaatcagtaacgtctagaatatccgctgtaagttgctgaagaggctagctggaggatgatatgttagtaacattaattcggatggtaaacggttatgtgcaaacttaccatggcaacaaccaacatcataacgatgatggaagtcctatggtgaaggcatttggctatcagtgcagtcttttcaggtcaattgagaggcctcgttgcagcacactcacgcgtatgcttcacatgctcatgcatgaatcgtgccttatatctcctagtcgagaagagagaagtattgaccttggtaaggagactggtggatggattaaggaataacctttgatgacactctcccgtaggttgaacgtactatcccgtatgaacgagcatcagtataacaagggtgatctagcatctaaggttgtctcttgcaagtttgaggcaagtgcctacgaagatactaataggagtccaggagaagctctctcccagcttacgtgtgttgaatccatccaaggccgcaagtctacagaggagtcagtccgaccagaggtgaatgcaagcaccccctaaaaagggcagagccgaaccgcaagcagggcagtctctgagggcggtctcgcccacaccggcaaactgggacagggtttctaagaagcagaacttaacctcaggccaagcgctggcagcaggacatgtcaccagtgggcccaagtggtctgacctggagaaaaa

SEQ ID NO: 592304 - DNA, 169 bp, Homo sapiens
gggggggcccccccccctttttttttttccccccccccctttttggggggggggtttttttttgggccccctttttccccctttccccttttacccggggggggggggtttttttttttttttttggggcggggccccccctttttttttgggggttttttttttttta

SEQ ID NO: 592305 - DNA, 425 bp, Homo sapiens
  misc_feature (261)..(261): n is a, c, g, or t
  misc_feature (328)..(328): n is a, c, g, or t
  misc_feature (335)..(335): n is a, c, g, or t
  misc_feature (341)..(341): n is a, c, g, or t
gcttctttctccagcatacttattttgaaagtcatccatgttgttgtatgcatcagtggcccatttctttttactgctgagtactgttccattaaatgaatgtaccagtttttgtttttccattctcctgttgatggacatttgagttgtttccaggtttgggtaatgataaataaagctgctatgaacattcatgtgcaagtctatctatggactatagggctttcatatcttttaaggtaattacccgggggataggangggctaggctcatatgggtaggttggaatatttttacttttttattaaaactggacaaactgttttncccaagngtttcntatccactttggcataccctacccaggcaggcattggaggaggttttcaatttcttcccatattcttccatcccacattttggt

SEQ ID NO: 592306 - DNA, 361 bp, Homo sapiens
ctgcaagattgctgcatctgctgtatagctgtctttggcctcccccatggcagtgcatgcagactcgcttgattgttgttgaagaccagagggggtgtttccgctctgccctactaccagtacttggctccagaacctactgagcagtcagcacagtcagagaatattggtgtgcgtgggtaatgctggactcccaagcgctgtgccagatcatttgatggagccgggaccaactgtagatttcctgcccatcgttggatttcggcaaaccgctcggcgctggccacgttaaccacaaggcccactgcctgcagttgctgtaactgatcgcggcgctgtgataaccactttctgaagcttt

SEQ ID NO: 592307 - DNA, 132 bp, Homo sapiens
cctatatcagagcccagaaagagtgtggaagatgcatatccctcccttgtagataccgctcagggaattatccagcatacttccaattatttgccattggccacagcttagttacttggctacgtctaacca

SEQ ID NO: 592308 - DNA, 1644 bp, Homo sapiens
  misc_feature (515)..(515): n is a, c, g, or t
ttaaacacgcttaattcatctttatttttctggtttaaaaaccctttgtgtgtagcccccagtgtggacccgtgagtctccggcgtgccagggagaactcgtgggtggtgggtctgtggacgaagcggtggctcaggtgaaacctccgtgatgagggagacactggggtgatatcacggtctctttccagagaggtcgggggtctcagggataccgtgttgggtctctttaaaagatgtggctctcaaagggtggccttggggcgaaatgtgtgccccgagggtgtggcgagtgtgcaccccgcgggcctgtgggtggtgtttcccgagtctctctgcgctctccacgagccacactacagaggagcgcaggtctgttcttgaggcgcaacagagtggcgcgcggagacaacgaagtgccacagtgtggcccccgtagggtgtgccgagcggaagtggagaggcgttaccacagcacacagagagagccgccccaggagcgcctgtgtatcacanctgtgtgtgccaaagggggacacagagagtgtgtggggcgctattgtgcgcgaaaactctgtgtgtgtatcccccgccagagagtaaaccctctctgtgggggcacacagaggtgggacaagaatagtgggagagaaagacttgtggggcccctgagggacagtggacagagcggccccccagcagaggacaatgtgggcgcgcggtggggcccccaccccctccccgtggggggagaaacccacctttatacacacacccgcaagaaaaccccggaagctgctgttgcgccccatgtgtggtataaagttccccccggaaatatgacgcccacacccaaaaaaggaggctcctttatagaaacacccccgtgggagatgagcccgactggtagatcccgcgtagcacgcgggacgctcatgtcggccgctactcccgacgcacgcagcggggggaacaactcaaccaccgctcttatcaacacgacaacaccgtcctcaccaagtcccccgttgtcggcaacacaagaagagggcggcacccccccaaggggagacaagcaacaacactctccaacggaggccaccccccctgcgaggagtacccctcgatcaaacagggggggcagcccagcggcagcaacaacacaggcaagcaaatgacacaactcactcctccccacccaggaggggcacccgtagaacaccaccctctacgacaggagctcccgtgtgatgaccacccatagagagcgcggctccccacaactatttgtgtatgcaatcagcgggagtcaaatcacacacctccagtattataacttcccttagagcgggcatgtatgccgcactccgaggaaaagacatccgcggggaggccgatggtggacccagcaggcacccacggcacaacagcgggacgggccaaccgcccggcgcccccgagagtcacgaacagcgagcgacaaaacccctctggagggtaaacacacccacagagcagctcccccaaccacccaggcgtcccaaagggagccccggggagcccacccgagaggaacaggaggacagcacgcagactaatgctacgaatcaatagacagggcgcggctacataacactccactggg

SEQ ID NO: 592309 - DNA, 108 bp, Homo sapiens
tgctggtcgatctctgcaggatcccctggagttcgccggatcatacgacagaggggcgtttggtattgcgttatggcacgtggtttcatcttgattattgttgtgatg

SEQ ID NO: 592310 - DNA, 703 bp, Homo sapiens
  misc_feature (453)..(453): n is a, c, g, or t
  misc_feature (703)..(703): n is a, c, g, or t
tcatggcggccgggaagatgggggacattcaaactgagcgtgcctaccaaaagcagccgaccatctttcaaaacaaaaaaaggtgtcctgctgggaaaaacgggccaaggagaaagcctcccggcggatacctacaagaaacatcggactcgtgggctctcaagaaaacccaagggaggctatgagagggccaccttacatgtgaacaaggaaagtgccccatctcacgtggataagtggtgctccatctcgaagaggcggaactccttcttcgtggcgcggtggtgtgacacaaagaagtgaaagaagtgcaaaggcaccatgtgtggtcaactcgcgcgcgaaaagacaatacaacgtgacaacaaaacattcccgcacaagtataacaacccggcctcccgaaaaaaaagacgccaccagaagaaaaccagtgctccgggagtaaccacnctgtgtgtcccccgcgtggcatatacaaaggggagaccagactcaacaagaactcaggggtgacccaactcgggtacaccaaagagggggacagaaagtgtgcacgagagcccccacagtgaaaagcaacacagaaccggggcgcgcgcatactcacacgagggcgcacctcaaaggggcgccacacaaaagggggaagaagcacagggaaacccaaagaaaaacgcaagtctcacaaaaaaagatcccn

SEQ ID NO: 592311 - DNA, 167 bp, Homo sapiens
cccggccaaaaaggggggcccccaggggccaaagggggcaaagggggggcttttgcttgggtttttcccccccccgtcccccgggggaaggggggggttgggggggggggcccccccccccccccccccccgggtttttttaaagggttttttttttttccccccca

SEQ ID NO: 592312 - DNA, 775 bp, Homo sapiens
  misc_feature (561)..(561): n is a, c, g, or t
gctggtacaggcccgggagttagggatgtttgtagttctccttggaagaggtccttcacatcccttgtaagttgtattcctaggtatttcattatcttagtagcaatgtgaatgggagttcactcatcatttggctctctgttgtctgttattggtgtataagaatgcttgtgatttttgcacattgattttgtatcctgaaactttgccgaagttgcttatcagagtaaggagatttgggctgagatgatggggttttctaaatatacaatcatgtcatctgcaaacagagacaatttgacttcctcttttcctatttgaatatgctttgtttctttctcttgcctgtttgccctgaccagaacttccaatactatgttgagtaggagtggtgagaacgagcatccttgtcttgtgccggttttcaaagggaatccttcctagtttttgcccattcagtatgatactggctgtgggtttgtcataaatagctcttattattttgagatatggtccaccaatacctagtttattgacaggttttagcttttaataactaanagtttataactgtaaacaacataacaaacattttctagagaaaacaaaagaacaaattacaaacaatgacacacagaccagcacgacacgacaaacgaacaccaacacaaacaaaagaggggggggggccaccaaaaaaattccccccggggggcgccccaatctcgccccccccttttctttcacggagggggcccccaaggggggcgcccca

SEQ ID NO: 592313 - DNA, 473 bp, Homo sapiens
gtgaaccccgggaattcaagccaccctcccatttcagcctcccaagtagcggggaaaacaggcacaagccaccaaaccgggttaattttaaaaatatttggtagcgatgggggcctccttgtgttccccaggctgatctcgacctcggaggctcaatcgatacccccacctcggtctcccaaatgtgtggggataacagggcttgacgatggtgccgggctggggcttttggagaaggagtcttcggggtcccgaaagttctccggcatgtccttgtgggtgggccagtctctgtcccttgatgacaaatttggttccggagtagagtcgggccaccgggaccgggttggggggaactacagggacacagggggtccaaggatgtaccggggagatccacgcggggagtactctaataaggagatacgtgttcttatgcaggcccaagtgggccctgaaagtccttcctcaaa

SEQ ID NO: 592314 - DNA, 405 bp, Homo sapiens
  misc_feature (359)..(359): n is a, c, g, or t
  misc_feature (381)..(381): n is a, c, g, or t
  misc_feature (396)..(396): n is a, c, g, or t
gccgttagcccttaaccatggcctccagattcacatgtaatccccgccagcacgctgctgatactaagggtggaaggcgactccatactccttcagactggtgagacatgccggaggagaaaagaatcatctgcgctgcaccactgtgcccattgccttccaagacccaaacttttgggggatctttcttaaggcaaaagaaagagactttgtgaaaagcaaatgctccgcccccctttaccttgcataaaacttcgctcaagtcgaagatggcggcagacacgagggcggtggtcatcctgtgcgttcgcgcgagccaggggcgaggatctggtgtgtcgcgaaggtcccggtgcggngaaggcgcagcctctcctaggngttaaggctcccggnggtaccgag

SEQ ID NO: 592315 - DNA, 202 bp, Homo sapiens
agctgggcaatatggtgaaaccgtctctactaaaaaggaaaatacaagaatttcctcagcgtggttgggaggaacctgtaatcccagattctcgggaggctgaggcaggaaaatcgcttgaacccgggaggtggaggttgcagtgagctgagattgcaccactgcacttcagcctgggcaagaagagcaagactctgtctca

SEQ ID NO: 592316 - DNA, 446 bp, Homo sapiens
ggccccccgggttttccctttttggtttcgggtttttttttttggggaaattttaagggaaaaaaatttttcccaaggaaaaattttttccctttttttcccaaagttgaaatttaccccccctaaaagggaaaaaaaatgggggttccccccgggggggggcctttttaaaaaaatggattcccccgggtgcaggaattttggccgaggttttttttggggaaattcccttttttttttaaaaaaagggaattttaactttttcccttcaaaaaaacccccccacttccttttttaaagggaaaaatcaaatttttaaaaaatgggggccccccccttttttggggtttttttaaaatcgggcccccgggttgggaaccccaaaagggggaaaagggaagggcaaaggggcccctttaaaaattttattttttgggtaaaattta

SEQ ID NO: 592317 - DNA, 195 bp, Homo sapiens
  misc_feature (102)..(102): n is a, c, g, or t
cgtcctgagagcattatcaggcgatgcagagtgcgaatatattttcagaaagattataagtgtgtccagttttgcctgtctataaatgatagtagttaccangttacatttgcagaatgaaaccaggtgtacagttatcgttgtactttgtacatgtgatttgttataattataggttctttattttatatatcc

SEQ ID NO: 592318 - DNA, 108 bp, Homo sapiens
agcagatcggagagaataaataccggtttggggattctcagcagttgcggctggtccgtattctgcgcagaaccgtgatggtacgagataccgaactcaaattcgtaa

SEQ ID NO: 592319 - DNA, 341 bp, Homo sapiens
  misc_feature (169)..(169): n is a, c, g, or t
  misc_feature (179)..(179): n is a, c, g, or t
  misc_feature (181)..(181): n is a, c, g, or t
  misc_feature (188)..(188): n is a, c, g, or t
  misc_feature (201)..(201): n is a, c, g, or t
  misc_feature (254)..(254): n is a, c, g, or t
  misc_feature (258)..(258): n is a, c, g, or t
  misc_feature (266)..(266): n is a, c, g, or t
  misc_feature (316)..(316): n is a, c, g, or t
  misc_feature (325)..(325): n is a, c, g, or t
cccgggctgggtcccccccctgggcaggtaggggggagcttccctgggtgggcctcattttttgctgcaaagaattttttgccctaagtcatgctgtttcctcaaaaaagctttgttttttgttaacgtattactcaaagtcccccaagccttttggctaagggtaaangtgggacggnangcggganggggctggtggtncccctcgtgcggggtcaaccctgcagggagttgtggccccttggggccctttnagcncctggccncctgctgtccccggggcctgtgaaatttgtcatgccatgacccccccgcnttaaacctntttttttaatgtgtta

SEQ ID NO: 592320 - DNA, 109 bp, Homo sapiens
gtcaataaattcttagctctagcctatatcctgaatggtataagtctaggtaactatctagggtttttatagttttgaggtctaacgtggaagttaataactccatcta

SEQ ID NO: 592321 - DNA, 366 bp, Homo sapiens
gcagtcttacatcttacaagggattaaattaaaacataagtagtcaagtaatacatccctgtacagtaattttttatcacattatagtttgaagcagctgtacagatgtctcggtgttcaaatcattctcccttcaggtaattatcaaagctgtacagtgaacaggagataaatagagaattctgaaatgttcccgcttgcctgcaaggtttaccctattctgtttttattatcaaatctttataatctggtacctgttcttgatgctggttagttgctgttgtgaggggtagataaaataacatatttgaaagcatctattacagagcaatacacaataaatggctgcaatgagaatgaaaactt

SEQ ID NO: 592322 - DNA, 383 bp, Homo sapiens
cacgaggcctgttcttccgcccggtgggcttcaagtaccgcagcctgatccaggacctgcgctggcgctacgcctgggactgggcgctctttgccggcgccgtggtgccggccttcatcttcggggcagccttcggcaacctgctccagggggtgccgttccacttcgaccgggatctgcgggtgttctacaccggcagctttttcgcccagctcaaccctttcggcctgttctgcggcctcctgagcgtggccctgctggtgatgcacgggacccattacctgcagatcaagaccgcgggtgcgatctacgaacgagcgcgccgcgccggctggatcgccgccgtcctcatgatggccttgttcccggcgggcggattctgg

SEQ ID NO: 592323 - DNA, 154 bp, Homo sapiens
acagacacttacggcttcaaggacagcactctgggtccgcgtggtacgcagagccgcggttttgaccggagcggtaaccagggcactgtcgctgaatcggacaacgacccgctggcattcggtggtaacgtgctgatcccaggctggtgccgga

SEQ ID NO: 592324 - DNA, 219 bp, Homo sapiens
aaatatactttacttcaagtctaatacagtaacgcttcatatcttcatggagaaaactaagagcaatagataggctaagcgcattacaaatttgtacctaaaaatttcagatacactatttcgcctttgctttctctagacaaatctctagcccgactttgtctaggccctaggggcctgactctgctcttagacaagtcactgtgcgtttaacaattt

SEQ ID NO: 592325 - DNA, 606 bp, Homo sapiens
aataataaatgctgcaaataagcatctcactttgtaaaaataaaatattgtggttttgttttaaaaaaaaaaaaaaaaaaaaaaaaacaaaaaaaaaaacaaaaccaaaaaaaaaaaaaaacaaacactcaaaacccaccagccccaacaaaattcaaaccaaaaccagcccaaatcatccggccaacctacgatctaactggccccattgcccctctgctaaacgagtatccccatccatcagccacaggcttacaatgcccgaacctggcccctgccgatacccaccttagccacctatgcgaacatcccaatatcccatactggaatctcaccttttacccccccaccagccgaccttccgaccatttgcacatccctactatgagtggaccaatctaagcctacccagcccctaaatcatggaacccccatcacttgcaccttacccacccgtgctacgcataactcaacaccaagcctgaaacaaaccccccttttcaaccggaccccccaccgccaacgtgggaccaacccgactctcagccccagcacccctttccatggcccctgcccttccccaatcctctttccctcagccccccc

SEQ ID NO: 592326 - DNA, 206 bp, Homo sapiens
actacgcccagctaatttttgtatttttagtagagacagggtttcaccatattggccaggctggtctggaactcctgtcctcaagagatctgccaaccttgctatttctaatatttaaaaggaaaataaatatctatgctgaaaataggaaggttaaaacccagacaacttatttaaattgaataattttcgctaatatggttttc

SEQ ID NO: 592327 - DNA, 327 bp, Homo sapiens
  misc_feature (13)..(13): n is a, c, g, or t
  misc_feature (279)..(279): n is a, c, g, or t
  misc_feature (322)..(322): n is a, c, g, or t
gagacagagtctnaactctgtcgccccaggctggagtgcagtggcgccactttggctcactggcaacttctgcctcccgggttcgagcaattctcctgcctcggcctcctgcgtggctgggatttcaggcacacaccaccacacctagctaatttttgtgtttttggtagagacggggtttcaccatgttaggctggtcttgagctcctgacctcgggtggttccgccgcctgggcctcccaaggtgctgggattacaggcatcaaccaccgtgcttgnctatggctgagtgatttcaaacagaattccatctagcttttanaatgg

SEQ ID NO: 592328 - DNA, 168 bp, Homo sapiens
gtgatctttactatgtggctattggcacaacaagaggtcgggagcgtcttctcttgagggagcaatttggagaagaagtggaacccaagactcgtgccctggattgccttctttatcatcccacaagcattccatctggttgggagcactggtcctggccttcagata

SEQ ID NO: 592329 - DNA, 1444 bp, Homo sapiens
ccagcggggtccgggcactcgtccaggaccgcggaggtgtagcggggcgcggcccgggaggccatagtgggctctgggcatggggagcacacgcgtcgcgctgggatattacaccggggacggttgtcggcgcgagagttgaattgcggaggcagatgacggggaccgttagaccggggcgcgaggtccggggccgctgaacgcattcggcagggagaggtggggcctcaaggcactacaagagacgatggaatgacccgtgtagcctagagatgtgtcgatcgacttaggatcagggcacatgatagatcaaattccctgtgatgggatcctactctctttttgctcgttgcctaattatggggaagtcatgatgatcaattggaattatcatgtcctttgaggtgcgacgtcgtcgtcaatcggaattgggagtttttatgcgtcgcactttatggccttgttgcaaagaaagggcgagaaacgctcagttgcacatggcctatggcgggcaacactaggggctttctaagggcaattattgaaacgcgtagtcgggggaggagctgatgacacgatgggttcaaaccgttgggggataactggaggatagttatataggggttgacttaggcatatggaagaaggggttgagaaagaaccctggcgcaaaataggaggttgtggagtgcccaatttatagtcccatggggcttctagatgactttctttgcacgaggtcggggtacgctccgggtttggggaccgattaatgggcggttgggattggagaggggagtacattcgacaggaagtaccgggaaggagaagacgcactatagacgaagggtaggatttccacttttgggcgcaagtggaggatttgaaccaatggaggtcgggcttgggtggagaaattccggttgataggcggtggtgattagcgggccaatcatagtagcagcagttgggcataactccaaggtggggacagacggttgggcaacattcgcggatacatgcggggtacctcattgaatggggcagtaaaaggaaatgcgtttggagtacacatatggaagttggcgccatggggtctaagtgccgagaatgggaagatggtttggacagcagacgtgttcgatagcaacacaggaggtcgtggttgaataattgggcgtataacattgtgattggttggaaaagtatgtggggccaaatggaccggacggcctattttgggaaatggaccaagtgattgtacttaaaagtaagccataacagaggtgtttacccattgaaagcggccgcgagaacactattgttgtgtaacgggggacggaaagtgtggttagtttgcgaaacggagagaatattgtcagcacgtatattaagagggaagggttacaagttggattgcaagcggtggtgatagaaatgagag

SEQ ID NO: 592330 - DNA, 568 bp, Homo sapiens
ccctcagattactcaatgttaacccagaatcaaagtatagaagtgtataggatgacattggaacacagtggagaacaggatatgtcttagggccatacagttctgggtttccgatcctggtccccgatcacttggtagcttataacctggatcaatgtgttgtagttaaatctgtacagttacctcacctgtaaaatggtagactatgatttctactttacaggtgatccggagagaaaaaaatacctcagagacagtgggctctttgacagtgaatatagccctgatgctcgttaagtgtttatgaacactgtccatctgtgataagtaattggtgagcttgggaactaataagtgcataagagagtgctacctggcgtttataagaatgtgtaagtacaaggtatggatgagagataggtgatctgatctgtgagaatgtacttggagtactgccagagaatcatatggcaggtgtgcagatggagcttactttccatttgggcttactacagtatgtgtattccagttggaaaggaatatctggagatttgtctgtaatgcattc

SEQ ID NO: 592331 - DNA, 1179 bp, Homo sapiens
gcctcgtgccgggaccacgtctgcagagggatcctgtggctggaagctgaggaggctccacacggtcgtatagcagtctaccgcagccaggatctgggcatccaggcaccggcatgaaccctccgaggctcttctgggtgtggctgcttggttgcgaggaacccaaggcgtgaacgatggtgacatgaacggtgtggccgatgggggcgcgccatccaaaccagggcctgcgtggatatcttctaccgagcgccagtggggcactgtggtgtgagaacctgtgggacctgacatgatgcctaggtctgtcagtcatgccaggagtcccctgcgggactactgcagaacgccaccacaggctctgcgtgcacagagcctggcttcaggtgcaacggatcgaggtcccacatcatgtcgtgagatgaggtccaagctgcatctgggaaagcgatgacctcactgggcgctgaacttgcacaagcgtccctggcgtctggccctgatagcagccaacttgtccagggccactgacgacgagacgcctagtgcagtagcgctctggcaccgcacagtgcacataccccagagtagactacccaacatgccctggaagactctccagggcagcctctacgcgagcgcctcgttgcgcccagaattctcttgcccaaggcccatgcggcgagtctgcggacacatggaccaatctaagcggtgaaattgtagcaagggctcgaacggagacgcccttaggacttatcttggtgggaccacgccgcgatccagtccctagaacctggtcgaccactagtgagggcccaaggcccctgccgacgcaagcggagcccgtgggcaggcaactgctcagccactgaggtcgagcgattgctgcaagagatggatgccccactggtacacgggaccctgacatacagacgtaactgtctactaccggtacggagtggaacacatttatccccgtgtctgtgccagccagaagatggccctgccacgaaagcctggtgcctctgacgatacttggcgccacgatcagtcgtgcaagtggctacgtgtggcctaagctcgtcggccattcgtaccccccaaggacgcatttgttacgaaatgtcgcatgaagctgatatcgccatatgcccagtggacacacgctggccgccc

SEQ ID NO: 592332 - DNA, 849 bp, Homo sapiens
tgcggtggctcatgcctgtaatcccatcattttgggaggccgaggcaggtggattgcttgagatcaggagttcgacccatctctactaaaaatacaaaaaaattagccaggcatggtggtggccacctgcctgaggcaggagaactgcttgaacctgggaggtggagtttgcagtgagccgagattgtgccactgcactccagcctggatgacagagcgagactccgtcttaaaaaaaaacagccaggcgtggtggcacatgcctgtaatcccagctacttggcaggctgaggcaggagaattgcttgaatctgggaggttgcagtaagccaagatcgcgccactgcactccagcctgggggacagagtgaaactgtctcaaaaataaaataacaataacaacacataaagataaaacatttatggtcattagaaatcgacaaatggacaacacattaaaaataagagagagggccgggcgcggtggctcacacttgtaatcccagcactttgggaggctgaggcaggtggattacccaaggtcaggagttcgagaccagcctggccaacatggtgaaaacccgtctctactaaaaatacaaaaatcagccgggcatggttggcacacccccgttaatcccagctactcaggaggcttgaggccagaatttgcttgagcccagggaggccagaaggttgccagtgaagccgagatcatgccaagtggactcccagcctagcttgacaggagcgaagaaatcctggtttccaagaaaacaaaatcagaaaataaaacaaaaatcttttgggcgcgtcattctcgcctctcgaaaaaagtttttagaacat

SEQ ID NO: 592333 - DNA, 151 bp, Homo sapiens
tatcacaagctatcagcagccccagcactagccaaagtagacaaccccagagtaagtggacacgaaaatggactaccattaacggaaactcggaaagtgtaacgcaggtactacctgctagatagtgagtactctggcgtcgaattattca

SEQ ID NO: 592334 - DNA, 305 bp, Homo sapiens
gtaaattgtgtggtccctgccgggcgtggtggctcacgcctgtaatcccagcactttgggaggccgaggcgggcagatcacgaggtcaggagatcgagaccatcctggctaacacggtgaaaccccgtctctactaaaaatacaaaaaattagccaggcgtggttggcgggcacctttagttccagctacttgggaggcttaagcaggagaattgcgtaaccccaggaggcggactttccagttagccgagattttccacttcctccagcctggccacgccacagacgcgagactttttttaaaa

SEQ ID NO: 592335 - DNA, 605 bp, Homo sapiens
aaacccttgctgacatttcttaatcacctcctagaagctataatagtagaactgcagaaggtgtagcgagagtaaattattgtactcacagtcagacactctgtgactaccctacaagggatccagcgctcacatacatcatgatcgtcatcgctttctgctgatctgcctgacttgactacactaaactaaaatacttaggaatagacctgacccaggaggtgaaagatgtctactaggcaaactaacttttagtatctgtaatgggttaccaatgagcaggcagcaggtacagcagaagaagtcagtgcgtgggcttgcgcatccaatgggtactgcaccttagatggtaaggcttaggttttgacttactaaattactaggtacgattattttctagtttatgtcattaaaccttaaaaactgctaagtaaccccttccatctcttgttaaatattgtaacatttcatactctcatttatgctgcctgacgttagagtgtatgtatccatatggtgactacctaaaatactacctataaagagtaaactgttagtagtgttttagctgtatttaatgcagtacagcttaccttgggatccct

SEQ ID NO: 592336 - DNA, 830 bp, Homo sapiens
  misc_feature (11)..(11): n is a, c, g, or t
  misc_feature (61)..(61): n is a, c, g, or t
  misc_feature (65)..(65): n is a, c, g, or t
  misc_feature (79)..(79): n is a, c, g, or t
  misc_feature (89)..(89): n is a, c, g, or t
  misc_feature (96)..(96): n is a, c, g, or t
  misc_feature (104)..(104): n is a, c, g, or t
  misc_feature (106)..(106): n is a, c, g, or t
  misc_feature (124)..(124): n is a, c, g, or t
  misc_feature (139)..(139): n is a, c, g, or t
  misc_feature (142)..(142): n is a, c, g, or t
  misc_feature (151)..(151): n is a, c, g, or t
  misc_feature (196)..(196): n is a, c, g, or t
  misc_feature (203)..(203): n is a, c, g, or t
  misc_feature (212)..(212): n is a, c, g, or t
  misc_feature (218)..(218): n is a, c, g, or t
  misc_feature (291)..(291): n is a, c, g, or t
  misc_feature (301)..(301): n is a, c, g, or t
  misc_feature (303)..(303): n is a, c, g, or t
  misc_feature (323)..(323): n is a, c, g, or t
  misc_feature (343)..(343): n is a, c, g, or t
  misc_feature (372)..(372): n is a, c, g, or t
  misc_feature (374)..(374): n is a, c, g, or t
  misc_feature (381)..(381): n is a, c, g, or t
  misc_feature (415)..(415): n is a, c, g, or t
  misc_feature (433)..(433): n is a, c, g, or t
  misc_feature (441)..(441): n is a, c, g, or t
atgggtacctntaactgctccaggacagcggggaggtacgagaggaccttcttctccctgngggngaccttggcaaggngattgggcanaagtacnactgtggngnagagatcctgatcacggngctttctgccataanagnggaggcggntgttgcaatcaaggccatggcaaaattactggctcccaggatggnggtggtngcagcagtnatcctntgaacctggagaggccccctccccgagcctgtccttgctttggcccggtcctaagctggactcctcctacacnattttttttncntttttttttggttttccccnccccctcaatttgtcggggngcccctgccctttaccttggtcccttggncnggggggngggaaggtgtggccttggtgaagctgccctcctnttctcccctcacactacngcctggtnggggtacaaggggttgggtgctgcttgtggttaagtctttttcgcccaccccgccattcaatttggaatcagaaagcggtggattctggcaaatggtccttgtgccctccccactcatccctggtctggtcccctgttgcccatagccctttaccctgagcaccaccccaacagactggggaccagccccctcgcctgcctgtgtctctccccaaacccctttagatggggagggaagaggaggagaggggaggggacctgccccctcctcaggcatctgggagggccctgcccccatgggctttacccttccctgcgggctctctccccgacacatttgttaaaatcaaacctgaataaaactacaagtttaatatgaaaaaaagaaa

SEQ ID NO: 592337 - DNA, 1193 bp, Homo sapiens
cctcttgttgtgctcatgattgtgtttttgcatacgacccgtcattgtgctttgtgtatcgctgctagttgctcgctctctgcccaatatgctgctttgggtttggatcactcctggtggtggcttatattgtgttgtttctctctgtcacttcacattttgtgtctcctccctatcctcaaggggtagtgtctcctccttctgtttgtctctcccctgtgtgggtccactctacgatttctcctctcacagctctcgcggggaggtgtccgagaggtggcccccttgtttctctctgcctgtgggggtgagaccctcgtgtcccactaggaggttgtgagcacaacattgttctggtcccttttggggatcaggttctctgtgtgtcgcgggtccttgtgttgccccttgtccagaaggggggccacaccgtgtggccagtcaaggggccctggtccacattatcttgggcttctccaccaggggtgtcgcctgttgcttgggcgcaccccgtgtgttccttcttgtgaccttcccggatgggcccccctttccccgagccttggcctgggcttttgggcccgcgtgccttatatctgggtcttcctccgtagcccagtgttgattggagcgcttgttaattttgtgtttttccccacgcccccctcccattctcttcgcgggagccccctgccctttctacgcttgcgtctcccttggccccagagctcggttcgaaactttggccctttgtgaaacttgctcctcctctttttccccctctcccactgccagcccctggtgggggaaaaaggggtgggttctgcttttggtttattttttttttttttttttttaaattccatctggaatcagaaagcggtggattctggcaaatggtccttgtgccctccccactcatccctggtctggtcccctgttgcccatagccctttaccctgagcaccaccccaacagactggggaccagccccctcgcctgcctgtgtctctccccaaacccctttagatggggagggaagaggaggagaggggaggggacctgccccctcctcaggcatctgggagggccctgcccccatgggctttacccttccctgcgggctctctccccgacacatttgttaaaatcaaacctgaataaaactacaagtttaatatgaaaaaaagaaa

SEQ ID NO: 592338 - DNA, 98 bp, Homo sapiens
ggggaatgtattacatgaggctgcaaacgtcatgccacccttgaatgatactccccagtgctccccttcttgctaaatgaaccatgttaccccatgtg

SEQ ID NO: 592339 - DNA, 839 bp, Homo sapiens
  misc_feature (11)..(11): n is a, c, g, or t
  misc_feature (61)..(61): n is a, c, g, or t
  misc_feature (65)..(65): n is a, c, g, or t
  misc_feature (79)..(79): n is a, c, g, or t
  misc_feature (89)..(89): n is a, c, g, or t
  misc_feature (96)..(96): n is a, c, g, or t
  misc_feature (104)..(104): n is a, c, g, or t
  misc_feature (106)..(106): n is a, c, g, or t
  misc_feature (124)..(124): n is a, c, g, or t
  misc_feature (139)..(139): n is a, c, g, or t
  misc_feature (142)..(142): n is a, c, g, or t
  misc_feature (151)..(151): n is a, c, g, or t
  misc_feature (196)..(196): n is a, c, g, or t
  misc_feature (203)..(203): n is a, c, g, or t
  misc_feature (212)..(212): n is a, c, g, or t
  misc_feature (218)..(218): n is a, c, g, or t
  misc_feature (291)..(291): n is a, c, g, or t
  misc_feature (301)..(301): n is a, c, g, or t
  misc_feature (303)..(303): n is a, c, g, or t
  misc_feature (323)..(323): n is a, c, g, or t
  misc_feature (343)..(343): n is a, c, g, or t
  misc_feature (372)..(372): n is a, c, g, or t
  misc_feature (374)..(374): n is a, c, g, or t
  misc_feature (381)..(381): n is a, c, g, or t
  misc_feature (415)..(415): n is a, c, g, or t
  misc_feature (433)..(433): n is a, c, g, or t
  misc_feature (441)..(441): n is a, c, g, or t
  misc_feature (449)..(449): n is a, c, g, or t
  misc_feature (460)..(461): n is a, c, g, or t
  misc_feature (463)..(463): n is a, c, g, or t
  misc_feature (469)..(470): n is a, c, g, or t
atgggtacctntaactgctccaggacagcggggaggtacgagaggaccttcttctccctgngggngaccttggcaaggngattgggcanaagtacnactgtggngnagagatcctgatcacggngctttctgccataanagnggaggcggntgttgcaatcaaggccatggcaaaattactggctcccaggatggnggtggtngcagcagtnatcctntgaacctggagaggccccctccccgagcctgtccttgctttggcccggtcctaagctggactcctcctacacnattttttttncntttttttttggttttccccnccccctcaatttgtcggggngcccctgccctttaccttggtcccttggncnggggggngggaaggtgtggccttggtgaagctgccctcctnttctcccctcacactacngcctggtngggggggngggggtgggtnntntttttnntttttttttttttttttttttttttttttttttaaattccatctggaatcagaaagcggtggattctggcaaatggtccttgtgccctccccactcatccctggtctggtcccctgttgcccatagccctttaccctgagcaccaccccaacagactggggaccagccccctcgcctgcctgtgtctctccccaaacccctttagatggggagggaagaggaggagaggggaggggacctgccccctcctcaggcatctgggagggccctgcccccatgggctttacccttccctgcgggctctctccccgacacatttgttaaaatcaaacctgaataaaactacaagtttaatatgaaaaaaagaaa

SEQ ID NO: 592340 - DNA, 135 bp, Homo sapiens
ctgcgtgagctgcgctgccgggaagtgcctccgcaaaggccgtggccgcgtgctgtcgcgcagcccgaagtaaggcgtgagcccagcgaccatttggcgctgaagccgccgtggctggcagccagataggcctcg

SEQ ID NO: 592341 - DNA, 170 bp, Homo sapiens
  misc_feature (94)..(94): n is a, c, g, or t
  misc_feature (121)..(121): n is a, c, g, or t
cagctatatcaatctaatatttattctaaagggcaaaatgcttccacaaaattattatgtaaggcaaaaggcgttcctccttggctattaaaanaaagcacgagcccgaaaaccaaaaaanatccagagacaaccggcacattaatagcacaataatatattcatgttaa

SEQ ID NO: 592342 - DNA, 564 bp, Homo sapiens
cccccccccggggacatatttaaaaaggggttttttttggtttcccccccccccccattttttgggggggcccttgccctttcccaagcccccttggccagaaccaaggaaaccgttacccttggtgaaacggccccctttttttccccccccctaaaaaccctgttggggaaaaaggggggggggccccctttggggtaaaccctccttttttttttttttttttttaaattccatctggaatcagaaagcggtggattctggcaaatggtccttgtgccctccccactcatccctggtctggtcccctgttgcccatagccctttaccctgagcaccaccccaacagactggggaccagccccctcgcctgcctgtgtctctccccaaacccctttagatggggagggaagaggaggagaggggaggggacctgccccctcctcaggcatctgggagggccctgcccccatgggctttacccttccctgcgggctctctccccgacacatttgttaaaatcaaacctgaataaaactacaagtttaatatgaaaaaaagaaa

SEQ ID NO: 592343 - DNA, 111 bp, Homo sapiens
gctcgactgctgcatgtcgttgcacttggtggacttgtaaatctcgggatggaactgatgctcggtgcgggtagtagagcagtactggcagtgcgtctccgtagctcacac

SEQ ID NO: 592344 - DNA, 417 bp, Homo sapiens
gcatgcctgcagactcgtagagggagcacgacaccactgcacccactggtattaagctggcgggaatcatgccagcgatccaccagagtcagctgaaactggcagctcagggcaggtggaccagccagcaagacccagaccatccaactcagctgatcctgagatgagaccaagctgctgctgaggacgacagccctgctctggtcactctggaggctgaccagtctatgcacagctgaagctggaggggacgacaagcccagctctagtcacacaccggacgctgactagcctatgcacagctgaagctggaggggacaggccctgctctagtcacacaccagaagctgactagtctacgcacagatgaagcttgaggactgatcaagcaagtaaatgaggctagaaatcttaaga

SEQ ID NO: 592345 - DNA, 2240 bp, Homo sapiens
ggtgttagctatacgatgcgacacatcgaccatagcgagtggaagaggtaggtatggtagtacgcgctaccgtcctttgttggttcggagaagcatagtaagtgagtggactcgttctcgccaatcttagtgtacgtggtggcggacgctacgaagtgaggagggagcatcagtcattccatggcgaaggaagataatagtcaggttggttgaccatgatgaaccactgtgttagaggagtgggggtgcgatacagatggggtggcaccacagcacatagttgtgtgaggtgttcgtgtggccggctacaagcgggagtaaggaagtagagggtgtgtcgtcagccacctccgttgtggttctgctgcctaacgtggggggacgacgagtgagggggtggttggtgggtgcggcccggcctgacgtcgcgtgtgttttggcggttcacgctatgttgtgggggctcggggtgatggggtggggtgcctccctcgcgtggtcgtcgtggctgggccgtgcgcctgactttgttgtggttgggtgcgtccacgcggacggttgttggtgcccgcgccgctggggtgtgggggtggcagttgtggtggggggtggctgccgcgcgcgtggtgtggtgtgtggatggtgtacgtggtgtgtttgggtggagtcggcgcggggcggtggtgggaggagggtgatgttggatagggtgtgtgggagagtcggcgtgctgcgccgcgagggaggataggggcgggcgttggttgtcgtgcggagtggcagcatccacaacgtatgtgtggtcgtcgtggtgggaggtagtattcctgcggcagcagggtgttagtttgtcttgtcgtcgtcgctcggcgcggtggtcatcgtggggtgctgcgtggggggtgttcgttgttcgcatcatgtgtggggggtgcgactcaccctctgcgtgtgtggtgttgtcgtctcttcgcgggcgcgccgcagcgcagttcgttgtgggtggggcgtcggcagcgggggacgggcgtgtgcggctgcaggaggttcgtcagtgtgggactacacgcaacagacacaacgggtctcgtcgcggcgcgagctcggcacaacaacatatatgatctgtgtttgatgtacagcgagggggtacagcgcgaacagcaatggtagtgctgactgcgacgactaccacaagttatatgtcgttgttgtggtagaaggaggtatagtcgtagtgttggtctacttgtggtagtaaaacaaacatggtagttgtgttgtggttgtggtatgtatacgtcgaggtagtgtagggacatcaatcggctgatgtagaagatgagtagaggttgggttgtgccgacaccagtctgtgtgagtgagtgcgcggccgtcggcgttggttttgtgggttcgccgcgactgatgctgttgtaggtagagcgtactacctacgtcttgtgtggtccgccggccacgcgacgcgtctcccctcccgccgctgcggctgtagttgtaccagctgcgcctcactgcgcgtcacggcttcgtctgcggtcgtggggggtagacgttcgtgtcgtcgtagtagagtggcgcggcggtgttgtccaccgcattttgtagtagtagtggtgtggacatcacaaccactactcttgtgtggaggaggtacgacagtcgacatcaacatcaagtgtggtttagtcttctgctcacgcaccagccgtgggacgacgacaacagcagaatatagtctacacagcggcgcgtaggagtagtgggcggtggagagttttgtgttgtgaagaacacaatgatggtggtctctctctgtgattgtctcacgacacacgccgcgctagagcgcacatagatagtcgtgttgtgtgatgaagcacacacaccagctgtgtgtgtgagagataaatagacacacaacaagagagagaagagagatgatatcaaactaatggtgtgagggtggggctgtgagatatgtatgtgtgcacggagggatgagggtgcgacacaccatactcccactcctcacgcacggggaagcaacaacacagcacgtacgcgcggtttctataagagagagagagcacccacccaccttcaccacgcacacaggtgtgggtgtgtgatggtgggcaaaacgggtgatatatgataaagtgtgtctgttgtgtgtctcaatatataataaataaatagataataaataataataa

SEQ ID NO: 592346 - DNA, 241 bp, Homo sapiens
aacatgtattgagacacagtctagtgtaacactgtttcaacagtcaggagctactgtccttcttattctaatgagacatagctctactgttccctgctttcaatagctgagagttagcgtccttcttattctaatgagacataatctactgttccctgctttcaatagctgagcgttaccgtccttcttattctaatgagacacagtctactgttccatgctttcaagaagcaggaactgg

SEQ ID NO: 592347 - DNA, 872 bp, Homo sapiens
tagctgacaacaagatacgtacaagaaccggacacgaacactaatagtgatgggaattatgcagctatacacccttgtgatggatcttgcagtatgcaaacatttcgggagctctttggcacattattaattccgccggttatgtttcagagttgctgacaagacgtaaggtccaacaacggcaccggttgtgcccgccccccggatttttttgcctacgtggccgtcagttttaacaaggaagtctcccgcaacactgggcttgcaagcgactgcaacaattacggctggaaaccccgaggaatccgcaggggctcggcggtcttgggaaaaacccccgtgggcggtcatgcaaaaggaccccccggcgggatgccggacgcgtcccccgccccccagggtcaagagcccgcctgcgaaaaacagctcccaaaaaccggcggggccacatagggggtatcccgagccccccgcctggaaacgtcggggggatagcccgtcactggcagccacacacgggctccgcctgaacttcgtagagcgtgtgatcaacccccggcccccctagagtaaagcgccattacatgcttcgtttgggccttagaccgccacccaactcatcaggacaccgtgcgtgtccgccgtacgtacttcgcaatcggagcgcagagtgcggtcaccccagcgtcgtcccgaggcaacgcccggcagggggatgtctctagacctcaaacacgcgagtatgctgagcagtttctaggacaaaacaagcatctggaacggggctcccgagttcaatgaagtaagtcatcgggccccatgacacatccgttcaggatatccccaaagcttgcatctttggcaacataaca

SEQ ID NO: 592348 - DNA, 421 bp, Homo sapiens
ctggtacagtgggccgaattcattttgttttcctgcctcccgctggtgatctgcctgatcttctccatcatggggaaatctattgttcctgtaaagacagaggatatgcggggtccagcagataagcacattcctcccatccagggggacatgatctaactagagaccaagaaagcaaaactttgatgactccctagattttgtcctgaccccaattcctggccctgtcttgaagcatttttttttttttactggattaaacaaaagagaaagcagcatatcaaagctgatttcctccccctttttccaatgacaaaagttccagggctggttttccagtacatttttaaacaaggccccaaaaactttatgtttgcccgtccatcagtgaactcattaaaacttgtacagtgcccctgga

SEQ ID NO: 592349 - DNA, 187 bp, Homo sapiens
acaaaaacacaaagcaggcagtgtggtgtagactgacagtaccagataaaaactctaagaacctatgaggcgccagggcagtgcgggttgcttcacccatatggtctccttgggtgtactgcgggtgcttatgaagcagtatccctacggacactgaccctagctaaggaggggggataccgacgct

SEQ ID NO: 592350 - DNA, 774 bp, Homo sapiens
ggagcccctgtatgcaggacaggagtcacatgccctacacagatgctgtggtgcacgagatccagagatacattgacctcctccccaccaaactgcccatgcatgctgatcctgtgagtgttaaattctaataaactatcctcatccccaagggtcacgatcaataataatcatccctgacttctgtgtctgtcacaaatgacaaatgaattccccaacccagagatgtttgaccctggccactttctggatcagagtggcgattttatagaacagtgactacttcatgcctttctcagcaggaaaacggatattttctctcgacattgtctaatccacatcttcgccattccctcaagatccaatgaacattcgaacctccattaatagagacgtttcttgtggtcacttcctaaatgatatctgatattctccatactcttgtatcacttgtattgaccacacacatatgctaatacctatctactgctgagttgtctagtatgttatcactagaaaataaaggaaaaatgattaataaatgacaattcagagccatttattctcttgaagcatctagattagcatgattattatttacatgggtcagttcttagatttctttctctcgcagtaagatgacagtactgagatgcacagaaaatagcaatgtggagaggctgtagtggcctcgatagtgttagcataacaagggagaaaggcagagggtaggaaagctgttgaggtaaatgcgaactagagtttggaggctga

SEQ ID NO: 592351 - DNA, 238 bp, Homo sapiens
tgatggcatttagacccattcgagtcccttcctttcaagtccattcgattactgtccattccattccactcctttcctttccattgcattccattccattcgactgtattccattcgagtcaattccattcaagtccattcctttctagtcatttaaattcgagtacattccaatcctttccattccattttgttccattccattggagtccattccatgctagtctaaatgcaatca

SEQ ID NO: 592352 - DNA, 791 bp, Homo sapiens
ggtgggggatgtgggaaaagatggcggtgccgcacaatcccggggttgatccgggtcctgtcaaatgtcacgttctgaccattactgcaatagccacatctgtgtgatcacggagcacaacctgtcgccagcattcagtcatgacactcatgcctcatgggaaaggtggacgtacctcagatcagtggggattgttggaccactgtgtcctgcgagcacacagggacttccctggggcgatcatgttggtcaagcaaactatgggacagcagtggggtcacaagagtaatcataccctatcggagtagataaaactatgacatcaatgcaacctaccgataccactgagcgtgaacctcgggacagactttcacgaaacatgggaaaaatgggggaaccgccacaatgacgcagtcgacacgatgtcgtaaatcccgcaccgagacctaaggtgaacaagcgacacacgacaagtggcagggaacaaattcgaagaacatacactcagagaaccgcaagtcaacgtgggtgcaacaaactccaacatgaagcagcctatgtggccatttgtgtcgcaagcgggaatggtgtagtacggcgttgcacaacgcactttcaccaccaatggacaacatggggctttcaacaacgctgagtcaccgaaataggaacaagacctggtgacactttgcaaagacaaacgtccattactccatggtaattcagcccacttccttggaaatggcccaactctacttgtacgccaagctttcagttgacttaggcacatc

SEQ ID NO: 592353 - DNA, 625 bp, Homo sapiens
atttggcagtaggaatttgattttcttccatctattttaaatgatcatcttgagtacgtggcaaaaagaggttatgacctaatcacactcctctgagtccttagaggaagaacactaatctggtcagaataaattgtatcttttctatctttatatccatagcccaagagtttgctgaattgaaataaaaatgggatagaaaagtgaattcaaggagaatgtccagagccctaataccagaaggcagtctgcacagccaggtcagcattcttgaacaaatgcacttccattctcactcaaaatgccgactgcctttcttctttttctgactgacatttaaaattaaaaaccaaagttgctgggctgtgatctatggcagccttccagccctttgaaaagataaagttagacagaagtggtggtgaaatgaaaatgaagaataaggagtggtcaggatctatgaaagaattacagctagttctgatggattgatttttcctttctctcttatccagtctctggggtgctcgagagctagatctgctgaccttaacttctgaggactttgagcaagtaccatactgttcggatgattttcaaaaaagtgacatttagcattttgata

SEQ ID NO: 592354 - DNA, 237 bp, Homo sapiens
  misc_feature (78)..(78): n is a, c, g, or t
tacggggagaatgagcgagttatgataggttgactctgagtatatgggcagacatgtacatgttctctgatagatggngataaggcttctatgcaggagtcccaagctcaccatgcagtagaaggatctgccaagaattacaggcaccacggaaacgcacagtcgaagtgacactgacacctctaaaaatggaaaatgagagtcaatccaaaaatgccctgaaagaaagtagtcctg

SEQ ID NO: 592355 - DNA, 624 bp, Homo sapiens
tgttacgaacatgcaactaacaccaagctgccatatcctgaatagtgcactcttgttaacagtgtcatagtctagatgcacacagcttgtgcaggaacagcacactagaacgatttgacgtagagtctgctgctcacctttggtgacctgagcaatcccatgccttttttaaattcttatccccaaattgcagcacatgatgccagaaatagcactgaatcaagaaaatagccattgcggagctgccctcttgagtctttctgtccatcccattctattctgtactgtgacttcagttcaggaagttttgtatggtgtataaaataaaaaggaaaagagcaagtttgctcagtcaagtgatcagatcccgaatctagatacccagttctaaggccttatcacctcccctgcccaataggccaacaaccatagttcctcacattagtgattagcagacctctttgtggacgagtgaatttcacaaacagcacaatttcagaagaaatcgagggcacaggccctcacttttcttctttagacgcatcatcctgtgatgttgaaatgtcattcgcaggatgctgatgttgtgcacgtcaatcaccgggcacttgcataactcttaga

SEQ ID NO: 592356 - DNA, 268 bp, Homo sapiens
ccccggggggggggggggggggattttttccccgggccccccccaaaaaaggggggcccgggggggaaggggggggccccttttcccccccgggggggccccccccgggcaaaaaggggggcccaaaaaaaagccccccctaagccaaaaaaggggggccccaaatggggggggccccgttttttttttttgggggggccgaaaaatttaaatttttgggccccccccaaagggggggggaaaaaaaacccccccgggtcccctttta

SEQ ID NO: 592357 - DNA, 652 bp, Homo sapiens
  misc_feature (12)..(12): n is a, c, g, or t
  misc_feature (91)..(91): n is a, c, g, or t
  misc_feature (94)..(94): n is a, c, g, or t
  misc_feature (128)..(132): n is a, c, g, or t
  misc_feature (142)..(142): n is a, c, g, or t
  misc_feature (146)..(146): n is a, c, g, or t
  misc_feature (148)..(148): n is a, c, g, or t
  misc_feature (170)..(170): n is a, c, g, or t
  misc_feature (180)..(181): n is a, c, g, or t
  misc_feature (223)..(223): n is a, c, g, or t
  misc_feature (246)..(246): n is a, c, g, or t
  misc_feature (287)..(287): n is a, c, g, or t
  misc_feature (289)..(289): n is a, c, g, or t
  misc_feature (293)..(293): n is a, c, g, or t
  misc_feature (297)..(298): n is a, c, g, or t
  misc_feature (301)..(302): n is a, c, g, or t
  misc_feature (316)..(316): n is a, c, g, or t
  misc_feature (338)..(338): n is a, c, g, or t
  misc_feature (351)..(351): n is a, c, g, or t
  misc_feature (375)..(375): n is a, c, g, or t
  misc_feature (378)..(378): n is a, c, g, or t
  misc_feature (389)..(389): n is a, c, g, or t
  misc_feature (394)..(394): n is a, c, g, or t
  misc_feature (405)..(405): n is a, c, g, or t
  misc_feature (410)..(410): n is a, c, g, or t
  misc_feature (423)..(423): n is a, c, g, or t
  misc_feature (637)..(637): n is a, c, g, or t
tcagcgggcgcnctcaccgcaccaggtggaaggtgagccagttcatgagcataggctgcgccgccgccaccgccatggtcaggtacatgcncantggttccgggccccacgcaccgggaccccctcannnnntgcgtctgcnaagntnttcagccgcagcgtccggttcntgaacacaannttggccacgcagcaccagcccagcaccaggtagtagccaatnttcccgaagagcaggcccatgtngtccccgccaattatcccgacattttttttgcccaagttgntnaccnggtnnttnntggtgtggtcggtnttgttagttaccagttttttgntgttttggttttncagctcctccaggttcagccaggncanttctgatctcncttgntgccccaggangtctngggagatcctatnctgggtccccagcgcaagatcagccaccaaaacgtaggttatgaaagccattgtctggtaatgtagaggtccggggcattgacgtcaaagcggggggccaccgggggtgtcctgttggtactgcacttcccagtcctggtgtaggtaggggaagaacagcaggcccagctttctgcccaacatacatggtgtccacagcaaagtaatacttgancttggtgatggggat

SEQ ID NO: 592358 - DNA, 710 bp, Homo sapiens
aagctggtacgggcgggatgtaaggatgcaacagaggaagacctgtctcataaaaaaaaaaaaaaaaagaaataagaaaaagaaagcggatacacccccgggtattaagataattgagatcattcctgtaaacacagcggagtagcagcatctagtataataggcacgcaataaatacgagctattatggctgaggcatggcatatgggggctcttattactccatcctctggtgtagcctaagtttggcagctgtgtagggaagaccgcctcatactaatgaagcacactgggctggggatcatttcagacctgcagatctctttggcatgaaatgcaagggggccggggctccctcttctgcatttgtgcacctgcattttaagaacataatgaatgatgggcattggtctctttgcattctcatctaggcttgggcccatcatcctaacctgtgggctacatttggaatttcgggattgggtaatggaatgcttcagatctccctccaagcttggcttcctataaattggatacccatgactcataggtcatcatctgagtcatgataaaaatacggaataaggctgggcacggtggctaacgcctgtggatcccagcacttgggaaggccaaggcaggtgatcacttgaggtcaaggagtggagaacagccgggccaacatggtcgaaaccccatactctacccaa

SEQ ID NO: 592359 - DNA, 123 bp, Homo sapiens
ggcggtcccactctagtcaggagatactagcagcccccttcctccctggagcattttctatactcagttcctcaaataccactctcttcatcttcctcactactcacctgacccgccctctga

SEQ ID NO: 592360 - DNA, 526 bp, Homo sapiens
ggggggtgtttgtggagggtgttttgctccgtggtggtcggtgtgttttgtcgggggtatgtgttgtgggtttttgtgggcgatgtgggcgcgcgggtgtctcggttggcttcgtgggagagggtcaaggggcatgaggcgctgtggggggtttttatgggagcttgtcgcggggccggctttcgggttggttgctggttatgtcgtccgtggagggggggggggtggcccccccctctcttgtgtaggattttctcaggggggggggcgggagctcctttgggcttgggggtgggcggtgggggttccccaaaaggtccgggttgcgggtttgggcttagggggggcccgtgggaaaaataggggcccccccgggggggtttaggggttttttccctccccccccccccggggggatttaatgtgcgggggtcccgggggggggggtttttctcccccccccgggggttaggccctttttccggggccccattaccccccctttaattttttttttggttttcca

SEQ ID NO: 592361 - DNA, 953 bp, Homo sapiens
ggcaacgcggagccgggaagtcgtcgctactctggtggaactcagagtggttctggaggcggcggacgcggaggtccctcagaggatccagcgaggggcgccaacaagaggcgaagaggtggcaccagggcggcggcaggaagaggagcgggagcaggagcgcggagcggagcgtcccgacccgccgtgcgtactttctggagggaaggggcgggggaatcggcccctgagggaagcgcccggtggcgagggggttagccaagttccggctgcggcgccactccctcggttccacggcagaggagagtgttttttttccacgaggcttccgccggctcgtgccgtccgggggcggagcatccctgcagcgcttcgttcggggcggcgtgccgtcccagctcagctccggggaaacgcgagccgcgatgcctggggggtgctcccggggccccgccgccggggacgggcgtctgcggtggcgcgactagcgctggtactcctgggctgggtctcctcgtcttctcccacctcctcggtatcctccttctcctcctcgggccgttctggcttctgccgttgtccgcccagccccccgttgccggaccagtgccccggctgtggagtgctccgaggcaggcgcacagccagtgcgtcaccgcattctgacgcgaggtgccaggactgccgcctaggtgggcacctcttcttacggcaccaagtggcgtgctcctggcggggctttgccgcggccgcgtggggagtggcggctcaactcagaggcagcgctgagaagtgcgcgggggcttcgaggttgccagctggcagtgactgcaaccgttgggctcggcttgtttcgggcagcaggttggcccccctggtgtgttgacaatgcccacaaggcagtaggttgggcgccggcacagcgcccgggcaccccgcgcgggccccgctag

SEQ ID NO: 592362 - DNA, 374 bp, Homo sapiens
gtttacacaggaaaaaggtttaatggacttacagttccacatggctggggacgcctcacaatcacggcggaaggtagggaggagcgagtcacatcttacatggatggcagcaggcagagagagagcttatgcaggaaactcccgtttttaaaaccatcggatctcgcgacactcattcactatcacgaaaacagcacaggaaagacctgcccccataattcaatcacctcctacccagttcctcccacatgtgggaattcaaaatgagatttgggtgaggacacagccaagccacatcaatatcctaacagctgccacaatgattaacttatggccaaactttctccccatcacggcccttccgtagtcttctc

SEQ ID NO: 592363 - DNA, 905 bp, Homo sapiens
  misc_feature (293)..(293): n is a, c, g, or t
  misc_feature (306)..(306): n is a, c, g, or t
  misc_feature (332)..(333): n is a, c, g, or t
  misc_feature (356)..(356): n is a, c, g, or t
  misc_feature (406)..(406): n is a, c, g, or t
  misc_feature (408)..(408): n is a, c, g, or t
  misc_feature (412)..(412): n is a, c, g, or t
  misc_feature (444)..(444): n is a, c, g, or t
  misc_feature (475)..(475): n is a, c, g, or t
  misc_feature (490)..(490): n is a, c, g, or t
  misc_feature (509)..(510): n is a, c, g, or t
  misc_feature (530)..(532): n is a, c, g, or t
  misc_feature (601)..(601): n is a, c, g, or t
cccatcagcaaaggtagcacgcacccattgacaccatcacgacatcaccaagtatcaccaagcctggctccatcgacttctaacaaccagctctttgcacctggagcggcgactgagcctggggcaagggcagcagcggaggctcaggagccaagccctcagacgcagcatcagaagctgctcgcccagctactagtactttgaatcgcttctcagcccttcaacaagcggtacccaccagaaagcacagataatagacgtgtggtgcagaggagtagctcgagccgagaacngagggcgagaaangctggagaccgaggagaccgccatanngcggagtgaacggggaggggacngtggggaccggcgttgatcggtgcgcggacacctgctaccaagcggagcntncagnaaggaacgtggaggagcggagtagagaacggncctcccagcctgaggggctgcgcaaggcagntagcctcacggaggnatcgggaccggggcgggcnngccgtgaagcgagaagctgnnnctaccccagtgagccccctgaaggcggctcatctctgaggaggacgctgagacgaagaagatccaaggnctgggtccattggagagcacgtgatctcctatctcggtgtggaacatgtaacaccagtgtaagatccaaggaggcgctggcaaggaagactgggacgtcaaacgtgcctcggtctctttcaatcctccgataacgagacatgagccgctcggaagactcctacaagaacatgcgccgcgcggccgtagaccagtggcgacgggggaagccggtgatgagcgccaagacctggttgccacgggaaggtgcatcagctggcgtgggggcgagcatggcctaatacggcccccaggcaatcacccaa

SEQ ID NO: 592364 - DNA, 302 bp, Homo sapiens
gaaagatcacaggagccacatgagtaatttggaattttctagtagccacatttttagaaaagttaaaagaaatgtgtgaaatacattttcacaccatattttattcaactcaatatatccaaagtattagcatttcaacatatcatcaatgtaaaattattgaggcatatttctttgttactgttctaaggtctccatatcctgtgtgtattttacacttacagcacatctcaattcagcctagctgtatttcaagtacttcatggctacttttcttaaaacaactaattctcaaaaaaaaa

SEQ ID NO: 592365 - DNA, 306 bp, Homo sapiens
gtattaatataatggaagtaaacgacatatggtctcgttcggtctacacaggggggagtgcagtggtgcgagtctcgatatcactgcaagcgtccacctcctagacttaagctattctcctgcctaagcctcccaggtagctgggattacaggcatgtgccagcatgcctgactaattctgtattttcagtagagatggggttcaccatgttggacaggctgttcccgaactcctgaccacagatgatccactcacctcagacgatccatccactccctcccaaagtgttgggacttacagacgtg

SEQ ID NO: 592366 - DNA, 245 bp, Homo sapiens
agctcggttcccgaaagcacacccatcctgggagcctacagagccagtgcttctgaaacagtgattataatagggagggttgcgcagggccatggatacgtggcgatacgatttacccggtgcgagggattatcccgactgaacggtcgttgggcaatgtctatgtgaacccgtcaggcacataactttcaatgcaccaacgatttcgccgttatcagtcagaaataatacgcaacacctgaacc

SEQ ID NO: 592367 - DNA, 341 bp, Homo sapiens
ggacccctatcgtctgccaaggtgaaagatgctaccctgaaaatcctccttgaagggtcccttacattactgcctgaaagggggctgcccagatattttaaatctgcttgtgtgatttcacacatgtcctgcaatccacactaattacactgaggtttcagtattggtttcaatagagaagtgatttgtggggaagatgctagggaaagtctatagcaaataatagaaaggaaaattaataaatcacagctcttttcacataaagaaagaaaattttttgtaaggtgaactatttaaaacacaattagctcattcatgtcttggcagcagcatcatgggta

SEQ ID NO: 592368 - DNA, 390 bp, Homo sapiens
acttagtccctgcttagactgcatcggtttggctgatgctgtagggatcatatggatgtgctttttatgcgtgttgaatttcttcgaaaatttctttataactctagagcccaggtgccgtgtggagtctttgttctcccactttctattttcgctgtccttcagcccgttacttaatttctgggcctcaatttcctcatctgcaaatttctgtgcccatttcttgaaatgggcacagaaattgtcgaaaaagaagactttattaacagagatttcttgcatcttctctgccttgtacttttcaacttgaatatgttggcatttctctacccttgttttgttggctataatcattcagtattcatgtcccaatttctgtgcccgtttcat

SEQ ID NO: 592369 - DNA, 318 bp, Homo sapiens
aaattccgtctcttgggaggccaacgtctggctggatcacttgagggccaggagtttgagaccagcctggtttaacatggcggaaaccccttctctacttaaacagaatatcaaaaattagctgggcatggtggcacacatctgtggtcccagcttctcaggaggctgaggcacgaaaatcacttgaacccgagaggtggaggctgcagtgagccgggatcacgccactgtactcccgcctgggcgacagacagagcgagaccctgtcttaaaaaacgaaagaaaaaacaaatggaatttgtgggcatttttaggcta

SEQ ID NO: 592370 - DNA, 217 bp, Homo sapiens
cgctcggacaccacccttctgggctccttttatctcccgctctgaaatcccatcgctgacgtggctgggacctcctcctcagctgcttctccctgtttccccgccgcgagtctggcgcctggcgtgtgtaaggcgctcagtagacttttgtggagcgaagaaacgatcgcagaggtgatgagcacgagcgcagttaggaggctattggtccgagcgg

SEQ ID NO: 592371 - DNA, 202 bp, Homo sapiens
cacgaggtcgagctcgagcctcccgccgttctcgtgcagcgcgcgcacgcccacacggtcggggcgctcgacgcgatgcttgacctcggggaccgacagggagccctcttcccagaccttgcggttgccacaggcccagacgatctcgggattgatgagcacgcgcagcccgtcgcgggtctccgacatgtcgatcaccatg

SEQ ID NO: 592372 - DNA, 235 bp, Homo sapiens
tgtcttccgaaggagagtttattcagaggactccactgtatttctgactttcttcggatactgaactcaggttcagagaattggttgttagtggtatagcagtgaccacttgagtatgcacccctgaagttccaactctcctcgtcctgggttagactaggacggtctacgtagtatcacactgggtaccgttcccgtcattattggtggttttagaggacgtaaacgttaccca

SEQ ID NO: 592373 - DNA, 356 bp, Homo sapiens
  misc_feature (169)..(169): n is a, c, g, or t
ctctgcttcaacacaacacccttctctcccattttggggggtggggggtggcattccctcaacgccccctttggcaagctcatttcctggtatgcaacgaattttggctccagcaacagggtggtggccctcatggcccacatggcctccaaggagtaagacccctggncccccagccccagcaagagcccaaaaggaaaaaaaagaccctctctgttggggagtccctgccacactcagtccccccccccaatgaatttcccctcctcccagtttccatgtagacccctttaaaaggggaggggcctagggaaccgccccttgtcatgttccatcaataaagtaccctgtgctca

SEQ ID NO: 592374 - DNA, 144 bp, Homo sapiens
aggaccagacttttatttgctatcatacttatttgccatctttttatgctaattatggagggttacttttaacattagtattataagggatctaagtcttatactacgaaatattcattacctttatgtttacgatagtctcta

SEQ ID NO: 592375 - DNA, 311 bp, Homo sapiens
atggacacatcaatatacttccgtgactcaaaggacactattgtctgggtacagtggctcatgcctatatcctagcactttgggaggcccaggcgggcagatcacaaggtcaggagttcgagaccagcctgcccaacatggtgaaaccccatctctactaaaaaaaaatacaaagattagctgggcatggtggtgtgtgcctgtaatcccagctactcgggaggctgaggaagaagaattgcttgaacctgggaggtggaggttgcagtggtgagccaagattgtgtgactgcactccagcctgggcgaca

SEQ ID NO: 592376 - DNA, 232 bp, Homo sapiens
cagggtgcgtgtctgttgtaatgtaggagagcacccgatgccatctgtggcatcatgagccacacacaacagggctgcatggctgcatcaccgcgagccacgtccgcagtgatcctccaatcttcgagcactgttggatccgcggccacggcagccctggtgtacacatggttgtcaggttccttggaggctgagggcagccagagacagagtgcgacaatgaccagcacca

SEQ ID NO: 592377 - DNA, 237 bp, Homo sapiens
atgtcgcagaataaggcatcaagacaaatatgtccagaggattaccactttcccactgatgccaatgtggtgtaaacatggtatatcgatgaattaatcttgtcatgggcatttggagagtccaggagagaagactcacctctggcgcttgagtgttaaactaaagagaggtttggtagagtattgattggtaatattatatccttctccttacactcaatttcttgaccctattcg

SEQ ID NO: 592378 - DNA, 271 bp, Homo sapiens
  misc_feature (250)..(250): n is a, c, g, or t
aaacttgtgcaaataactttattaccataaacatatgaatattcatgaatagattcccaattctggggcactcagagagcaaaagcaaatgtttcaatttttgtttacaaaagtatactttaccaattgctgaagaaaaaaattcataaatctgggagggataaaacattcaaaaaatcaggcacattttccaattaaaaaattatggaaaacattatccttttgttatttaggtcccatggaatggggngttcttttccttctttggtct

SEQ ID NO: 592379 - DNA, 288 bp, Homo sapiens
  misc_feature (8)..(8): n is a, c, g, or t
  misc_feature (26)..(26): n is a, c, g, or t
gtttcatntccctgccatttgccatnctccagtgctaacggaaagaagtgaccagccatcctgtgccaagccatcttcttggccagtttacctgagatcaggtttatgaaggaacctgtcaagcaagctaaagtgtctctgaacaagcaagttgaactgaacataattattgatggagaagaaacaagcaagcataaaaggactgcaggaggtgctgtgggttggaccgtgggctgtggagggtttgtgtatgatgagaagccctgtacagtcttctcaagaaatacc

SEQ ID NO: 592380 - DNA, 254 bp, Homo sapiens
aaaaatccccccccttggggggggggtttggccctttttcccccgcccggggccctttttccctaaaattttttttgggggggattcccctttttttttttggtttagaaattgcccccctttttccccccccctgggcccccccaaccatttacccgcccctaataggtttgtccccccccttttttttcttcctccccgccctaagtttggcctttggggggctcccaaaagggtttggttggccccaatta

SEQ ID NO: 592381 - DNA, 463 bp, Homo sapiens
ggttgtaaaggaatttgaggatttggaacccggccccagaacccctggattttgggggttaaggaccagttttttaaattgggaaggtaggattttggcaaaaattgaggggtcaggttggccaccttagggttaatggcctaataccatggcctttcttttgccaggggttaaccagttttggaggtaaaggattagcaggccttcaattggataaattttttagaatttaatcctttaaggcgctgaatccgttttggtttttccatttaattttccagtggttctaaggtattggtacctggattttggataatcctttcttccggaatcttggttggctctttgggtcttggaatttgtggaatcttgtgggtttctcggtacacacggcctgtgacatgtggtgatagggcacagtttttatgtgtgagatgcgttttgtgagggggtttaccctcgc

SEQ ID NO: 592382 - DNA, 298 bp, Homo sapiens
atcgcggactatgaaagcggacgggccatacccaataaccaggtgtttggcaaaattgagcgggccattggcctcaagctccggggaaaggacattggaaagcccatcgaaaaggggcctagggggaaatgaacacaaagccttgaaatcagtgggctccagctgattttgttccgccggttccccttggccgccagttccgttttcctcacgggccgaacggaacaaggggtccagcttgggggggaccctccccagcccattcctgttgtcaaacaaacaaaaccttgcaaaggga

SEQ ID NO: 592383 - DNA, 414 bp, Homo sapiens
acatcagcagcagctcaaaaggttctccttcttcatcaagaaaaagtggaaccagctgtccctccagcaaaaacagcagccctaatagctgcccacggactttggcgaggagcaaagggaggctccggctgtcccagattggcagcataaactgtcaagtagtaagaagaacttggatgccagcgagaatggggctgggcagatctgcgagctgcctgatgccttgagctgagggccatatgcggtggtgcagccatccagagctgctcacttctgaggaccacgaggtagcttcggccaatgccctccttcatgagcatgaaccatatggcaatgcctaccgcaacgttcagactgcgcaccacagtgcacgaacaccgccctcacgtcctcccagcccactcacttcactcc

SEQ ID NO: 592384 - DNA, 126 bp, Homo sapiens
ggtcagagcttagtgattccccctgaaattggcaaattggatttaacccaattaatagtgtgtgtgtggccgcagtcatgtccctcacatcctttgaacaaatgaaaattacttttaattccttca

SEQ ID NO: 592385 - DNA, 527 bp, Homo sapiens
acgaggacattacattacgataacggacagtgctgggattacaggccttaaccagcatgcctggactattgccattttcagtgttgtgtccattgactgtttcctgttgtaccaaaaagtcatcaggagatacatatatggatagtgaaatcctctagtgacatggaagtttctgtgtcatgcatatcgagaaattgtgatgcctggatgcctgaggttccttggatgtgacgtactatgcatttgcaagtatttgctccctgtatagatccaggatctatagataaactattgtcgcattcagaactgtgtttagaatacaataatacgttgtcgtgatgtaataggactgaagcctctattactgcatgtcaaccaaaggttctctggtgtagactaaacatctaagggtcagactaccttgtggaacctggcattgttctccttctgtagcactaagttacatttgttctccgtgtcaggatctttgcagatcacacacaagaattgctggtcgtccaacctgt

SEQ ID NO: 592386 - DNA, 350 bp, Homo sapiens
gatggtgatgcagccctcactaaccgtgatgggccctcagcattggcctccagaggggcgtcgtgacccgcggtgaccaggccaccttccttctctttgccttcagtgatgtcagtaaaggcatctttgccttggacatcagcagggaaggggagggcaagggagcccttgacctgggaggggaggccaccagcattggtctctggcagggcgtcgtgacccactgggacgagccctggccgcctccttccttcccgttgccttcagccacctcagcaacggcatccttgacatcagtaaagatgaaggggaaggtgatggaggcctctttagtgccacagggccatcgc

SEQ ID NO: 592387 - DNA, 267 bp, Homo sapiens
ataaaatgggggaagggccggaaggtccccctttaaggggcctttggccatttaaaaccaccaagccatttgggtccccgggaataatgttcaatattaagggccgccaccaggttaaaccccttaatccaaatcccacccataatgaggttatccaaataagccaaattttaataccttttatgccaaaaaggtaaatttaaacctggaaaaaggttctgggcctttttaaaaaaaaaaaatggggtttttttaaaaagaaaaaaa

SEQ ID NO: 592388 - DNA, 192 bp, Homo sapiens
  misc_feature (47)..(47): n is a, c, g, or t
cccactactggccatctgatctataaatgcggaggcatcatacctcnatttttttctagtgccttttatgctactaagacaattcaccactatcctgttaccttgctttactgactggatgtcaagccttgagactatgatgacgctgtctctctgtctcccgctctaaaatgtccagtccatgagggcagt

SEQ ID NO: 592389 - DNA, 116 bp, Homo sapiens
cttcggatactggacgcacgtatgggcgacatcctagtagccttttttttttatctttaggacaattatgtaattgatttatttctcccctactatgatccaaaaaggatttatag

SEQ ID NO: 592390 - DNA, 379 bp, Homo sapiens
gaccaggcatcagctggcgtccaagtaccttactgagagccccactgcttgatggcaagctctaggcttgcttgggataggtgactttgctcatgaagcagctgtactgagtagtctagtacggacacatagatcatcaggaagggcctgttgaaacgcacaaatggtccttgtattccactaaatagcagaaaggcagggtagattttgactgctgtaggagacaaatgcttctgtgccctcctacaaatacatcaagcacagccatataggaccacctggaaaactagtaggttcctggcccctgtgatccctgacaggtcagccttgcagggaaaaggcttcctacaatgcccagctggagaagtatgtcgtacag

SEQ ID NO: 592391 - DNA, 561 bp, Homo sapiens
attagctgataaaggagactgtaggaattgcatccagactgtgatttgagggggttggctgtagtgcggacgtggcgttgtgggtgtgagtgtctgtgaggagaactacaagcccgtacgcttcggctctcgatccaatccagtagacaatggtttcatctgagggacagtgaggggtcctatctcggaaagagtctggatggagagggcattctggcagaagagtacaaccaggctttcaagcaggcatcgcagtctattgccctagctcacttagtaggtaaggggaaccatagatggaggtgtcttatcgtgaaacagaggatggggtgtaagcacatagaatccgcttccatccatgatgggcatacggcccaattggcaccggtcatgcaaggcacaagctacattgtatacgccccgctacacctggatagcatcaatggtttccaatagatgtaagcatttaaagtgaaaccgcgtgtgagcgactaacaatgttgagccgggtttaattgtgccgacccacctgtttgttgcaacctgggttcctggggtatc

SEQ ID NO: 592392 - DNA, 453 bp, Homo sapiens
agaagttaaacattagaattttcttacatgaattgaattatcagaaaataatttgtattgtcaaaattccacagctgtgccaacttacagaaaaaattagtgcatttggtattaaacatttaccattatataattattgtcttgatactaaattcaggcaaaaccagatcagttacttagagaatgagatatccaaaataggatttaataattcttcaaatctttatatggatccaacactccagtctcttttctctgcttagtaaatattgctgattgttttagggggaattgaccagtgaacacttagaagcttttgttttctgattttaaaagataaaacgtattggaaaggttactgcttatcaaagtagaaagctaactgtcctctagcgccaaagtatatactgaggaattgagtgggaaatccccacccaggttttcccattggca

SEQ ID NO: 592393 - DNA, 102 bp, Homo sapiens
  misc_feature (2)..(2): n is a, c, g, or t
  misc_feature (69)..(69): n is a, c, g, or t
gnagtgcatggctggtttcggccggatgatggctcaaaaagaaaggaaaggatactttcaggcttagangttagtcttttttatgttggaaattttcacaac

SEQ ID NO: 592394 - DNA, 462 bp, Homo sapiens
atatacacacgcgagagatcacactcagcagacccacagatcacacccagcatggatcacacccgagcacacccagcacagataacatccagcacacccagcacagatcacacccagcacatgcacagatcacaaccagcacagatcacacctagcacacccacagatcacaaccagcacagatcacacctagcacacccacagatcacacccagcacacagaaatcacacccagcacacccacagaccacacccagcacagatcacacccagcacacccacaggtgcttatagacagacacactcagatgcccatgattacagaaggtcacatgcaaagttcacacaccaacctggaagatggaaagacacccatggactttgtcttaggctgggtttcctggaggcagaagctaagacgtggatttggctgcacattattggggcagtgccctcgggagt

SEQ ID NO: 592395 - DNA, 133 bp, Homo sapiens
cgtttagacagaagtttttacttcgcaggattttgctagagcgttttaccactccagacctagccccatacccccgcaattaggaggacactggcccgcaagcaggcatcacccgcgctaaatcccctagtaa

SEQ ID NO: 592396 - DNA, 438 bp, Homo sapiens
  misc_feature (4)..(4): n is a, c, g, or t
aganaactgctgtggctatcttaatatcatatgaggtggattttaaggtaaagaatattataagacatgaaaagggacctttgtagtgttaagagagttaattcatctggtagacataataatcataagatatatgtcctcaataatagagcttcaaaataaatgaagcaaaaatttacccagcactttgggaggccaaggtaggcggattcacctgaggtcaggagttcaagaccagcttagccaaaatggagaaacttgtctctactaaaaatacaaaaatcagccaggtgtggtgtcatacacctgtaatcccagctactggggaggctaaggtaggagaatcacttgaacccaggaggcggaggttgcagtgagctgagatcatgccacagcactctagcctgggcaacagagtgagactccaatctcaaaaaa

SEQ ID NO: 592397 - DNA, 418 bp, Homo sapiens
  misc_feature (352)..(352): n is a, c, g, or t
tctttcatctttttatcaccaagtcctggtgaccttggcaggtgccacccatgagtgccaatgtagcattcatctatgaagcagggaaggcccatagaaaacgaatgatctgaggccaggcgcagtggcttacacctgtaatcccagcactttgggaggccgaggcaggcagactatctaaggtcaggagttcaagaccagcctgaccaacatggagaaaccccgtctctactaataaaatacaaaaaaagctgggtgtgttggcaaatccctgtaatcccagctactcgggaggccaaagcaggagaatcactggaacccaagaggcagaggttggggtgagccagtattngccattgcactccagcctgaacaacaagagcaaaactttgtctctcaaacaaacaaaccaaaaaaa

SEQ ID NO: 592398 - DNA, 203 bp, Homo sapiens
tctcccctccccccctttacaccattccccctcggaggcgcttccccgggaggggcaaagccggtctaacaccacagaaaaacacacaccaagaacacacgcacaacaaccaataacacacaaggacagaagcaaataacaaaaaaaagagaacccaaaccaaacagcatacaaccaacatcaaagacaaacaacaaaacagg

SEQ ID NO: 592399 - DNA, 224 bp, Homo sapiens
tcaattgactcgtacccacactttccttcctcggtgcatgtccccattgtgcctgggtagctggaattcctaaagaagaaactaattgacatagctgccttcaagagcccaggtggggacaatagcttgtagcacatacacacgagtttgtatcctacaagaacgtgttttgaaaacaaattgtatgtggcagatcgcttattaaggctattttgcggggggag

SEQ ID NO: 592400 - DNA, 83 bp, Homo sapiens
ctacaagacggcacccggtactgcgcagccatcggcgcagccacacgggggagaagccctttccgtgccccgagtgcggccgc

SEQ ID NO: 592401 - DNA, 529 bp, Homo sapiens
  misc_feature (386)..(386): n is a, c, g, or t
gtagaagatggtgttttcttttcctcgcataatatatagaggagataatgttgttgttccacagcggcacacacacaatatttgctacatttgtgtgtgtgtgtttgtggtgtagcacacatgtggtgcacatcatatatatgtagtatatgtgcgctatattaaatgtaaagaaaaaatgtgtgttgtgctcacaggtgtatattgctgtgtagatatagagatgtgtctacatatatatgtgacacatctctcttatatatattgtgtctcttctctctccttctctgatatatataagaggttaagagggactggttttgtaagaaacactctttccactatttagatggattcacagaatatataggtatagagctgatatnttctggaaaataggctccagatgggtaacttcttaatatatatttatgggaccactattggaattgtaacttgcattttagccgtgcatgtttttaattgacttaactggggaactgaattcaaatatgcctcttattatcca

SEQ ID NO: 592402 - DNA, 85 bp, Homo sapiens
  misc_feature (44)..(44): n is a, c, g, or t
tcactagagagctgtgtgccattgcccaggcagagtctctgcgntacacaactctaggaggctttgctgtgcagagggcctgctt

SEQ ID NO: 592403 - DNA, 215 bp, Homo sapiens
tgactggagtaatacaagtgtggtctatacacacgagtgagaagtaatactcagcattaacaagaaaagaacttctgacgcaggctacaacgacaggattaagctggaatacgattatgcaaagtgaaataagccagtcacaacaagataaatattatatgactatcagggtattcaaattcagagacagaacgtagcatggcaggcgccagagg

SEQ ID NO: 592404 - DNA, 247 bp, Homo sapiens
atatgaaatcagctcacctcgagctcccaaagttggaattactggcgtgagccaatgtgcctggacgacgggatccttattaagagaggtacgtgtactgcaactgaatcttcaggccacgagcaataaaagtttgatatgccatacatagccaaggaactttatatattactccagaacaccaaatgttgacgccactttagaaactacttctacaacctggaaacgtgaccatcagattttacct

SEQ ID NO: 592405 - DNA, 1371 bp, Homo sapiens
  misc_feature (613)..(613): n is a, c, g, or t
  misc_feature (726)..(726): n is a, c, g, or t
  misc_feature (793)..(793): n is a, c, g, or t
  misc_feature (801)..(801): n is a, c, g, or t
  misc_feature (864)..(864): n is a, c, g, or t
  misc_feature (992)..(992): n is a, c, g, or t
  misc_feature (1021)..(1021): n is a, c, g, or t
  misc_feature (1027)..(1027): n is a, c, g, or t
  misc_feature (1037)..(1037): n is a, c, g, or t
  misc_feature (1066)..(1066): n is a, c, g, or t
  misc_feature (1094)..(1095): n is a, c, g, or t
  misc_feature (1098)..(1098): n is a, c, g, or t
  misc_feature (1115)..(1115): n is a, c, g, or t
  misc_feature (1143)..(1143): n is a, c, g, or t
  misc_feature (1145)..(1145): n is a, c, g, or t
  misc_feature (1168)..(1168): n is a, c, g, or t
  misc_feature (1175)..(1175): n is a, c, g, or t
  misc_feature (1178)..(1178): n is a, c, g, or t
  misc_feature (1199)..(1199): n is a, c, g, or t
  misc_feature (1205)..(1205): n is a, c, g, or t
  misc_feature (1208)..(1208): n is a, c, g, or t
  misc_feature (1210)..(1211): n is a, c, g, or t
  misc_feature (1216)..(1216): n is a, c, g, or t
  misc_feature (1219)..(1220): n is a, c, g, or t
aatgagatggcagctaggaagaacatgctattggcggcccagcatactgtgtcaagaattcacacgaacttctcagccaagaccggacaccccatgggaccagcaggctcgccccgagtcttggagacgaacatacagaactgcttgtctcgatttcatgccttgattacccatcgggtttggcgagccaggccatctgtgccgcggtgtctgccctgcagaactacatcaaagaagccctgattgtcatagacaaatcctacatgaaccctggagaccagagtccagctgattctaatcatagaaccctggtagaccaatggagataacacactaggagaactaagaattgtgaacgaagaagaggttaggagagtagggaaggaacaggactgctataaatccttctccaccgctacagactgggaacccctcctggcctgggggtaagagtttgttaccgtagccttactagtttaaagagccttcactggttctgcatcacccgtcccgtggacttcttagttgtttctctagcgctgagctatctcctaacttggacctattatcagaaggtgacaagtactggctctttattcattaagcttttttntttggaaccccattctttccttctctgaaagtggtgctataagttttagaatcttttaaatacattcccgtgggccaacagacccacacacttagccattgaaatgtcaaatngatgtgccctagatcaacagatcaacaataccttttttttcagtgtccaggtaatgggttggttttngtgtccgntaaatatttaccttgaaaaaaacgaaaagtgtgtatctagcttcttcagagatcaagtcctcnggtaggaggcaaaggttctatctgcttagcaacctagttaataagtggtatctgacacactctaaaccccgtgttcaaacgggggccttctggttttaggaaacttgtagaaacgaagcctgctgatngatttttttctcctttttttttttttttntttttnaacttggaanagttaactcttcaaagggggagactcttngaaatggacatgtccctttagaggtacnngangctttattggcatattnattccagatgtttcgagtaaacttgcanangggtaggcacgaagcaattggtngctgctngtncacccccaagttccccggggnaggtcncgngnnatttnaannaaacagtgcgttgagttgtccagcattctactctcacggcgtactcacacaggggggtcggcaacattccggtggcccttcttacgacctttcttgcgacctgggactccacttttcagtcttacttttctcactgctgacggggctcatc

SEQ ID NO: 592406 - DNA, 255 bp, Homo sapiens
  misc_feature (37)..(37): n is a, c, g, or t
  misc_feature (89)..(89): n is a, c, g, or t
ccatagatccccccattgagctgtggatgggcaaacncgggtggatcccccctcccccaaccccccattgagccttgggccccccctcnctttcctcccctcccccttctccctgccttcttttttttttggtttgagcccccaggccttttcccctttgagggaggtgcttcgaagaatgttgcccccccctaagtgttagaagcctatgtccgttcatccctgagaggtttgaaagaataaaaataattttta

SEQ ID NO: 592407 - DNA, 108 bp, Homo sapiens
tttggttgatctagaggagtttattatatcaatataaatggaaatgatatgcattgaaggactcgtgggatattatgatccaaatatacacaggaaatgatagcattg

SEQ ID NO: 592408 - DNA, 731 bp, Homo sapiens
gttcttccattaaaatattcttcacaagcggttatgcagtcgtgccccgcggcctgttgctgaccccgggaatctagagtcgtaccctcttgtgtctctctgattcagtcttaagcgtgataatgaagttgtgcgcccttttaggctcgctctactgtcgcttgtctatagattttctgcctccttttagaaaattgaacttgaaaagacaggatgaacgtggtacacagcatgtgaagacaattctttcaagaagtttggctgtcaaggaaaacagagaatgtgctaaagaacatacagacacagagcagacaggccacctttgcagatcacatggagcgtttgtctgatattagaagctagcatgaagctaagctgggaacgacagagagaccaagtcctgatgacattgtttgaacccagagatccagacatgcctgaaaactagttttaccactggtacttatccgttgaactgagccaataaactctcttttatacttaaccttgcggttttacctggcatttttgtcagttgacagctcataatattctacatatagagagtatacagtcattagatcaactccaagaagacgcccgaatacaaatcctcgggcgttttttgcggcgctgcacaacgtttgtgatgtgccctggtgtattggttctcgaccccgtttccttcacggggagacgcggccccaagggcggtaatcaaaccgttcttt

SEQ ID NO: 592409 - DNA, 1009 bp, Homo sapiens
aggcaggcgtgtctgccgaagaaaccagggaaagtggtgtgcttatgcatgttcacatcgacggcagatttaccaccaccaacagaaagtcaagaaacagatgcagtcagacccacataagcaggacgttggactgaaaccgagttcctgagccggcctcacaggccccagatctatttggagccatccaccacccccatgaccctggacacggactatcaaacgtaagatcatcatgagcgacatggatgcgtgcacacccaacatgggaccccatataagggcacaccgatcaacgtcatcacagaaaaaatatacttcaaacctgacaagagacaacatagagaccatataaatcggaacgacataaagtatcaacagggccctagaccagaaaaaaggatggaaaatgccttcgagagaagacattgagaaaatccattccgattacaacaccaaacatcaaatgttcgggcaaccaaggatgagaacccagatggtgcaagaactattaagacaagacactcacgacaacactggaaaaacgtgatgcacacgaaggcactccgatgattcccgaaaccacatcagacaatggatgaaagccagggaagatgggagacgcaaacgcagtccaggcagaaagaatagcatgaccggaaggactagaagatgtaagaatagaacgaagaatcatactgaataaggaacagaatgtacaaacgaacatgtgaatagcgatcgaaaccaacgaagaaatacaagacaaccctttaacacaaggaccatagttatccccggagtgaattgaacaatgtgaacacaaacacagaagatacaatgacaagacacagggaccaatcgaaaccatcgggccggagagaacacaccaaagaaggaagaaagaactgatacacgaaggacagacgcacaaaaacagtaagaaggcatacatagaagaagactaggtacagaaaaaacaaacaagcatacttcgacgagaaagaat

SEQ ID NO: 592410 - DNA, 780 bp, Homo sapiens
gcagaggattgcctgctaccaggagttggcagccaactgaagagcaggggtcagcccacccttcaaacaagcccccactggagaccccacaccgctgtgtggctggacttctgccccacacaattgccacatcaacctcatggaagtgtcctaccccaagaccacccctcagatggtgctaggtccttcagcatccgctttggacgcaaacccatccctcatcggcacttgaccctggagcaaggccactgaaccccatgtagtacaccgcagcactgcatcaccaccatggctgctccctcctggaagtgcttgcctgctgcagagggtgatccccagaggccagggtctccatgatggcaagttcgggccagaccagtgggacccttggtcaggacgaccggggcctcagacttcctactcaagcaggaggaccgtgacgatccaggatgcactacctgcacgctcttcagccacgctggatgtggccctgcacaggagatgaagcaatatgtcacccatgatcaacagtgctgttgtccagcatcacagagaccaactacgggtgggtcctgcgatgcatccttggctgaggaggcctccttccctgccccatggtcagtgacagagagcgagatggacatggagtgaccatgtgtggcatcacaagaaggtgtggcttcaaggaggcgcagaggaggaccaccggaggactcaggcaaagcaaccatgagatcatcgagagtactacaagagcgtgtaccaggcaaacgggcaatg

SEQ ID NO: 592411 - DNA, 701 bp, Homo sapiens
  misc_feature (149)..(149): n is a, c, g, or t
  misc_feature (549)..(549): n is a, c, g, or t
gagttagtgcttaatgaggtcagaatttcagttgagataacggaaaagttctgaagatgggatgtggtgatggttgcacaacaatgtaaatgtacttcatgttactgaaatgtacacttgaaatggctacaatgggccaggtacggtgnctcatgcctgtaatcccagcactttgggaggccaaagcaggtcaatcacctgaggtagggagtttgagaccagcctaaccaacatggagaagccccatctctactaaaaatacaaaattagccgggcatggtggcgcatgccctgtaatcccacctactcaggagtctgaggcaggagaattgcttgaacctcgggaggctgaggttgcaattagccaagattgtgccattgcactccagcctgggtaacaagagcaaaactctgcctcaaaaaaaaaaaaaaaacaaaaaaaaaaaatttttggggggcctgggccccgaaaaggtttttaaaaacaattcgtcgtggggcagcgggggcccacgatggttactgtacaacgttgggctaaggctggtncccaaggagagaatccggccaagaaatagtgctggggattttcccccaagtaaaaaacgccgggggaaaacggagctttttggaacaatccataggagattcagagcacaatacgggcgcttacacgggtctcaaggactcgaataaatagg

SEQ ID NO: 592412 - DNA, 266 bp, Homo sapiens
aaggagacgatcccttcttcattatcagaatcacatcatttctggatataattgagggattcttgaaaatgcttttgataatggcataaaacttaggagtttcatagctgaatgcctgcttatctcatccaatatacctggagaggaaatacacagagggttcaccggagtaagcaacgaaagttgacggaagaaccacatgaaaattcctcatgtcaaaagacactttaatgccctatccttcttcaatcgggagatcaaaataa

SEQ ID NO: 592413 - DNA, 333 bp, Homo sapiens
tctttaattagaatgtctcacttattttgtaaacattttgtgggtacatagtacatgtatatatttacggggtatgtgagatgttttgacacaggcatgcaatgtgaaatacgtgtatcatggagaatgaggtatccatcccctcaagcatttttcctttgaattacagataatccaattacattctttagatcatttaaaaatatacaagtaagttattattgattatagtcactctattgtgctatcagatattaaatcattctttttatcttatttgtttttgtacccattaaccatccccacctccccctgcaaccgtcagtaccctta

SEQ ID NO: 592414 - DNA, 387 bp, Homo sapiens
ggtcgacaccaccatgcccggccctgaagggtcatttctgtaaactgattattgcctgattctttcactgacttctcacttggaaacttttttaacttataggcaagtttttaaaatagtacaatggggccagattcagtagctcacacctataatcccagcacttggaggccaggatagcaggatcacttgagctcaggagttggaggctgtagtgtgggctgtgatcgtgcctgtgaatagccactgcaccccccacctgggtaacagagtgaaaccctctctttcaaaaaaaagtgtacaataaacacccatatgcataaaatctgtagctcagttccacaagagctgacattttgccacattgctctctctcagtcgacgcgg

SEQ ID NO: 592415 - DNA, 1094 bp, Homo sapiens
gtccggagcatcggtgcagtttcgagggtaaagcctttggcgcggtgatgtggacttttgttctctaactacaactcccagcatacgtcacccctcacgtgggcgctaggtgtggtttcgtgggatagggtcaccagtgaaaagttgtgcagagcccaacatgagcttcatttccaagctgccacctatctctgcctcctgcgtagcatccggaaacatgtggccctacatcaggaatttcatggcaagggtgagcgctcggtggaggagtctgctggcttggtgggtctcaagttgccccatcagcctggagggaagggctgggagccatgaacatggagaatatccttggatgctgcattcataggagaattgaataatttctatcaatatgtatttatcattaaattttttttaagtttaaaaaaaaacaaaaaaaaaaacaaaaaaaaaacacaaaacaaaacaaaaaacaaaaacaaaaaaaaggcgcgcgcgcgcgccccccccaaatttcccctcccgcgagggcggcgcccacagttctctcgccgccgtcccccccgctcctctctctcttgccccaagaggtggcgcccctctttgggaggagccgccgtctattatatcagccctcggagccgcgctggcgcgcgcgtctgtcgtttcccaccgtcgggctccgtcgcgcgggcgacacacacggtcggagtccaccgctgtggagccactccctctgtggggaagacggagagcacccctctctatcttctcccgcgggggcgggggcgccacacgcaccatttttggtgcgggcgaccaaaactctcctccccttacccagagcacagtctatttacacacaggctctcttcacaccagagagcgcgcacacatatatactacacactctccttccagcacaggcggccgtatactaacccgcgcgcgtgtctacaccccccccctggccgctccagtcatttgtccccgccaccgccgcgccattagaaacgatcctgtggccgccaccaacggcgagcatagttctacctcctctgcgcgcacaaattttttttttcccgccggggggt

SEQ ID NO: 592416 - DNA, 1352 bp, Homo sapiens
gtccggagcatcggtgcagtttcgagggtaaagcctttggcgcggtgatgtggacttttgttctctaactacaactcccagcatacgtcacccctcacgtgggcgctaggtgtggtttcgtgggatagggtaaggcgaaaatgaagtgacgatgacgtaccaaagaggaaaatagttgaatatgttgtgtgagggcgtcgtttgcagaagccccagtggcctaatggataaggcattggcctcctaagccagggattgtgggttcgagtcccatctggggtggcctgtgacttttgtccttttttcccctttctaaacaaagcgaaatatgccaactttttttttttttttttaaatgggaagtgtgtgtgtgtttttactagctggtgggctgcaattttcgagaatctgcacacacccatgtcctttgtctgagccgcaggtcccctgggatttggggagacgtcaatacgttgaattttgatatcccttttataaatcatttaaaaatgtcttctcagcgtgttccatatcaaatccacacccacaccccccgccgggcccgcttctcctgagactcagcggttggtcggcttacgggcatcttcaatgacgcagtgaagaaaagcccctgtttccccaaacccttgttctgggttagaggtcctggtaccttcagttaacagtcgggtttcgtttgatttgttacggcgcccctgggccttcgattaataaggttcggtcaacggacaagtgagcggttccactgctcgtcagtcgatagggggagtcggtagtctgtccgaccgtaccattaggcgcctgggccggaggaggggttttcagggtcgtaggacgccgttgggcaccacgctcggagaaggacaggacaatggcggccttagggtccccgtcgcacacttttcgaggacttctgcgggagttgcgctacctgagcgcggccaccggccgaccctatcgcgacaccgcggcctatcggtaccttgtgaaggctttccgtgcacatcgggtcaccagtgaaaagttgtgcagagcccaacatgagcttcatttccaagctgccacctatctctgcctcctgcgtagcatccggaaacatgtggccctacatcaggaatttcatggcaagggtgagcgctcggtggaggagtctgctggcttggtgggtctcaagttgccccatcagcctggagggaagggctgggagccatgaacatggagaatatccttggatgctgcattcataggagaattgaataatttctatcaatatgtatttatcattaaatttttttttaagtttaaaaaaaatcactcagatatacaaaaac

SEQ ID NO: 592417 - DNA, 116 bp, Homo sapiens
ctacgtggcttgtgggctccccttacctgtgctacgatgaacggcggtggtgtgttccttattccctacgtcctgatcgccctggtcggagggaaccatagccactggtcaaccca

SEQ ID NO: 592418 - DNA, 419 bp, Homo sapiens
  misc_feature (419)..(419): n is a, c, g, or t
cacagactccatctgccatcagttccggcgagaacagcttgagcagggtccccctacagtgctactgcacccagtaccaggactacagcctgtcgtaagaccacacggagtaaggcatggcatgtcggctgctcggaccctcatttgactcctacctgctgcctgaactgaccatatatgactgtgaagtgaacgtgcccgtgctgggaagatccacgctactgcaaggagggcaccttctaatacctctggaccatgctaattgagccaagcctgctacctgcgcaacgactctgccgatgtagaacgaccagcttcactctcttggtgtgctgttgcaactatgtatttctaacgccagcatactattaacaagatggactcctgtcagacttgcccaggtgaccatgcttggcctn

SEQ ID NO: 592419 - DNA, 1771 bp, Homo sapiens
gtccggagcatcggtgcagtttcgagggtaaagcctttggcgcggtgatgtggacttttgttctctaactacaactcccagcatacgtcacccctcacgtgggcgctaggtgtggtttcgtgggatagggtaaggcgaaaatgaagtgacgatgacgtaccaaagaggaaaatagttgaatatgttgtgtgagggcgtcgtttgcagaagccccagtggcctaatggataaggcattggcctcctaagccagggattgtgggttcgagtcccatctggggtggcctgtgacttttgtccttttttcccctttctaaacaaagcgaaatatgccaactttttttttttttttttaaatgggaagtgtgtgtgtgtttttactagctggtgggctgcaattttcgagaatctgcacacacccatgtcctttgtctgagccgcaggtcccctgggatttggggagacgtcaatacgttgaattttgatatcccttttataaatcatttaaaaatgtcttctcagcgtgttccatatcaaatccacacccacaccccccgccgggcccgcttctcctgagactcagcggttggtcggcttacgggcatcttcaatgacgcagtgaagaaaagcccctgtttccccaaacccttgttctgggttagaggtcctggtaccttcagttaacagtcgggtttcgtttgatttgttacggcgcccctgggccttcgattaataaggttcggtcaacggacaagtgagcggttccactgctcgtcagtcgatagggggagtcggtagtctgtccgaccgtaccattaggcgcctgggccggaggaggggttttcagggtcgtaggacgccgttgggcaccacgctcggagaaggacaggacaatggcggccttagggtccccgtcgcacacttttcgaggacttctgcgggagttgcgctacctgagcgcggccaccggccgaccctatcgcgacaccgcggcctatcggtaccttgtgaaggctttccgtgcacatcgggtcaccagtgaaaagttgtgcagagcccaacatgagcttcatttccaagctgccacctatctctgcctcctgcgtagcatccggaaacatgtggccctacatcaggaatttcatggcaagggtgagcgctcggtggaggagtctgctggcttggtgggtctcaagttgccccatcagcctggagggaagggctgggagccatgaacatggagaatatccttggatgctgcattcataggagaattgaataatttctatcaatatgtatttatcattaaattttttttaagtttaaggtttttctctgtaattttgtttactagttcttaggggaattaactggacatttcatctttactctcagtgaatttactgaactttttgcactagactgatgttgtttttctacttaaaaaaatttttttatattttattttaaaagtagtacaagccttagccaggcacggtggctcacgcctgtaatcccagcactttgggaggccaaggcaggcggatcacctgaggtcgggagttcgcgaccagcctgaccaacatggaaaaaccccgtctctactaaaaatacaaaattagccaggcgtggtggcacatgcctgtagtcccagctactcaggaggctgggacaggagaatcgcttgaacccgggaggtggaggttgcggtgagctgagatcgcgccatggcactcactccagcctgggcaacaagagcaaaactctgtctc

SEQ ID NO: 592420 - DNA, 82 bp, Homo sapiens
  misc_feature (2)..(2): n is a, c, g, or t
tntgcgacagagtctcttgtcgcccaggcctggggtaccaatggttgtgaatctcagctcactgcaacctccgcctcccagg

SEQ ID NO: 592421 - DNA, 782 bp, Homo sapiens
gcgcgtccttgggttcagcaagcgagtgccgcctgggtggtatgctgtggctctgctgggggtcgctgtctgtgtgctgcggtggggaggtcgcgttttagtcgtgggtctggggattatgggttccagccggtggtctgttgcgccccctgtggaagccgtgtttgcaatggtttgctccatcactctcgtgtccttgtgtgtggtgtcgcgggccgctcctttgctgatcctgcgggtgttgtgcaccgtcgtgtggttgcgccggcgcgcgcgtggcgcctctatgtcgtcgcgggatggcacgcacgttgtgatttttcggcgcgtcggggcttcgcacttttttgtctctccccgcgccgactctcctgtctctcgggctatctctctcctggtctgttggccggaaacgcgccgtcttttgcgccctcgccgcgacagtccacgctccacgccgcgggctctgccacttttgttgtcatagaatatgacgctctaactgcgggtgtgattgcatgtgtgtgcgctcctggttctcgtctgtttttgccgcctgatccgccgcgctctagggtgtgggagctgtttgcacccactctacaggggcaccctttcacataactaacaatttcttccccctcttttatatcccacggtgttcgtccactactcctctgcttcctactctctatattgtctgggcctcgcctcccttttactatagaagaacaatattaatgtgctccttctcttacagaacaaacaaataaccaaaaaaa

SEQ ID NO: 592422 - DNA, 169 bp, Homo sapiens
cacgagggtatgtctggcttagcacttaatcacagaaacttatatgatgcgcactcctcctcagagtcattcaggtatagacactgaactgtgtccgtattatttctttcattaggagacactgtcctaacagatacatggggctcagggaatgtgagggtcacacagg

SEQ ID NO: 592423 - DNA, 545 bp, Homo sapiens
gtccggagcatcggtgcagtttcgagggtaaagcctttggcgcggtgatgtggacttttgttctctaactacaactcccagcatacgtcacccctcacgtgggcgctaggtgtggtttcgtgggataggcagagacagggtttcaccgtgttagccaggatggtctcgatcccctgaccttgtgatctgcccgcctcggcctcccaaagtgctgggattacgggtcaccagtgaaaagttgtgcagagcccaacatgagcttcatttccaagctgccacctatctctgcctcctgcgtagcatccggaaacatgtggccctacatcaggaatttcatggcaagggtgagcgctcggtggaggagtctgctggcttggtgggtctcaagttgccccatcagcctggagggaagggctgggagccatgaacatggagaatatccttggatgctgcattcataggagaattgaataatttctatcaatatgtatttatcattaaatttttttttaagtttaaaaaaaatcactcagatatacaaaaac

SEQ ID NO: 592424 - DNA, 435 bp, Homo sapiens
tatttcctctgtgcaatttactttcactctagtgaatgcttatttattaaatctttctctgtggacctgtatctctagctgggttaagaatttctgacttgctgcttctctgggtcaccagtgaaaagttgtgcagagcccaacatgagcttcatttccaagctgccacctatctctgcctcctgcgtagcatccggaaacatgtggccctacatcaggaatttcatggcaagggtgagcgctcggtggaggagtctgctggcttggtgggtctcaagttgccccatcagcctggagggaagggctgggagccatgaacatggagaatatccttggatgctgcattcataggagaattgaataatttctatcaatatgtatttatcattaaatttttttttaagtttaaaaaaaatcactcagatatacaaaaac

SEQ ID NO: 592425 - DNA, 1253 bp, Homo sapiens
ggcaggagaagatggagttcacactgcttccctgcatttccccagatgactgaaggctctaggccactactcactcagacactcctcctcgaacatcgaacatcacctacctacgagagagaggacaatccatggtactgctggatactcgagacaaacaaggtcaatacatgtagctactcggaaaaagaacagaaacaacacaacacgatcacagtgccaaacgaaaaagagctaacaagacgacaaggaaagggcacacagagccctccagcacaacaaggaggacaaagcagaggaacaacaacaaccgcggaaaacaaaaagacacaagagagaaacaaacagagaacacagccaagaaatagaaacaaaacgaggaagaagaagaaagccagacacccgagcaaggagagagaactgcaacatgcaagacacagagaacaggcgaagcacacagagcaggaataacgcagaaaagcagaacacagaaacaagaagaaaagaagccgcaacacaaaacaaaaaaagaaagaagaagcgaaaaagaaacaacaccagaaaaagagagaaagagagcgaacagcgccggcgcaggagcgacgagggaggaagccaagagaagaagaaaaacgggcaagacacaacgaagcacaacaaggagagagaaaagcacaagagaaacaagaccagagcaggggcaagggagcggcaagagaggaggaagagccagcaggagagagaacgcaaaacaacgggaacaaggagaagaaaagcaagagagaaggcgacgagaacgacgaaaagaggagagaaggacagagaaggggaaggaccgaaacagaaaacaggggcgcaaaaacacaacacgggggggacgagaacacagggagcagagggacacggcgagcgcaacgggagataggggcagaggaggagacgaaaagagaaggcacaagcgaaaaacaaaaggaaggagggaagcacagacgaaggtagcacaacggcggacacagtccgagacaagaaagacgagaaacaaggaggaaaacgcccgcgaagaagaagagcacgaccagccacaagcgggggagagagaagggacagagcggagagggggagagcgcgccgagacgaagggaggagcggccaacagagaagcaagaagtcgaagaagagagcgagccgaaggcgcagcaagacagaaagtcagggaacgaccagcaagaaacggcaccggagcgagaagcacg

SEQ ID NO: 592426 - DNA, 424 bp, Homo sapiens
  misc_feature (8)..(8): n is a, c, g, or t
  misc_feature (16)..(16): n is a, c, g, or t
  misc_feature (41)..(41): n is a, c, g, or t
  misc_feature (54)..(54): n is a, c, g, or t
  misc_feature (134)..(134): n is a, c, g, or t
  misc_feature (139)..(139): n is a, c, g, or t
  misc_feature (145)..(145): n is a, c, g, or t
  misc_feature (160)..(160): n is a, c, g, or t
  misc_feature (170)..(170): n is a, c, g, or t
  misc_feature (182)..(182): n is a, c, g, or t
  misc_feature (208)..(208): n is a, c, g, or t
  misc_feature (210)..(211): n is a, c, g, or t
  misc_feature (214)..(214): n is a, c, g, or t
aggcctgngacaccgnaaattgccttgaacctgggaggcgnaggttgccaatgngccgagatcgcgctactgcactccagcctgggcaacagagagagaccttgtctcaaaaaacaacaacaacaaaaagtcanagtcntaatangcgcaattattggcntctttcttcnagagcccaaagngaatttaaggggtggaaccatcccantnncangggtcaaaactaggattggatcttggtttgaatgaaaaaaagcataaaatattcttgcaataattgtaaaaatttgaatgtggactaagtcctagattatattaaaatatttttaattttttaagcttgacaaatgcactgattgttatactttaaataactaaaaatctgagaatccacagtgctacagacaataaatgataaaatggg

SEQ ID NO: 592427 - DNA, 199 bp, Homo sapiens
agaagttccaatagcattatgtctagaaaaaaaagtacataccttaattttaaaatcctgctaaaaatgttgtgatcatttgaggactcagcaagttggaacctttctgttgtgtagggccttgccttgatgttgatgggctgctgactgatcagggcggttgtcgttcaaggttgctattgaaacttctaaaactagg

SEQ ID NO: 592428 - DNA, 1116 bp, Homo sapiens
  misc_feature (816)..(816): n is a, c, g, or t
  misc_feature (900)..(900): n is a, c, g, or t
tccacgacccgccacagtggggctcaatatggccggggccccatgtggcgaggacatttttttttcgagccactttttccagaggacccacttgttgtgtttccctgggtcccgggccggtttcctcgtgaggtgtccccactatgcccgaggacggatttgttcccaggaccccttcctattttttgggtcggtgggagtccccgcagttccgcgtcccctttcttttgtccaccggcagcggggcctttcagggggttgcccccactgaagagcccgagatccaacccggggtttgttgaggttcgcactatgtggaacccgttttgtgagggaacacacacataggagtgggcgtgtttgttaatagccccccccccaagagcgatgtgggtcccaggattttttttttttgggatatttcccattgagcgctggtgggaatttttaaaaagacgcccttatgatgtttctccccacaacacacaatcgcccacacataccatggggcaaaagagattttaatatagggtgcgccctcccttggggaacttggtgtttgtttgtggtgttccccactggagacatttctcttctgtcttgttaattttctaggggtcccaagtatggggcgcgaacgagaaacacgctcctctcattgtatgtaaggagtttttttgagggccccccaattgtctccgagacgccccctctacatagtctccccagatctcggtgtctcctggtatacaaatctccactctaaaggagttttctccatagaaggttcactgtgtgccccaccacccgagaacntgctcacaccagatgcgctgctttctcagttgtaggcgaacagatgacttcgtggcccaggcccagatacagaaaataatgtgngcttctttgtccacattgagcaccagcacaccctgtggagggggacatcttctcccgttggagccacactagccagctggtgaggaaattggggaattctatggtattaaggttgtgttaatcgattgttgggggagaaaatccttgggtatggaaagcggggttcattgtgattggccaataaatggcggccgccccttgtcattgttttcccca

SEQ ID NO: 592429 - DNA, 1165 bp, Homo sapiens
gaaaaacagatccgcgacagctaggcgcgtgagaccggcctgcccgcaggtactgctctggaccgtggaccctgctgtgacctgggagacgcagaacctgcctggaccacctgcgctggggacgacgtgtggccatgagctcgcaggaagctgagcgggccgaaaggcaggaggctcagcatacactgtctgtgaccttggaacagtggcttcggcagcgccccctctagatctcagtgaccttgcttcagcttgaaacaaccggaacctcaatcttgacatatatgtaattggtaatgcaggaattgaactctgggatcataagacctcacttatcacgatgctgcctataatgacatcgtggagcagattatcctcactggattgtgaatataccccatctgagcattcagtcaaggtctccacatgtccgtattgcagagggatcctacttacatgggtctatgccaaggtaatcagaacaattgtgccctattattccaggatctctgctcatacatcaaataccaaccccacacttgaacctgataaggggatacgtggacgcgaaacaaaacggtgagaagtcaaccacttctgccttgaaacctacatcagctactatgtacagcaatcattcaaactgtcaacctgactccaccagatataccaacaaaatataccaagcgcgattggaggcacatattgaacgggattccttgcagaattgcaagagataggagcaggagcgacgaccatcaccaaagactccatggacccaacgagccgtcagtacatcatgggacagggagagcattgaactttatggaaaatgacggaccaattggagaatagaaaaaatatggtatccgcgacgaattcccaatcagaaacacgcagtcacaacgaagttagacccacatatagactaaacgaagaccccaacaacaaacattttcccgataaaactattaaccgacatatataccggaacaatcccaagatacaccctaccaatttcttacagataacaccactcacaaaaatggatacagataacaccacacttataataaaacacctatgaataaactcatacagcaaatgaagagcaaaaacaatagaaagaaaaaacatcagctacaagaataggcagacgcatcaa

SEQ ID NO: 592430 - DNA, 181 bp, Homo sapiens
taccatttacgagtacggagccctcacaattgatggggaggagtacatcccctatcaagcagcatggtggcaaatacgtcctctttgtcaacgtggccagctacgtgaggcctgacgggccagtacatatgaactagaatgcactacagcgaagagcttgcaccatgtcggtctaggtcat

SEQ ID NO: 592431 - DNA, 438 bp, Homo sapiens
  misc_feature (324)..(324): n is a, c, g, or t
  misc_feature (421)..(421): n is a, c, g, or t
  misc_feature (432)..(432): n is a, c, g, or t
gtctctgtcacccaggctggagtgtagtgatgtgatctcagttcactgcaaaccctgcctcctaggttcaagcgattctcctgcctcagccccctgagtcactggattacaggggtgtgctaccatgcctggctaatttttgtatttttagtagagatggggttttgccatgttgcccagactggtcttgaacccctgacctcaagcgatctgcctgccttggccttcccagagtgctggggattacagatgtgagccaccccacccagctgattttaaaaaacaattttaaaaaaacgttttgaaacagcccaaatttacatnaaaagttgttaagtacagttggaaagatttttttccctggaaccattttgaggggtttaagtttgccgacctaatggccccttcaccctggaatggntgggtgttgcnttccct

SEQ ID NO: 592432 - DNA, 391 bp, Homo sapiens
gggaccgcccggaggaaggggggggggtaaaatgtaaaataaatgttttgggaaaccccccccctgcttgtggccccacctgctgcagacccgggccccgggccgaggttgctttctgtgacgaccgcctggtgacgctggacaccaggagggttatggcactgccctcccctcctggagcccctggcactgaccacctggacttgacctgactcctggtcactggccaaacacccatcctcaccccagccaccccgggccctggctggtgccgtgtgacacctgtagcccacctgtgtgtctttgctccgcccacccctgcgtggcgccggtcaggcgcaaacctggcgccagtgtctaaatgtccatcattctcagaccaaaaaaaaaa

SEQ ID NO: 592433 - DNA, 2554 bp, Homo sapiens
  misc_feature (18)..(18): n is a, c, g, or t
  misc_feature (44)..(44): n is a, c, g, or t
  misc_feature (57)..(57): n is a, c, g, or t
  misc_feature (66)..(66): n is a, c, g, or t
  misc_feature (72)..(72): n is a, c, g, or t
  misc_feature (117)..(117): n is a, c, g, or t
  misc_feature (123)..(123): n is a, c, g, or t
  misc_feature (161)..(161): n is a, c, g, or t
  misc_feature (233)..(233): n is a, c, g, or t
ttttccccttccttaaanaaaattggaaactgggggcaaggggncaagaaacgcctnttcccaaantctctncccccaaacctctctgcgcccaattgccaaaagccctccaacaanaccctnccaagggccccaaacaagctggttgttagggggtccanggcccctcccatgcccggggaacggaggtgcaaccgtgaaccacagttggtgggggcctgaaccgctggcgnccgggctctggcagagcccctgagatcctgtggggtcctgaccactgcactgggtttttcaagatgaccaggaattcgtgaggctgggtggtgactccgtgggggggcggagacatggccatccagaggtcggggaccaaggacaccgtgagcagaatagccagtctctcctcactctcccccaggcaaggagagcacaggaaggggttgcaggaactcatggtccagttgccagagagccccccacaacccctgcagacccagagctggctcagcggaggtgccagcccagccttaggtgcgaggcttggcctcctttccagttagggcaggccgccaggcccggccacgtctgcatacacagtcctggctgtagtcctggcctggaggggtgtcctggttgctgggtgatctatgcagggacgggaatgaggggcaggggtcttggggtgtgtcccgccttcccctcccccgtcggtgccacctactcagtgcaccgggtgggctttttggattccctttgtccagccctgacctccccacagccatcgggagggccccccagagcgcatctggaggaggagggggcgcaatgaggcagggaaggtcggcgccctgcagctgcctccgctgcgtgtggagcgaagggagttctcaccttgcgaagtctcatctgtcaggctttcctccgggtgggcgctgtccgtcctgctgcccgacgtgcacgacagcgtcctctaccgcctgtgcctgcagccgctgccgctgcgcgctgggcccgccgccgccgcgccagagacccccgagccggccgagtgcgtggagttcaccgccgagccggccggcatgcaggacatcgtggtggccatgacggcggtgggcggctccatctgcgtcatgctggtggtcatctgcctgctggtggcctacatcaccgagaacctcatgcgcccggccctcgcgcgccccggcctgcgcagacacccctgaagcgcgaggccgcccgcccatctttgcgccacctgcctgagggcgcctgagctcccaggtcctccgcccgctctcctctcctcattcctgctgcctccttaagatccccgcggaggaggacctgccggcgacggctccggcactttggcatcatcacacgccctttccagccgggcgtcagactcccagactctggccccggattggcccctgggcttgcgctgctgtgccagccgcatccagggctctccccgctctccgcaggcctttatagaggcggccagggcatggagccccttccagcaagagccatgggcactccggctcaccccgcacctccatcctgtgccgaattgtcccagacagaccgtcgccattgctcggtcactgtgctttgcaggcctggggcgcagctctccaagcctgtcctgccccgccccaccccactgggcttaggttagcttcgtgccttagtatctcgggcccactgcaggagccaacaccctctgctgtccagggggggtctgtggccctaagattggccggcctctccatgcatctggccagcgtccccttggagacaccttcaccctcaagcgctgcagaagcatgaggtgagggcctgcagcgctctgtaccgtttagggtgttggaccagccgggagcctggcaggcctggcccagcggccagggtgagtgttctcagaccccgggcagctggtggttctccagggccaggtaccccttttgtgtgtgcgacctctgactaggtccctgtgggaatggggcagatggcggccatcaccactgggtcccagggcagaagcttagataccggccttgagcagcccgaccttccaccgctgcctggatcccaagcctcagccgacccaggggaccttggtggcaacggtgtgactgacagcaccacccctagcctttgcatgcccaggggtcgagagccagtatccggcccagacaatgccacccgccatggaagaaaagctgaccctgcccacctgctgcagacccgggccccgggccgaggttgctttctgtgacgaccgcctggtgacgctggacaccaggagggttatggcactgccctcccctcctggagcccctggcactgaccacctggacttgacctgactcctggtcactggccaaacacccatcctcaccccagccaccccgggccctggctggtgccgtgtgacacctgtagcccacctgtgtgtctttgctccgcccacccctgcgtggcgccggtcaggcgcaaacctggcgccagtgtctaaatgtccatcattctcagaccaaaaaaaaaa

SEQ ID NO: 592434 - DNA, 263 bp, Homo sapiens
acacacacacacacacacacacacacacgtgtgcacacaccataactgctgtgcctaccaatgctgtcaggatgctactagttcattaagcattttactgtgctgggtgcaacagggcacacaaactctgctttctcagaattccaagtttaggcaaaaatagcccatgggcaaataactgtagtgcaagataaagtgttacaagtgttctgaacaggtttgtggtcgacgcggccgcgaatttagtagtagtaggcggccgc

SEQ ID NO: 592435 - DNA, 102 bp, Homo sapiens
gggtcggtccacttgttaaagcagctttaaagctgggtgcatttcttcataatgtataacgcaacttttattcatccaatttctgtttgtggaggtagcact

SEQ ID NO: 592436 - DNA, 486 bp, Homo sapiens
tccccactgttgtcctgccgtgtcggagggttgcttgacctcaagagttcgaaagcaacctgggcaacatagtgtagatctcgtctccacaaaaaataaaaatatagccaggtgtggtggcatgaccctgtagtcccagctactcaggaggctgaggcaggatgaccgcttcacgcacacgttcagggctgcagtgagctgtgctctcgccaatgcaccccagtctggctggcagagcgagaccctgtctccaaaaataatcgtacttataattaccatagatttaattctctgagtgtaagataccatcctattcaaaactggtatggcttatagggtttcagaaacccttaataacgtatcctaatattcaaagcaaacctccaattcccaaactcttgggaactgaaagactaaacacagaggcctatgggtcaccagttcaatgcctaacgacccgtgaagctgccatggagacgctgaggt

SEQ ID NO: 592437 - DNA, 1915 bp, Homo sapiens
cgccctggtcccctacaaggtgctgcccgagggccccgaggcggtcggcgggcgcctgtgcttccgcagccccgcgcgcggcttccgctgccaggctccgggctgcgtgctgcacgccccggccggccgctccctgcgcgccagcgtcctgctgcaaccgcatgcgtcctcctgcatgtggcgcctggccccggccgccgcgcgccgtgtgcgcgccttcgcgctcaactgctcgtggcgcggcgcctacacgcgcttcccgtgcgatgcgcgtgctcctcggggcctcctgccgcgactacctgctgcccgacgtgcacgacagcgtcctctaccgcctgtgcctgcagccgctgccgctgcgcgctgggcccgccgccgccgcgccagagacccccgagccggccgagtgcgtggagttcaccgccgagccggccggcatgcaggacatcgtggtggccatgacggcggtgggcggctccatctgcgtcatgctggtggtcatctgcctgctggtggcctacatcaccgagaacctcatgcgcccggccctcgcgcgccccggcctgcgcagacacccctgaagcgcgaggccgcccgcccatctttgcgccacctgcctgagggcgcctgagctcccaggtcctccgcccgctctcctctcctcattcctgctgcctccttaagatccccgcggaggaggacctgccggcgacggctccggcactttggcatcatcacacgccctttccagccgggcgtcagactcccagactctggccccggattggcccctgggcttgcgctgctgtgccagccgcatccagggctctccccgctctccgcaggcctttatagaggcggccagggcatggagccccttccagcaagagccatgggcactccggctcaccccgcacctccatcctgtgccgaattgtcccagacagaccgtcgccattgctcggtcactgtgctttgcaggcctggggcgcagctctccaagcctgtcctgccccgccccaccccactgggcttaggttagcttcgtgccttagtatctcgggcccactgcaggagccaacaccctctgctgtccagggggggtctgtggccctaagattggccggcctctccatgcatctggccagcgtccccttggagacaccttcaccctcaagcgctgcagaagcatgaggtgagggcctgcagcgctctgtaccgtttagggtgttggaccagccgggagcctggcaggcctggcccagcggccagggtgagtgttctcagaccccgggcagctggtggttctccagggccaggtaccccttttgtgtgtgcgacctctgactaggtccctgtgggaatggggcagatggcggccatcaccactgggtcccagggcagaagcttagataccggccttgagcagcccgaccttccaccgctgcctggatcccaagcctcagccgacccaggggaccttggtggcaacggtgtgactgacagcaccacccctagcctttgcatgcccaggggtcgagagccagtatccggcccagacaatgccacccgccatggaagaaaagctgaccctgcccacctgctgcagacccgggccccgggccgaggttgctttctgtgacgaccgcctggtgacgctggacaccaggagggttatggcactgccctcccctcctggagcccctggcactgaccacctggacttgacctgactcctggtcactggccaaacacccatcctcaccccagccaccccgggccctggctggtgccgtgtgacacctgtagcccacctgtgtgtctttgctccgcccacccctgcgtggcgccggtcaggcgcaaacctggcgccagtgtctaaatgtccatcattctcagaccaaaaaaaaaa

SEQ ID NO: 592438 - DNA, 160 bp, Homo sapiens
  misc_feature (26)..(26): n is a, c, g, or t
  misc_feature (31)..(31): n is a, c, g, or t
  misc_feature (43)..(43): n is a, c, g, or t
  misc_feature (110)..(111): n is a, c, g, or t
agccagatttatatcagacttctgtnaatanaatttcaacatntctggacgggctcatagtagaccggaacagatccatgttgagctcttcaaatttggcccgagtcagnntctcagaaaagtcttctccttcatagaaggactcaatttcaattcttgc

SEQ ID NO: 592439 - DNA, 293 bp, Homo sapiens
gttggctgactctgagtatccgggagtagagagaaggagcagaaagttgttctgtgtggggctggcagtgatttgatgaccgcctctgctgctctcacctgggactgggcccattatcctgcttggtcacacccagcccagaagacgggtcctcctgttccagtgactcactgcagttatcgtgcccgcgtcttctggtgttgggtacctccgtgccgttggtgaagacacaccagcagtagcctatgctctcatagcactggagtggcagatagttgccgttctctcttact

SEQ ID NO: 592440 - DNA, 2598 bp, Homo sapiens
  misc_feature (18)..(18): n is a, c, g, or t
  misc_feature (44)..(44): n is a, c, g, or t
  misc_feature (57)..(57): n is a, c, g, or t
  misc_feature (66)..(66): n is a, c, g, or t
  misc_feature (72)..(72): n is a, c, g, or t
  misc_feature (117)..(117): n is a, c, g, or t
  misc_feature (123)..(123): n is a, c, g, or t
  misc_feature (161)..(161): n is a, c, g, or t
  misc_feature (233)..(233): n is a, c, g, or t
ttttccccttccttaaanaaaattggaaactgggggcaaggggncaagaaacgcctnttcccaaantctctncccccaaacctctctgcgcccaattgccaaaagccctccaacaanaccctnccaagggccccaaacaagctggttgttagggggtccanggcccctcccatgcccggggaacggaggtgcaaccgtgaaccacagttggtgggggcctgaaccgctggcgnccgggctctggcagagcccctgagatcctgtggggtcctgaccactgcactgggtttttcaagatgaccaggaattcgtgaggctgggtggtgactccgtgggggggcggagacatggccatccagaggtcggggaccaaggacaccgtgagcagaatagccagtctctcctcactctcccccaggcaaggagagcacaggaaggggttgcaggaactcatggtccagttgccagagagccccccacaacccctgcagacccagagctggctcagcggaggtgccagcccagccttaggtgcgaggcttggcctcctttccagttagggcaggccgccaggcccggccacgtctgcatacacagtcctggctgtagtcctggcctggaggggtgtcctggttgctgggtgatctatgcagggacgggaatgaggggcaggggtcttggggtgtgtcccgccttcccctcccccgtcggtgccacctactcagtgcaccgggtgggctttttggattccctttgtccagccctgacctccccacagccatcgggagggccccccagagcgcatctggaggaggagggggcgcaatgaggcagggaaggtcggcgccctgcagctgcctccgctgcgtgtggagcgaagggagttctcaccttgcgaagtctcatctgtcaggctttcctccgggtgggcgctgtccgtcctgctgcccgacgtgcacgacagcgtcctctaccgcctgtgcctgcagccgctgccgctgcgcgctgggcccgccgccgccgcgccagagacccccgagccggccgagtgcgtggagttcaccgccgagccggccggcatgcaggacatcgtggtggccatgacggcggtgggcggctccatctgcgtcatgctggtggtcatctgcctgctggtggcctacatcaccgagaacctcatgcgcccggccctcgcgcgccccggcctgcgcagacacccctgaagcgcgaggccgcccgcccatctttgcgccacctgcctgagggcgcctgagctcccaggtcctccgcccgctctcctctcctcattcctgctgcctccttaagatccccgcggaggaggacctgccggcgacggctccggcactttggcatcatcacacgccctttccagccgggcgtcagactcccagactctggccccgtgagtttggcccgcttgcgttgcctattgctgctgggtagtagccgttgccggctactctcaaggatctctcgctccagctcctccagtagcgtgcggcttgtgatagatggccggcccatgtggcagtggacgcccctgtccgagcaagagccatgggcactccggctcaccccgcacctccatcctgtgccgaattgtcccagacagaccgtcgccattgctcggtcactgtgctttgcaggcctggggcgcagctctccaagcctgtcctgccccgccccaccccactgggcttaggttagcttcgtgccttagtatctcgggcccactgcaggagccaacaccctctgctgtccagggggggtctgtggccctaagattggccggcctctccatgcatctggccagcgtccccttggagacaccttcaccctcaagcgctgcagaagcatgaggtgagggcctgcagcgctctgtaccgtttagggtgttggaccagccgggagcctggcaggcctggcccagcggccagggtgagtgttctcagaccccgggcagctggtggttctccagggccaggtaccccttttgtgtgtgcgacctctgactaggtccctgtgggaatggggcagatggcggccatcaccactgggtcccagggcagaagcttagataccggccttgagcagcccgaccttccaccgctgcctggatcccaagcctcagccgacccaggggaccttggtggcaacggtgtgactgacagcaccacccctagcctttgcatgcccaggggtcgagagccagtatccggcccagacaatgccacccgccatggaagaaaagctgaccctgcccacctgctgcagacccgggccccgggccgaggttgctttctgtgacgaccgcctggtgacgctggacaccaggagggttatggcactgccctcccctcctggagcccctggcactgaccacctggacttgacctgactcctggtcactggccaaacacccatcctcaccccagccaccccgggccctggctggtgccgtgtgacacctgtagcccacctgtgtgtctttgctccgcccacccctgcgtggcgccggtcaggcgcaaacctggcgccagtgtctaaatgtccatcattctcagaccaaaaaaaaaa

SEQ ID NO: 592441 - DNA, 375 bp, Homo sapiens
tcactatcagatcacaccaggatacaccaccactagcaggcgctagagctatatagtaggagggggcagtccgggtatggtaggacgaatgcctaagctaagtactagaagaactatcccgacggatgtcatcaagtgcagggcagccagcaaaagaggggtccacaccttcagggagactgatacccgcaaggggatcttcttcttcactgcttgttgaaggcaacggctcttctaaggattcctcgggaatctgctccagagatggccacggcagaatctctggtggaagagctctcacaggatgcatgtggggagctgtcctcagtgtggctgagcagatacccctgacccatcactcctgccttgcacttc

SEQ ID NO: 592442 - DNA, 270 bp, Homo sapiens
tgtgtggtcgatctaaggatccggaagatctggtgtgatgatgctgcaggcatgtcaagtagaatacatgtgaagaggagtgcatcaagagcagcaatcttgacattctcagacttgttccagacaagatggtgcctgacagctgcacataagcaaagcttcatcagggttgatgctcttatccagttctttccgattgacgacgtcttggagaagcttctgaatcttgcggatacgagtagaacccaacaaccaggacaatatcatgaa

SEQ ID NO: 592443 - DNA, 282 bp, Homo sapiens
  misc_feature (18)..(18): n is a, c, g, or t
  misc_feature (68)..(69): n is a, c, g, or t
  misc_feature (72)..(72): n is a, c, g, or t
  misc_feature (90)..(90): n is a, c, g, or t
aaaaaggtaaatttaatngatataggagtgtgtacatcatctcctgtttacctgacaaagccaatgcnnggntgtgctcaagactttcgnaattctcacattctccatgtttctgggttctacagtgtttgtacagttttgctactcattgatttcctaaaatccttaaggtcttgagttcatctggtctgctgatttcacgggtcttagggaaacagtgttctctttaggactttccatgccatgaggggccctggaagggatagcctcaacaactttccc

SEQ ID NO: 592444 - DNA, 230 bp, Homo sapiens
tcgagctgtgcagttttagcgggtacaagatctaccccgacacggaggcgctacgcaggaaccacgggaaggtgtttccagttcttaatgcgagatgcgagtcggcttttcctttccagagagaattctctcgcagatataactctggctctctctctacagagagggagcgcacaaagagggcacactcggagagatttacaaagagaagagcacgccgcgcagcagac

SEQ ID NO: 592445 - DNA, 403 bp, Homo sapiens
ctgcacttcatcttgcaaagcgctatttcaggcacatcgattggaatacaggaagtagcccgcacctgccagtgagctcgccattcaggattggaagagtgagcagggcatcttgcgaaatcattgtgtgtcttcaggagagatgtgcagatgtcttgtaacaactaattataatgcaaattagggctacattgtaatctgctttgttaatgaaaatgataaaacagaatattgacaagctaggacacctgtggtatctttaattgtatctccttcagaagtttgcttcttatggtataataaagtatggaagaatattgagtatatgtttactctgggcctgggagaacttaactttctagagcagtttgttgacttgtgtgcaatggggagaggtaccatg

SEQ ID NO: 592446 - DNA, 598 bp, Homo sapiens
gtgctggacctccgggtagcgattgcagtagcctctgccgaccctggcttgaccgggccccgctgtgaccagtgccagctgaggctactgcaatcgctacccggtgtgcgtggcctgccacccttgcgtccagacctactgactgcggaccgtccgggagcaggcccgtagcgctttggtagactccgcaatgccacctgccagcactgtaggtcacgggcactgggcatggaggaccgaggcctggcgtccctggatcctaggatgcaaagagtaagattgacgcatgatccagaagacagcttctcagacaaggaccaccgaacgtcacaagagccaggagggtggctacaggtggaccagatgccattcctctaccctcagcgcgaaactactccaggggccatgcagaagactgagattcatgcgcccctgggaagcgagcgaagaacaatgtggtcgcactatcccgcagaaggaccccttgggaggaagtacttagaccgaggacaagccttttccgactggggtcgtcgcctatgaactaattgttagtcacagaggtgaacgcacgagtacgacagagtatggaacaaaa

SEQ ID NO: 592447 - DNA, 373 bp, Homo sapiens
tctttagactaataggtgaaaagccttagcggggtcgttctatggggaaaccaccaccgtcactgtaaccacaacaaatcaacgactgctcagccgctcagagaatacaaagcacttgtaactgaaatgatatcaatagctcacaacaggaatatacagtgactacctgccccaagtactcttgggtctggcagaggaatacacagggggatactcagcaaatctgacagccaggatggtacagtcccaacaaaatcagaacagacattgagagttatcaggacaaacactagccatcagcaactccagaggctgactcaggaactatggctacctatcagccccgccttcagtaccgtgcaccatgcactaa

SEQ ID NO: 592448 - DNA, 951 bp, Homo sapiens
  misc_feature (155)..(155): n is a, c, g, or t
  misc_feature (682)..(682): n is a, c, g, or t
gcacagaaggagacgtggaatcggaagagaagggatacttcgaggacgttagaaagaagtcacaaatcgttcaaaaggtggtagtaggagagatacacaaaggaatctacataggattaagcaactgcgccgtgtcccggagcgagaaagcaggntcgtagtagtcaatgagtaggtgaagacgattctaggcttaaaagcagtctttcaagggaaaggtagaatggggaggaagccggaaagagtgcgagtgaacaggtatgaaggatgatgagcgtggggtgacatgggaagaaatagacgcgagaggctattacggtgtggagggcctagtgtcttgttgggggagacgagcagaggcatgttccgtggggagttagaaaagagacgggattaagcgtttgtccgtgtgcctacagggagggatgtggtctggcccctggaagatgcacatttccgcctagtggtatggtgaacaatagggactcgttttagtctgcgcaaagaggaattgaactatgcacccggtgtgttgtggctaatgtgacgcagacgggaaccagttgcctgtttgggtaaccttttggtgtcgtgggggattaaaagggtgtattgcgcgatttacgaaagccacgggttggtgaatttctaattaattgcgaagaggaaactcttaactgcnttgaagggggtgtggtcacaagaacaggctagatggcgtgagaaaacaagaggtgggaattagaggtaaagaggttataacatggagatcaagaggaagtttaaaaggcaagttcccagtggtggttggcaattccatttggtctagttaaaaggagttaaggtgggcttaattaaggcggttctggtgtcagcggtaagagggaaaaggttccgggggtaaatttgtttcttgcaaattaggggtgcaaaggatttccttttgtaaac

SEQ ID NO: 592449 - DNA, 122 bp, Homo sapiens
cgtaacccacggtgccaccccttccgagggcaccaacaccagcgggggctagttgtgggttgtagggaagaccttctcccgtgcttgcaaggagctcaccatgcctttggggggggatctct

SEQ ID NO: 592450 - DNA, 173 bp, Homo sapiens
gtgtgttctgaggatcccgtacacttgaaaccgtaagacaaagaacaggtaaagagggcacaacacacttctaccgtttataccaaaccaaaatcatgaaattcaaaatccaagtatcaaaaaattccagccaagtcaaaaccaaaaccaaagtatccagcaattcaaggggt

SEQ ID NO: 592451 - DNA, 318 bp, Homo sapiens
gaactgtgaaagggggaagaggacaatggatctgtgtgttgactgtggacacattggtgatcttggagggggatatgagcaagcagcatctatcgccgccaatccagggacagcagagaattatggatatacagaagtaaactgggcttgatacaatggtcacgagacatgtgtataactgcttttagaacaggaagtttttcagaaaacggaaggaaatgcttttagtccattggattgtgccgtgattaatgacaataaaagtgttgttgagatgttaattgatacattaagtgcacacattgtgaacgccacaga

SEQ ID NO: 592452 - DNA, 417 bp, Homo sapiens
gctttctttttgaggaagacgctggtctgtaaggggctgaggatttttggtccgcacgctcctgctccttgactcaccagctgttcgctctcgccgagggaacaagtcggtcaggaagccccgctgcgcaaacagccattggcttttcacacgggatacccggtgatataaagcaccctgttgggatgcccggacggtggagccaagtttcaacgctgaaatttcggaattcacgccttaaacaaagccctgcaaacgttacacacattccccttggggaacacaccagcggttgcttgttgcctttgcacccttggcattcacggacggctgcctgcccaaaaccatgcacccccgggaatattctttccaaaaggttggcacaactggtggaccccaaaggttccggcaaacatg

SEQ ID NO: 592453 - DNA, 181 bp, Homo sapiens
aaaaaaaaaaaaaaaaaaaggttttgaaaaataagcccccctgccttttgggaccccagcattttttattttcccccccatatcccggggagaacccgggtttcaagctttttggccatgaaaggggtccccttttagaggtcatgaggttgaggctaataacccttttttccaggaccca

SEQ ID NO: 592454 - DNA, 1216 bp, Homo sapiens
  misc_feature (22)..(22): n is a, c, g, or t
  misc_feature (197)..(197): n is a, c, g, or t
  misc_feature (235)..(235): n is a, c, g, or t
  misc_feature (280)..(280): n is a, c, g, or t
  misc_feature (706)..(706): n is a, c, g, or t
  misc_feature (737)..(737): n is a, c, g, or t
  misc_feature (800)..(800): n is a, c, g, or t
  misc_feature (809)..(809): n is a, c, g, or t
  misc_feature (834)..(834): n is a, c, g, or t
  misc_feature (843)..(843): n is a, c, g, or t
  misc_feature (896)..(896): n is a, c, g, or t
  misc_feature (945)..(945): n is a, c, g, or t
  misc_feature (994)..(994): n is a, c, g, or t
  misc_feature (1078)..(1078): n is a, c, g, or t
  misc_feature (1190)..(1190): n is a, c, g, or t
aggaccacaaacaatttcttanctccccccgccaataccgcccttcacggccccgcgcgcccgccgcgccccttcgcgatcagggaggagaagggagaaggagcctagctatatctcgtagaatgatgattataacagaacgctaattaataaggaccagaacttatactgaaaaaccgatcatacgtatcgataanacaaaataagacataagtagtaccattcttcatgcggnagcgaatcggggggggggagcgagcaacacatgcgcgtcccgccncccctctcctgctacaatcaaggagagaatacgcccacacatcacagcccacaatcacatgtacttcaaatcccgtccagcctcccggaggaggaatcgagaaggaagaagatagaagacgtgtagattacaaacccacatgcaggacgtagcacgcataagccttccacgacgcagccgtgctattcgtggtccaccacagcacgcggtacgcggaagtcgggcgcagcgaacgacacagggcagtcgctgagcctaacagtctgttctccgtctcctatcactaagataccgcaagaccgtacactacacaacatcgaatgtaaggtaaccaatacgcagacggccatccgtagactaaagtacgcgcgcatacgatgagtgtgtgcgaaagagaacgcgcacagcaggaatgagacctaatgncgaagcaacggtcaccgagagctcgttaccnctcgcctctctctgtcacgcgctccacacgcatacactcatacgtcagctggattgcaaccanccacgtggntcgcgctgcgcgcatagcgacgcgnagcgtgtgnatagcataagacaacgatgtgaacgagcgcggtctcgctagtacactcccttncacgctcctatgcagaagacgatgacatagcgacatcgtgcacgtaaanacgacgtctcatctacagcagaacacgcacagacgcacactcgcgctcncacctcctcctgacctaacatacctcggacgctcatctcctgaatcgtacgcgaacacgtacgtgcatcgcacgagcgagatangtcgtcgaggtatagagcttgcgcacttacgtaccacactatccgcctgacacgcgcgcccgccatcgcgatactgatctactatcgactaatattcgcaatgccgactatntatgacgcactcctccgcgctatcgg

SEQ ID NO: 592455 - DNA, 143 bp, Homo sapiens
atacaaagcactatgaacatgtgcctaactcatgctattcttatttgaatagattgctctttggtcccagctcatgttcatcactcccttcaaatgcctattcttcctattatatcttcttgactgatgctctcctctgttga

SEQ ID NO: 592456 - DNA, 198 bp, Homo sapiens
atatcgataataactagtatggagataaggggtagtaggtgtgcctatgagataagaagtgggctagggtatttttaatcttagagcgcaagcctatcatcactgcgcccgctcatacggggcacggccgtggctcggtttatagacagttgggtggttggtgtcaatgagtgaggcaggagatccgagaaggtaagt

SEQ ID NO: 592457 - DNA, 419 bp, Homo sapiens
  misc_feature (194)..(194): n is a, c, g, or t
gaggattttcgtcacccttactgaaaccccctggggctttcatcatcagaggtcaaattattatgataactattccattaagtttgccaaacatttgtcgtggttaccagtgcagcctgtcaaattttgctatttgacccagctttggaaaaatttagttcttggtttttccgttttggattaaaaagacggtnccagttttatttggctgtttaaagccaaattcagctatttaattatggtttcatggcccctgttgaccaatgtccagggtatggggggcttccctgtcccctttaaagcattgcttccaggttttttgttttttaaaatgctgggctgtaaaaaactgtcaaacttgctatttcctgggacagggtagtttttcccctttcatttgaataaaagcagggccccca

SEQ ID NO: 592458 - DNA, 385 bp, Homo sapiens
  misc_feature (62)..(62): n is a, c, g, or t
  misc_feature (323)..(323): n is a, c, g, or t
  misc_feature (335)..(335): n is a, c, g, or t
taagaaacactataggggaggaagtatgcatatacatgtccatatgtttattataaattttnctgatacgaaagatatgtggcacacagtctataagtaacaatgaaatatacagtattctttatggcaaattccatatagtgaattggttcccatggaattctttttttttttttttttgagacagagtctcgctctgtcacccaggctggagtgcagtggcgcaatctcggatctcggatcttggctcactgcaacctctgcctcctgggtggacgccattctcctgcctcagcctcccgagtggctgggactacaggcgnccgccagcacgnccggctaattttttggtattttttagtaggaaaccatgggtttcactggt

SEQ ID NO: 592459 - DNA, 1514 bp, Homo sapiens
ggctccctgagccgcctccccaccatcaccatggccagaggcttctatatttccaaagtccctggagcatacctagaagacacctacctgagacagaacaaccaaaacacaaacacacacacgatacaagaaaaacacccaaaaaaaaaacaaaaacaccaacaacacccccataaccaccaccaccccaaccaccacaaccaccaccaaccccgcctcgggcagcaccgttggaccaggagtaaagcgtgggaatctgttaccggctccccgaacacgtctattggtagtcccatattagatcctagatccatgatgaagatctgtcttatatatgacctgtttagtcctacatctctttcctaagtatatctgttaatgttctcaagttatctattgttttataagtagttcgagccttgtatttcatgttttcaggttgtgcgtctctgatttggttgtattgtttttattgaatatctgtacagtagcatgtctatagctccatcatatccttagtaaagttcttactatagcttaattcatctttttttacttgtttctttattttatgtgttctatcgtgattagtttaattattctcctatattcattatttgttaattaaattgtgtatatatcttgatcctctaatgttttctctcttcttgcttttgtgtttattgtattcttatatttatctttaatgatttcctgaattttttgtttttatgtctctttgatgttctagtgttttgaatctctataatttaatattgtatcgttcttttactatttaaatatctttccttttaatttttattatatgttatatctattctctcatttttatatagtatttaatatttttatcttatttcttgaatgttatcctgatgtttttgattatgtttatttttatgtttgttagtatttcgttaattgtgttgatgtatcttagttctagtttcctgttcttagttgtttgatgtttagtctgttaataatgtgatttattaatttataggttatgtgtcttttgttaatattttgttttatatgtatttattatagttccatgttgtgtagtctatttcgtttttatagtaattatctattttatttctttagtatcttatttgactgtagtatttctgtcctgattgttagtatagttatatctctgatttgctcttcttaagtaatagtctttatgtcgttatatgtagatatagttcctcttaatatttcttctattctattgattatcatatatctgctaatgattgttgatttgtcatattgattagtgatacgtagttcatgtctcttgatatgtatgactcctatttcttcgttattttgtatacttcattctcttgtattatgtacatgttttgctgctatattattttcggtatttctcattaagctatgttctcttttgttatgatgattttcgtctatattcttttttctctcaattttaggtttttttgtaatattaagtcttc

SEQ ID NO: 592460 - DNA, 882 bp, Homo sapiens
tgccagtaccgtgttggtatgcgtgagtgccggttcatgaggaaggttcaagtgaagtagttcgttaggaggctgagcgatatgggtgctgtgattcgccgctagtaactttcgttagaattgttaccctatctaccgcgagctaatactaattatgtggtgtactcgatttctctactatgtcaggagcgatagggccctccgacgggattgccaactagcctgtcgtgatgcgggaccagccggtctttggaccgccggagctcaggttccaggtggaggccacggttggcaaaattcagctgcgaagcttacttggaggtgacagatgtcagaagtgtatgacacagtctaatttacaatgcgactacttatactgtgggtctgcgatcgccttaagaaggcgacgcttcctcgcagacactggacctgtacctaccaaagagactgctttcccattgggaattgcttggtaaagacttgagtagtttacaatctatgatgatgatgatgtgtctccattcgctggaaggtcttgagagaaagaccacagaaataaggcacaggcctgatcaacctgctgatgaacctgcagaaaaggctgatgaaccaataggaacattaagtgataagccacgtctatgatatgtattaatcaaatatgtaagaatactggctccacatactgatgacaataatgtatactttgaaccgaaaggtgactgagtggtggatatgctatgttttaggaatcagtccagatgtgagttttttccaagcaacgtcacataaatacctatataattggaactacattggtattctttgaaagggtctgtataatcattttctagaaagtatgggtatctatactaaggttta

SEQ ID NO: 592461 - DNA, 151 bp, Homo sapiens
gtccccgcgtcgtggtgcggggtcacgggtgtacgcgctgtcgccgctttcccgatgttttccgacatcagcgaacagctgaagagcttcatcttttccaatttcgtgccggccgccggcaacgtcatacagaactaccgggaacagttcg

SEQ ID NO: 592462 - DNA, 652 bp, Homo sapiens
  misc_feature (24)..(24): n is a, c, g, or t
  misc_feature (632)..(632): n is a, c, g, or t
gagggttttaaagattattggtanaatacaatgtctttaaaatggaaacatgtggtctaaattacgttccaatattaggtttgctgaatgctttaaggtcataaactgcttatttggcttttgaaaattgtttaacttgcctgctttccagctaggtaaggcctgggaacatgtggagttggccatgcccctagctatgctgcaaacagtcaaaccttttcagaacataacttaccaggttttacattaaagttaaaattgctaagagtcaccattgtaacatgcaattaagactactagaaacggttttacatgcacggtgtgtaagaatagtagaatgtatgtctctgtgtgtgttttgtaaaaggtttttacttctttaaaatttctgagtcattattttggcaaaataaataatctggaattccaaaatcaaacttcagtttcaaaattgtctttcctaatgcctggctttctggatggatcagagggcccctgaaaacatccagaaaggaggtaaacaggattatttgatgtgtttaggtacatgggattgccaaaatgatgttcagtcttctttaagttttttttgtgaataatactaatatatgttccaaaattgtatgggattnctaaaatagtacatgctatc

SEQ ID NO: 592463 - DNA, 140 bp, Homo sapiens
gcaggagttctgggcagtcactatacacttgatcctgactggccacactgcctgcctctctcctttacttcctcatccccacctggtcccatcccacgcctgtctcctcctgaccgctgaccacccatcctcttacgagt

SEQ ID NO: 592464 - DNA, 119 bp, Homo sapiens
acgagggctagcctcacagatggggtacctgagagatcacatggtgtgcacaagtacgtggggtgacaggcaataaaattttaagaattcttaagtctgggggactgcgaccaggcgta

SEQ ID NO: 592465 - DNA, 670 bp, Homo sapiens
gatgcggttccgggcccccctgctatatgagcagtacatcgtggcagtatctcacccaggaggagctcagtgcccgcaccccaacccaccagccccccaagcccgggtcccccgggagacctgcttgcccgctctccaacttgcttgctccatgtcctactgaggatgctgggagctacatgcagctgtcttgctccaacatgcaggaggaggaggagtgcctgcttggatggaatgatggaagaggatggatggacatgtgactgatggaagaaccagaggtcatggcaacggactctggaggccttggtgttcccgactcgcgagcgagaggcttgatcctgcgacgaggacgttcaccagccgcatgcaccaagcgcttcctagatggcaaggacggggactttgactacatgcacagtatgacgacaaaccccgacttcgacaacctcgacatcgtgcacgggatgaggaggagaggtattgatgaggaagaactgaggatgcgccagccagagtgatggggactgatggcgcacccttcccaccgtctgccccatccccatccccaacaaggctagctgattccaggcctgctcagtgacccatttctctaagggggacatcatgggcaggtgcccacaaaccaaaaaaaccaacaatataatgg

SEQ ID NO: 592466 - DNA, 230 bp, Homo sapiens
ccccatttttttcccccccccccccccctttgggcaggggggatgtcctacaggaaatgttttcctctgtcccccccttcccccccctttcaaaccaggccccttcttgggggaccaatttttaccgggccgggggaccgaaaaacccccctgctctggggaaaccgcccccttttactttaatttttttaactggacaaaaaaaaaaacccggatttttattttttcca

SEQ ID NO: 592467 - DNA, 489 bp, Homo sapiens
  misc_feature (2)..(2): n is a, c, g, or t
  misc_feature (61)..(61): n is a, c, g, or t
  misc_feature (72)..(72): n is a, c, g, or t
  misc_feature (101)..(104): n is a, c, g, or t
  misc_feature (108)..(108): n is a, c, g, or t
  misc_feature (112)..(113): n is a, c, g, or t
  misc_feature (124)..(124): n is a, c, g, or t
  misc_feature (130)..(130): n is a, c, g, or t
  misc_feature (178)..(179): n is a, c, g, or t
  misc_feature (219)..(219): n is a, c, g, or t
  misc_feature (251)..(251): n is a, c, g, or t
  misc_feature (260)..(260): n is a, c, g, or t
  misc_feature (263)..(263): n is a, c, g, or t
  misc_feature (270)..(271): n is a, c, g, or t
  misc_feature (294)..(294): n is a, c, g, or t
  misc_feature (296)..(296): n is a, c, g, or t
  misc_feature (300)..(300): n is a, c, g, or t
  misc_feature (306)..(306): n is a, c, g, or t
  misc_feature (315)..(316): n is a, c, g, or t
  misc_feature (325)..(325): n is a, c, g, or t
  misc_feature (328)..(328): n is a, c, g, or t
  misc_feature (338)..(338): n is a, c, g, or t
  misc_feature (343)..(343): n is a, c, g, or t
  misc_feature (383)..(383): n is a, c, g, or t
  misc_feature (440)..(440): n is a, c, g, or t
tntacgttcaatattaccaaagttcaatataataaaaaatataaataaacaaaaaaacatnaaaaaaaaaanaaaaaaaaaaaatgcaaataaataaaaannnnaganaganntctcccagatncccctnactcaggacccttccccgcagcttggcagtggccactcaaggcttggnnacaggcaaggcttggctcaatatcctgtcaggggcaaaanccaagctgtctgggagggtcgggggatgcagnaaagatgtntgngaatcannaaaccattgctgcatttggggtnanaagntgaatntgccaagcnngagggagcnctnaggcctcatnctcantgggggtcctattacttgaagatatatctaaatttcaacncccaagcctcctcttccaacaataaagaagccatatctaaaaaaggaaagtcaaaanattacctcaacctcactcaatgagctccacgtatttgcagggaacatac

SEQ ID NO: 592468 - DNA, 120 bp, Homo sapiens
cacggcactagtaaggatagcagcgggatacgggcggcgggagctaggggaacaggcataggacgtattacgggcaagcagacctgactaggcggacgcaccgcgctatacggcctagaa

SEQ ID NO: 592469 - DNA, 180 bp, Homo sapiens
ctcacgatcgtgcccacatctcacgcactgtctacccaacacaggcatgctcataaggaacggttacaaaaacgtacaacggcactcggcaaatcttaccccgcctgtataccagaacacatcacctctagacatcaccagatattagacggcaccgcactgcccacgtgacacactgtt

SEQ ID NO: 592470 - DNA, 792 bp, Homo sapiens
tctcattacctttttgaaggggtctcaaaatcctgtgacaaatttcgggccaagttgttcccactaaaaagtactgatttaaaacctaataatttaaaatggccaaacccaaaaaagaaacaccaaaggggctccacaaaacatttctccttttccttctgaaggttcaacgaggcatggtatcatgacccagctctttatactactaaacttaaagggccaatgtgacacaaacagttctgagaccgtgcttcacacgcacgtgataaacgaggggggcggtggccaggtataagggataataatccatctaagccttcctgagcttcacggggcaaactggcgcgaccatggcacagcgtccagcagcctgcatggccccacggcttcggagtgacacccaccagcagacgtgcaggcgcctcaatactcaccgacccgagcaaaggcgacccaaagggggaatagtcgtgaaaagccctcctaaaaccccccagtggacactggcacaggaacccagtgtctcagacgccatgggcagagcaactcccccaagaacaatccacaacaaatatcaagagcgcccatactacagacacagtattgtacacccaagaaccagcgcggatccacactgctttccccgtaacagagacagccaacacctgagcaatagcatcctgtaaagccccagtgcggcaaaatccaaacacaagggggaataaacccaggcgcccaaaatggcgcccgggcaaccggccccaaggaaaacacactccgaagcaacgggac

SEQ ID NO: 592471 - DNA, 148 bp, Homo sapiens
ttccaaaaggggggttttttttaggccccccttttcttttccccctaatttatttgagttcttactttttgaggcggggaaaactccctgttaaataatgccccccttggttatgcttttattaatttttttggcccccgttgcttta

SEQ ID NO: 592472 - DNA, 206 bp, Homo sapiens
  misc_feature (13)..(13): n is a, c, g, or t
  misc_feature (37)..(37): n is a, c, g, or t
  misc_feature (59)..(59): n is a, c, g, or t
  misc_feature (83)..(83): n is a, c, g, or t
  misc_feature (154)..(154): n is a, c, g, or t
  misc_feature (180)..(180): n is a, c, g, or t
tccctccttcctntccttcctttcccttccttcctcnccctttctctctctttctctcntctttcccttcctttccttccctntctttccttttaagacaaggtctcactctcttgcctaggtaggagtgcagtgatgtgatgatagccactgnaacctccagctcctgggctcaagtgntcctcctgcctcaacttcctgagtag

SEQ ID NO: 592473 - DNA, 254 bp, Homo sapiens
gcatgcagtgacgatagtgtgtcgatctgcgctagttgtgccactactggaaggacgaaagcaggaacacaacagggaactgccgccgcctaccaggaaatcgatgtgaactggtctacaaattatgcagcacatactaacgaagaaaggacaatgctgaattcaaattacaattaaaaggcagtcctccaggcatctttcaaagctacgccctagcatagcaaagtccagtctcaggagcagtaatcaagaga

SEQ ID NO: 592474 - DNA, 916 bp, Homo sapiens
agcggaaggagctgctcctcaaaagcccgggcggacggcggcgacggcgcgggttcctagcggcagcctcagctccaccaccatcccgtcaccctccccgcgcttcctctccgtcccctcgcgctcctagtccactctggtcgcagccggcgctgtcctccgccccccgtgagcctgccgcgccagaccctcgtcccagtactatggtgggacctgccgggccatcgttgcgccatctctcatcgacgctgcgcatcctagactcgtaactgatcgtgcccggtccttttacaacgtgtgtgagtgggcaagcgtcttcgagcctaggaacctgcaacgcatcaacgctggctcaccgagtctcctcctacaaggtctgacggtgaagattaagccctagcgacgctcgcaggtctgcagcaatgatttccattggctggtgtgcttgtcccacttggcaactgaagtctagcagagcctgatggggacagagttgtatatacgggtacatatgacacagaaggtgtgagcccaacgaagaagtggagaacggcaacccatccagatcacctatgccgttcacagacattgggaccttcgagacagtgtggcaagtcaagttctacaattaccacaagcgggatcactgccagtggggaagccccttctctgtcattgagtatgaatgcaagcccaacgagacacgcagatctgatgtgggtgaacaaggagtcctgcctctgaaagtggctctttctgatgctactggacaatcttttcagaacatctactgtttcagataaccagcgcaggccttaaacaaggcatgccacaaccattgctgttccccatctggtactaatgacctactaggcctggtattttgaaaagtgtattccctctgacacatatccta

SEQ ID NO: 592475 - DNA, 267 bp, Homo sapiens
tacttggatggtttggaatggattaccattccagttctggcacttatacccctctgggtggtttgctttttacaccttcctgggaatcccattttcctaaaaaataacgacattttcagatctggaggagcctacatctcaatgtctgtgggttataaattctggacaggatacaatagctaaacttaatgtaggcaaatgcagagacatttaatctgacatgttgacctctacactgagactatactggcatagtggctaaaacaa

SEQ ID NO: 592476 - DNA, 1056 bp, Homo sapiens
  misc_feature (222)..(222): n is a, c, g, or t
cataaacaaaatctaccttacttgaggaattaggtaggtaaggaatgatcacattggagtttgggattaaaaacaccaaaaaaaaaaaaaatgcattgtggttctctctacactggctaaaaaatattggctctacactgtaagttttaaacgttacgttttctgtattgaattgtacgtgtgggattgtgagttagcattgtgtgctgttgagttggcccncacaggttacatttcacccttcttagttgcagccccatcagtcttaatgaaggaaaataaaaacaaacacaaagccttaagctcttggagttaccttccttttaccaaattgagcattggttctaaccaccgtggagccttgggcctacattgtggaaacaaggccccttcctgcccttcgtgttccattctctttagagcattacctttcattccactccagtgctcagcacgttcctcaattcccaatgcgaacaatttagttgtggcttagaaaaccacttttgcttgctaatttttctaacacttctgagacctgtggtttgggttcaccaagatttttgtgccaccaaatctcgtgttaaagaagtgccgagaactgtgggccttattataaattttttctcacagattgaaaattaagcgccctttgacctttttcctcttgtgttctcgtggaggacatgtgttcaggctgagtgagtctactataattaaaaagggctcttggccatttttgtgttcaccttattccaccttacttgctccgattacgcccagaaaatttcttcataggtgaatcgtgaaagcaatgtgttgacttgaaggacccaggtttgaacggttctacttgttgtttggggaccaagttttgccccttttaattatttttctaacaaatggggcaacaacataggtatcaacacaaatataaataggcccctagaattaggtttttaatggccccaaaacacgataacacatacacacatcaaaataacagataaataaacacaacaacaaatggcgacggcccccatcataaaagatacc

SEQ ID NO: 592477 - DNA, 315 bp, Homo sapiens
gtagatcgatgaggaacagcacactgcaccacttctctgtcatagcaccttcagggatctgtgcaggactcacatttcatgctcaaggaacaaactcattgtttgagtcaggagaatattgcctttctgtactagatctttacctcttctgaaaggttctttacagttaaccaaagtgaaatgtgaacaggaagctagtgctcacagccgaatcagctctggatcaggttcctgccactggtgtggctggcctgtgtgggcctagtacaaatctgtatttatggagcttggatgccgccatctatttgatggtga

SEQ ID NO: 592478 - DNA, 333 bp, Homo sapiens
  misc_feature (333)..(333): n is a, c, g, or t
cttactttgcatagtttcatgagcactggccagaaagatagaaactgccattcaggcctatctgccatttagtaacagtatagccataaagcaaagcattactctggactttattgtcctgtttctatcgaattggactaacatgaatgtaggatactttagaaagcatgtaaagtactagaaacaatgaggtggcttcatttagagctcattctgagacctaaatttaaagggacaggcattacagacaacagagcgtcttcatacctaggagatttgcaaactctgaactaagggcttataagaacaagctgagcgtgttcattgtacatn

SEQ ID NO: 592479 - DNA, 729 bp, Homo sapiens
  misc_feature (1)..(1): n is a, c, g, or t
  misc_feature (254)..(254): n is a, c, g, or t
nggtgtttggctcaggtaggaaaagaggattctggggagtgaagagtcgggagaggagaagaaaatttgatagaaacacacggataatttctcagcggagagcggatatgccgaaagcacacatcgtaaaatgaaagtacgatcagaagaaaaataacagatagccatcataccaagagtcttgaaagaggaagtagacgcaagccgagcaccctaaagacgcagcgcgccgccatagtcgcagaaaacgagtngctcatgcaggagcgagaccagcccattcaaatgttcctttgtagggttataaaaaaaaaaatattcagtgagcgtatcaggtcaccaggtgcccgttacatatgagaaggcagaagcaacgaacgcatgtcactaacgaaaggccacatagcacaactgattgccccaaaagatcgcgaaagatctggagcaaaaaacaaatctggaagagaaaaaaacacacgtacacaaaaggtcaaacgcgttggttcgcccaagtcgaacagatcgccctgagaccaaaagttaaagaccgcgcctccacacctcgtagagccttgggtggacagacgaaacaaaggagtgccccagcccggggggaatcgacgtataaatacaaccaagcgcaggagggggagggcaagcatgacttttacaccaccccacaatgggttgcgcgtgataagatttttgaaaacatctccacacggatct

SEQ ID NO: 592480 - DNA, 409 bp, Homo sapiens
agtacggagatcagaactctggcttgttggacgtactggtaattcctgcaatttcaaccagaatattttcctaaataggtaaaaagctgaccttggaaccctgccagtgaaccttcctcactggtgctccactgatggcacgtggcacgcagaatccatggccacgatatccatggccaccgcttgccatcaccacctcgcgctggctgccgtttagacagtgcaatgcttaagaacaactgtatgcaatgctctcctggctcctcttctcagcccaggtagcagaccaggtcatggctctttcacggaagccattcctctctcataatcattgtagctcaggtgcctgtttaggagacggagctgtagtcaccacaatgattaatagagagtctccgtcgaactgggt

SEQ ID NO: 592481 - DNA, 620 bp, Homo sapiens
  misc_feature (52)..(52): n is a, c, g, or t
  misc_feature (90)..(90): n is a, c, g, or t
  misc_feature (102)..(102): n is a, c, g, or t
  misc_feature (112)..(112): n is a, c, g, or t
  misc_feature (123)..(123): n is a, c, g, or t
  misc_feature (134)..(134): n is a, c, g, or t
  misc_feature (171)..(171): n is a, c, g, or t
  misc_feature (181)..(181): n is a, c, g, or t
  misc_feature (204)..(205): n is a, c, g, or t
  misc_feature (210)..(210): n is a, c, g, or t
  misc_feature (244)..(244): n is a, c, g, or t
  misc_feature (259)..(259): n is a, c, g, or t
  misc_feature (261)..(261): n is a, c, g, or t
  misc_feature (269)..(269): n is a, c, g, or t
  misc_feature (281)..(281): n is a, c, g, or t
  misc_feature (295)..(295): n is a, c, g, or t
  misc_feature (335)..(335): n is a, c, g, or t
  misc_feature (337)..(337): n is a, c, g, or t
  misc_feature (351)..(351): n is a, c, g, or t
  misc_feature (358)..(358): n is a, c, g, or t
  misc_feature (373)..(373): n is a, c, g, or t
  misc_feature (391)..(391): n is a, c, g, or t
  misc_feature (394)..(394): n is a, c, g, or t
  misc_feature (436)..(436): n is a, c, g, or t
  misc_feature (454)..(455): n is a, c, g, or t
  misc_feature (500)..(500): n is a, c, g, or t
  misc_feature (504)..(504): n is a, c, g, or t
  misc_feature (538)..(538): n is a, c, g, or t
  misc_feature (597)..(597): n is a, c, g, or t
cgccctcctcgtacccgtcgcgcccccggagacccgatcccgccccgcgccncagtgccagaggcctgtatacccagcgggtgccgcttntccacccgaggnttccacctcnaacgagccatnttccacgctgnaggtagccagcccaggccaccccgctctcatgacgcnaaaggcggcngctatcagcacggtgcagcgctnnaagtncttcagcctgcgcggccctatgtgctgcaagcgngacctgcgccgcctncnataagacngtgtaccccatngagcggctggtggncgacaagctcattttccacaactctttcttctgctgcaanantcgtcacaccaagntcacgcntcgggcagctacgcngcgctgcacggggagttntantgaaaaccccacttccagaagctgtttaagagcaaaggcaantaagaagaggggtttggnngcaagcagcacaagcgacgctctgggcccacaaggaggtggaccncggnaccaagacggcctgaggcgtctgtaaccttccancccctctgcggaaggcctggagcgcggcaagcgcgggaaggtgggaagcgaggtccagnctggggcttgccgtggggggcca

SEQ ID NO: 592482 - DNA, 230 bp, Homo sapiens
aggctgcagagaagcagtctgagtcaaaactcaacagtagggaagctgacagtgcagccttcagtctgtggccgaagatctaagagcccctggcaaaacactggtgtaagtccaagagtccaaaagctgaagaacttggagtctgatattcaagggcagaaggcatccagcacaggggaaaagtgaaggccggcagactcaacacgtgttcttatcttattttccaactt

SEQ ID NO: 592483 - DNA, 319 bp, Homo sapiens
cgtcaagtaacagtaggcatagagaccaatattacagtaagcaaacacagagaccaacattacggtaggcaaacatagagaccaacattacagtaggcaaacatagagaccaacattacagtaggcaaacatagagaccaacattacagtaggcaaacatagagaccaacattacagtaggcaaacatagagaccaacattacagtgggcaaacatagagaccaacattacagtaggtaaacatagagaccaacattacagtaggtaaacatagagaccaacattacagtaggcaaacatagagattaacattacagta

SEQ ID NO: 592484 - DNA, 761 bp, Homo sapiens
  misc_feature (510)..(510): n is a, c, g, or t
  misc_feature (518)..(519): n is a, c, g, or t
  misc_feature (522)..(522): n is a, c, g, or t
  misc_feature (534)..(534): n is a, c, g, or t
  misc_feature (541)..(541): n is a, c, g, or t
  misc_feature (543)..(543): n is a, c, g, or t
tcttgttggtcgtctcttagaggatttctcccggaacctctgctcagcctggtgaaccacacaggccagcgctctgacatgcagaaggtgaccctgggcctgcttgtgttcctggcaggctttcctgtcctggacgccaatgacctagaagataaaaacagtcctttctactatgactggcacagcctccaggttggcgggctcatctgcgctggggttctgtgcgccatgggcatcatcatcgtcatgagtgcaaaatgcaaatgcaagtttggccagaagtccggtcaccatccaggggagactccacctctcatcaccccaggctcagcccaaagctgatgaggacagaccagctgaaattgggtggaggaccgttctctgtccccaggtcctgtctctgcacagaaacttgaactccaggatggaatttcttcctcctctgctgggactcctttgcatggcagggcctcattctcacctctcgcaaagagggtctctttgtgtcantttttttnnatntaaaatgattgngcctctncnaaaaatcacgagatatgcacgacaacccggagacagggtcctttgggccccgtcgttttttacaagaccgttgttgtgcccgtattctcagaaggcgttactgaccgtcaggattgcgggcgtgagtgaccatcgcgtacacaggcctggaatccagttgggggctgtttcgaagacagaagatgatcggtgcatctggagcttgacccgcctggaag

SEQ ID NO: 592485 - DNA, 106 bp, Homo sapiens
gaggatccccacctcctaccccacgcaaacatatccttgtagatggagatactttaatttatcatggaaactctggtgaagttggctgctacgtgtgcttctcgac

SEQ ID NO: 592486 - DNA, 100 bp, Homo sapiens
tttctcactccccacgacccttcacggagacgctgacagagagcatgctggacagtgcagaactgaaagagcagattcaggcgttgatgagagagaacag

SEQ ID NO: 592487 - DNA, 823 bp, Homo sapiens
ctggcgttcatccagctgcagcaatgcgctcaggatctgctgcaacgccaagctcaacctcacctcgcgggcgctcgagccggcaggtaatgagatgtgcatacccgcccaacggcgtggagtgctacagctgtgtgggcctgagccgggaggcgtgccaggtacatcgccgccggtcgtgagctgctacaacgccagcgatcatgtctacgaagggctgctttcgacggcaactgtcaaccttgacggcagctaatgtgactgtgtccttgcctgtccggggcttgtgtccaggatgaattcctgcactcgggatggcagtaacaggcccagggtttcacgctcagtggctcctgttgccaggggtcccgctgtaactctgacctccggaacaagacctacttctcccctcgaaagtcccacccctttgttccgggctgccgccctccagagcccagcgatctgtggactcaaacacatctgtcaccacttctaccttcggcccagtgaggacccagatccagcagcaaacccatgccagcgccaatcagtcagactcctgagacagggagtagaacacgaggcctcccgggatgttggagcccaggttgactgatggcgccgttgggccacccaggaccgtggcgattcaggcagtatcctgcgaacaggggggccccatgagcccatagtaagggctgtgtggttcccaccagctggattgcagccttctgttggccgtgcctgtggtgtctacttgtgagcttctccactggaatttcctctcacctatctttgggctggttccctcttctatcacttg

SEQ ID NO: 592488 - DNA, 756 bp, Homo sapiens
ggcagtcatgatggacgtatgagagttgagccgctgtgagagcgatgccgggctcaggcgaggacgatgagagagggcggggcgggggccggatcccctctcagcgccgtgtgagcatccgcgggggcagcgccctcggggagccggccggctgcggcggtggcagcggcgggtcgctcgcctcctcttcgtcttttctaaccgtgcagcctcttcctcggcttctcctgaaaggggaaggtggaagccagtgggctcggtgcgggagccggctgaggagcgcgctcgtgctggtcggctggggacctcccggtcctggagcggggcgagggagaaccggcggtggccggcgtgcggcatggaggtatgcagctccagggagaggggtctgagtctgactgttcaaccatattccagcgctgggaacgccggagagttcggtctctcccccttctactgcctccaaacaacgagctgtgcggatggccggccggcaacatcacagggaccctggggccggtattcaaacctcccgtacagccagggcgcacagaccacaccgatgggcacgggacttccggaggacagccgggtcggatggcaagccgttaggaggattattcgacttcatccaacattcctgctgccggccgattcgagggctttggttgatgaggagaagcaggccagtcgtgcaaccactcagcaacagagaaaaaacaatacaggtggagcaaacaaggttgaaaagaggga

SEQ ID NO: 592489 - DNA, 1256 bp, Homo sapiens
  misc_feature (168)..(168): n is a, c, g, or t
  misc_feature (259)..(259): n is a, c, g, or t
  misc_feature (297)..(298): n is a, c, g, or t
  misc_feature (319)..(319): n is a, c, g, or t
  misc_feature (367)..(367): n is a, c, g, or t
  misc_feature (615)..(615): n is a, c, g, or t
  misc_feature (633)..(633): n is a, c, g, or t
  misc_feature (706)..(706): n is a, c, g, or t
  misc_feature (708)..(708): n is a, c, g, or t
caaagatgcagatctgaactctatgtttctaccccatgaaaatgggctttcttcggctgaaggagactatccccaacaggccttcacaggcatacccaggtcaagagaggatctacatttcagaatacctacaacttaaaggatatgcaggagaagcaatcagtttgncagtgggaaaataaaagaattttcctttgaaaaactcaaaaactctaaccatgcagcttacagaaagggaaggaaagttaagtctgactcntttaataggaggtcagttgatttggacttgctttgtgnncattataacaacgatgggacnccccatcctttggtttactgcggagttcctcagttgaggaaaaccttntctcatagaaactcactggatacgaacctgacttccatgtttcttcaaaacttttctgaagaagacttggttactcagatttggaaaaacataaaatagataatttttcttctgggacagacataaagatgtgcttggacatcttattgaaatgctccgaggatttaaagaaaatgcacagacatcataaaacaatgcataaagaaaaaatcaggagtagcatcagtgaaggaagtggtaatgatacnatttctagctctgaaacngtctatatgaatgtaatgaccaggttagcatcctatctgaaaaagttaccatttgaattcatgcagtctgggnantaatgaggctcatacattgtaacagacactgatcagtcaatatgccatagcattacaacttagtactcgcccttcttccctctaaggtgttgggtggctactgtaatcaacgcccgcatataatatgaatgatgttggtccgacgcgtcgtcagcgttcttgactcttaggacgatgtcgagaaaagcgtattgaactggctaaagatgacagagcgctaatgcgtaaggaagatggacaacgtagtgacagatccgattcgcaacacaactaccacacatagttccctctgattagtacactctgatgagagtaggaatgatcctacggaaactctaataacgccgtccaggggtccgaactctagcgagtgcacttcaagccactgaaaatcccttctaggatacaactgttttcctatgcgttggacgaacttttaagtgggaaaagcttcttgaatactttgacaagaaggaagtcaggaatggaataacagagaaagcacttgacgtaataaaagggagcaaaaaaacgaccagaacgagatg

SEQ ID NO: 592490 - DNA, 315 bp, Homo sapiens
aaacacccaatgaaccgatgccccccagattaatggtagacaccaaccgaaaatgaggctagacatctgatacacatagtaacacgtagggcacatgcacacacacatgcacgacatggggagtgtacacttactgacctacacgagcatcaggagtatcattaactctaaatgaatataaggttgaaccacatgaaatagctgacatttgcccacttaaaggtgataacatatagattcacctaacctcatagcatactgaactggacactcaggagcaaactaggaaaggctaccctgtaaggcagaagcata

SEQ ID NO: 592491 - DNA, 377 bp, Homo sapiens
gcttattaaaccagatttattctccacaagctgaagatacctgaggttacatgaggactggcattaaataatttataaatgtatttttgactgacagacttttatcataaggattcatgtgtttacaaaagcaaaatccaacctttccagagctagaaagtgggaaggtgcccggtctgcaagcacagccttgggggaggatgaggtcacataaacatctctgtctacactcttagaatgccctaagatgtatttaactccgcaatgacaagccttgtgggaaaacctgaaccgctgtgtggacttgcaaagtgcagatccaatcgcactccgtttcaaaattttcatttggaggcactgtagggcttctgaaagcg

SEQ ID NO: 592492 - DNA, 190 bp, Homo sapiens
  misc_feature (71)..(71): n is a, c, g, or t
tatctctcaatatagacccatgtttgcatttactcccaattgagttgtgctttgcctggagcaggatctgntacccttaagacaaaattttattcccccttgagccaaaggattccttacatccattgatagaccaaaattccagtcatcagaccttctgcctgctgtacagcctgctctatttttcctt

SEQ ID NO: 592493 - DNA, 213 bp, Homo sapiens
tgatgagctggaccccatgcaggagtgtagtgatgcatctcagttctcttcactccgcctccgggctcaggtgatctctcacctcagccccccaagtagctgggactacgagcacatgccaccaccctcgcctaatttttgtattttttgtagagatggggttttaccatgttggccaggctggtctcgaactcctgagctcaagcggtccac

SEQ ID NO: 592494 - DNA, 132 bp, Homo sapiens
tgtggaacctgcaccaacccccatcgctgccccagtaacagtgccagtggtatggaaacgaaagcagaagccaaagcacctaaggcaagaggctgccaagccaaaaggtcctatcaaaggtgtacccaaaaa

SEQ ID NO: 592495 - DNA, 329 bp, Homo sapiens
ttccatttcacctgctacttaacctgtttagaacacacaagtctaggccaggcgcggcgtctcacggctgtaatcccagcacgttgggaggctgaaggcgggtggatcacctgaagtcaggagtttgagaccagcctggtcaacatgatgaaaccccgtctctactaaaaatacaaaaattagctgggcgtggtgtgcgcgcctgcagtcccagctacttgggaggctgaggctggcggatcacgaggtcaggagatcgaggccatcctggctaacacggtgaaaccccatctctactaaaaatacaaaaaaattagccgggcttggtg

SEQ ID NO: 592496 - DNA, 148 bp, Homo sapiens
tcgagcgtgaaaaaatgacaagaagggtggagagaagttctgtacgaaagtcaaagaaatggtctgacccaaggcgcagtggtgtcgaggataatgggaagaggaggatgcaacatcactgcactacaggatgttactggtgcccata

SEQ ID NO: 592497 - DNA, 221 bp, Homo sapiens
  misc_feature (170)..(170): n is a, c, g, or t
cttaattgcggtgcctttccaacacaaaggtgttgtgatatctcaacccgggaaacaaggagctgaaagtggagtctggttcagccccgtgcagactcaaccagagcttaacgttgtctttcaaacaccctgaggctttctaaacaggcagtgcagacgttctctctggnggcacaaaggccctcgggtcctccccggttcccctggttcggatggcataa

SEQ ID NO: 592498 - DNA, 187 bp, Homo sapiens
accctaactgtagcacagaccttttgtcctccttctgccacctccacatcctggctacatccacttcaccagatttatcttcctacacatcagcaatcttacaacaattgcctcatcaaaaaccttccatgtggctggttacagtggctcatgcctgtaatcccaacgctttgggaggctgaagcag

SEQ ID NO: 592499 - DNA, 409 bp, Homo sapiens
ggactgagtactgagatatagagaacagtaccccaatcaacatagacccgggccggtagatacgggccgacactgaacgtcgtggtccagggacctgacagttaccaggctgaagatgagaagcagagggacaaggtgtcatccaagaattcacttgagtcctatgccttcaacatgaaagcaactgttgaagatgagaaacttcaaggcaagattaaggatgaggacaaacagaagattctggacaagtgtaatgaaattatcaacgggcttgataagaatcagacggctgagaaggaagaatctgaacatcaacagaaagagctggagaaagtatgcaaccccatcatcaccaagctgtaccagagtgcaggaggcatgccaggaggaatgcccgggggtaggaggt

SEQ ID NO: 592500 - DNA, 130 bp, Homo sapiens
  misc_feature (12)..(12): n is a, c, g, or t
  misc_feature (47)..(47): n is a, c, g, or t
tcagctcgtacntccaagaagcaccgctgacacactgttcctgctgnccggcagacacagtgctcacgcctgacttcctgaaccgctgccgcatgcatgcaatctccggctgcaggcttctttcccatgc

SEQ ID NO: 592501 - DNA, 115 bp, Homo sapiens
  misc_feature (40)..(40): n is a, c, g, or t
cactttctagctgaggttatctagaccttttgttacttcnctttccaggtactccttaatgactttacgaagttcttgtctgttaaatgcaagttggtaacttacttcctcctct

SEQ ID NO: 592502 - DNA, 685 bp, Homo sapiens
cggccattatggccgggtacaggtatatggagaaaaaaagtcagtctaataaaatcctagacagaaaaaaaaaaaaaaaaaaaaaaaaaaaaaaaaaaaaaaaaaaaaaaaaaaaaaaaaaaaaaaaaaaaaaaaaaaaaaaaaaaaaaaaaaaaaaaaaaaaaaaaaaaaaaaaaaaaaaaaaaaaaaattggggggccccaatgccaagcaaatttgaaaaatgggccttttttaaaggggggccaaaattaagggcccttgggaaaaaaaccccttaaagggggaaaaccaaaatttaaggggcctaatttaaaaagggggaaatgggaaaaacccgggggggcaaaaaataaaaaggcttggaaaaaaaacccttttcaaaaagtggggaaaattaaaaggggcccgaaaatggaggcctttaaaaaagggggaaaattggggtggaaattgggaaaattgagggaattttttacccaaaaaaccgggatgaatattttgaaaaaaaactaattttttaaacacggggacggattggggaaaaacccctttggaaaaaaaaaataacccgaaaaaagggggggtggtacctaatggggaaaaaaagccccttttaagaaaagggggccctttcgtgaaaagggggaaaaaacagtttttggggggaggggccccaaaaaaa

SEQ ID NO: 592503 - DNA, 925 bp, Homo sapiens
ggggtcaccagcagctgtacggtggagccacccggcgaaaattcgggccatggttctcgtctcattgttcgtgtctgttcaaactcggcacggtctgatccggaaatatggcctcaatatgatgccggcagtgtttccgtcagtacgcgaaggatagtcggcttgtcattaagttggactagatgctcttccttcagaggattatccggggtcatcgtactcaatgataaaaccagtgataattcttgctatataaaataaacatgtgaggaaaaatgaacaaatcatagccaaaagagactcgcgaggggcgcattaactatcgggtgcgggagcacaaaaagggtgcttcgcaattgggcgtcatgcgggcatcgtccagagtctaactgagacaccaccctttcttcttgcaaagtcgagagagaggaggcaagccaaggcgtgccttctcatatgtggggggaccgaatattaatcctggaagagcttgaaggagagaacccgtgacttacatgccgaatcccgtgtgacattcgccaccccatttccccttttgaacgctcccgggaagggtggaaaataaaattccccaaaaggggtctctgccggcaagggctacgaccatttgacaattcgaggaccctaaagcggagtagctaccggaggatccggtccatctgacttttggtgaaagcccataaaggaaggccactggacactttctaacgcgtcattggaagggggtcccaattcaggacggaagaaacacttttcaacggaaaatggtctccacacaaaaaaacgcaaccggacgcaatatccccgttaacacgggactacaacagaagcacacacacgaaacgaacacgaaaacacagacggaagaaatagaggccgcaccacacagaaccaagcacaaaaa

SEQ ID NO: 592504 - DNA, 729 bp, Homo sapiens
gcctggctgggcttcctggcagagctgagctggggcttcctgtgagaatgacctggggcgctgagtgaagtgctgctgcgtttgtcgctgccgagctcgtgtgcctcagctgtgccctgcaccctggtccccgaccccccgtggccccgagtggctgccagatcagacttcgtggtcctgccctccggaggagcagcctcgatggctggtggttttcatgagcatgtgagtgcctgactgttttcttgctgcatttgtgaatgatgccctgcctgtctgcagtggtgcctggaggaatcacttggtggatgtgtgtgcacagtgcactgaacatgtgctggtgtgcctttttgacgtgccttctttgtgtttcatgccaatggtgtgcttgctgctagcatgcccttgtgtgttgcccttggtgccatgtgcatggcgatcccctgcttccccttgccaccggtttatcctcttggttgtcttggtttcttgtcccctggtgtgcatttggtgtttcacagtgaatcccattcctgccaaatgtgccccttagtcattttggccttctgactccagtgtatttttgtggtgacacttgacaaatgtcatcccctctcaggagagttgtgcaacttggccagccaatttccctggagccattcacctcacccactctgtggccacttcattccagcagttgcaccccagcgtcaggcctactcaagttca

SEQ ID NO: 592505 - DNA, 844 bp, Homo sapiens
  misc_feature (114)..(114): n is a, c, g, or t
  misc_feature (125)..(125): n is a, c, g, or t
  misc_feature (168)..(168): n is a, c, g, or t
  misc_feature (176)..(176): n is a, c, g, or t
  misc_feature (234)..(234): n is a, c, g, or t
  misc_feature (360)..(360): n is a, c, g, or t
gtcgcgtacccgaagaagtacaagcatcgtaaagcgttggagaggtgtcaccggacacggcggcgacaggtgtgttcccttaacgtacagttggatagaaaatcaagtatattntaaaagaaggnatgtgggatcaaggaggacagccttggcagcagtggcccttgnaaccagcnacaatggatgcagtcattccagcaccaacaggatccaagccagattgattgggctgcnttggcccaagcttggattgcccaaagagaagcttcaggacagcaaagcatggtagaacaaccaccaggaatgatgccaaatggacaagatatgtctacaatggaatctggtcaaacaatcatgggnatttccaaggggattcaaacttcaacagaatgtggcaccaggtttgtagtatatgtagttcacaatcttcagacttttaaaaaacagaatgaagattattattaaattatttaatacgcttagttgtatgacttctggaaattaactgcttcttaaagaataggcagttttcaatatgattagactttgacattatgtggtctaacaattattctgtactcatcctgctagcttcgtggcactcagcatcgattctttatctaggtaacatcattcctaggctgacaggggctgagaacactctggaaacctcacttggcatctagggaagagagcaattcttgggactctctatagcaaccctctggcccttatcagaacgctgcaactgggcagagtacaacatgtctagcctctaacttacaagaacagtcgtgtccactgatgtgaacaaatgagtgaggcaagtatactcatgcccata

SEQ ID NO: 592506 - DNA, 396 bp, Homo sapiens
tccctgatgaacaagaaggaggtggtggaggctgttgaccatgtagagacacaaccatggtggtagtgggcattgtgggctaacgtgggaaaacccctcgaggcctccggacattcaagaactggacataggcatgagacacatcagtgatgacatgcaaggagagcgaacgtatcaagaactgggcatgaaatctaaagaaagaaggccaagaccaaaggtacctggcagacgaaaacatgggcagggaactgagggcatgggcaaggaaacgccacgccgggagggagggaacatacaggcaaggatggacggaaggtactgggcaagggccatgccggggtcatagggcccagaacccagatgcgccatgaagcacgtcagggagccaagaag

SEQ ID NO: 592507 - DNA, 290 bp, Homo sapiens
caacgctacctcttccctaaaaaaaaaaaaaaaaaaaaatacaaaatttagctgggcttggtggcccatgctttgtaaatcccagctaactcaggaggcagaggcaggagatagcttgggagtcagaggttgcagtgagccggagtttgctgtgagccgagaccactgcactccagcctggtgacaaagcaaaagtccgtctaaaaaaaaaagggtgctctttggcccaaagtttaccctaaaattggtgaacaacacatgggcaggttaggaaaaaacggggggccgca

SEQ ID NO: 592508 - DNA, 311 bp, Homo sapiens
  misc_feature (32)..(32): n is a, c, g, or t
  misc_feature (89)..(89): n is a, c, g, or t
  misc_feature (176)..(177): n is a, c, g, or t
  misc_feature (183)..(183): n is a, c, g, or t
  misc_feature (214)..(214): n is a, c, g, or t
  misc_feature (220)..(220): n is a, c, g, or t
  misc_feature (242)..(243): n is a, c, g, or t
  misc_feature (247)..(247): n is a, c, g, or t
  misc_feature (272)..(272): n is a, c, g, or t
  misc_feature (282)..(282): n is a, c, g, or t
  misc_feature (286)..(286): n is a, c, g, or t
  misc_feature (292)..(292): n is a, c, g, or t
  misc_feature (295)..(295): n is a, c, g, or t
  misc_feature (311)..(311): n is a, c, g, or t
gaagtatgttttccattcatttcagtccatgngaaaacacattgcagtcaaaattaaagatatccatccataaattacttttatttctnattaaatgggcacagaatcattagtatattaataacagatatgtttattattacatatccatcagtgcggctttcaataccacttgnnacatgnatatcatcctagagacgatcggttttccagngcttcntatctgatacacattactgccnngccnttttttttttcttttttgttttttngttaaggggntagncgatangtnatgctgtgcatatgan

SEQ ID NO: 592509 - DNA, 460 bp, Homo sapiens
cgcgattttcttccccagtttcttggaaaataaaaaaaaaaggtttgccagtttaatttttcccaaattttccttttttggaccttttttttctaaaagggtcctgggtcaattgggcaccataaaggttttcaacaaagggggtgccctctccggggtcacaaagaaggaaccccttaaactttccaaggccggggataagggtttgttgcccagtttaaaaaaaggactcaaaccgctggggccatgtttttaaaggccaaccccatttttttccccccaggggaggcattaaccaaaccctttgtttttttaatgtttggccaaaaaacccagtttcccctttttatgggaaaaatggtgaatccccccccaaaaaaattgcctttgtggggctgaaacccttcccctcattcctgggcccctccctggttgaccttaaaaaaggggttggctgggg

SEQ ID NO: 592510 - DNA, 374 bp, Homo sapiens
cggcgtggcggctcacgcctgtaatcccagcactttgggaggctgaggcaggcggatcacatggttaggagatcaacaccatcctggctaatatggtgaaaacccgtctgtactgaaaatacagttagcccggcatggtggcacacacctgtagtctcacctactcgggaggcgtgagcaggagaatcacttgaacccaggaggtggaggttgcagcgagcatcactgtactctagcctggtcgacagagcaagactccatctcacaaatgcaatccacggaagcaaccacatatcctctggaagctaacagaattgttaaagaagtctcaaagttaaagcaacgaacattctcacagagccaggcatggtggt

SEQ ID NO: 592511 - DNA, 525 bp, Homo sapiens
  misc_feature (132)..(132): n is a, c, g, or t
  misc_feature (143)..(143): n is a, c, g, or t
  misc_feature (186)..(186): n is a, c, g, or t
  misc_feature (194)..(194): n is a, c, g, or t
  misc_feature (252)..(252): n is a, c, g, or t
  misc_feature (378)..(378): n is a, c, g, or t
agtgcgtggcgggggtcccgaactacagtggggcatacataatctgctgctatgcttcgaggctgtagtctgaagtcaacctaagttttaaacagtaaggtgaacctctgagatagaaaatcaagtatattntaaaagaaggnatgtgggatcaaggaggacagccttggcagcagtggcccttgnaaccagcnacaatggatgcagtcattccagcaccaacaggatccaagccagattgattgggctgcnttggcccaagcttggattgcccaaagagaagcttcaggacagcaaagcatggtagaacaaccaccaggaatgatgccaaatggacaagatatgtctacaatggaatctggtcaaacaatcatgggnatttccaaggggattcaaacttcaacagaatgtggcaccagattgggaatgcatcagcaaccccacaccccctccagatcagccatggatgccacaacacaggccaatggacattttcctcttcttgaggcagcacagtaggcagtg

SEQ ID NO: 592512 - DNA, 214 bp, Homo sapiens
  misc_feature (8)..(8): n is a, c, g, or t
atcggggntggggatgtccgcggggtgagtacgttattgttacaaacactgtttggtctccaaagtgacagtcccggctcctgcctgtgaggaggtacggccgggcagccgcgtgtggctctggtgtggactgggcggctccacagtatcccctcaggatcagtgcttgtcctctggtttctgagctttgtcctgcgggtggatgccgtttgca

SEQ ID NO: 592513 - DNA, 612 bp, Homo sapiens
  misc_feature (116)..(116): n is a, c, g, or t
gccaatcctctctgtatcttcctccctcaaaccctaatccccgtctaatcaccgagaaataccagataaatctccattgggggctattctataaaatgtctgacaagcacttcttnacattgtcctagtcctcaaaaccaagagaagtcctaggaagtgaaatctggaaccaaaaaaagacactagggaacaattagcgaaatgggaataaagtatgtagttaatagtactgtaacaattttgtttcccttaattgtgacaaatgtaccattgtaatgtaggaaattgaacaggagaaactgggtgaggtatactctgtatactagcttgcaacttttctgtaactataaaactattctaaaataaaaagtttatctaaatagacaagttagggtaagggaaataaagtatatatggatcaaaatcccttagaagcaaataataataaacattcttttgatccctttatattagtggcaggacagggatagccttctcatttagaggatataaaattattaataaaacaatactataagccgggcgtggtggttcccgcctgtaatcccagcactttgggaggctgaggcaggcggatacctgaggtcaggc

SEQ ID NO: 592514 - DNA, 283 bp, Homo sapiens
  misc_feature (176)..(176): n is a, c, g, or t
  misc_feature (245)..(245): n is a, c, g, or t
  misc_feature (261)..(261): n is a, c, g, or t
  misc_feature (275)..(275): n is a, c, g, or t
tcactcctctgaccttgacccacttaggtcctgtggtcacttatttatttatttatttattttactttaagttctgggatacatgtgctgaacgtgcaggtttgttacatgtgccatgaaggtttgctgcacataccaacctgtcatctaggttttaagccccacatgccttaggngtttgtcctaatgctctccctccccttcccccaccccccgacaggccctgggtgtgtgatgttctcctncctgtgtccatgtgtnctcattgtttcaanttccactt

SEQ ID NO: 592515 - DNA, 376 bp, Homo sapiens
ttatcagcccattccaaaaaaggagctaggtggagatagcaagtaggaaggacatccctgtgcggatcttcacgtactccccgatacccttgagctatggctgcttggtggaaataggcagcacagatgcacttcctgacgatgtcccagtcagtgccacacgaggccaggctcatccgctgctgcaacatgatgtccttgagttgagctcgcacctaccggacactagggcaggagacggaggcaacacaggagggagccatccatttaaatcatcgaccctcccctcataccaacatcctgctcatccaccactctaacttccgcattcccttagcatgaatgaaatgatcgtaaaaccaaatgatgaagtaat

SEQ ID NO: 592516 - DNA, 552 bp, Homo sapiens
  misc_feature (4)..(4): n is a, c, g, or t
  misc_feature (39)..(39): n is a, c, g, or t
  misc_feature (78)..(78): n is a, c, g, or t
  misc_feature (90)..(90): n is a, c, g, or t
  misc_feature (109)..(109): n is a, c, g, or t
gtgntgagttcgcttgggtcgggcattgggtttcctggngggtcggggtagtggttttgggtttagtggttggggcantgcacaatatantgggtagtgagcgaggagntgttccctaatagtgcgtatgggcttgatggcgaggtccctaaggataaggaaggaggcgtgtttgattcggggcccttcattgtaggtgagtgagacaggggcttcgatttggtcagtacacagcagcttgtacagtggttaacaactcaggattggctgggcacggtggcttacgcctgtagtcccagcactttgggaggctgaggtgggcagatgacaagttcaggagtttgagaccagcttggtcaacatagtgaaaccccatctctactaaagatacaaaaaaatagtcgggtgtggtggcacgtgcctgtaatcccagctactcgggaggctgaggcaggagaattgcttgaacccaggaggcggagattgcagtgagctgagatcgcaccactgcactctagcctggtgacagagtaagactccatctcgaacaac

SEQ ID NO: 592517 - DNA, 223 bp, Homo sapiens
  misc_feature (10)..(10): n is a, c, g, or t
  misc_feature (26)..(26): n is a, c, g, or t
  misc_feature (30)..(30): n is a, c, g, or t
  misc_feature (51)..(51): n is a, c, g, or t
  misc_feature (76)..(76): n is a, c, g, or t
  misc_feature (195)..(195): n is a, c, g, or t
  misc_feature (198)..(198): n is a, c, g, or t
  misc_feature (200)..(200): n is a, c, g, or t
aagctaatangttggttgctggtctntagntagacacaactcatgaggctncttggttcttcgtgtagtccaccgnccatggtatcacactgttgaagtaaactcatccagaaacacccttgactgaaccgagcccgatcaggttttagacgatcgaaattaagaggaaagagtaattactcctccaagacaccnaantncaggacacttagtgatcacttaa

SEQ ID NO: 592518 - DNA, 281 bp, Homo sapiens
taggggtaatgaaaaatgtaaatcccgggtatccttattcccccccccggtatcatattatttcattttccccaaagtcctttaattttaactgaaccccagcaggatttttagaaatttttctttaacaaacttggaagatgatttatccagctgaactgtctttagaggtaattattgggaaggtctgttttattttttcaggggggttcacagggctttgatgttcagtttgtatttttggaattgctttacttagaaattaaaacagcccaccatta

SEQ ID NO: 592519 - DNA, 930 bp, Homo sapiens
ggtaggtgcttccggacattcatactgaattcgagtcacactgttcgcctctgatgtgccattcctgtggctgtgtgtctcgcactccacgatgagtggcggcgcctgcctcgttggatagatcctctgtgagatgatcgcactacaaattgaggtcagtagaactccttgtacatccgctggatagttgacagaacggtcctcctgagagatccagtgaagatagcaatgtcactatgtgatgattaattgtctcgtcatgtatgtaccctagtcgtagaaaacgtgttgctgaagtatgatcccctgtaatgaatcggtaggatgcctttggaacatgctgtgtagatgcagtcgtcatgtagtttcagaagtgccatctaagcgaatatagcctgagttacaaatctgcgtatgcagcagtgggtgtacccttgtgggataacatgtgactctcttgtgccctgatttgaatcgtaacggcgtgaacatccttgggaaccatgcacgtactgccatgatccagagcaggcccttaccggggagtccacgagggttcttgagggtgaactgagccccaggggacagaggcgaacgcagctcatctcacgtggatggtcatctttatgatttaaccctagcctaaccaaatgatcgtcgtgggataacacagatatctcctctgggctgtgtgtgaatcattgccatccccatgcactcaacgtgggagctcactcagatgtggtttgatgtggtaggagtgcctgcctcggggcagttctggcacattgctgtggcaccatcgaccctgtgaacaaccatgggaggttcactgctcttgattcttgtacttctacgcgaaatcctgcacggacattgcaacaagacacgaacagatgttgcagaaaaggcggttacccaaggtggata

SEQ ID NO: 592520 - DNA, 275 bp, Homo sapiens
  misc_feature (246)..(246): n is a, c, g, or t
cttttttaaaaaaatcaagtctaggtcggtcgctgtggctcacgcctgtaatcccagcactttgggaggctgaggcgggtggatcacgaggtcgggagatcgagaccattctggctagcatgatgaaaccctgtttctgctagaaatacaaaaaaattagccaggcatggtggcagatgcctgtagtcccataatgctaagattacaggcatgtgaatgcttgagattacaggcatgagccaccgngcctggcccatcatccccttttgaaggtt

SEQ ID NO: 592521 - DNA, 101 bp, Homo sapiens
gcggccgcctactactactactactgctcgaattcaagcttctaacgatgtacggggacatggagggagtttcattaaatgctaactactttttcaaaaaa

SEQ ID NO: 592522 - DNA, 290 bp, Homo sapiens
  misc_feature (58)..(58): n is a, c, g, or t
  misc_feature (116)..(116): n is a, c, g, or t
  misc_feature (126)..(126): n is a, c, g, or t
  misc_feature (139)..(139): n is a, c, g, or t
gccgtagtggccgttctgcgtggcggccggcggggccaccggcggcggaaagacgacncggtgggggcgtcctcatcccgctctggccacagacccgggttcgtgtcgccctcgtnctcccgtccncgtcgggggccgncattcggggggcccggcccatagaagtctaagccgttgcagtcgcccgcgccacggcgccacagcggcgcacggcctccttggtggcatccaggtcatcatcggacgccccaaaggcggaccacgggaagctggcagccggcggcggtcgc

SEQ ID NO: 592523 - DNA, 329 bp, Homo sapiens
  misc_feature (2)..(2): n is a, c, g, or t
gnagtgcaatggctgggaaaggcatcaggtaggagtgagcagacctggaagacaaaaattaagataaagaggctggccggagtgcaatggctcatgcctataaccccagcactttgggaggccaagggggggcggatcaaaaggtcaggagatcaagaccatcctggctaacatggtgaaaccccgtctctactaaaaatacaaaaaaattatccgggcgtagtggcgggcgcctgtagtcccagctactcaagaggctgaggcaggagaatggcgtgaacccgggaggcggagctgcagtgagccaagatccagccattgcactccgg

SEQ ID NO: 592524 - DNA, 963 bp, Homo sapiens
  misc_feature (206)..(206): n is a, c, g, or t
  misc_feature (307)..(307): n is a, c, g, or t
  misc_feature (410)..(410): n is a, c, g, or t
  misc_feature (518)..(518): n is a, c, g, or t
  misc_feature (951)..(951): n is a, c, g, or t
gacaagccaaggccggagcggttaaggaggacactggtctgcactgtggttgcaaggaaggtggatgtgagagacactacccttatggttctctagaagcaatcccatcgcagctagcatcatgctgtcccctcagagagctttactctgcaaactcaacaacatcaacctccagcacgtctccctgggcctgcacttgtcccgcngtcatgagctacaggaggggcctttgagcacacaccctcctccaggagaaactgggggcaaggagagcaggggcccctgcagtggcaccctggtggacgcnaattccaacagcccagctgtgcactgccggtgctgccaggagcacggtccgggcctagaaaacaggcaggacccgtaacaggaggaagagggggctgcatctncctaagaaacaggctgctcctcctcactcagctcctgctcagatattagcaccgatgagtcaactgtctaagtctacttgcgggaactccatggtgatgaggatgcanacactcagcccagtatcatacacctggagcagggctcacaaatggattaagaaggaactggaacctgctcacaggacagcttctgctgctctaatgattaatgctcaggagcttattcttcaaaagatcatggcctggactcgaactgcaacgcactgaacacatgccaggacgtcccttccccaggcttggaggaagaggacgagagggcggagagggatctccctacctctgagctcttagaggcggatgatgggaaaatcgacgctgggaaaacggagcccagttggaagattaacccaatttggaaaattgacacagagaaactaaagctgaatggaaaccactgaaacaataacactggttggaaaacaacgggatgttaatctagctggaaagtgaactgaaaaatcgatttggttggaaacaacanagaataactgat

SEQ ID NO: 592525 - DNA, 1037 bp, Homo sapiens
  misc_feature (311)..(311): n is a, c, g, or t
  misc_feature (402)..(402): n is a, c, g, or t
  misc_feature (490)..(491): n is a, c, g, or t
gtcctccctgcgcggacaccgtcgggcctcgtcgggagaccggctcaaggactcgggctccgtgcagagactctccacctacgacagatgtgcccgctgcctggtgccttgtctccccgtgctagtacccatgcctgtgcgccatgtagtgtgccgtggtcctgggtggcctcgttccagctgcagctcagtcaggctgggggtgctcacatcatgctaatgctgctactgcgtcgctgcacgccgcctaggcgacatcagtctcgccacgcgaagttcgccttgacacgacctgatccttgtgcgctccntgcgcaaggcccgtctccccggctccgaccatcgcatgccagagctgacgagcaccggccaaatgatctcacatggtacgcttaggcaccnacaaagcgactgcgacggacgtgcagaggctggcagagtgttcccgatgcagagcaagcatacgcaccaggtcgatgccggagacganngtccccacgcctggtggaaacactgctgcggccggcggtcctgaatggccgttaatcaggtggtctgtgtcgacgtggatgcttcaagtggtcgcgacgtcttagtgcacgccaaggcaggtagcgtgaggtaccgaggagcgacgtgtgcaaaaggaagtcgagatgaacgggaagtgtctgagcctggagaaaacatcagaattgtccctggttcatgccacgagaggatacttgtgacccacgcgaacacatgatgcaaaatgacgatcaatggcttcggagacataaaaggcttgccgagaaggtcttgacaccggggtcgctgggatcggatagccgcgagcatggatggaaacccatgcctgtattgcaggatggggcgcagaacttgggacgcgaggttttatctctccgaaccccttaagggaaaggctttgacctgtttgtggggcaaaatggttgccaagggccccccgaaacgtaaaacaacgaattgcgcaggaggctccactttcttgttaccacgcgtctggctggtctcag

SEQ ID NO: 592526 - DNA, 272 bp, Homo sapiens
tgggtgactctagattatcccaaatctctcattgcggggggacgtgatcgcggaatgttgtccgggtgttgtgatgccccggtccctgctattggagatggcacttaggcaaatccgggtgcgtgattcaagggtgtggggcgagcgactttaggtcgcgaagcaattggaagtggttccaagaaaagcctctaagcttcagtcatacgagaccgtaccgcaaaccgacacaggtgggcgagatgagtattctaaggcgcaatgagagattg

SEQ ID NO: 592527 - DNA, 535 bp, Homo sapiens
tgtgacgccatcgtgcaaccagcgccccatccacccagcacggtcccgtcccgtcagcagcctcggcccgggctcaggctccaccaccacttcgcccgtcaccaccagccgtccccagcgtgcagcccatcgtcaagtcggtcctccaccgccaccaccgcaccccccagcactgctccctctggtcctgggagtgtccagaagaacatcgtggtcatcacgttcccgccgaacaggggagggcaaaggaggcgccccacgcatcccgatccttctgcacagttgcctcacgcaccggcatcgtccccgtccaccagctacagcaggcagtgccctttgtaggggggaagcaggaggctggggacagtccccctccagctccagggactccaaaagccaatggctcccagcccaactgccggctcccctcagcctggctccgtgatgctccacctgccagcccccggataccacacatgcagacacgacacacgtgacgacaacatgcagcacgctaagcggaaggaagttgaga

SEQ ID NO: 592528 - DNA, 626 bp, Homo sapiens
tcctgcttccccgccgtcgcctgccgccatcatgagtggaaatcgtgcacttgcaggccgggcagtgcggctaccaaatcggcgccgaagtttggggaggtgatcagcgatgagcacggcatctgaccccacgggcgacctaccacggtggactagcggacctgcaaggctggaacgcatcaacgtgtactacaatgaggccaccggcggcaagtacgtgccccggcgccgtgctcgtggatctggagcccgggctaccgatggactccgtgcgctcggggcccttcgggcagatcttccggccgagacaactatcgtttctcggtcagagtgagtgctgggaactactgggccaaggggcactacacagaaggcgcggagggtggtggacatcggtgctaggagtgttgtgagaaatggaggctgatgagctgtgacgtgccatgcagaggtttccagctgacccacatccgctgggtggggggactgggtctgggatggggtaccctcctcatcagtcaagatccgggaggagtaccccagagaggatcatgaacacgtttagggtggtgccttcgcccggagtgtcagacacaggggtggagccctacaaggccagcctctca

SEQ ID NO: 592529 - DNA, 125 bp, Homo sapiens
ggttttttttttggggggggggggttttaggtttttgttttttaaaacggggcctttttagggggaaccctttgccccaaattttgtcccggattttttgggccccttaaaaaggtttattggga

SEQ ID NO: 592530 - DNA, 150 bp, Homo sapiens
  misc_feature (2)..(2): n is a, c, g, or t
  misc_feature (13)..(13): n is a, c, g, or t
  misc_feature (25)..(25): n is a, c, g, or t
  misc_feature (32)..(32): n is a, c, g, or t
  misc_feature (46)..(46): n is a, c, g, or t
  misc_feature (59)..(60): n is a, c, g, or t
  misc_feature (71)..(71): n is a, c, g, or t
  misc_feature (73)..(73): n is a, c, g, or t
  misc_feature (88)..(88): n is a, c, g, or t
  misc_feature (91)..(91): n is a, c, g, or t
  misc_feature (99)..(99): n is a, c, g, or t
  misc_feature (113)..(113): n is a, c, g, or t
  misc_feature (116)..(116): n is a, c, g, or t
anacgggcacgtncacacacgtgtnctcgccnctcgaacacgcgcncacggcgcgctcnnccctctctcgngngcccctcgcgggcgnctngggacatngtacgacacgacgnttnttggggacacggacgggacgactgacggacgggg

SEQ ID NO: 592531 - DNA, 903 bp, Homo sapiens
gaccattatctcacacacacacacacacacacacacacacacacacacacacacagaaaagaaaaaagaacacgcgtagcgtgggcgctaggaagacctgtgtgtgagtaccatgtgtgccatttaccttgaacaagctactttcccactctgagccgttggttccctcctttaaaatggaaataataatagtgcctactatcttaggatgccctataaggatttgatgagatgatgtaggaagttgccctgtatcagagctatgcactgatatatagattctcacgtttccccttcccagcctgggttgtctcaacaagtgctatgtaccttgatgtgctctggaattcccctttgtctcgtctgtaaccacatgtttctggacctactcaatatagtgtgatgataacaagtagccaacatgatgagtgactaatagtgatgtgaagtgtgacgtgttagtgcactcactctacattatcccctttgagtgtcccaactatcatctatgctacagcagaactacggaacgacgaagcggtcgctgtctgcccaaggaatgttgtggggtctggtagtgaggacccatccagggcctctctgggcttatatctctcgtggctctagtgagacgacgctaacggggagaccactttgacagggccagggtactactgacacctctggtccaccgtgtctcgtgctggcgctctgctgatacgcctgcatgtgtgacgtctgggcaaagccagagctcgtcttgaggcctatagttttctacatagtggcacgaggaaactgacagaccagatgttctagagtacaagtccgtggccctagccctatgacttgccatgtgcaacttgagtgagtctctgtgtctctcagtgtttcagtttcccc

SEQ ID NO: 592532 - DNA, 1081 bp, Homo sapiens
ggtgttggcggcgcgttaccgaggatctattgtggggtgccgtgtccgtggctagactctggcgacgggtgcggctatgagtctgtgcgccggggccccgggaggggtgccgggcggtatctacagcagtggccatgctctggggtgtgggccttgctgtccactggctcgcgtcgttggtgagcgcacgaggtacactaccgtgtgcctgtctggaattgcacctaggagctaatgaggctcctgcatggagctagccagaccgctggcaggcgaggcatagtcaatacttccagcccccgcagtgtctactccaaggtatgcatcgggctcactagggtgccgcgccagcatatgcgtatgtctgccggagaagctcagactcttgggggtcacaatgcgccattggttagggttaggcatctgcgcaccacgccgagtcagggatactgtcctgcattgaactggcatcaggcaaataatgcgagcctggtggacgtgggatcggaaactcagcgggcacgtcaatcacgagcagggcgggcctatctgcagacgagatacgatgagggttgccgtgccctgtctgacatgagccgaataagccgagctattgccctacttccctagtcgtcgggacgccaaacttacacccagagccaaagtctgtggagccagtggggacttgcgtccaaatgggggattggctgggggagggcaccggtggaccggagagcttggggctgactggagcgttggcctccggcctgaggcacccagtttgagacgtagcacttctcttcggcgctacgggggcttcctggaccccctacctggtcagcatacggacagagccccctgttccatggtccttccacatgaaatccgcggtcgtctaagcttctactctggtacaagatggccaaacgaatctttgggtcggatgtgcttcgaaccgggacacgggtccgatgtgtggatggttaaagcagccttcgagtggttagaaggatacgacaagcgggcagacaaaaaaagttagatggctcgcagacgagagaaacacagtaaaaacttaaag

SEQ ID NO: 592533 - DNA, 421 bp, Homo sapiens
cgttcctggcactactgaagttgcacgaggacagagacagactctgggctccagagccagcactgatgtacttccggcgtctgggggagcacatattcttgatcttcatggtgctgggggccatgtctgtgatctccttctgcatcctgtccgctatgccccgatacatagtggtgcccccagagaggacattgttggcatattacttcttacggatgtctatgtcgcacttcatgatggaattgtaggttgtctcatgaattccagcggactccatgcccatttaaggaaggctcgcgaagagggtctcagggtcccggaagctgcctttgccaatggttattaccttgcccatcttgcagctttatagctcttttccagggaggaagacgaagctgtgtggccatctcattctccatat

SEQ ID NO: 592534 - DNA, 375 bp, Homo sapiens
gtgtattagcgtaccgctcgtgcagttccagacaggaatggttgaggcagaattcttaaaggcttcgtcctaacctgaagcatctgggctcttacccagactgacatttcagaattctgcatttgacagtttgtcttggattggttgctgccagagtcttcggcatcttgatctgtctggttgtgagaaaatcccagatgtggccctagagaagatttccagagctcttgccattctgacatctcatcaaagtggctttttgaaaactatctacgagccgaattacttctactgcgtgcaaaagtagagacattaccatgcagtccaccaagcagtatgcctgtttgcacgatttaactaacaagggcattggag

SEQ ID NO: 592535 - DNA, 912 bp, Homo sapiens
agccgcaggcctgtaggctgcatggagcccagccggaatggcatggtcttgaagccccacttccacaaggactgtgcagcggcgcgtggccaggtggttcaaccagccggcccggaagatccgcagacgtaaggcccggcaagccatggcgcgcggatcggctcggcgccccgcgtcgggtcccttcgcggcccatcgtgcgctgccccagggtttcggtaccacaggaggggtgcgccgctgggcggggggtttcagcctggagggagctccgggggttgcgccggagaattacgacaaaggcagggtgttggcccgggcaccccattcgggcattttccgggttgcgattcccggaggaaagggcctgaaaacaatgctccgaacggggaagctcccctgtgtcatgggccccaactcttgttcacacgacggggaactgaaagggagatgtacccggcattcacgaaagcttacgaattgcatcttccccccacaggggaaagcgcccctttggggtgcccccccaaaaagaaacgggtgcgaccgaaccgatgtctaccaatggctatgaaaaagcaaaatctcttggaaaaactttggggcaccaacccccacaagggcatttagaagccggggaacgcgggggtgtacaaatttgcccaccaggttccggggggaaaccactggctccttaattacgacgaacgggcgggcagcaaacagggctctcgggaggtttcaacttccaagcttggacgcggaaaagcgggcgcaacaagacattttttctccaaagcgggccccttttccggcgcataaggctccctccgcgggataatttggcccctggatcgcccaaagccggccgccggcgcattcatacacggggcaaatacggggggccaaaaa

SEQ ID NO: 592536 - DNA, 145 bp, Homo sapiens
gcagccaacaggcattccaggcagatggtagacattgaggacctggagggacctcagagacagagtgccacattacaggatgatcagacatacctgtgcatgttgtatggagaaacagaggaagacattggaggaccccatccca

SEQ ID NO: 592537 - DNA, 172 bp, Homo sapiens
ccgcagaaaccactaacaacacccctcctaatactaacgaactgactgcggccccatcacaatcatggcaagccaacgcgaataatccagtgaaccactatcacgaaaaaaacactaactctctatactaaactcacctacaaaatctccttaaatgatgacatacacagac

SEQ ID NO: 592538 - DNA, 1425 bp, Homo sapiens
  misc_feature (440)..(440): n is a, c, g, or t
tcctggttggccacaagaaaatttttatggggggttaatggagtgcgggaaaaagggtttaatcccttgggtgtggaagaaaaaacccttcccccggggatcctggcgggttctatgttctcccgtgggtgggggttccgagtcgtcgaaacctcctatgaccttttctgggtaggggcgccactggttcttctcccagggttgctccctaacatggctgtagacctgggacacgtgtactctctctgggggagatctcccacttggtctcaggctgtaaggcgcctcagggatacgccatcgcaggcgcacagcagatcaacactaggtgagatgcgctaacgagtatgagagacgggtgttgtaggggcgtctctcaccactctccacgcgaccatctagagggtgcgacctaagtatacatcttgccctaacacagngagcaccaatctagttcaacgagctctccccgcgggataaacacgtcacctattatagaagacaccaccccagagcggcaaaagggcgagcgagagtagcacgcagaaacaacgcgttcgagaagggcgggcacaagatctctctacataaaggcgcaaaatcaacaagggcgcgacaacacctctaggatagaaacataggacaggcagaacaaccaacacgcctcaactcagacccagcccgcgccaacaattagaactataggcagccaaacaaatagcaccccctattgtgaggggcacacccctctacaaaggggggccacacaacaaggtgatagtggtgcataccacccccaaagaaagcataggagatcaaaataccccccgcggacaagatctccccgcgggaagaatatgaaacccacatctatcgagagacatacctcgaaagaatacaggaaccccacatatccatcattgtgtagagcacaccatagaacccacagaggaatgcagacaacacaccaacaatctatggggacaacaatacaacaacaagaggagcaacaccagtgaaggagaggagcaacaacaccccccaaagatgagacgtaacagccaaacagagtatgagaacaaccactacccaccacaaaatatgtaggccaccaaattataggggcccactaccaacaggaagaccaccccggagggagatagtggagaacacaccgtcaggaggacccatcctgtaaggaaaaactactacaccacaaagggggccgtccaaccacccacaccacaagaacgggcaaaacaaatgtgggcggccccaaaaaaccacagaagaggatacgttcagccgataacacatgagtaagaaccaaccccaccccatgtagaaccaccacgagcgcgacaaaaatagaaccctgcagaacatcaggaagaaacacagcccaatctaccccaggagcaaacc

SEQ ID NO: 592539 - DNA, 925 bp, Homo sapiens
  misc_feature (729)..(729): n is a, c, g, or t
ggctgcggaataatctcccatatgtaacttactagtccggaaaaaaaagaaccatggggatacgataggtatggtcgtgagctatgatatgaatgggttcctagggttgatctgtgtgagcacaacctatatatttacagtacgcgaatagacgtagacacacgatcatattatcgactctccgctgaccataatcatcggcttgatccccaacctggcggtcgaaaggtatttgaggctagacatcggccacaactcctacgtgaagcaatatgaaagtgatctggctgcagtgctgctgagccctaggatgcaatctttctttccaccagtagggtggctgacgggcgtggtatgagcgaaatcatcactagacatcgtactagacgacaggtagtacgttgtagcgcagttccatgtatgtcctatgcaatgggagcggtattcgcgcagtcataggcagggttcattcactgttgtcccctattctcgaggctacaccctagtaccagaaactgagccaaaagccatgttcgctaggcatattcatgggtgtaaagtctaacttggttcccagagattttctcggctatgcggaatgccccgggtgactcggactaccccgatgcgtagcaccacatgatggatcctatcatctgtggctcatcagtgctctaacagcggatgtatagttcatgaatggagagcttgctcgaggaagtctaaagntgagacctcttagcgggggtttttgtggcccgactacaaattgagaacggtatatgtgcacaggggtggccccaatggttagcacctgccgatttaaggaaagaaaaaggggggccagaaaatcggcgcgccagggagaaaagaggacgaagaaaacggggaggtgtgaacaagcgaggaaagaagaaaaaaaaag

SEQ ID NO: 592540 - DNA, 175 bp, Homo sapiens
gattatgcgtgtttgctgtagagacagggcttctccatgttggtcaggctggtctcaaactcccaacctcagatgatccacccacctcagcctcccagagtgctgggaatacagacgtgagccaccgcgcccggctggatatatcacagtttaatcatccacctgttgaaggacc

SEQ ID NO: 592541 - DNA, 115 bp, Homo sapiens
gaactctaattcattgctggtagctatgcaaatagtaatcgctacttaggaaaaactgtttgacagtttcttacaaaattaaacatactctacaggctgtggcagtgtgcttccg

SEQ ID NO: 592542 - DNA, 534 bp, Homo sapiens
gtttatggtatgcacagaatagaagtggtgtgagaatcagaggaggtagacagaggttaatcgatgggattttgccttagcatttggtatatgatcaataggagggtagctattaacagatatcctcaacgagcagtatgtctgtttggctttgcaggagagggacctacgtcattaaattgtgttgttactgtgtgccaagaaggctccatctaatcctattgtaacatttcaagagtgtaaacataaaaagagctaagcatactcacaaagagaggacagcattgaagagtgatctgtatgaaccactggaaacacgagaaccacatttcgggtctttagaattctactgaagggtaccagccacgtttcttcacaccactccttctcccttaaaatatggactattcctatttcaaaatgggaggtgagagaattggagagtgatgattttttagtgggcaaaggccgttttccaactcattcctaaggatggcaaacataatacttcagagtgatgacggaggggggcag

SEQ ID NO: 592543 - DNA, 146 bp, Homo sapiens
  misc_feature (51)..(51): n is a, c, g, or t
  misc_feature (60)..(60): n is a, c, g, or t
  misc_feature (72)..(72): n is a, c, g, or t
  misc_feature (75)..(75): n is a, c, g, or t
  misc_feature (83)..(83): n is a, c, g, or t
  misc_feature (92)..(92): n is a, c, g, or t
  misc_feature (101)..(101): n is a, c, g, or t
  misc_feature (118)..(118): n is a, c, g, or t
  misc_feature (125)..(126): n is a, c, g, or t
tggtctgatccagtttaatttgttatgtagccagtgtatgcctcctcatanaacaattanctgaacctatgnctnctacaaancatgaatgnctttgttancagagcgccaagctgtnccatttnntgtgatgggttttgaataaa

SEQ ID NO: 592544 - DNA, 321 bp, Homo sapiens
atagcacactcctgagtgtaaaacaacggccagggagtcctgaacactgcccaaggctgtttcctgagctaaaaccgccgcccattaacccttacggaaggccaatgggggcttcggggcataaaaccacgtacaggtaataaaatagactcaggaacgcggggctaaaagatccaaaaatggggccaagactctaactagaaactgtctctgtcgcccctggagaactcaaaaccccgaggtaaaagtctgttttttgctcctcccaggcccccgtggttccagctacagtgccccgtccttttgtgtcatcatcatctt

SEQ ID NO: 592545 - DNA, 134 bp, Homo sapiens
gagaagggtccactgtgaacatgctgttgaacatggtctcactctggtcctgtaggatataggcgagcgccgattccttaagaggacgcgcgatggtctccgcttgccctcggtccgatcgaaaggaagtcggg

SEQ ID NO: 592546 - DNA, 711 bp, Homo sapiens
  misc_feature (227)..(227): n is a, c, g, or t
cctccaggcgcttacatggagaccttgagcttatccggagcccttgccctggagtttaccaagggccaccaacggcctggggcctaccctttttttggacagccaagtgccccggagcctacccctgcacttgcccctatggcgcccctgctgggccactgattgtgccttaaacactgcctttgcctgggggagtggtgcctcgcatctgataacaattttgggcncggtgaagccccatgccaacagaattgcttttgatttccaaagagggaatgatgttgccttccccttttacccccgcttcaatgagaaccacaggagagtccttgtttgccataccaagctggataataactggggaagggaaaaaaaaccgtcggtttttcccttttaaagtggggaacccttccaaaaacaaggactggttgaacctggccccttcaagggtgcagtgaatgatgctcccttgttgcaggaccatcctcgggttaaaaaactcaatgaaatcagccaactggggatttttggggacatagaccccccccgggctttatataccctgatattatttgaaaggggccgatttaaaaaaaaaaaaagaattttaaccctacctggggaaagggttcatgttccctgggagtgaaaatttttaccttcctccaaatccctcttgtaagtccttttctttattaatatttccgtgga

SEQ ID NO: 592547 - DNA, 1066 bp, Homo sapiens
  misc_feature (60)..(60): n is a, c, g, or t
  misc_feature (78)..(79): n is a, c, g, or t
  misc_feature (226)..(226): n is a, c, g, or t
  misc_feature (383)..(383): n is a, c, g, or t
  misc_feature (520)..(520): n is a, c, g, or t
  misc_feature (550)..(550): n is a, c, g, or t
  misc_feature (585)..(586): n is a, c, g, or t
  misc_feature (596)..(596): n is a, c, g, or t
ggaagtgacatcgtctttaaaccctgcgtggcaatccctgacgcaccgccggtgatgccncagggtaagacatgtggnncggtatcccccttttggggggcaaacaaggggctttcgccggaaaagaaccggttttacgttgttccccgggtttttcacaacgggccaattccaatcccgaacgtaatttggggggaatttgcaatttaatccctggaaaagtgcntttcaaatttgggtggggcaggcaaggacaattgtggggctccaaaggcaggtatgcgagccaggatccggcaatgtcccgttcggcggtgaagggctgtggtgcgtgatgggcaagaacaccatgatgcgcaaggccatccgagggcacctggaanacaacccagctctggagaaactgctgcctcatatccgggggaatgtgggctttgtgttcaccaaggaggacctcactgagatcagggacatgttgctggccaataaggtgccagctgctgcccgtgctggtgccatngccccatgtgaagtcactgtgccagcccanaacactggtctagggcccgagaagacctccttttnncaggctttangtatcaccactggagacaaagtgggagccatcgaagccacgctgctgaacatgggcaacatctgccgcttcttcggggggctggtcatccagcaggggttcggcggggtgggcatctacaaccctgaagtgcttgatatcacagaggaaactctgcattctcgcttcctggaggatgtgcgcaatgatgccagtgtctgtctgcaggatggctacccaactggtgcatcagtaccccattctatcatcgaccggtaccgagtcctgggcttgactgtggagacggagtacaccgtcgcacttggtggaagagtcgactgccttgttggctgacccatcttgctttgggggtggtgccccttggctgctggcaacacaggtggttcggcgggtggtggcggcccacctagggtggagggcagtgaggatgtgggtagtccgccaggatatggatgggcgcgcgttgctgcg

SEQ ID NO: 592548 - DNA, 1149 bp, Homo sapiens
  misc_feature (60)..(60): n is a, c, g, or t
  misc_feature (78)..(79): n is a, c, g, or t
  misc_feature (226)..(226): n is a, c, g, or t
  misc_feature (383)..(383): n is a, c, g, or t
  misc_feature (520)..(520): n is a, c, g, or t
  misc_feature (550)..(550): n is a, c, g, or t
  misc_feature (585)..(586): n is a, c, g, or t
  misc_feature (596)..(596): n is a, c, g, or t
ggaagtgacatcgtctttaaaccctgcgtggcaatccctgacgcaccgccggtgatgccncagggtaagacatgtggnncggtatcccccttttggggggcaaacaaggggctttcgccggaaaagaaccggttttacgttgttccccgggtttttcacaacgggccaattccaatcccgaacgtaatttggggggaatttgcaatttaatccctggaaaagtgcntttcaaatttgggtggggcaggcaaggacaattgtggggctccaaaggcaggtatgcgagccaggatccggcaatgtcccgttcggcggtgaagggctgtggtgcgtgatgggcaagaacaccatgatgcgcaaggccatccgagggcacctggaanacaacccagctctggagaaactgctgcctcatatccgggggaatgtgggctttgtgttcaccaaggaggacctcactgagatcagggacatgttgctggccaataaggtgccagctgctgcccgtgctggtgccatngccccatgtgaagtcactgtgccagcccanaacactggtctagggcccgagaagacctccttttnncaggctttangtatcaccactcaaaatactccaggggacacacatatgaacatcctagagtgatgtgcagcatgatcaagactggagaacaaagctgggagccagacgaagacacacgcatgcatgaacatagctcaaacactcatcccccgttctccattagggccatggatcaatccagacaaggtgttcggacaatggccagcatctacaaccctgaagtgcttgatatcacagaggaaactctgcattctcgcttcctggaggatgtgcgcaatgatgccagtgtctgtctgcaggatggctacccaactggtgcatcagtaccccattctatcatcgaccggtaccgagtcctgggcttgactgtggagacggagtacaccgtcgcacttggtggaagagtcgactgccttgttggctgacccatcttgctttgggggtggtgccccttggctgctggcaacacaggtggttcggcgggtggtggcggcccacctagggtggagggcagtgaggatgtgggtagtccgccaggatatggatgggcgcgcgttgctgcg

SEQ ID NO: 592549 - DNA, 155 bp, Homo sapiens
atgaatacaaagatgaggctctaagagaaatggtggcatgaagaccctctcccatctttgtagaattaagataacttatgattttctagcttttgagctaacgtaactatagtaaagattaagctcatttagtgtttactcattatttttttttt

SEQ ID NO: 592550 - DNA, 378 bp, Homo sapiens
  misc_feature (21)..(21): n is a, c, g, or t
  misc_feature (74)..(74): n is a, c, g, or t
  misc_feature (352)..(352): n is a, c, g, or t
gtccatacgggcgttgttctngattcccggtcggtaacttaaagggaaattttcacaatgtccgggagcccttnatgtcctgcaaataaaggaggagggatgtccttaaggttccttgcagcagggaacccacttaggtgggcaccaatcttgacttccagatggaacagtacatctataaaaggaaaaggttatgggcatctatatcataaatctcaagagggacctggggagaagcttctgctgggcagctcggtggcaatttttgccattggaaaaccctggctggatgtcaggttttatatcctccagggaatactgggccaggaggggctggtgctggaagtttgcntggctggccgactgtggaggccactt

SEQ ID NO: 592551 - DNA, 352 bp, Homo sapiens
  misc_feature (12)..(12): n is a, c, g, or t
  misc_feature (199)..(199): n is a, c, g, or t
cattgccctaanagaagtggggccttgtgctacccagtcaatgagtggccctcctctttgagaggtcacaaagttcatcttgttgttcaaaaactccaccttattaaaaaaaatacaattagactttttttttctcccccaagacggagtctcgctctgtcccgcagaatggagtgcagtgccatgatctcggctcatngcaacctccacctcccaaggtcatgtgattctcctgcctcagcctcccgagtagctgggactacaggggcaagctactgccctcggccaatttttgtatttttagtagagacggggttcaccatgttggccaggctgttctcgaactcctgac

SEQ ID NO: 592552 - DNA, 1522 bp, Homo sapiens
  misc_feature (1522)..(1522): n is a, c, g, or t
ggcggatgacgccggtgtcagcggttgtggtgccccggggtgccctggtggccctgggatggggaaccgtcggtggactaccgcgtggaggttgcggcagtggccatcctggtggaccgagggtcagcggtccgtggactgcggtccgtggccgaggtccggaacggagtcatcgcggagtgcaaggccgagcgataatgagtggatgcaccgtacacctaagcttggtgctcgcttgggttcgtagagagctagtgtaagcatcaagctcccatggtagggaagatctatcatcgtgtcgtccactgtccccgacttaaaagggaaatccagtagaatcgagttagaattactttataccatgcgtggggaccgtctcgtcaagtggcattggagggtctatagcaaggcattacaatcgcgcaagattgtccgaggaacgccaagaagcactgatgaccagaggctagagtgacaagcgaggagcgttttcgagaagggacaattttatgttgttggcctactcctgagagggaacattaccgacactgggtcactagcggtcgggagcacattgagtaggtagttcaagatgctagcgtcgcgataggcggaaagcgattgggtacccaccacagtgccgaatacgcctgtatggcgcgggacccaattcgattcgctttgtggtacaacagccgtccgtccccaaattgaagatgactccgccgcgaacatagacaggccaaatgtaaaaacggccttaagcattgatagttagcgccggaaatagccaagacagcaacagcttcacgcagggtcaaaagagcctccccccgagagacaatgcgtttgagttaggccccatttttgtgcgcacgtaggggcactaggaaccctttgtagggcgccaggaactttgccctgtgagcagtacacattagggtagtggcagataggtcgataaacacagtcgcccatttccaaagttccagctccgtttgatcttagcacaagcccaaatcagtgtggtcgcccaaccgtttggtggacagtttccacgagtgcatgtcccgagaggcgaaggccccttggtgtggaccacctcaaaacggaacaagagtcttatggcaatccaacgttggcactcatgtgacgtgtcgtgtcacatttcgaggaactattcagaccatttggatatacagacagcactttcaaatgggcacaactggtttatgggcattatggcgaagcgttaggcgcaacacacgcctctttggggagaaccaacgacactgtttcctgagcacaccatagatgagaccgcaaaccgaattcttttaggaatttcggcccaaggttgtcacgtgtgagtcaggataccccgttaaccacagggattttacatcacgttaggaacgatcaggccagcgttggaagaaacctctccgttagggaaaacgggagaattaagacatttggtacattttgacaatccaccaagcgtatacttcccgcaattatn

SEQ ID NO: 592553 - DNA, 114 bp, Homo sapiens
tcatcgatggccacctgagtatcggagctggggggtgcactcctataatctcagctactcaggaggcggatacacaagaatcactggacccggggaggtagaggtggcagtgga

SEQ ID NO: 592554 - DNA, 308 bp, Homo sapiens
cacgctaagcggaaggaagatgtagattgcttccttcatgtcactttctttttagatactggacagccagcccctcagaataaacgtttggtctgtaagccctgatccactgcagaccttcctgcatcagataccacagaaaggctggacccattgcccccttctggtctcgtgactgaggactcttcctgcccagattcagagcccgaaggcctggaggctggaaaagaaacgactgccctcccgtgggacacactgcctccttggccgtcgtgtcctcttttacggagcctcaaatcccaatgctt

SEQ ID NO: 592555 - DNA, 360 bp, Homo sapiens
  misc_feature (4)..(4): n is a, c, g, or t
  misc_feature (40)..(40): n is a, c, g, or t
  misc_feature (62)..(62): n is a, c, g, or t
  misc_feature (130)..(130): n is a, c, g, or t
  misc_feature (134)..(134): n is a, c, g, or t
  misc_feature (298)..(298): n is a, c, g, or t
ccanccccacatcagggttaccttgagtattaaatgagantatgtatataaagacccatggncttttatacatggaaccttaatgtccgcctaggggatgattaaacaaacagcaaagtataaaatgaancccnaaatagagcccactcatataaaatgcattaaccaattataatcaatttcatgaaaaataatgattttgaaacgtaaagatcacaaggaatatgaatcaaatgttattcatattttatcttaactataatgagatacttttgaaggcttttaagagaaagagtcncctcagagatttttactttaaatcagtcatttcagctgctgtatggaaaatggaatggagta

SEQ ID NO: 592556 - DNA, 553 bp, Homo sapiens
tttggctccattcagggccaaacacgagcgtggtgacgggcggcatctacttgggctctatcatgaagggtggggccgtggctgctgatggacgcatcgagccaggagatatgtggtacatggtatcagtgcccatcctaggcgggggtgtggatagagggcagggaggtgtcctaccatctgtaccctgctctttcagaggccccttctgggtggggggaagactccctgacctaccaagtggagttcccttttcatcctccccagcacagttgtttatcccagtcggggtcctttcccaggtaaacgagatcaagttggagaacatgagtaatgacgatgcagtccgggtacggcgggagatggtgcacaagccggggtatggatggaatggggcacggggcaaggggctgggtctgacctatacgcatcctgccttcagtaggacacccttgtttgcaggcccatcacccgtgatgtagccaagtgcggcgacccaagtccagggtgttgcttcacatgggccaggagtaaggggatgggagactcagac

SEQ ID NO: 592557 - DNA, 674 bp, Homo sapiens
tgtgatttattcatttaatcccagctaaagggcagaggcgccatctccggtgactgaaagggctgcttgccgggttcatgccatgctcctgccgcaggcactatgagtagatgggactacaggtacccgccaccacaatagtctaattttttatatgcctaggagagatggggacttaccgggttcaccacaatgataaatgactcctgagctcatgttgcgtccgtctcagacaatgaaagagtagggattacgaggcgtaacccatgatgcccgggcactacagggataactttgaggctaccgcgtactatattgtgtgtggcaggtaatattcactcaccgactggagtgcggagggtatgtaaatgatcactgacatgttcaattgcgagactgaagccgtcctgcttcctaatattctggctatctgctaccattgggcgctgccctcatggccatgaaattttttttttgttgtagacacaggggctacctatgtgggccggctttaataaaacctcccgggtcaaggattcttctgctaaagattaaaaaagtccgtggggggaacaaccggggcgggtaaccaagaaatcttttttgggcgggacccaaaaaagaaacccagcttaagttgcctttatgaggggtaacattaaaaagaggtatct

SEQ ID NO: 592558 - DNA, 325 bp, Homo sapiens
  misc_feature (8)..(8): n is a, c, g, or t
  misc_feature (23)..(23): n is a, c, g, or t
  misc_feature (29)..(29): n is a, c, g, or t
  misc_feature (176)..(176): n is a, c, g, or t
  misc_feature (185)..(185): n is a, c, g, or t
  misc_feature (223)..(223): n is a, c, g, or t
  misc_feature (231)..(231): n is a, c, g, or t
  misc_feature (253)..(253): n is a, c, g, or t
  misc_feature (294)..(294): n is a, c, g, or t
gagagatnttgtttcatatgaanaatatnttgtataattaaagaaatttcttggctgggcacagtggctaacgtctataatcccaggacttcgggaggctgaggaggaaggatcacttgcacccaggagtttgagaccagcctgggcagtatagggagacttggtctctataaaantaataaaanatactaactgagttgggtcctgtggttccggctgcttnggaggatnatttgagcctggggagttcaangctgcagtgaaaactgtgatccaagccactggcacttccancatgtttaccagagcaagagacccctgtcct

SEQ ID NO: 592559 - DNA, 739 bp, Homo sapiens
atctcaatttgaattgtatctcccagaattcccacgtattgtgggagggcaccagagggaggtaattgaatcatgggggccggtctttcccatgctattctcgtggtggtgaataagtctcactagatctgacgggtttatcaggggtttccgcttttgcttcttcctcatttttctcttgccccttgccacgcaagaagtgccttttgcctcccaccataattctgaggcctccccaaccatgtggaactgtaagtccaattaaacctctttttcttcccagtctcaggtatgtctttatcagcagtgtgaaaacggactaatacacatggtaattccatgtttaactttttgaggaacagccaaactgttctccacagtggctgcaccattttacattcctgccagccgctcatgaagcttccaatttttccatatctttgccaagatttattattgtctgtcttttgattgtagcctttctagtgggtgtggagtggtatttcattgtggtttgatttgcatttccctagtaattaacggtattgataatcactttcatgaacttatttgccactttgtatgttttctttggataaactgtcttttccggtcctttgcctattttacaatggtaccattgtctttttcattgaattataatacatatcatgtattctggatactagatccttattatatatatttatttgcaatatttctctcattctgtgtattg

SEQ ID NO: 592560 - DNA, 132 bp, Homo sapiens
ttgagcggactgagcggctctcatcattgtattctcagtacccaggatgcctcagtaaatgcatattgacggaataatgaatgattatacaacctgggaaaaaaaagtatattcacatatatagagaccgct

SEQ ID NO: 592561 - DNA, 292 bp, Homo sapiens
gtagggcctcaacgtgggttcacgtgatgtttccccagatagactcaggtcaaacgctgttgttagagccctgcagagccgcgggtctcagcccttgttggtatggcgaggtcctgtagccggcagtcggcctcccaaaatgttgctggctttttccagcggttggcaaactagacccactgctgggctgatggcctgttgttgtaaatattttttttttctttttgccaccacacccggctgatttttgtatttttagtagagacagggtttcactatgttgctcaggaag

SEQ ID NO: 592562 - DNA, 132 bp, Homo sapiens
tctgctgcggttactctcgacggctcccctacggtggacccgcgccgtgggggacgtacgggcggtgccggacgctggggcggctgaccgctgacgtaccggaccccgccagaccggaccttcctggaccga

SEQ ID NO: 592563 - DNA, 330 bp, Homo sapiens
tttcaggatgaagacattgaaggctgtgaaagtcaaaggaggctcggcgcagtggctcatgcctataatcccagcactttgggaggcctaggtgggcagatgacctgaggttgggagttcaagaccagcctgaccaacatgaagaaaccccgtctctagtaaaatacaaaattagttgggcgtggtgacatttgcctgtagtcccagctactcaggacgctgaggcaggagaaccacttgaacctgggaggcagaggttgtggtgagccaacatcatgccattgcactccagtctgggcaacaggagtgaaactctgtccccccaccaaa

SEQ ID NO: 592564 - DNA, 1481 bp, Homo sapiens
cccggccgggtgggggtgtttggttagagtaccccccccaccaccactcaatgggaagtgaggacgcgtgtgttatgagtttggttaacaacctagaggtgttgtggtgggtggttggggtggaacaagcacacagcccttgcgttgtgggggtagtagctggtcagtgtaaagcggagggatggtttggtggagagacgatcagttggggggggggagaccacaacttcagtcctcgtcggagcgtaggcacgtcttggggtgtggtgtaggaggaagaagagcagacgccctggtgtggagtataatgactgtgtttgttgtgtcgccctcccccgtcccctcgctgtggtggtgagtaccactcccgccgtcgcgagggtagtttagtggtgtgctgagattgaagtgaggaggtccagcttctcgcccgcccggcgtctgtggtaagaaaacttcggcaggaagaggatgttgtgtagaaaaatagcatatggtggggtgtgttgtctcgcccgacacagcgtgggtgtgatgattatttttgttttctactatcaaagaaccacccccacaacttttgtggggtcgacgaaagtatgttataatagtaaggatgatgcagccccgtccagagctgtggtggttattaagaagagagctgcacgaccaccgcgtctcttgtggtatgaggtttttggtgtgggggcggcgcgccccgcactttgttgtctcgctctcggcggctgttgtgatgagagagagagtatcgccccccccccccctcctttcttgttgggagctgtcacacgcgctgtggggagaagagagttttttgtgctctctgcgcaggatattattttctctgtttgtgttgtttgtgttttggtgtgttgttgtgatgagagacacacagatgttgtctctctgtgtgtcaccccgcgcgcgcgcgggagaggtccactcgggcggcgcgcactgtgtgtctcggtgtctctctctgtctcacacactctctcgcccctctctctcgcgcgtgttgacacggcgcgtgttgtctctctctgcttgtgtctcccactctccgcgcgcgtgtgtttggtgaggagcacacacgcggagcgtgccgccccgcacacacccgcgcgcgcgaattttttgttgagatttttggagagagacgagaagagagagtgtttcacccacacgcttgggcccgcgcgggtgtgttgtgtgagaaccacctccaccctcccacagtgggcgtccacccctccctctcgcggttgtccccacacacagtgtggcgggagagaaaaggggtgggagccccccctctcccccccccacaaataatttttttctggcgcgcggcgggagaaaacacacatttttttggggggtgtgttccacacggagagaggccccacctcactaaaacccccctgcggggcacaaaaagggggaccccttttcccaga

SEQ ID NO: 592565 - DNA, 1607 bp, Homo sapiens
ttgtagtcagcagacgagacgctacgtgtcgtcgcagacgcagtctagatcaggtcgagtgcgctccgcttcgtcgagcgctcaatcgacgcgttgtcttcgtccacgtttgttgcttagtgagtctgcttgttgcggcgcctgtatgttaccctgccgtgtgtttattactagaacgctgggcgatgttttctgtccttcttctgtgtggagctgggctgacatcgcttccgtgtcgtgtggtggccaacacaaaggatggggcgttgccccctctcctcctttaggcgtctgctgttgtgtctggcccccccctcccggtgatcgatacagattttagggggccacatattggtgcgcgcgccgcacatgttgctgcagccggctcccgtcctgcgtcgccccctccagtgctgtccccggtctgtgggggtagattataatctttgcccggtggcccgttgtgtcacggtggttgttctcgccgtctcgctgtgaggagcaggtgttgtttacacgcctctgcgagaggaggccgacgggttatcttatggattgcgaccaccaggaatattggtgggccttctttgtcgcgcctttttctcggggccccaagtgtatatatcgttttccccccggcggggcacactccaccccccgggggggtcctaaaaaccccccgtttgtcagaatagtgtgggcggaaccacaaaagcccccctataagccgggccttgggtaattgtccaaccgggtgcttgggtgcaacacccaggaagttgtcccaggtgtccaaaacacttgggttgtagagacattttctacaccaccggcgtgtgagactatatacggggccccccgcgatgttgacactttcgggagaaccccctcccaggatgtgtccaagaatacccacaggcacaagtgtggttccgccactgccggacacgcggtgttaaactcttcttccacagagccacgatctctctattctctcccgagaggattgaggtctctccccgcgccccgaggtgtttcacaacacgtcgtgagttgctcgccccacgctttcacggacccacattgcgtccaaagccacaatatacctgtgagaattggtggaactccgaagggattatgagccccctcggaatgtgaactctcttctttgttaaaaggagaacactaatttggaggaccgcaatgcccacaaaacacataatttatttcttatgtttgcctctgtccgtagtttctggttaatttaaaacttggtgttggcttgttcatggaaccccgcggtgaacactgcccgctaaactctcgtgaactgcccttggtaagtgccacactgggggtaaaccagtcctcgttgagtggcgcatgaaccctggagcttattccgccgcctgcccccagtgtggggggagataccctttacccatggacttcaccagaattaaagatggccccataaggaattcccagacccaatatttctttcctgccggtttattttatgttttatatattatctataatatctgtatatgctgtgtcatactcataattctggaaatgaattaagtgatatattcctggtttgt

SEQ ID NO: 592566 - DNA, 381 bp, Homo sapiens
  misc_feature (13)..(13): n is a, c, g, or t
  misc_feature (17)..(18): n is a, c, g, or t
tgacgagatttancgtnnacaccaggagctaaaatatactattataatagtattgcattgaccatgatgttggtctctcacatggaaacccgcgttttgatgtgagagaaggggagatgagagtcccatgcagtgtgggctgcttagtagaaatgctcagctcagtgggaaagggcaggctggggcagaaatcaagacgctgccagatatttgacaggccagggcttcggagccagaggccctctctgctctgttgtcctctcacatcaaaacgcaagggcaggctggggcagaaatcaagacgctgcccaagatatttgacaggccagggcttcggagccagaggcccctctctgctctgttgtctctcacatcaaaacg

SEQ ID NO: 592567 - DNA, 289 bp, Homo sapiens
  misc_feature (90)..(90): n is a, c, g, or t
  misc_feature (244)..(244): n is a, c, g, or t
cccagcagagcccccagggcaaggccccacccacctgccacctgtcctccctgggacacttgtaagtacaaagctccccagcctttgagnctcaaccccccaccatctgtctgtcctcagggaccctccagtagggggaccattggggacatcacagaagccactgtccagatggggctcaggcaagtgggtgtgggatgggcaatctgaaggatagacctggaaagtcccctctgataccccnaagccagccagccgggtccccaaggggtcaggacagaaccaacta

SEQ ID NO: 592568 - DNA, 114 bp, Homo sapiens
  misc_feature (1)..(1): n is a, c, g, or t
ngactatagaggatcccgctgatcctgctaggtcaggagctcaagaccagtctggaccaacattggtgaacccccatctctaataaaaatacaaaaactaggccagtgcgtgct

SEQ ID NO: 592569 - DNA, 838 bp, Homo sapiens
  misc_feature (454)..(454): n is a, c, g, or t
gctgaccagcaccatggcggtgtggcaagaacaagtcgccttacgaccaggcggcaaaaagtggagtcaagaacgaaagtggttgatccatttgtctaagaaagattggtatgatgtgaaagcacctgctatgttcaagtataagaaatattggaaagacgctcgctcaccatgagacccaagggaagcaatacatagcatctgtatggtctcaagcggtgtgtcgttggaatgtgagtcttgctgatttgcacgaatgagtgaagttgccattctagacaaatctcaagctgattactgacacgatagttcgaaggtaagaaactgcctagtacgtaacattccatgtgctatggcatcttacctcgatgagcaaaatgtgtgcctatggtcagaggagagatggcagacacatgattagaagcgtcacgatggcatgtcagagacttaccgnatggttgtactggactatcgtcccgttctgtgttcggttgaactagaataacgcacatgaatgcgagattacggcaatgacctcttgatggcctcagctaccaacaggtccgccgaaatccggacatgaagatgatggaatatcatgagccgagaggtgcagacaagatgacttgaaagaagtggtcaactaaacttgattccatgacatgcattggaagagagagcatagtaagaggtctttgccaatctattttatcctctccatgatcgtcttcgttagaaaatgtcaaatgctgaagaaggccaagtttgaattgggacccgctcagtggagcttcatggtgaaggcagtagttctgggaaaagccagctggggacgaga

SEQ ID NO: 592570 - DNA, 872 bp, Homo sapiens
tggcgaaacatgaactgaaaggactgcatgaccatccggtgaagatcgccacccgggggggtccacaccggaaagaccctcgtgaggaacggaaggggccgccccgactgctccgggccactgttcccgctacagcgaacccagagaacatgcatagacacacaccacccgctaacgtaagagaagatcgcatgttagtagggaccaaggcctgctgtattgctcaaagcgccaaaatcatggaatgctgccactcggtcttttcgtttaatgttctcattccttttcgcgcatggcctaggatggtctcgacaagagatgagatggagacttagcgggtctccaagacaagaactacgtaatcacactagtcggtatgaagacaattcgatgtccatagggaagcggggagctgcattccccttctgggctgctctacctgctaaatctcaggatgaacagagccaggcggaaagctatggggccaagcagtgctgtgtgcttccccgcagatagagaacgatgcgttgatcacaatagggcctcatgggtgtaaccgcatggcagaccccatgggctggcgcagcggcctgttgccgtgctgtcattcaagtaacgtgcttagcgtctgataacgtgttctattctgatacacgcgtgttgtttttacaacaggtaagtttttgtttcagaaatatgtattgcttttgtcatatttttatgcaaattgtattgtcaacatgggtcatttaaagtcctgtatgaaccataacctctgctgtggtaccttgtacatgtattggattctgattcttattccaagtgtggcaatgtgccccttctgtatctttatacaaggggaatagtgcttt

SEQ ID NO: 592571 - DNA, 238 bp, Homo sapiens
  misc_feature (107)..(107): n is a, c, g, or t
  misc_feature (150)..(150): n is a, c, g, or t
  misc_feature (186)..(186): n is a, c, g, or t
  misc_feature (219)..(219): n is a, c, g, or t
ccaggttggtgtcaaactcctgacctcatgatccgcccgcctcggcctcccaaagtgctgggattacaggtgtgagccaccgtgcccggcctaatctttgtattttnagtagagacagggtttcaccatgttgtccaggctggtactttnagccttcacaggctgtgggccatggctgtggtttgnaatggttgggaggctgtgtggtgtttgggggtntgtgggtctcccataccct

SEQ ID NO: 592572 - DNA, 445 bp, Homo sapiens
  misc_feature (5)..(5): n is a, c, g, or t
  misc_feature (35)..(35): n is a, c, g, or t
ttttntgggtgttttttttttttaaccactaatgnacaaatctgtaatttacttttcttgctttctaattttatttcatcttggaaaattaatcaacaagttcttctcatctcatctttggctttttcattgttctttgtgatatcttgactatggaatgttatgtataattttttactaagttataaaaataagtaaatttagtctattacaagatgattgcaaaaatcattctccttagaagtggatctcctagagtttaattaacaagggaataaaggatatggataaaatctttactaaaactttgaactaggccaggcatgatgtttgcttatgcctgtaatcccagcactttgggaggccaaggtgggaggatcacttgaggctatgagttcgagactagcctggacaacatagtgagaccctatctctaaaaaaaaaa

SEQ ID NO: 592573 - DNA, 132 bp, Homo sapiens
tatgtagacatgagtgcattaagttcctgaagcacccgatctagctcacagagcccggtacccgagacaccgctggaagaggcgaatggcggggccgccggggctgcaggcatttggggaccgaggcttgca

SEQ ID NO: 592574 - DNA, 379 bp, Homo sapiens
  misc_feature (5)..(5): n is a, c, g, or t
  misc_feature (35)..(35): n is a, c, g, or t
ttttntgggtgttttttttttttaaccactaatgnacaaatctgtaatttacttttcttgctttctaattttatttcatcttggaaaattaatcaacaagttcttctcatctcatctttggctttttcattgttctttgtgatatcttgactatggaatgttatgtataattttttactaagttataaaaataagtaaatttagtctattacaagatgattgcaaaaatcattctccttagaagtggatctcctagagtttaattaacaagggaataaaggatatggattttgggaggccaaggtgggaggatcacttgaggctatgagttcgagactagcctggacaacatagtgagaccctatctctaaaaaaaaaa

SEQ ID NO: 592575 - DNA, 155 bp, Homo sapiens
gctcagacaagagtgtgcctcagatgtttgagttagacttagtgaaagagaacaggaagattgaggaaccattttctagtaggagatggggctgagcaaagggtcaggctggggtgaatggtcgtgaagttgggtaccgaccgatcgaacatgtc

SEQ ID NO: 592576 - DNA, 101 bp, Homo sapiens
cgcaaagcatgtgggcacggtgggcaaacgcggagtggcagagcagcacgggacaggcatggcatttcatcatggaaaggagcccatgtcaagcagcctgg

SEQ ID NO: 592577 - DNA, 1106 bp, Homo sapiens
agcggaacgtgtaagggcaccggtgttggacggagtgcccctcagccggttacctcctgttacaggcccagcaatctaggggccttccggagcctcctgctacgctcttgtctggggcttccagtcatcggcggatcgattcaggtccgtctgcctccatggcactgggctctctggcgccctcgccgtttcctcctcgcggcgacagtttgccaggtgaagcagttaccccggctcggtcagtgaccgagggctggcatccaggcagacatcacgtatctcatcaagtgctccgacatgaggctacggggtgacgggctcgtggaggcagaaagaacgcaccaagaagaggcatagactggagaatgcatgaatgagaatgatcactcgcggttaatgctgactcagtttgtagacactacagacccagacataggcatgtcagaaacaatacactaccttacctcagtgtgagaaaggcctcattcatatattaacgtaatcatgctcgctggacaggtacacctcgcatgctgaccttcaatctattcgagcttgtgttatgcattcacgagcaattccttatgggtggacatggtttaactcatacattggaacgacacggagattggcaggcgctagggataggctcggaacgttgcacactccacagtaattatctcctccaattctgacgccaaggcagaacagatgtgcgcttgggagacaaaattaatacgcggagggcaaaatggccccgctcatagacagaggccacaggaagaactcttgataccgttttctatagaggaattcaaaccccctccttcgaagagttagagagccacatagctagcattcaatgtgagggagtagtgccgatagtatgtgccaaagagaaaagggaagttctttgagaatggctcctaggttttcaaagaatttccatctatttttttgcgcgttttcctatcgcattcacaaagcggaacggagagggaagtttcagacggaaagtttaaacattgtgacaagagggggtcaaaaaatctcttttttttaaaaaaggtaaggcgtcacaataaggcactggcgaattcctatgg

SEQ ID NO: 592578 - DNA, 101 bp, Homo sapiens
actgaggaggagctgtgctaagccccacccagcgctaccagtgcccgtcttcctgtcccatctgctcagagagaggtggggccgagactggatggacgagc

SEQ ID NO: 592579 - DNA, 795 bp, Homo sapiens
gcctgtgatgccatctggaatattgatgagccctcacgaacttgtaagatttcagtccatccaaagatccagcccgcgtgatgaaaatggggagacttcggttattgtcaacccattgtggaagaactgctggatccgtggcctggcgacccagacacttctggggatggtaccagggtgtgcaccgaccatgacctgcgatctatcatttgcttcaagcccctggcaactcccccagagctctccatgcccagagagtggccatctgacaactagaggaggtgctcttcttactgagggggctgaagaaaaatggcaacagctgacctagaagaagataggctcctatctgtagacttgccagtctactcccgacccctgcccaccctagactgttttctgagccctccggacctgagactgagttttgtctttttcctttagccttagccgtgggtatgaggtgtccacgggggaactgggtggcttcactccgcccattcccaagagggctctccctccaccctgcagccgggagcctctgctgtcctttccagccgcctctgctcctcgggctcatcacccggttctgtgcctgtgctctgtttgttggagggaaagactggcggttctggtttttactctgtgaactttatttaaggacattcttttttattggcggctccactaggccctcggccgctcgcaccccgctttactgattgtacacattcaatcaacccaactttttcagaataaaggcccaaacctaatccttactacaaaggagaaata

SEQ ID NO: 592580 - DNA, 724 bp, Homo sapiens
taggatgagcgcatctgcatctcgttgggtgcaagaagaaacctttgtgggaaagacataaagaaagaagccgagcttggtatgtatatacaaggtttggcagtcttgggtctaatagtccgcgtggtgccggtctgtccacatgaggaataaaatgccaagccggcgttcatcgagggaaacttaagggttttatgttccttccgttgtataagtgttagagagccatggcccagtctgccttgttggcgggtagttgagacgggcccacactatcctggtggaaattctgttatacgtcgaggggtttaattgcggtcatattagcaggggtgtggggtgaagggccttaaaacccaaaaaagcaacctgcgcccagttaaaaaggtttttcttcctgtctggcctagggagcctcggatggattaaaattttttggggggagggaggaagatttttaggtttttttaacgcagttatgtaggccaaggacctgtgggggctatgttctacagggttctcccatgagggtgctttaaatgaggggtatttgtgggtgttgtcagaacatcagctttttcgggttccctgccgggtaaatgggccccccctaatggttggcttagttcgtttttttttggttcaataggattaaatgccaaaacccatatcaaatgttggccaagaagaacattttaaagaaattaaaaaaacagtaaaaaag

SEQ ID NO: 592581 - DNA, 183 bp, Homo sapiens
agcggagctgggggcaagacggtgatgaataccaaacaccaagacctcccgcctgccatcatcgatgtggcccccttggacgttggtgccccagaccaggaattcggcttcgaagttggcctgtctgcctcctgtaaactccctccatcccaacctggctccctcccacccaaccaactttcc

SEQ ID NO: 592582 - DNA, 345 bp, Homo sapiens
atccggtcagtggtcctctcaatagttcccagatgctgggactgttggcactggtgccaccacacctggctaattttttaaataaaagttttgtagactgcagtctggctatattgcccaggcttcaagtctacttcctctttcttttcttttttcttttcttttctttctttctttcgttctctttctttcttcttcttctttttttttttccagtaggggggaataggtagcattgggttgcttggaaaagttctttgggtgattcctgagattttgacgcacctgtcatctgagcagtgtccagtgtaaccattgtgtagtctttggtccctcattgccctc

SEQ ID NO: 592583 - DNA, 165 bp, Homo sapiens
tgtatgtgtcatcgtcatatctgtgtgtgtatgtagagagaccctgtctgtgtgtgtgcagaggcacactccgcgtgtgtgcacaagcgctctctctgtgtctctgtgcgcaagcgctctctgtgtgtgcactgtgacactcccacagggatattctatagacta

SEQ ID NO: 592584 - DNA, 531 bp, Homo sapiens
ctctcaactaacatcagaaacaatatgagtatgtacattgctatttatgctattcaatattatattgaatgtcttagtcactgaagttaggcaacagacagacttaagtgtcgtatagatttaaaaggagattcaaaattgtggttgtttctaggtaatgcaaatatatagaaacttcaacataatttgtaaatcactttaacaaaattgctgaataccgatgtatagtaacaattaataatgtgccattatagcaatgacaaccaattacctccaatgtgctttttaattttggtattactttttggggggctggaaggtgtttacaatcacttttaatgcaatctttgctccattacataaatactatttggtcagctcgaatgtgtcaggtaacatagcagatctatttctgttaaatgtcattctcttgttggtttatatttgtgcttttaatctcaatttttctatttataactttttaacttttgtatagaagcatgtcatactattataaaacatattgaattt

SEQ ID NO: 592585 - DNA, 465 bp, Homo sapiens
  misc_feature (30)..(31): n is a, c, g, or t
tccatcgaaagcattggaggcccagtgcannatgtcacgcctgtgatcccagcactttgggaggccaaggcgggtggatcacgaggtcaggagatggagaccatcctggctaacatggtgaaaccccgtctctactaaaaatacgaaaaattagccaggcgtggtggtgggcacctgtagtcccagctactcaggaggctgaggcaggagaatggcgtgaacccggaaggcggagcttgcagttagccgagatcacgccactgcactccagcctacatgacaatgtgacactccatctcaaaaaataataataataacaatataagaactagctgggcatggtggcgcatgcatgtagtcccagctactcctggggctcagtcaggagaatcgcttgaacttgggaggcggacgttgcagtgagttgagctcataccactgcactccagcctgcacagagtgaga

SEQ ID NO: 592586 - DNA, 971 bp, Homo sapiens
  misc_feature (1)..(1): n is a, c, g, or t
nttgtctctggcttactgtactagtccgtggatttggtcgcattctatttgtcgcccacatggttcctctgcggcacgtgtgggtatttcactgtggcggcaacgcgtttttcccgccctcggtttttgccaacaccctggcatttccccacctccggtgggccccacgcccctctggagcgcccttgcgaacacacaggggcccgttggcccgattctccgccgcttggggccctcgctccccgcgctcacttgtgatgggggccttctaccacgccccttgtctggcttttacattcggcgccgatcatgctgtgctctgaaggcccatgccactctttctctcgcatactggcccctggacaacactcatgggtcaccgggggttctttctgtgatgcaaaacacgcgcggccggcgcccccttgttttttcagtgcgtgcttggaaaaccctccgtcggcacatagaggggggggcctcgcccccccgtcgcgccaagtaatgcctcctggccttggtggataacacagtcatcgccgcctcctttgtaggaatgtcccagacgccggagggtatggtctcacgcggacgggcgcgcgcccgcgcttctgggtgacccgcgcgggaatccccccctgcccttacaagggggcgatggaatgattaacaacaggaatgtggggagcccacggcagaactcgcccacgaaggttggttggtcccccagaggacggtcgctggcaagaataatctattttgcaagagagtcgtccctgtctgcagagctgcgtctcagagaaccgctttcttgacgcgacgaggaaattctgaagggccgcctcccgacgcgcatcgtaaatagaggtccttcttgcgatcataggattcctttgtcccttaccaacccgaatgagcgcggcagtgtctttacactcgccaccacccctgggccccaaacaaacaaaaca

SEQ ID NO: 592587 - DNA, 302 bp, Homo sapiens
actcgaagctctatgcgggcgcatgcagcaagatcatccggggcacggcatatctttccagcggctctcagtccaggtcagagtattcagtagagctccactgactcagtacagaggcaggagccaaggccctggctaatcgtgcagtagaacgcacacaccgggggcagtcggtccgtctcattagaatgcaaagggccctggacccatgagtactcatacagatccttgttttcacttgggactttacttggatcctggcactgctctcgggtgaggttgaccacttccagcccacagtg

SEQ ID NO: 592588 - DNA, 1361 bp, Homo sapiens
ggcacgccctcgctgcgcttccagtccttcttccctctccccgtctcaccgtgcacgtgtcagctactcgagtgcgtcttggatgcctcgcggccctgccaactatgctgccttcgtccagtccttggccgccagggccgcagaagcgcgcgggcatctagcactgggcagacaccgattgtccgcctgactgggagaggatgagaggagctgtcggtgctgtcgctcatcttggtcctgcttctacacatcagcctgcaccccaagtaccgtctacgcatgtacggggacattggcggtgaacgcatgctggacaacgcggtgctcgtcatgtgccagatgcgttctgatggtcattcgctcaatgttccccgtatcttgagccttgtgcaccacaagatgaagtccactactgccgtctccttcacaccaccaccagacgaacgaatgtgacatgctacacctggcatggacgctgcgcctacaagctggcttggatgtgcaggcccgacggacgcggcaggaaacgacgcgaggaacgcgccgcacggatgccttggaacagccagcctgcgccggcacgcgcgcgccgacgccacgcagcgccgagcgtgctagcaccgcacaggccgctcggcagcgcccacataaaccacactttgcacggcacgcccacgagcggcacgcgacgcacgctcaacgtactcagcatggcacgcttcaagccccaggcagaactcccgcggcagtgcacaccctgtggcgcacgtgcgcgaagcggcaaggagccgagaaaggagctgacacgaccggaaccgcagatgaccgccagcgaacaccacgcgacgcagcagcacaccgcagcactgtcccagaggccctaaagcgggcccccctgggacagacggccgagcgacacaactacatgcagacacgcaccccgcgctaccgggacccagggacacgctccggccacaacactcgggcccacacagcaacactaccaggtctcctactcattacacgcacgcgcagtcctcacggcaataacagcgaactgacacggacacaaagagggcacagtgcagtgacaccgctccagggcgacagaccaggaccaccaggcgatcgcaggacaacgacccacgcgagaccacaaccacgtgcactccctgcgcggcgaactacccgccacgtatcacgagggacccccgtgagccgttctacgaaacagtgcgccgaacactcccaccacagctaccgcttacgataagtgaacaccaccagagcgccacaacacgcatgacgccacagcagaagagaacaaagccacccaacccagccacaaacaacagcagaca

SEQ ID NO: 592589 - DNA, 233 bp, Homo sapiens
catccaccgttcaaacaagatgtatcacctatagaaagaaatgagcagcttaggataatgacgacagcaacccgaagacagggaaatttaggtaaaaaccaacacagttatgacgttcttatacgttaacgtgtccatcgtgcttggctttctctcttacgccttgtggccgatcaccgtggtccaatattgccaacgtgtcttgtcctggcttactgcaacagccctttgtg

SEQ ID NO: 592590 - DNA, 258 bp, Homo sapiens
gcgtcgaccaaggtgggaggattgcttgaggctaatcattcaagacaagcctgggcaatagagtgagaccccacctcaacaacaacaagaacagcaacaataaataaataaatagctgggtgtggtggtgtgtacctatagtcctagctactcaggaggctgaagtgggaggattgcttgggtctaggagttcacccagtgaactatgatcacaccactgcactccagcctgggcaacagagcgaaactctgcctctt

SEQ ID NO: 592591 - DNA, 423 bp, Homo sapiens
  misc_feature (45)..(45): n is a, c, g, or t
  misc_feature (148)..(148): n is a, c, g, or t
gcgagaaagggtcgcctgcgttttgggaggtgggatggcgcaggnccgggaaccgtcctggcgcgccagccagcgcttagataagtccaggtttatttatggggtgctgtcacgggcggcgcgggctccgggcgccgcttgagcgtgnccgaggcgccgctgctgaccatgaccgcggggtagagcggctcgaggaaggctgccaggaagcggtagaagaggctggcgccacccgccaggccgtagaaggacaagccgccggcgtcgcagtcgagcgccacgcccagcgtgcggtggtaggcgccgtgcagcacggtctgcgcgttgtcgtgccacaccgataacttgagcgagtcccactccaggcaccacgagaaggggttgcggcccagcaggtagaccacgctgcggctcgggcggccg

SEQ ID NO: 592592 - DNA, 264 bp, Homo sapiens
caggctgaggacgggtgcgagaggggtgagaaattctcattctcgagtacagtatggggtacagtgtacatggcttgggtgatgggtggaccaaaatcctagaaatcacctctaaagagcttattcatgtaaccagaagccatctgtaccccaaaaacttgaaataaaaacacaaacttagacggccaaaatataagttggattctcactttgaatctcacaaatctagtattacaacattaacaaggaacacattaactccta

SEQ ID NO: 592593 - DNA, 107 bp, Homo sapiens
catgatcatattcgctgagtcctgatccagtctgtcataccacgagaggaaaatgatcatttaatttaccttcagctacctcatctgctgccttcattattgcatta

SEQ ID NO: 592594 - DNA, 386 bp, Homo sapiens
caagtttagctaagacctgctcgaactgattccacttttgaaatctctgaccttatttcatttccattgtctgtctcctcagggtcaagatcttgtggctgggactatcttgagtctcctataaaaactattcttgccgggtcgcggtggctcacgcctgtaatccagcacttggggaggccgaggcaggtggatcacgaggtcaggagatcgagaccatcctggtcaacatggtgaagccccgtctctactaaaaatacaaaaattagccaggcatgatagcacatgcctgtaatcccagatactcaggaggctgaggcacgagaattgcatgaacatgggaggctgaggttgtagtgagctgagatcatgccattgcactctag

SEQ ID NO: 592595 - DNA, 901 bp, Homo sapiens
aaaagaaacgcgcagacatcaaaagcgcgaaggtcctcggtgtcatggcaaaggagtaaaacccaccacgggggtctcaaccccgagccggtacaccaacagggtggccccaacagggtgtctcggtgggagggcacaaagggccaaaccactgttggggttgggccccacctgacacagctcgtggtgccacacgacgtgagatgagagtacacagaatgttcaaagagccagcccccgtgccccttattaggaccgcatttctgccggcacaaacaacatattgaacccgtgtggactctgccccttgcggttatcgacaacgccaccccaatacagctgggtttgtgtaccacagcacgcgggcctcaaatcggggggacgacaccaccacccgtacattctgggtgaaaaacacaatagtcgatgcgcgagatagcacaccacactggtctaaaatatatgcgcacccgcccatgcgtgcctaaccccaaaaaggcccccaccttcgggggaagtcccacgggtgggagggacaccccgtaaggtcacaggggagttctgacccccccggcgaaacatggggaaacccgtggcgatcaagaaaacacggggacaattttcgatgtgggcgacgttgtggggcggccaccacggtgcaccctaaccttggccagggtggtgaccaacaagaatatggctgttacccccggggaggccgggacctgcctggtggagacgtggagtatcgccgcccggcacccaccccacggggagcccagggaccaaacacgctggcccaggaagaaaacaaataaaacaaaaagcgaaaatgttttaagttttccggccctacccacattacaaccccccgggaaataccttaaccctccaaaaaaca

SEQ ID NO: 592596 - DNA, 356 bp, Homo sapiens
tcggagctataacgaacaggacaaaaattggttcgggtgttgtctatgctactagtatatcactcatgaagttcttagaatacaagtcaatacaagtaacagtcttgttgcaccgtgggaaaggtcgtgaattggaaaacccctgcgggtagttgttgggatattataatgctgttgacggtttggtaagtgtggttttgtttgctgtatgatttttttctctcttgctaccagtatggctatgccagacaaaccccccagtcccgggagctaggaagtgtttaggacgggtctggaatacacaccttggtagtacgccggctccagggctgagggctcgatggggctcctggtgg

SEQ ID NO: 592597 - DNA, 257 bp, Homo sapiens
atcagtcagagtggggcatggttggtgggcacaggcagattctgatcaagccgatggttgcctggcacaaaaaggggcagtgatcaggagcacttcttgagacatctgaaggatcccagcttcccagcttcaagtatcccttccctccttcacctcttctgtccccgaggccagacacagacatactggaaaatatccagagaaggagaccatcccagaccatgtcacttaactccacaggactctgggacgtgctc

SEQ ID NO: 592598 - DNA, 102 bp, Homo sapiens
cggcgacggcggccgcagttggtggcccaggaggacacggagcttcgggacctcttgtgcagacgctggagaacagcggggtccttaaccgcaatcaaggct

SEQ ID NO: 592599 - DNA, 286 bp, Homo sapiens
gcgtgtgtatgtgcatctcggtcatgcactcctgctgatctcctgctcagctgccagtgctagattgcaggcacgcgcgccagcctgatggttttcgtatgttttgggtggagacggggtttcgatgtgttggccgggccggtctccagctcctaaccgcgagtgatccgccagccttggcccaccgaggtgccgggatagcagacggagtctcgtacactctttgctcaatgagtgcccaggctggggcaggagaatcaggcagggaggccgcataccgagctcg

SEQ ID NO: 592600 - DNA, 407 bp, Homo sapiens
ttcacaggtcacatggtcacctccatgcacagtgctctggggtacaacaagaatgtcgaagaaaattatgccagcatccaaagggaagcgacacagtgcctacagactcagttcacaccaggcctcagaagagccacacgttctgaaaaagtcttggacagcccgggtttccttaatctctggtaagtaccggcctgcttggcgcatgcaccaaacggaagtgtagtctgtttcctctccccagcctgctcgcagaaatgtgtcattcttcagctccggaaaaccttaaggtcccaacccattcgcttccatggtcacctgtctgtaactgagagctcaatccacaatttaacctgaatctgagcgtgccccacagtacaggctccgcccctttctatagggaccca

SEQ ID NO: 592601 - DNA, 462 bp, Homo sapiens
cacgagggcggccggccctcgacgtccagtcgaacccgcgcgggtttgggtgcccagacccggaattcggtcttctgctcagtcatggtgtcgctccagcagcacgacgggcagttcggcgaacaactgcgcggccgacgtcggcccgtccacgacgctgccggtgagggcgtccttccaggtgccgtcgggcagcggcaacaccgtgttgccccaacctttttcggccagccggacggtccagcgggtgaccgccaccacgatgtcggcgccgcgggtaaaggccagcacgtgatcgcaggcgtccccgtcggcgagcaggggggcgtagtcgccgtgcaggaaggtatccggatgggcccgccgcacccgcagggcggtggtgaccacccggatcttcggatgctccaacgcctgcagcgcggcgcgccgcgcccggtagtcgactgggcggcgattgtc

SEQ ID NO: 592602 - DNA, 1439 bp, Homo sapiens
  misc_feature (499)..(499): n is a, c, g, or t
  misc_feature (823)..(823): n is a, c, g, or t
ggccaacgcccgctgttcggtttgccgagtcgcagtcgggatgttggcaggaccgccgtcgatcagggcttcgcagacatcagaggcgaatctcaactgtgcgaaagatcgatagctggtgcttctcaaccttctttggtcttcgtctcggtgctgcgttgctgcttaccgccccagatgagcatcgccctgttgcctggccgtgggacgtctttgctggacatcgccttccgagcttcgtcttgtgtgggaccctgcgcgcgttcgtcagcttgtcatcacttctcggatggccagggcgccgcaattcgcgtgtgagcacgtcgcatgccaagtgcgcaatcgcgtcagacgcgacgtcgttgcgtttcctcgaatacgtggtgagactttggcccttcccatgggaagactgtcacttgtggcgtactctcacccgctcgtcatgtcccgagaacggagacgcgtagtcagagccccctcccagacgcgtgtcgtntgtcccggacttagcttcccccctgtatatcgcccgtctgtggtgctccgctctcttcgctatggtgcatgtacatcgcgtgggagtccaggtccttacccccaacgcggcccatgacaggcggggtgagcccctggcaccttgtgctcatcccgtgcctgatgacccccggctcgggtggcttcgaccagttccgcttcggtcctatatggtaagcctttctgacgtgtctggttttccacggggggaggcgtcgcgataagagcggggttctacccaggtttttcccctcttgcccattttggtctccttaaagcacaagcncctcaaatgtactccccggcttcgcaacggagggcgcgggcgtcacccccgcccccaagcaaggattagggattccttggtccttattccggggtaagacgttagcacagactaacataatacccttggcccctgttaaaacgttgctgtggcgaccaacccccgggggccgtgcgcattgcgaggtccccttggaccaggcgcacgttgccatcctcgttggaagcccaaccaggaggaccctgctttgtggcgagtcacaaggcgtattttaccgacgtgccccctctgatagaagagttctccgatgcggggggtttgcttccaccttggtccccacacttgtgtgtcggtggtggctcccctgtgtaggccttggggtccgtgcctttttctgccgcttggagagttgcgccgggcatccataccaggtcttttgctcctccccgtgcgcgccgccaccctggtgcccagtccgggcgcctttgcacccgagagggcgagaagaggaaggccaggtggcccatcattcccctgtgtgcaccctttccacaggaactggggggtgtatcggaagggggcacggcatttggccctcagggcagtttccccacgg

SEQ ID NO: 592603 - DNA, 263 bp, Homo sapiens
acttacccccggttacagagcggggtcagcagatgggcatcaggcgaacatgttctgttcctggtacttgcgccggctggcacagtgggggcagcccttcttcgccacagcctggcagctctggtggaagacggtcttgcactcggcacacctgactgtggtgtcaaactcaaaggggaagatgatgtcgtggtgctggcagatctggcagatgaagccgcgctgtgtgcacaggtcgcagtggtagacatgctggtaggcag

SEQ ID NO: 592604 - DNA, 396 bp, Homo sapiens
tttttgtttccgggaggtggtaatttgtggcccacccagatggagtggggcatgaagttttggtggccccccaattaagccttttttgccttcttcttgggttacagttacagtgggggccctttggttttgggctttttttaccaagggggtgggggccccttcggccatttttccgtttccgagtacgggggatggtttggtttctttagccgagagggcaaggtggccttttccttcaaggggggttcttttaagggtttttttccggtgccccggggcctacccttttggggggaatttttgggggccttttttaaccgccccgccccggcccctttccccgcccccccccccgctttccgggggggggatttaaggttgggtccgttccca

SEQ ID NO: 592605 - DNA, 309 bp, Homo sapiens
aggatcacattgccatttttagcaaattggtatttatacattgtttctaattttgtgcttcaggaacactagagcacaggttttccttgcttgcccatctctgttgtcactccgtagtgactggctgccggtctctttcccatgtcctcttgtggcttaatttcctcatgttgacatgctaactgccttccattagccttcttttgggagtatgcaaatgtttgctagtgtttgtttgtttccatacagtggcttctttgaattcccctataagtgagtccggttatttaaaatttcggtaaattcaat

SEQ ID NO: 592606 - DNA, 879 bp, Homo sapiens
  misc_feature (334)..(335): n is a, c, g, or t
  misc_feature (339)..(339): n is a, c, g, or t
  misc_feature (359)..(359): n is a, c, g, or t
  misc_feature (362)..(362): n is a, c, g, or t
  misc_feature (370)..(370): n is a, c, g, or t
  misc_feature (381)..(381): n is a, c, g, or t
  misc_feature (384)..(384): n is a, c, g, or t
  misc_feature (387)..(387): n is a, c, g, or t
  misc_feature (422)..(422): n is a, c, g, or t
  misc_feature (427)..(427): n is a, c, g, or t
  misc_feature (439)..(439): n is a, c, g, or t
  misc_feature (442)..(442): n is a, c, g, or t
  misc_feature (453)..(454): n is a, c, g, or t
  misc_feature (457)..(457): n is a, c, g, or t
  misc_feature (459)..(459): n is a, c, g, or t
  misc_feature (470)..(470): n is a, c, g, or t
  misc_feature (475)..(475): n is a, c, g, or t
  misc_feature (477)..(477): n is a, c, g, or t
  misc_feature (480)..(480): n is a, c, g, or t
  misc_feature (485)..(485): n is a, c, g, or t
  misc_feature (497)..(497): n is a, c, g, or t
  misc_feature (502)..(503): n is a, c, g, or t
  misc_feature (508)..(508): n is a, c, g, or t
  misc_feature (516)..(516): n is a, c, g, or t
  misc_feature (548)..(548): n is a, c, g, or t
  misc_feature (835)..(835): n is a, c, g, or t
ccctgggtttattaagctcctggctccgctctagacctcagcggttctggctgccagcctgggcagcctgggaagcctgggaggacggtggcttgcggtctgtcgtgaggcagtgcggacggggacctctggattctgctggatctgcccgggggttacctttgggggctgggacccagtcgaggggacacaaccgtcctggcagtggttggttctgcttcccctgcagaaaagcagcattttcggaagctgaagaataagctacccagcacaccaccttgttgtgtgaccttgaggcaggtggttctgtctctctgagcctctgtttctctcnnagcngagcagccaccatggctganggncagatgcncttctcctgcnacnacncaagccgcctgcgccgagaccccttccgggactcnccccncacctctcgccngcnaggatgaaggnnttngnaaggaccccancccananganttganaaactcaaggcnaaaannggatntgtttttntttttttttagcatgaaaaggcaaacaaaggncgggcatggtgccccggggccccactgccaccgccaggtttggggtgcctgccgagggcaggacccccccacccttccctggggagccctggaaagtgtgtgtgaatgtgcacagcttcaagccagaggagttgatggtgaagaccaaagatggatacgtggaggtgtctggcaaacatgaagagaaacagcaagaaggtggcattgtttctaagaacttcacaaagaaaatccagcttcctgcagaggtggatcctgtgacagtatttgcctcactttccccaganggtctgctgatcatcgaagctcccccaggtccctccttactcaa

SEQ ID NO: 592607 - DNA, 288 bp, Homo sapiens
agcatgacaacaccgtgggacgtggcattgcaggctgagggtgcagtaatgtgcataggtgtgaagctagtgtttcccaggcacagtgggaagcctggtctcagtagagcagagtgggccagggttgaaagggggatgtgtgtggcgggagaagtttgggtcaccatatgtgagggcatttctcctctgtgataacatttactccacaaaagttgacatttgattaaacatatattttcgtattacaaactacactatattgtgctacagtccaaatgcgcatacctt

SEQ ID NO: 592608 - DNA, 454 bp, Homo sapiens
tgtaagtgtgagagagggataagaagtgtagttctgttttggaattctttattggttttaacggatactctttgtgaaaaatttaagtaatattttagtttaaatttgattttgagtcaaggcctactgccacttttgggatgggagttggacctacataccaagtgataagttcaccttaacatttgctttcagaatggctttgatttagctgtgtcaggtaacagaacagggttagactcttgttttgttattggcttgaagattaggatcccaaaggggttggaggcagggaatatttgaaaattcagattggaatttcaggccaaaagctcaagaccaccagcctctcctcctgcctggaaaaataagcctttgtgaaagattgatttaccatgtacaattgtgattgtgaacgttgttgagtaaacctccagactttctctaaaaaaaa

SEQ ID NO: 592609 - DNA, 784 bp, Homo sapiens
ggagcgggacgtggcgccgtctagccaggcctgggctctgtggcgggcgccgcagtccggtccccggcgctcctcccagcgcagacttcaaggtgctaccatggacccttcccctgtcttgaaccctgagccggcaccatgcacggacgcctgaagggtgaagaccgtcagaagagcaggcggaggccaaaggggctagagcgagaggggaagctgaaggctatacccatgtcagcccaccccaggccgttatccagaggcgcaaggctgtggagctgcatgacgtcccgtgcgttggaatggacaagccagattctggggagccaacccttgattttggccactcttctgaaccgtgcagacgaagagggtgctccaagacagttggaggacctcaaggaagtctcctggaagagtgtgggatgctctgctgacaggcacgacactggggcttcctggacgagctgactgtgcggggtgaacccccaagtcttaatgttaccgtgggacaccggatgctggcttggtaggacggtgcttgagcaaaattgaccgagagtggaaggtctggggccccggcttccctgcaggtggattgcgcgggacctttcacgttggtggcgcactatcggggggttgtggccacaagggcagcggggcccttgagaagagtaagcttcatgaaggttattaccggattttcaagttgtttcctggattacgctggcttggccggtggccccaggggatgcacggggcctggactggtgccacacggccggta

SEQ ID NO: 592610 - DNA, 125 bp, Homo sapiens
gactttcgaggaaatacccccctacaaccctgccctttagcagggcttccttgccagcgttgggagttcctgacttaagccctcaccaacccggaccctcacttcattcctgaagggctaccaac

SEQ ID NO: 592611 - DNA, 188 bp, Homo sapiens
tttggccccctccccgggcccccggggcccccgccctggtttgggccgtttctttgcccatggccccaaaaaagtttttgggccctttagcccccctttttttcttgtttcaaatgatggctgggatactggtttcccccccctttgcttggggcaggggatggctttaattaatttcttttccttta

SEQ ID NO: 592612 - DNA, 1101 bp, Homo sapiens
ggaagatggccggctccttggcggctcggggtccgccagctgtgagtgagccccgagcactggctgtcgcggctgaggcagatgctgcctctgcgtctggccctgtcctgtgctccctcattacctgtctgccatggctggagcgaacccgagatgcgtggagctgggcttgggcacagctgttgagtggcaatgtcatggccagctcctcgagacatgtgaagatgacagtttcatggcttgtggaccaggaagaaactgtgctggaagggacaattggatcaagatgagtgaggccccaaccagtatttggcaggctgaggagactagacataaagtaggtccatgtcgggagctgccagaagaggttaatggagtatatactgtcctttctctcaccgtatcacggaaccacaaaaactgcgtgaccttgatctgcaaaagcacgatggtagtcgacttatcaaaggtgtacgccccagtcagatgtaatcatggtccccattgaaggggcgtgtccaggaacgggaacacaattccagtgggagaaggccaggtaccatatccttatacctggaaaccccaagacactcagacaactatctcagcacagtgcagtgcgtatacatgagtgctaatcagtctatgtatagtgtcaccgacgggctagtaacacaagaaggagacatgcaaatgcatggataacaagtgaaccgtctgcgagaacattgaacttaaaccaggcgaaaagaaagtggaataccggaccaatattggaggaacaagggcacctaacacttagcgcgcaaaagagtagggagacaatccatggaacaggaagataaccacagcgggaccgtatagacaaagagagagcatggaaaaggggaagggacacaagaaaacattacgatgaccaaatgaccagcataaagtccacgcttacgaccaaaaaaccaacaacaagtaatgaccaaacatgtcaacaacatacgaccggtaagatacacgccgtaaacaagaaaataggtggaaaaaacatgacaacaccaagagaacacaagtggacgacatccgagattactacgctcacccgaagcg

SEQ ID NO: 592613 - DNA, 788 bp, Homo sapiens
gtgggcccctgaggagctttgtgtcgtcttgaacgagcagcccaggtcctagaggtaaccgttaggcgggatttatgtgcactggctgcatgagctggcaaccagacagcgtcccttggtgagaaagggattgctgaggcacctgtcacaggcctccaccggccagtgcgcgacccagcagaggcgtactacaccagcgtctgatcctcttgagcatccttctgtgtaccacttccatgaggactcattatgggggtcatcttggaaaggggaggagcttctcccagtgtgagacccaaaagactctggaggtcatctggcggagagtctctgggagaccagaaccacacataacaagccccagcttggcatcacaaaggcccaggagacctccagagtaaaaaccaacccctgacctaccaccagacaggctcctaccatgtatgctgccagcacagtaggtcccggacagctctggagtactctccatcggaggcccatgcccgtaccaatccaactgccttatggaaacggtctctctccaaggtcagcactggaagggacacgtatcgataagtgtatgaacatgccacatgggacagcctggctgcggcttcaaacaagcaagtccatacagacatggacctcaagacaaaactcacgcccagaacttgcacgtacagaatgagcagccttggaggcagggggagaggggcaggagagaggccggaaacaagcaaagaaccaacacgcgaacacccagacactggacggagaggaaccaagat

SEQ ID NO: 592614 - DNA, 128 bp, Homo sapiens
gaaaccctaataacggaatgataacatgttagctatcaggattgaatcttagaattcatctatccttcatcatcaaaactccctgaggtgagcttaattaatttattgattgattgatttaagtctct

SEQ ID NO: 592615 - DNA, 164 bp, Homo sapiens
ttgtcccttgtggcatgtgttaatgatttgagttgattgctggccatggctgctgtgttgcaactagtaatcccacaagtgtttggacttacattgctgttgatgacacgagcgccctggacgtcggagagtcaatctaacatagataacacctatctcatccc

SEQ ID NO: 592616 - DNA, 771 bp, Homo sapiens
tcatcggattatagcaataagacctgacgattaccaagaaggactaacaatcggaagactgaccagtgactttagtccttgggagaacttgagcccacggctgtcttgctgcctgtgacttactggtgtggaaaatagcccccaggtaggacccttccagtgatgggccaaaagcgtctttcacccggaatccggcaccagtggcccttctgtgacacagtgtttataaaaaatggttaagttatataataagagtgaacactctttgagattggagaattatgtgagatttccaccagtttttagctgggttccatactgtccctgcttgttttattgcccggccagcccaggccaatggcctataaatgctgtggcttatattttgataagaaatccaaaaacccttggttaaaagatgccactcacgaagtctggaagtattctgaaagcactccctttaccctcccgttgacacggtttgagtctcctgcttgtaataggtgaacttgtgccccatgggtacacattaaaggaacactgctgcccacgggcctgggcggacacgctcacagtgggcacggaatgtgtgctgggtctcacgccccccattgtgcctgcttgctgggccgttagtatagggccaagcctgcctgcggcgaccctggctgctaggcccttctctagggaccgctgcgactcataaagacccagaagcataaataaacttttccaaaatttatttggctctttcgttaaaaactgtgccaa

SEQ ID NO: 592617 - DNA, 446 bp, Homo sapiens
tgattgtaatcactttgcgcgcattctcgtctctgctgatgtcttttattcctttgaatgctctgatccctttatagctggcgctctcagtctactaaaaaacaatttttcctgtcgaagtataccccgcaccccgtggtcacgcctgttccccagaactttgccgcagggcaaggtaggccaatcactctgagcgtcgcgagctctgagaccagcctgtacaacatggtgaaaccccgtctctgctggaaatacaagaattagctgggtgtgatggtacacacctttggtcccagctactcgggaggctgaggcgggagaatcgcttgaacctggaaggcggaggttgcagtgagctgagatctccattgtactccagcctggctacagagcgagactccgtctcacaagaaagtaaaaaccactacgtgtagacttgattcctc

SEQ ID NO: 592618 - DNA, 996 bp, Homo sapiens
ctggggtgtatgtttcgtgatgatggcgatgatgacagtggtgatgatgatggtgataatggtgataagatacgagatgagactgacaactgctgcgactgacactgactgacacatgactgacgactcacgatgacaccgacgttgactgacgattgactgccgactgaacactgacgactgaccccgatgaccactgactgacgatgacactgacattgactgacgactgacctgcaggtgaacttgaccttacgactgacactgtccctgccgcattgacacttgacacatgaccatacatgcacactgcacacttacatgcaacatcggaggactggacacatcacccattacatgcacacatcggcctcgaccacttcactctgacacctcgcaccccacttcggacactcggccccactctactcgccgaattcacgcacaactgcactcggacagactctgccaccctcggactcgaccaactggccgacatgcagcactccaccaattgaagcaacttggacagactggcactggcacggcactgacaggattgcaccaacattctttgaggtcatggcaccacttgggaccccttaaaattgaaactggcaaacatgggcattgcaaacgacgggcaacattacaattgccaaaattggggaacatcgccatcggcagcctggagcacatttgcccactggccggttgggcaaccacttgaggcactggacacactcgactctgaccaacttggccttgcaggaccttgggaaaacattggtattgggaagcacttgaaagcaattggtgcaattgcacgaactgtgaaccatttcggaaacatcggattggacccataacaacatatggacagatcgcaaaataggcagacattagtcaccatgggaactgacaactgacaccattgcgcacatcacacacttggccgaactcgaacctgccgtaggagttgccagcctacacaaa

SEQ ID NO: 592619 - DNA, 1631 bp, Homo sapiens
  misc_feature (287)..(287): n is a, c, g, or t
tggtctggaggaatggggacaccaaaactcattgtggcagcagaggttgagacgaagctttcacaaaagagtgtctaagcaacagccaacctcagttttataaatctccagaaacaccgtggctagtgttgtggattttgcaaacctctccccaactcaagtttcaccgaaaaatctcaggtgaacaaagaggttttggaagttctccacacgtgagtgggtggctcgggtgaaatctcaggctcttagagacaaattcggactctctctcattacacacgagcccntattctcctatacacgtgaactcgtgtgtcaccccgacgaaagagagagtctctatacacgcgtggaagcaccccagcccagacaacacacatacttgacacagagacacacgtgtgctcccgagatacttgggagcgccttctccacaccgtgtgtgctgacacacactgtgccacacgacagcgcgacaggggggcggtctctacaacggcctattcagccgaccgctgtgacacccacgtggtggcgtcactcagagaatatcacccccccctgttgcgccctcatatgatgcggagtcgccacccgcctcatcatctcccaacacacctctgcccgcacgacgagacatattgtgccgtgtatataacagcagaacaaagacctgatatactcctctcccccatgatcatatcgtcggccggcacgttgggcaccgcccaatcttctcgtctggacgcaacgcggttccctcccccgttgcccctcgttcgccaccccgcacgccacccgccccgcgccctctcctcgcaccaccccgccggcgccccggcggccacacacaatcctcccactcttcgcgcgcccactcaccaccctagcggccgcgcgctggcccccttgccgcctcgccgccccttcttcttaccccccttcctactaatcttcctcctcgccacgcccgcctcttcgtcttgggggcggcacccccttcttgtggccccccttctcattagcagccccccccctcttctacagacacacgtcggcgtcgggcggccgtcgttctcccatcgctgcgcacagcgggcggcccacaactctatccgcaagccacacaccccagcaggcgccgctgcgcacccacctctccttcgtgcgggccggccccccgctcgagcccccatctctcgttggccacaccaacacacagcaccgccttgcacaacccacctccttctcatcccacaccccccccttgccacaaacgcgcgaccaaccccgcctgccgatcaacagaccgcggtccctttaccaccacccaaccaacaggggccacatccccctcggcggccacctctaacacaaacaacttctctggtaacgcccacaaactcatctatctaccctccgtctctccccaccaccacctccactacacaccgccacctattaccccccctgctacatgccccgccaagcaactccacccgccagttatcaagccacgctccagcccgcaccacctcctcacgtcccacacacgccacaacaccactacacgaccgctcctcgcccacacgggccgcagatacaacacccccgacaataagacacgacga

SEQ ID NO: 592620 - DNA, 88 bp, Homo sapiens
ggagaatctagtgtagcagcctccaggaggattcagcacaacactggggagtcacccttccctcgggccctctcctaccaacaactgg

SEQ ID NO: 592621 - DNA, 251 bp, Homo sapiens
atgacatctcctcatgagaaaactctgagtgcagcatggccgggggtgaccatgtgggcgttcagtagggtgcttccaggtagatgtggtggtcactcagagccgtatgtagacggcagccagtaccttctcgggcacatactggcggcgcttcaggtcatggtccccatcaggtaggatctcaggctccatgatgggcacaaggcctttctgcgtgggagatacggccattgggcccaagcgtggggtac

SEQ ID NO: 592622 - DNA, 734 bp, Homo sapiens
gatggccagaagcacaagtccaagcaaagttttttttcttaaatgccttttaaaaaaaaaaaaaaaaaaaagttgtgcagttatcagcccagaaacatgatatgatagtttccacattaatctagcttaagggtatctggagcagttaggggaagcgtgtaagctgggtgtagacgggcttatgctcataatggacattggtgtgagttctgaattctggaagcccgttggtgaaccactatcattcctattcagggaagaagacgatataacataggacattccagtggaaacgtgtggtataaagggatagatacacttaagaagaaagtgcatgtgtggttaacaaaagattttttgggatgaaggtaacaaaaatcgtgaccaatggatgaagaaattacatcttgctaagaaatactctaattgaccctgtaggaacgctagaaagacacgtaatttaagagggagaaataatttaaccaaaaaaagagtcaaactacaccccggggggggcaaacattagggacacataaataaacgtggaaaccacaatgggggggcaatacagaaaaagcacattagtggaaagacacaagaaaagccgtggacaaggacaaaacacagcaagggactcaagcagaaattaccccatggggagagagaaagcgacaagaccaaaacaacgctaaccacacaagggacaaaacacgccaactgaagaagggccagcg

SEQ ID NO: 592623 - DNA, 304 bp, Homo sapiens
  misc_feature (304)..(304): n is a, c, g, or t
ttagagatggctggtgggggcagggtgccgtcagcttggctgggtagacagagagttttttgtggtgagggaatacagctgctctaggcctttggggtaacactgcccagtcatcagcccaaagagattcaaagagcaccaccagcagctatttttataaatcaatcctgaatccaagctgagcacatggatttagagtgaacagttgtcatgctctattacaagctgggtgtttggtagacaacattaaagttgctaagcaggagactcccatctgtactgtgcagtgtgtactttacttgcn

SEQ ID NO: 592624 - DNA, 241 bp, Homo sapiens
ttagcagcgtggaaacattttaagtgtgatagattaagtgcagcaaaagatatttcatgtaacgaagttgttcttccaatatcaaagaaatatcagtaggctgggcgtgtggctcatgtctgttatcccaacattttgggaggctgagtgctggtggatcacctaggttcaggagtttgagacctagcttgagctccacagtgtcacctcgtttctactatatatatacaagacaaattag

SEQ ID NO: 592625 - DNA, 387 bp, Homo sapiens
gactccccctcctcttctgccactgctccagctcgtctacttggatggggttgcccgctatctgcgagcatgacagagtcttcctcacaaggaatcggcttgttgttttacagctgtctattgctccatcccccctgacgatccctaggtggagatggggcatgaggatcctccaggggaaaagctcactaccactgggcaacaaccctaggtcaggaggttctgtcaagatactttcctggtcccagataggaagataaagtcccaaaaacaaccaccacacgtcaagctcttcattgttcctatctgccaaatcattatacttcccacaagcagtgcagagagctgagtcttcagcaggtccaagaaatttgaacacactgaagg

SEQ ID NO: 592626 - DNA, 479 bp, Homo sapiens
gaggatcacgatgtccgttagattggtatgttttgcagggctggtacccgttgttcctttttatgtgtagtgcttttttcaggagttctgtaaggcagtcctggtggtgacaaaatctcagaatttgcttctctaaatgattttatttctccacttatgaagcttagtttggctggatatgaaattctgagttgaaaattctttttttacagaatgttgaatatgggcccccactctcttctagcttgtagagtttctgcagagagatttgctgttagtctgatgggcttcccttggtgggtaagtcaaactttctctctggctgcccttaacattttttccttcatttcaaccttgctgaatctgacaattatgtgtctttggagttgcccttctcaaagagtatctttgcggtgtcctgtgtatttccccaatttgaatgttggtctggtcttggctaggttgggggaaatacacgg

SEQ ID NO: 592627 - DNA, 126 bp, Homo sapiens
ggccctgaagtgcctggatgccccctgcctcccagtgtcctgcattacttactggaggctcagtcaccacaacctcaccctacccagccctggcctgcgtttctcggacaccagccaacctcctcc

SEQ ID NO: 592628 - DNA, 204 bp, Homo sapiens
accgcacacaccggtagtttttgtatttagtagagacgaggtcaccgtgtagccaggatgtctcgatctcctgactcgtgatctgctgcttggctcccaaagtgctaggatataggcgtgagcaccgtgcctggcctaaagggggatttattaaggagcattaactcacacaatcacaaggtcccacaatagtgcatcgcaagc

SEQ ID NO: 592629 - DNA, 196 bp, Homo sapiens
ctggcgatgtgctcagtgcattgccatgcgtgggtggtcgggttattgtcgttcttttatcataactgcgccagcagcgcccatggaaacttcgttgattacccctgagcagttgtcggcaatggaagggcaaatcaagagccaaccaacaaaatgcgcttgcgcgaacccaagccacggatggcgagatggctgg

SEQ ID NO: 592630 - DNA, 402 bp, Homo sapiens
tcactctagagatccccccgggagccttaaccctataggaaatatttttgggggggaatggccaaatcacctgttgagtaatactcattgtgtttgtgcagtggttcaggggaggagagaggagggggaggtgcagagagctctatgccatcctgtttacagcgaggcaagatgaatcattatgtctgtgcattttgttttacttatctgtgtatatagtgtacataaaggacagacgagtcctaattgacaacatctagtctttctggatgttaaagaggttgccagtgtatgacaaaagtagagttagtaaactaatatattttgtacattttgttttacaagtcctaggaaagattgtcttctgaaaatttgatgtcttctgggttgatggagatggga

SEQ ID NO: 592631 - DNA, 130 bp, Homo sapiens
tgcaatggcaggagaaatcagagtgttgcggcagaagtcggaccatgtgtgcctacagccaaagcccagccattaaaaaacagctggacagacatcttccttccccacctacgctggcctacagcacatg

SEQ ID NO: 592632 - DNA, 984 bp, Homo sapiens
gtgtgctagcggagggagagctcagggtggcttaatccaggagagcccgtgtcatggtcccgcccccagccagtggtgaaagcaaacgttcatcctaaggtgtgcacgcccaggccctgcgccctttacagtctaggccgcctgccatgggggtgcagccgtcgtccagtgggctgcggtcagacgttgcactgcgtgcccacaatccagaattcctgcaaagacgaagttgggatgcacaggaacccaagcacatacacgaggaagaagatgcggtcagcagtctcaggccagcttctctgtgagccctttacgtcctctggagggctctgatggggagagatacagggcaacaggacgctgttacttcaatggtccccgtcaacatgagcggaagagcgaaccccatggggtcatcatcctgtatcgcttccttatcttagattctcagttgatgaaaatttgggtctggcccatttcaggcgcatcttcagtcgaagaaacaccctcttaggctgtgcaaggcatgggttatcaggggattgaggtcacctgggacttcagggaggctcagcttgctccctgccccagatctgtttcttctaagggaggaggacagtggtggagaccaggacaggagagccagtaaggtggatgcaaggggcctctatcgcaactggacctccgtgccctcaccccagccctaggtgtgcacctaaggctcattccttaccccccagccctgcccactttcagcaggatgaggccctgggtttgccgtgctctcggtgtaccccatctcggggcaggggctgggggcccgctctttggccccaggttgccccgggccaagaagccagcaagaagcacaagtctctatggtgttgaagacaacgcgtcagcaagcaggactcgtgaagtaagtaacctgggggacggccgggcccatggagatcgtcaaggggcgaacccggggatatctgg

SEQ ID NO: 592633 - DNA, 142 bp, Homo sapiens
atgcgtaatatgtatccgagcggtacaaagcgttttttacttctcacttcaattaatgctgcgcttcgctggtgagtgcgtactttttctacctgtacacattcctgcattcatgtattttgttttttttgactaaagctat

SEQ ID NO: 592634 - DNA, 101 bp, Homo sapiens
tgagctcggtaccgctatagtcacggttggtactagttcacggttggctgactagtccacggttggctgctctgctacgtacgaaaccccgacccagccaa

SEQ ID NO: 592635 - DNA, 997 bp, Homo sapiens
  misc_feature (6)..(6): n is a, c, g, or t
  misc_feature (11)..(11): n is a, c, g, or t
  misc_feature (32)..(32): n is a, c, g, or t
  misc_feature (393)..(393): n is a, c, g, or t
  misc_feature (399)..(399): n is a, c, g, or t
  misc_feature (728)..(728): n is a, c, g, or t
  misc_feature (800)..(800): n is a, c, g, or t
  misc_feature (994)..(994): n is a, c, g, or t
taatanttaanagattttattctaatagctanaattacagtgcttgtttgtcgaaatgaaaactgaaaacaagtatacaaaacagttgattactaatcgtgtattgaaagcagtaagaggttccacgacaccaaatagaccagttctgaggtttccccaagataaatttaacagctccagcttcagtgtttatcaaaatacaaaagaaaaaagtagaggttgtctttttcgatggcaaatcggacccttgcaggctgagggagagaaagctacatcacacacagaggtggggtgctcccgaggggctgtgggtctaggtggaccgcctgcccggcttgcacgcgctcctgctggtgaggccccagacatcctgccaaagtgtctgagcgagcncgagtnttggggacgacggacccactctggccacacggcgaccgagggacagaaggggccctgcgtcccataggctgcctgaaggtgggtagggcggcctgcggcaaagtggggtggctgtgggctcccagcctggcccctgggaaccgtgggagcacagggacaagcacatggctatggaatgcagggtgacccaaggacaagcgagttgcggggatctctactgtgaccatgcagaattgatcgcagtctgctgcgccaccaccacctcatgttcccgaggggaacagctgggctggcgactggcatccaggccgtaactgcaaatctatgcnaggcggggtctcccttctgtgtgttcaaagtgttctcgacttggattcttaactattttaaaaaatgcactngagtttgggttaaaaaccaaccaccaaaataggatttcaacacagctctaaagccaagggcgtggcaggctctcccaacacagcgactcctggagccaggtgcccatgggcctacatcccctctcagcactgaacagtgagttgatttttctttttacaataaaaaaagctgagttatattgcataatgagttncat

SEQ ID NO: 592636 - DNA, 357 bp, Homo sapiens
gaaaagagctctactactagtagaattagtaacaatgagagtaaacaattgttacccactctaagaatacagcagaagccagcgcggtgtcgcgcctgtagtcccggcactctgggaggccgaggcaggcagattgcttgagtccaggagttcgagatcaggctggccagcatggcgggaccccatttctgctgaagatacaaaagattggccgggtgtggtgatgcacgcctgtggttccggctactcgggaggctgaggtggaagccacctaagcctgggggatcgaggctgcagtgggctgagatcctgccactgtactccagcctggggaactggagtgaggccctgtctcaa

SEQ ID NO: 592637 - DNA, 418 bp, Homo sapiens
gacatctacaggatcccttccacctacgatcccacagcagcagcccactattcctgctcaggcaccacatattatgtacaggatgccgatctctttgtaggtttagttagaatataagtcaacgatttacgaacataggtcacatggctgagtaagcattagactgtaaatctaaagacagaggttaagccctctttttgccagttccgaggtgaatgtcatgtagaattgcaaattacaaagaagcagcttcaatatctgccgggacttctcccgcctatataattcctgcggcgggagaagtagattgaagccagttgattagggtgtatagctgttaactaaaagattcgtgggtatgtaatcccaccaatctagtgaggatttagcttaattaaagtgttagatttgcattcaa

SEQ ID NO: 592638 - DNA, 715 bp, Homo sapiens
  misc_feature (6)..(6): n is a, c, g, or t
  misc_feature (11)..(11): n is a, c, g, or t
  misc_feature (32)..(32): n is a, c, g, or t
  misc_feature (393)..(393): n is a, c, g, or t
  misc_feature (399)..(399): n is a, c, g, or t
  misc_feature (673)..(673): n is a, c, g, or t
taatanttaanagattttattctaatagctanaattacagtgcttgtttgtcgaaatgaaaactgaaaacaagtatacaaaacagttgattactaatcgtgtattgaaagcagtaagaggttccacgacaccaaatagaccagttctgaggtttccccaagataaatttaacagctccagcttcagtgtttatcaaaatacaaaagaaaaaagtagaggttgtctttttcgatggcaaatcggacccttgcaggctgagggagagaaagctacatcacacacagaggtggggtgctcccgaggggctgtgggtctaggtggaccgcctgcccggcttgcacgcgctcctgctggtgaggccccagacatcctgccaaagtgtctgagcgagcncgagtnttggggacgacggacccactctggccacacggcgaccgagggacagaaggggccctgcgtcccataggctgcctgaaggtgggtagggcggcctgcggcaaagtggggtggctgtgggctcccagcctggcccctgggaaccgtgggagcacagggacaagcacatggctatggaatgcagggtgacccaaggacaagcgagttgcggggatctctactgtgaccatgcagaattgattgttgtttgttgtgctatcattattttatgtttttntggggaacagttgggctggtgattggtatttaggttgtaact

SEQ ID NO: 592639 - DNA, 232 bp, Homo sapiens
gatgcatgataaaaaacactatagctagactagaaaatctacaaatgtgtctacgaacaaactacagtcaaaaagtgcactcccgatttcttcatagtactgattctgaagtagtctacatccatgagtttttactggaattgaatgaactttagtctaataatattctatcaagtaaagtaattaaagaagtcctagcttcctatgcatatatctataagaaaacggaact

SEQ ID NO: 592640 - DNA, 104 bp, Homo sapiens
gaatccggctctctggggtggcgtccgactgatgctgttcttgggctggaagatctcgttgtagtcctcggcgttctggatctccgcgcgggactcgcgctcgt

SEQ ID NO: 592641 - DNA, 116 bp, Homo sapiens
tctagaggatccctaatgattgtccaccgctcccagaaaaaacacactcacccccaatccaaatgaatcatctgcatagaaaaccagagtcagcaggcctagggaaggagcggtgg

SEQ ID NO: 592642 - DNA, 464 bp, Homo sapiens
ccaaggaatttggttctagaagcaggaaaaggcaaggaaatagatgttcccctagtgcctccagagggaatacaagtctgctgctaccttgattttggtccacaaaacccatttcagacttctggcctctagaattattaaaaaaataagttgtgatgtaataggaaactaatacttgcctatgggaaaccgcagcaggagatcaaagggagggagggaagaaagtcaagtcattcatatcaggctggttgtatccctcatctcacagtcactgctcctttcaaggtggccttctctactccttcccaaattcagtaaccatgccctcctcccctcatgccttctactgctactctgctgttaccagcccatattactgtgctatcttttttaataccccctacacccaaacctttgtaaacaattttatttgaaaataaattcttaaattatcctaaaaaaaa

SEQ ID NO: 592643 - DNA, 442 bp, Homo sapiens
  misc_feature (108)..(108): n is a, c, g, or t
catggagcatggaatgagtctagtaattgatgaaacacacttttggaaatagtgatctacccaaatattgtgtatctagacagaagattatcactgctgctgctatancataaacaaatgatatagcattgagattaaaataacgcttgccacatattactaagtgatggatttaaagcatggcttctcaaatgtttcttgttgatgtacaactgttttcaaataaatcacttggaactatgttatgtcaccaattatgatagaaaaaaaagggagaacgagaaaggaacttgcttagtgaaaggaaataatctgtatctcacaattacttaaaacaaactgggatgcaaacattttctgtagattaaggctctgatcacatttcatccaataaatctttctgcaaagtttgtgcatgtttgttcctgtttataggtcgagc

SEQ ID NO: 592644 - DNA, 449 bp, Homo sapiens
  misc_feature (404)..(404): n is a, c, g, or t
  misc_feature (412)..(412): n is a, c, g, or t
ttcttattaatataagaaggcaggaatgtcaggcctctgagcccaagccaagccatcgcatcccctgtgacttgcacgtatacgcccagatggcctgaagtaactgaagaatcacaaaagaactgaaaaggccctgcggccgcgtggacggatgagaggccaccatggtgatttgtgcttgccccaccttaactgagggattaaccctgtgaatttgcttctcctggctcagaagctcccccactgagcagcttgtgatccccgcccctgcccaccagagaacaaccccctttgactgtaattttccattaccttcccaaatcctataaaacggccccacccctatctcccttcctgactctcttttcggactcagcccgcctgcccccaggtgaaataaacanccatcttnctcacaaaaaaaaaaattggggggggggggggggggc

SEQ ID NO: 592645 - DNA, 1427 bp, Homo sapiens
  misc_feature (288)..(288): n is a, c, g, or t
  misc_feature (290)..(290): n is a, c, g, or t
gggaaaatcgaagattctggcggatgaagttacttagaccacagagctggttgcatttaccacataccgagatcgtcttacccagtgagaagaaagctcatgaatactaggttcaccgcgtctgtgctgtcgaaaagtacgcctatacgctgaagaatcataaaggggtacatgcctgcgcaaatttcgagatcgcaaagtgatgactaacttaaccacatacaagactggtcatactgctgacaactaacgtaatcctcgctgattgtgctaacccacattggtccntngtaataaagcgacacttacacagaatcacgcctacacaacgtggagtagagttcccttcctgtaagtcctagggaaagtagaggcgtgctttttctgcgaccacgagttctcgcacttgatgcagctagtgttgggtaagcacaactgtcattcccgccgttccctagttcgcaacgacgtttgaggacgacacgaaccccggttggaaaagcagctcctcctacgtacattgcacatgaacgtacattccaatatgtccgccaagcagacacgtgactaaattgaactccctaaggaaaaggggtggcatgactttaatagcgcaactacacaaggattgaggaacctgcgtgtgacccttctttgaagccgtatccaattacccgttacggaaattggtgcttgcaagggcgttttaagtcgccccattctctgttggcggaaaactaggccccctcccggtccccgtggtcagtcgcaagttcccgaagggcaaaatcggtgggtgtataccaaggaccgttatagcctagcttggactcgaaaacacctagggcccagtgtcattccataagggtagagtgccgttccatatttcgctcccctgttaagcaggccatgaggggtatttacctggtccgcaatgttgtaacacaccgggcccaagaagtgtgcgttatacaaatgttaacttgggttccattcctctgatatacgatgtggtgtgtcctcccgcagcttgttcccctgttgttttcgccaccaaagcggacacgttgtagcccccacatccttgttcccaacgcttacacaggcttattccgactctcggacaaatttggggttgccacggaggcgccccctgttggtattgacccccaagtccagaaacatccgctaatattatatcgggaagcataacggttgggaagactcgcacacgcacaatcctcctgttcaaaggcccatcactatatggcagggtggtcaaaccccccatgtctattagtgaaggaggctacccatcaggagacaaccccggagcatattatctaccatacggcgaaacagcacacattatgtatgtgtgtgcgccgcaatgagagaggaatttggcccggatttcccagaaatcg

SEQ ID NO: 592646 - DNA, 316 bp, Homo sapiens
ggcctgtctctggactcctgcacattccgaaccatggaaggtaggcaaaccacatgatctccagctgttttatctttttagatgtatcattgtcaagttggtatggcaataaaaatgtctttcaaaagttgaaaacaaatgtccgtctttggcccaatctcacacacaaatacccagaaagttggaagttaaggaaggtaaattctcagtggtggaattgtaggttattttaattcactttattgaattgctttttattttctaatgtttggcattgtgtcatttaattaaaataaaacatcatatatgttttaaa

SEQ ID NO: 592647 - DNA, 616 bp, Homo sapiens
  misc_feature (19)..(19): n is a, c, g, or t
  misc_feature (79)..(79): n is a, c, g, or t
  misc_feature (124)..(124): n is a, c, g, or t
  misc_feature (437)..(437): n is a, c, g, or t
atgggcatccttggtgggngaccacctggataatattgcccatatggtggccaagggagcagctgtaccatgaatatcngaccatgtccaggatcagtgtactcaatgcactggaggaggcatngacaatcctttctataaaaaggaatgctatatggttgtcaacccattcaccacgaccagcctacgaagcccctggacagggctgtcttctgggttgagtttgtcatgcgccacaaaagggctaagcacctgagatcacttggacataaccttacctggcaccagtaccactttctagatgtgatcggcttcctactctcttgtgttgcagtcactatagttcttactgtaaagtgcctcttgttcatttaccgattctttgtaaagaaagaaaagaaaattaagaatgagtagagctcattgacaatggactncatgaatgaactttcaccctcattctaatttatgaaccaccttctaaatactgatttgatttttttttaatcaaggcagatcttctttggaaatttttactgtgtaagaagacatgtaaatctgtggatactgatccattttcaaaaatctcatattttttttaaatttcaaactattt

SEQ ID NO: 592648 - DNA, 86 bp, Homo sapiens
cccacgcgtccggacccacgcgtccggcccagcagagtcaggtgcggacgacttgtctgtaggagcagcggcggcttgaggacccg

SEQ ID NO: 592649 - DNA, 202 bp, Homo sapiens
gtgtgtctggtctacagccagaggttatactcttggcaatgagtcttcatgttatagttgaggaaaatggtaactgagaagtggagtgaatgaccgtatcggctcagccagatccatgccagccaggttcagaactatttgcatcccccctgttaaaagtccgcctgaatattgattagtgcaggaagaatgtaattcaatg

SEQ ID NO: 592650 - DNA, 851 bp, Homo sapiens
aagtgacagcctgggcacggtggcttacgtctgtaatcccagcacttagggaggctgagagggtggatcacaaggtcaggagttcaagaccagttggccaagatggtgaaaccctgtctgtactaaaaatacaaaaaattagccgggtgtggtggcgggcgtctgtaatcccagctactcaggaggctgaggcagagaatggcgtgaacccgggaggcagaggttgccgtgaaccgagatgcgccactgcactccagtcctgggcgacagagcgagactccatctcaaaaaaaaagaattataaaagtgacattgattggtgtgcaaaaggacaaggcattcaataaatgctgtgggggactattggctattcatgaagaaaactaattgacatgggtatcgtcctttatgaatcttgtatataaatcacattttgtgtgggaggtgaactgtaaaaattcatattgtggacctataacttgtcatgagaacatttcgacaagtagggagggattttggtgaacttatcaggtccaagattgtggccccgtcatacgactaaaagtttagaaccattaaaattagaaccttgcctgtgaaggaggaactgaagggttcaactgcgggtaccacttaggagacatattctgtgacccgtgtaatccataagtttctagtttaccctgtcggtgatccccttctcggcagttttcgcgccctatcctcaggcttttccctaccagtttggcgcacctttgaaagctggcggggcctgctggggggttgtgtcgcggggaaccccccctgctgggggggtttacgggcaaccctcggcgcccgcggggacctgg

SEQ ID NO: 592651 - DNA, 452 bp, Homo sapiens
  misc_feature (101)..(101): n is a, c, g, or t
  misc_feature (104)..(104): n is a, c, g, or t
tgagaatgatggtttccacttcattcatgtccctacaaaggacatgaactcatcttttttatggctgcatagtattccatggtgtatatgtgccacatttnctntatccagtctattactgatggacatttgggttggttccaagtctttgctattgtgaatagtgctgcaataaacatatgtgtacatgtatctttatagcagcatgatttataatcctttgggtatatacccagtaatgggatggatttctagttctagatccttgaggaatcgccacactgtcttccacaatggttgaaagacgaagagacatacaaagcattcaccaagaccaaagtttctcttttgttcctattaaatagctttaattaaaacacaaggaaccctaaaagcagaaaataccattgcatttcattatattttaatggcaaatgatattatacaaaaaa

SEQ ID NO: 592652 - DNA, 426 bp, Homo sapiens
  misc_feature (304)..(304): n is a, c, g, or t
  misc_feature (338)..(338): n is a, c, g, or t
  misc_feature (370)..(370): n is a, c, g, or t
  misc_feature (422)..(422): n is a, c, g, or t
ttgacatagcctggctctgttacctaggctggaatgcagtggcacaatctcgggccactcaatcctctgcctgccacattcaagtgattctcccaactcagcctcctgagtagctgggactacagacatgtgccaccatgtctggttaatttttgtatttttagtagacagggttttgtcatgttggccaggctggtctcaaactcctggcctcaagggattcactcaccccagcctcccaaagtgctgttactttttcttcatagtacttaccataaatttaaaattttgccttatttatttnttttccttgttagcctgggccttttcaccaaccncacccccaaaatgaatgggaagtttccactanggacaagggttttttgtacatctttttcaacgttaaaattaatttgcttcanggtc

SEQ ID NO: 592653 - DNA, 345 bp, Homo sapiens
tgagatggagtctcactcctttgcccaagctggagtgcagtgatgtgatcttggctcactgctccgcctcccaggttcaagggattctcctgcctcaacctcccaagtagctggggttacaggcatgcatcaccacatccggctaatttttggatttttagtagagatggggtttcgccatgttggccacgctggcctcaaactcctgacctcaagtgagccacctgcctcggcctcccaaagtgctaggattacaggcatgagtcactgcgcctggccaatatttgagaaatattgatcaagaatagaatatctctggtcgacgcggccgagaatttagtagta

SEQ ID NO: 592654 - DNA, 160 bp, Homo sapiens
gagtattcatctacatagaccacaaatacattgcaagaccatacctattattctgcgcttcaactgtcatgtcctaggcacagctctaaacctccttattcgacccgatctgggccagcctggcgaccttctaggtaacgaccacatctacaacgttatc

SEQ ID NO: 592655 - DNA, 142 bp, Homo sapiens
ctctggatgtaaaaaagcaaaagtgcaatggcactttggtaaaacacacagttgttcaacctatgaaggattacatcctttgggcaggttttattcccaggatatcaaaccccttgtccatgagagcagctactgtttcaca

SEQ ID NO: 592656 - DNA, 172 bp, Homo sapiens
tcacttctcacaatgaggctcctgcttaacttcttgggcttctaattcttttggtctctttgattccattgggataatgttatgactcagtctctcactctctcctgtcccctcacacctcggagagacccggctctcatatttctctcagatctagacaaagactctcgca

SEQ ID NO: 592657 - DNA, 234 bp, Homo sapiens
cccactatgaatatagatagaagaatataaatatatatacatatatacataatatacataaatattcataaatatatatatcacataatatataaatatatatacataacatatgtatataaatatataaagatatgtacacaacaatctatacataatatataaatatatatacatacaatattaatatatatacacacataaatgaaaggtattaccctgggtagtcacaga

SEQ ID NO: 592658 - DNA, 723 bp, Homo sapiens
gctgttcaagttgtctcttcaattagatgctcgcataatattgggtgccgaaagcccgggatagggggaactcctccggaagacctctcactctatacctaccacggtgaccgacgtacgtcccatgcaaagagacattccctcgcctctctaggatctcagactcagctccgcgagctagtccggcctcatgtcttatggatattgaaatccaacaagccggtcacggacttcgttcttggggagacagccttccttcaggtgttgggtgcaatgcccgggacgcccgccttggccatttggccagccacacaagccaggagctccaattggggacgcccactgaggatcctagtggttgcatctgttccttggtatctttcttttccccccaggtctttccttgttctaatcatgggcaaatttcccgaccgttccatcgcctctttcttctgtctgggcattgtgtcctactaagaatagcctcaaaaactcttcaggctatgcacccagtactaaagaggctaaacgtctaattttatgttgctgtaacacgtgctggccccagtataaattagaaaatggcgctcagtggccagaaaacagcgacttccaatttctctattagtgggacttagacaactctctatggacacaatgggccaatgggatctgaaggtacccgtacttccaaagcatttgttacatacgatctctccctag

SEQ ID NO: 592659 - DNA, 640 bp, Homo sapiens
  misc_feature (57)..(57): n is a, c, g, or t
  misc_feature (504)..(504): n is a, c, g, or t
aatacccaatataatataaccaccacacaaccacccagaccaacaaaaccaccctcnatgagtggacttagccatggctcttcacaaacagcaactcttcgtcctcattgtagagatggcgatactaaggcataccttggctagcctggacttcacttctgcaacattttattgatgaaagcaagtcacaagaccagactgattcaaggggtggagaaatagaccctacttcttgatggagggaggagtacagctaccttgcaaacggatctggacaaaaaaaggattgaaccattacagaagcatgacctacaatccacccccatccccctcgcacccgcctgactcctggatccacacatgtctaccaatacccgaactgccactctcgacttcactcccgatgctatccccctcatagcgatcgctgcctccactcccaccctaccccgcaacaccgcatctacagccaggtcagcatctctatacatacctacccattanttaatggcgtttccataggtctttgttcgactatagcgaacgataagccaccactcacacattctccgaaccgacgcgagcatctcatcactctacgccctccacagagcgctttcgtacaggcatctcttctatc

SEQ ID NO: 592660 - DNA, 341 bp, Homo sapiens
ggtcgacgagggagtgtatagaattgatcccaggagaaacaaggataatcggacgggcatggtggttcatgcctgtaatcccggcactttgggaggccgaggcaggtgaatcacctgaggtcaggagttcaagactacctggccaacatggtgaaatcccgtttctactaaaaataataaattagccgggcgtggtggtacatgcctgtaatcccagctactctggaggctgagacaggagaatcacttgaacctgggatgcggaagtggcaatgagccaaaattgtgctattgtactccagactgggcaacaagagtgaaactttgtctcaaggtcgacg

SEQ ID NO: 592661 - DNA, 205 bp, Homo sapiens
  misc_feature (73)..(73): n is a, c, g, or t
  misc_feature (178)..(178): n is a, c, g, or t
catctaaaggaagacagagcatcaagaaatgcaggtttggagttcccgtcgtggttcagtggttaacgaatcngactaggaaccatgaggttacgggttcaatccctgacctcacacaatgggttaaggatccggcgttgccgtgagctgtggtgtaggtcacagacgtggcttggancctgtgttgctgtgtctgtggtatagg

SEQ ID NO: 592662 - DNA, 302 bp, Homo sapiens
  misc_feature (3)..(3): n is a, c, g, or t
  misc_feature (16)..(16): n is a, c, g, or t
  misc_feature (62)..(62): n is a, c, g, or t
  misc_feature (65)..(65): n is a, c, g, or t
  misc_feature (139)..(139): n is a, c, g, or t
  misc_feature (176)..(176): n is a, c, g, or t
  misc_feature (278)..(278): n is a, c, g, or t
gtnccaaacgcctggncattttcttacctgctttgacaactaaataacctttaattttcttnttnctttttaattgaaatcaagtaagaaattttattaattttggaattgaaaaaacatcctttgttgtttccaaganttaattaaataggaggcatttggcggtattatgtggntaaccctttaattttcatgactgacatgtattatcctaaagttatttgacttgtcccctaatttctctccacgttcccaaatggtcttatttcaaaataggngtcatttttctcctggaaaaaata

SEQ ID NO: 592663 - DNA, 342 bp, Homo sapiens
  misc_feature (48)..(48): n is a, c, g, or t
ctatagaggatctcccaagaagctggtgctgttgtgtactcagcaggncgcatcctgggggctacgtaaccaaccacatatacacctgggtggaccgcaggccgcagcatttcccacccttgggctgcccagcccacggtggtgccctgaggcagcaggagggtgaccggaggagcaccctgcaccttctgcaaggaggggatgagacaaaggtgagtggggtggggaaaggaggccagcctctcagacaccggtattctccctccgaacccagaacagcagagctgctttggaggccgcaagaagaggctggttctgtccaggctctgtcttccctcaagt

SEQ ID NO: 592664 - DNA, 1499 bp, Homo sapiens
  misc_feature (140)..(141): n is a, c, g, or t
  misc_feature (194)..(194): n is a, c, g, or t
  misc_feature (234)..(234): n is a, c, g, or t
  misc_feature (280)..(280): n is a, c, g, or t
  misc_feature (289)..(289): n is a, c, g, or t
  misc_feature (303)..(304): n is a, c, g, or t
  misc_feature (316)..(316): n is a, c, g, or t
  misc_feature (917)..(917): n is a, c, g, or t
  misc_feature (941)..(941): n is a, c, g, or t
  misc_feature (967)..(967): n is a, c, g, or t
  misc_feature (974)..(974): n is a, c, g, or t
  misc_feature (986)..(986): n is a, c, g, or t
  misc_feature (998)..(998): n is a, c, g, or t
  misc_feature (1038)..(1038): n is a, c, g, or t
  misc_feature (1087)..(1087): n is a, c, g, or t
ctggctggctgtgtggtgctggggaccctgtgagcgggaagatggcgtgctgtgcgcagtgaggcggacggggcccgcagctgccgtggtggcggccgggggaggcagctccggtcaggtgaccagcaatggcagcatcnnggagggaccctgccagtggagacccagcctcagaacccacctggcccagcctngcacccaatgcctggcaggtcatcaaaggtgtgctgtttnggatcttcatcatctgtggccatcagcatgttgtgttccgcctgangggcctggnccctcagtgaccanngcgggccccggnaggagccccacgcgttcgccagcctgaaacctgttccccaaagacactttaatgaaccttgcatgttgtacattctcagagcacgagcactttacagacttcaacgccacgtcggcactcttctgggaacagcagcgatcttgtgtatggcgactggactagcggcgagaactcagacggctgctacgagcactttgctgagctcgatatcccacagagcgtccagcagaacggctccatctacatccacgtttacttcaccaagagtggcttccacccagacccccggcagaaggccctgtaccgccggcttgccacagtccacattgtcccggatgatcaacaaatacaagcgcagacgatttcagaaaaccaagaacctgctgacaggagagacagaagcggacccagaaatgatcaagagggctgaggactatgggcctgtggaggtgatctcccattgggcacccaacatcaccatcaacatcgtggacgacacacgccgtgggtgaagggcagtgtggcccctcccctggatcaatatgtgaagttcgacgccgtgagcggtgactactatcccatcatctacttcaatgactantggaacctgcagaaggatactacnccatcaacgagagcctggcagctgcngctccgngtctccttctgnccactctcgctntggcgctggcagctctatgctgcccagagcaccaagtcgncctggaacttcctgggcgatgagttgtacgagccagcagatgaggagcnggactcgtgctgaacggtggccctgtctggaagaacaaacgcctaactggtggcgctcactatcatcagtgatatattccgtaacaagatgccgtacttccgagattagctcggcactttcaatctgaaaatgcatattcccaagctttcgttggaaaccagccctggcagtccccttgggacgggccctgttctggtagagccatcccagatcattccgtatccggcacgttcgtccacaacgtcattcaagagggggacactcactacataaaatgactcttgcgacacaaagggagacccaaactgtcgctggtcccaacagtcgacgcccgttctccaaatcatgggggggtaccttcaatctgaacctcatacgaagatccacacacaggacattgggcacgatccg

SEQ ID NO: 592665 - DNA, 87 bp, Homo sapiens
tgcagtacaactaggcttaatagggacatgtagttagcttttaattcctgtttggagaaaaaaaacgttagaagcttgaattcgagc

SEQ ID NO: 592666 - DNA, 1527 bp, Homo sapiens
  misc_feature (140)..(141): n is a, c, g, or t
  misc_feature (194)..(194): n is a, c, g, or t
  misc_feature (234)..(234): n is a, c, g, or t
  misc_feature (280)..(280): n is a, c, g, or t
  misc_feature (289)..(289): n is a, c, g, or t
  misc_feature (303)..(304): n is a, c, g, or t
  misc_feature (316)..(316): n is a, c, g, or t
  misc_feature (945)..(945): n is a, c, g, or t
  misc_feature (969)..(969): n is a, c, g, or t
  misc_feature (995)..(995): n is a, c, g, or t
  misc_feature (1002)..(1002): n is a, c, g, or t
  misc_feature (1014)..(1014): n is a, c, g, or t
  misc_feature (1026)..(1026): n is a, c, g, or t
  misc_feature (1066)..(1066): n is a, c, g, or t
  misc_feature (1115)..(1115): n is a, c, g, or t
ctggctggctgtgtggtgctggggaccctgtgagcgggaagatggcgtgctgtgcgcagtgaggcggacggggcccgcagctgccgtggtggcggccgggggaggcagctccggtcaggtgaccagcaatggcagcatcnnggagggaccctgccagtggagacccagcctcagaacccacctggcccagcctngcacccaatgcctggcaggtcatcaaaggtgtgctgtttnggatcttcatcatctgtggccatcagcatgttgtgttccgcctgangggcctggnccctcagtgaccanngcgggccccggnaggagccccacgcgttcgccagcctgaaacctgttccccaaagacactttaatgaaccttgcatgttgtacattctcagagcacgagcactttacagacttcaacgccacgtcggcactcttctgggaacagcagcgatcttgtgtatggcgactggactagcggcgagaactcagacggctgctacgagcactttgctgagctcgatatcccacagagcgtccagcagaacggctccatctacatccacgtttacttcaccaagagtggcttccacccagacccccggcagaaggccctgtaccgccggcttgccacagtccacattgtcccggatgatcaacaaatacaagcgcagacgatttcagaaaaccaagaacctgtctctcctgtcagcaggttcttggttttctgacaggagagacagaagcggacccagaaatgatcaagagggctgaggactatgggcctgtggaggtgatctcccattgggcacccaacatcaccatcaacatcgtggacgacacacgccgtgggtgaagggcagtgtggcccctcccctggatcaatatgtgaagttcgacgccgtgagcggtgactactatcccatcatctacttcaatgactantggaacctgcagaaggatactacnccatcaacgagagcctggcagctgcngctccgngtctccttctgnccactctcgctntggcgctggcagctctatgctgcccagagcaccaagtcgncctggaacttcctgggcgatgagttgtacgagccagcagatgaggagcnggactcgtgctgaacggtggccctgtctggaagaacaaacgcctaactggtggcgctcactatcatcagtgatatattccgtaacaagatgccgtacttccgagattagctcggcactttcaatctgaaaatgcatattcccaagctttcgttggaaaccagccctggcagtccccttgggacgggccctgttctggtagagccatcccagatcattccgtatccggcacgttcgtccacaacgtcattcaagagggggacactcactacataaaatgactcttgcgacacaaagggagacccaaactgtcgctggtcccaacagtcgacgcccgttctccaaatcatgggggggtaccttcaatctgaacctcatacgaagatccacacacaggacattgggcacgatccg

SEQ ID NO: 592667 - DNA, 287 bp, Homo sapiens
caggaattcggcacgagctcttgtgagggccggtgggggtggggggagcgataacttaagcaggggccagagttccaggagcatgagggaacgcctgccttccgtgtcatgttcgtttttctacaattctcaactatagcctattgaacttctggtgacagtatcttgcgcaagatgagaacagctttaccaggaagcagaaggaaacttgttcttggaatggcactaagcagatcgcagcaaagttaaatgccactgaataaacacaaccaatgctgaaagaaaaa

SEQ ID NO: 592668 - DNA, 486 bp, Homo sapiens
  misc_feature (1)..(1): n is a, c, g, or t
  misc_feature (192)..(192): n is a, c, g, or t
  misc_feature (197)..(197): n is a, c, g, or t
  misc_feature (209)..(209): n is a, c, g, or t
  misc_feature (247)..(247): n is a, c, g, or t
  misc_feature (292)..(292): n is a, c, g, or t
  misc_feature (309)..(309): n is a, c, g, or t
  misc_feature (318)..(318): n is a, c, g, or t
  misc_feature (381)..(381): n is a, c, g, or t
  misc_feature (390)..(390): n is a, c, g, or t
  misc_feature (425)..(425): n is a, c, g, or t
  misc_feature (439)..(439): n is a, c, g, or t
  misc_feature (467)..(467): n is a, c, g, or t
  misc_feature (475)..(475): n is a, c, g, or t
ntttcgtcattaagggttactatcaaatccgtatgccgtgcgggcgcgcgccccttacatcagtatcggcaccacgctcgccaccggcgccaccaacgaccttgcccgtttcgcgtgccattctcccatcgacttctcccttccttgcatcatctctttcatctgcgagtcattctcgtttttcgcgttggnccttngcgcctgtgccntcgccaccatcggcattttcttcagttttgcctttttncgttccacctttagatcctttttgcgttcattaagtttattcagncataactataattattncctcgactnccgacataggttatcatcgcaaactttagccgtgttaaccggtatgcatattcggtcacattnccttttcanattttacatttccatttcccattttgaaggaattnccggtggtaaccangaattgcaaatcgtttattcggtatagnttccaacngaaccttcctc

SEQ ID NO: 592669 - DNA, 312 bp, Homo sapiens
cctgtttttttccagggcctgcttttgggggcagggaccttgtgaacccctcatttttatgcaaggggcatccctaaaacctgaaatgaggaaaacttcaagggttttacagggcccttgttttttaaatccaaattgataataatgttctccaaacccagtgagaggtttgaaggctggcttttgaaaaatccctgatgttttattggaacaacccctgagctacggaaagcttttctgtgatgggctaggccctttatatttgtgtgaaaacaaatttataaaaccggttaataaacttatccaaggtca

SEQ ID NO: 592670 - DNA, 1059 bp, Homo sapiens
gagcaggtcaggaccttttccatgagaaatatggggagagccttgggcatcaagtagcccggtccaggtcccctacaacgcggatcaagagtaacccgcggtctccgaggtatcatcgaggggctgctcccgcaggaatcccgcatcccgagatgccctgttaccttgcggctcccagaacgcatggtagcaggattcttgcatgtggatgacatagtatctaagttctacaggtcagcacagtgccttttcctaaaggactccatcaccaaatagcctgatgaagatgacgccaacagacctcggggaggaaggtgagtccatgcggggcatgcgacgtgaaaggagactcttactaaacgagagaatacgggtgaggccctgggactctgaaccaggacggtgctggtcccttataaactacatccgggagcgagcccacgagcgcgggtggcagggtcacgggttctgagctgatgaccatcccccgtatcccggcaagccccataccactgtacgatcactaacaccgtgtgatcgaaagaatctgaaaggcccctgaggaatcgtagttccggatggtacaatcatttaaggaggtctcctaacacccactagtcatgaaatctgcaatgagtggctatggtgcctgctcaaaagaagagagaaatggtcgcgaaagcagcgaagtagaaaatggggtgctcggaagagggacgaggttccggttgcgtgcatcctcccttggttgtgcctaattccgcgatcggctaaccaggactcacgtagccatgggacacccggaatccactcgtggtaaagttggccgacattggcatccggattcaacaatgtgggcgctaacccaaaggtattgcgaagcgatctatgcttgtgattgggcctggaggggaagaacggagatggtgggagaattggccgcgggagaaaaagcacactgtgacacaagagcatcactcaggcgcgacaacgacagcagagacaatcgtgagagaggaaggagacacaagacaacatgcgccaacagagaagaaaagt

SEQ ID NO: 592671 - DNA, 279 bp, Homo sapiens
atctaagtccacgattggaatacattgtaccaaataattagcttatgatcttaaaaatgtcaaggtcatggaaagtaaggaaagactaaggaaacgtcacagagttaagaaatataaagtcatggcaattaatgcaatgtgattgtgaactggatttttttttataagccattattgggacattggaagaaatttgaatgtgatctgaagaattaatggtacatgaagtataaattttaattcatggttttggtggtatatggtgattatatagaataa

SEQ ID NO: 592672 - DNA, 131 bp, Homo sapiens
gtgtgctgttgtgcggtcatagctcagtgtatgccttatcctcctggctatagcagtcctcctgccgtcagcctccctagtggctgagaccacaggcgcatgccacctgtgagtttctagagatgaggtct

SEQ ID NO: 592673 - DNA, 147 bp, Homo sapiens
aaggatcctgtgggctgatggttttgataagatgatgagtttggggatacgtagttgcctttccaatacctggccattagcaagaaatgctaggctgaatgcaaacgtcgctgtatatactagagatggagactatgatcagatatt

SEQ ID NO: 592674 - DNA, 1119 bp, Homo sapiens
gggctcctcagattccagacacaatggaggagaacagcgagagtctggtgcactcgttccccgtagtgacgatgcggatctgtgcatggagactcgagagcatcgacaccgacgtggtgtggggacccaacccgtccgggtacgtgtgtatgattgaccaggcaagatgcgtcacggagaaggttcatggaaaagttagatgacttgtatcggatatgtcatgacaaggagattgataacgcatgtgtagtgaagcgatcatccagggtgctgtcagatgcttagttacagcatagctccttaatagtaaaagtgagtcgcatgcatgagaattagctgacaggtgtttgctataagtttactcgataccaatcggaaaggtattcaagatgcttgggaaaaaggaggtagtaataagtatcatgaccaaggaaggattctcgattgcagcatggtaagaatatatcagaaagaagaagatgatttgatgattgggtaagataagaaaaaagtgaggaagtcaatgagcgttctctgggtgctaggaaaagtgtacatgtgaggctggaagggcaacagaattggacttgcccttggaatgggtaccttattttcgtaggcccggtgaaaagattcatgggcatagcaaagctaaagaggaagtgtggttagcttatccccgtggggttaagtatcgaaatagccgggggtttcatggacagggctacatggattagcacatagtctggcccagaaatcttccggcggaagggcttcctttgatgacgaagaaattgttcgcaatggtcctgattacttcagaagcacccttttgggggccaacgtactatcacggcataaacttttctgtgagcacccatattaagggttgagggcgccgctaagcggaaaacgaggcacaggtagttgtgaaaaacctttcagtggtttcctcatgggagaaaatcaaagtagcaatgtgacattgggggggaacaacgtatggcgatttgtaaactggtgtatagagaaggtcagggagggaagggaaacgtgaagtgggttaatggatgaagtcacaccttgatggaaagaggtatgaagaatgtagagaaggtg

SEQ ID NO: 592675 - DNA, 348 bp, Homo sapiens
atattcaagggagagcaagctagatccttccctaatatagtagaatagtcatgctaggccacaagaatcatctacccctacaagtcctagcaggattctcacaatgtttcctctgccctgggaccctctgtacctgagtttctgctgctcttctccctcttcccgctggcatctgctgcccttgtctgatgaccctcctgggtgatttccaccatgctagccccaagcccatacttcatttgcacaaaatcccagtcacacaaggttgctgtgcagagcagacttttcccaaaggtttagactgatgggtgcaggagttgctgctcagtgtggagggaacagactgca

SEQ ID NO: 592676 - DNA, 878 bp, Homo sapiens
gatcccggtgtcagtggcgacagccgcatgcggtgttggtgggcgctatgcatatcacccgcgaggctggagcgagtgcttgcaggtatcttgtagaagtggaggagctcgccgatgtagcgtgctggcggtacgaagccgtgcacgtacttgttggatctgggactagctatagaggaatcataatcgatagggtctgagggcctctgaatggaggatcttctaggcgcttcggtctgaaagatgtgagtaggtttgcttacgggaacatgtttatcaagatgccctcatcgctgagactaaaggaaatgattgaataaagatcgaagatcatctggatagaacgaaatagaatagaacgtgcggaatctaatttaaagtgagggtcaagcgtctttattgaggcccaaggcagatcggggagctgaagggttttaacattgaatccccactcaaccagtgatgagcttaatagctctcaaggtcatcttgaaaggatgagactcaagaagcaagatgggggaccagcaacccccaggtcatggaggagccaggacctccaacttgacacctgtaaggacaggatctgccctgtaaggggccagccgtcaggaatctggcatgaaaagctctttgtagtgcttggtactctgtgatggcaggagggaaccttcagctgtctggtgtggactggacacagggttcggtggacacaagatctattgacgggcttggtagcacagtgggtggtggggagggtgtgggggggtaaaatgactggcaaggtttcagaatggttgtgtattggccggcaagaaggggggggatggggtttatcgacttaaaggggaaggtaagggggcggatggaaaacaggg

SEQ ID NO: 592677 - DNA, 809 bp, Homo sapiens
  misc_feature (4)..(4): n is a, c, g, or t
  misc_feature (83)..(83): n is a, c, g, or t
  misc_feature (87)..(89): n is a, c, g, or t
  misc_feature (92)..(92): n is a, c, g, or t
  misc_feature (108)..(109): n is a, c, g, or t
  misc_feature (114)..(114): n is a, c, g, or t
  misc_feature (126)..(126): n is a, c, g, or t
  misc_feature (140)..(140): n is a, c, g, or t
  misc_feature (146)..(146): n is a, c, g, or t
  misc_feature (154)..(154): n is a, c, g, or t
  misc_feature (162)..(163): n is a, c, g, or t
  misc_feature (165)..(165): n is a, c, g, or t
  misc_feature (171)..(172): n is a, c, g, or t
  misc_feature (185)..(185): n is a, c, g, or t
  misc_feature (198)..(198): n is a, c, g, or t
  misc_feature (201)..(201): n is a, c, g, or t
  misc_feature (206)..(206): n is a, c, g, or t
  misc_feature (210)..(210): n is a, c, g, or t
  misc_feature (229)..(229): n is a, c, g, or t
  misc_feature (232)..(232): n is a, c, g, or t
  misc_feature (241)..(243): n is a, c, g, or t
  misc_feature (263)..(263): n is a, c, g, or t
  misc_feature (284)..(284): n is a, c, g, or t
  misc_feature (291)..(291): n is a, c, g, or t
  misc_feature (294)..(294): n is a, c, g, or t
  misc_feature (296)..(297): n is a, c, g, or t
  misc_feature (304)..(304): n is a, c, g, or t
  misc_feature (307)..(307): n is a, c, g, or t
  misc_feature (320)..(320): n is a, c, g, or t
  misc_feature (334)..(334): n is a, c, g, or t
  misc_feature (338)..(338): n is a, c, g, or t
  misc_feature (340)..(340): n is a, c, g, or t
  misc_feature (342)..(342): n is a, c, g, or t
  misc_feature (348)..(348): n is a, c, g, or t
  misc_feature (358)..(358): n is a, c, g, or t
  misc_feature (402)..(402): n is a, c, g, or t
  misc_feature (424)..(424): n is a, c, g, or t
  misc_feature (443)..(443): n is a, c, g, or t
  misc_feature (471)..(471): n is a, c, g, or t
  misc_feature (474)..(474): n is a, c, g, or t
  misc_feature (477)..(477): n is a, c, g, or t
  misc_feature (479)..(479): n is a, c, g, or t
  misc_feature (516)..(516): n is a, c, g, or t
  misc_feature (578)..(578): n is a, c, g, or t
  misc_feature (580)..(580): n is a, c, g, or t
  misc_feature (635)..(635): n is a, c, g, or t
  misc_feature (698)..(698): n is a, c, g, or t
  misc_feature (807)..(807): n is a, c, g, or t
tctngggaatctacaaataggaaatcaaaggcagattactgggtctgaagagtgtctacattgttaaaaaaatcttgtttttntttnnnttnggggaggtagattttnncagtnactctggaatantgtgaaaaatgttntttaanaatatatntgtatatnntnctgcanntgtttcatagatntgttttttaaatnatnttggntgtnctgattattttttttttanttnttgtacttnnnagttgatgggaacacgcagnagctcatactcaatattaggnactagtnatntnnttcaggngtnctttagttttttnttagctgtattgtncatntntntttttnaatgtttgcntttatacaaactgtgtatattatgtatggggtgtcagatatgtncacatcactgttatataatagncacatcattgttgtacatntgaggataagttttagtgcgagaaagtntcnttncnttgcattccatgtgttcaatctagttcacaatttgtnaactcttcagattattttccagtacattcctcattagattgtgggtttcaagtttccatttncnatttgaatgtttccagaaatctctgtcttaaccaaacctctctctccaggcacgnttctgcacatgagtctgatctgtgtagagtagtatcatcaaaaatgccaaattttgatcaggnatatacctggactactctctttcaaaggcaattgaacatcgtgataaaggatagcatctattcaggtcatggaaggatatggtcagttgaacttgtgttgaactttggngg

SEQ ID NO: 592678 - DNA, 793 bp, Homo sapiens
agcggggcgttcaggccaccatggccgtgctgctgctgctgctccgtgccctccgtcggggtccaggcccgtgtcctcgagcgctgtgtgggcccagtgccctggcctggtagtccagggttccccgccaggcccggggagggggcgtgcgtacatgtgccagtcaggcctccggtggcgaccgtcgctcgaggctggaggccgagctctgctgagcgttacgatggagactgcgtaacccctacctttgaagggatcaacggattgatgttgaaacgacatttcgttcaggactccaggtcatgactctggcgacttttaggtggtactttctacttttgaactacctcaatggttgaagcacgaagacataaggacgcaagggactagtgtcgactggggaacggctgcctgaccaggacgaagaggagaggagacgccgtgagcgggacgagcagatgtaccgatgagcggctgcgcaccattgctggtcatcggcgggtgtgtcatgagcctccgtgagagtgctcgtcagcatcagcggaggcagcatttcctggaacgacttggtccagggagatgctggccaagggcgaggtgcaggcagcggtccaggtggtgcctgagagcggacgtggatgagaagtcttactgtagcctgggagccggtggcgttcggggcggccctcggatagccctgatgtacgaagtgcaggttggacaatgttggctcgtttgcagagcagcttcgagccactgaagatggctggatttggggccatgccaggatcca

SEQ ID NO: 592679 - DNA, 292 bp, Homo sapiens
ctccatgatggctgagtgtgtaaaagaaagaccaggtggtctggctagtggctcacccctgaaatctcagcactttgggagaaaagaccaggtggtctggctagtggctcacccctgaaatctcagacaccctgggaggccaaggtgggtggatcacttgagatcaggcgtttgagaccagcctgggcaacacggtgaaaagccatctccactaaaaatacaaaaattagctgggcgtggtggcgcaagatctgcaatcccagactacttgggaggtctatcagcgacgtag

SEQ ID NO: 592680 - DNA, 799 bp, Homo sapiens
  misc_feature (425)..(425): n is a, c, g, or t
tttgttctttcttcccttgctttttgtctacactccttaaggcaaactacttgggaggctgaggcaggagaatcacttaaacccgggaggcggaggttgcagtgagctgagatcgcgccactgcactccagcctgggcgacagagcaagaatccatctcaaaaaaaaaaaaaaaaaaagtaacaagactcttaacagctgtggagatctgtgcctattctgagtgcttctccactacttcctgatactgatttagctctgtgtatatatttgttgaagtaatgcttagatcttagttgtattcatccagtgccctcccaatcatgttttgtgtggaatagcaaatcactttctgcttgtattccaaaaatgttgcagaaagacttgccaccctgctggggactgtccctgccccctgaccacttntggcctgccttacactcgattattttgggcaaaaagtgcaaatcaagactgagatgtcaggccaggtgcagtggctcatgcctgtaatcccaacactttgggagccgatggatcactcaagcccaggagttcaagaccagtctgagtaacatggcgaaaaaaacctgtctttacaaaaagtaaaataattagtgaggcgtgatggcatgcgcacacctgtagtctcagcttctcgggatagtcacagctacttgggaggctgaggtgggaggatcacctgaggccagggacacaggtacatcaaggctgcagtgggctgtgatcacaccactgcactccagcctgagtaacagagtaataccctgtttcaaaga

SEQ ID NO: 592681 - DNA, 512 bp, Homo sapiens
gaggatctatagatggcaagtaagcatatgaaaagctgttaaactccataagtcatcagggaatgcaaattgaaaccacagcgaggctatgacttacttatctcaatggctaaagaaaaaatagtgaaaataccaaatactgatgaggatacaaactggatattttatacattgctgacaggaatgtaaaatggtacagccactctgggaaagagtttatgaatttcttatcaagttaaacataattttttaatcaagttaaacataagacccagcagttgtgctcctggacattcattccagagaaatgaaaacctatattgtacttgtactcaaatattcataggagctttatttgtaatagccccaaactggaaacaacccagatgtcctacaacaggtacatggttaaacaaaccatccataacttggaatactggtttggaatgaaaaggaactaactgttgaaacaaaaacttggttgttcctccaggggattatggggtaccaaa

SEQ ID NO: 592682 - DNA, 384 bp, Homo sapiens
gcggattttagagaaccccggacaacatccttcggtatattcgattacttatacactgaggaggcatggcttgagaaaaaaccttgcgtgataaactcagaattattccacttttaaggatgattatttctatattggtagaattagatgacattgtaactgaatattaagggagtgttctagggcatttacttcttaaatagaagaccttgatattaataaaactaaaaaaaggttatcatttttttgagacaggatctcagtcaccaaggctgcagtgtagtgatgcaatcctggctcactgcagcctgaacttactgggcccaagcaatcctcccatctcagcctcctgagtagctgggacaacaggcgcaggccaccatg

SEQ ID NO: 592683 - DNA, 1843 bp, Homo sapiens
  misc_feature (101)..(101): n is a, c, g, or t
  misc_feature (262)..(262): n is a, c, g, or t
  misc_feature (327)..(327): n is a, c, g, or t
agttcatggcttgtggcgtgtgagttcacgagacctaggtttcaggccccgtctctactgtgcagcgacgactgatgccctggtgcgcgtcggagaggtcnattggtcctactggaaggcatgacagatgtatcccttcagtctgttcgagcaatcgacgtatcgaagcacaaagtagcatctcctgggaaaccctcgttcatgacttgttcttatgcacactgttaggttgcgcacaacccatgcggatgagtgccgtcantctatgatgttgagaacatgatcagcacggaaaacattgagtccacgtctggaccatcgtgtggngcgtgtcattgcgtgctcaccttcaaggactccctatctgcttcaaatcacccatacggttgcaggtctgcccattcgttcattatgttccaagtaacagggtccttcaattatcccttgcgcaattcggcatgcgtggagacgcgcgattcattgcttcttttgttaacaattttcgcgagcgattgcaccaaggaagagtacgctacgttcaatgcaagtttcgcctttggtagaagggcggtagtgaactgcctccattaccacaaccccacaaaagggactttggcgccggaccattgtgtccccaatgtggttcatttgagcgccgaggggggtcctatgggcttgaaggggcggacgagtgggtgggggccacttcacaagggaacaaacttcccgggaacacgggggggacaatatggataaggcgcccactcgcatataatcgcccgatttatggagccctccttaccttgtgggaggctgagatgtgccgactcacacaggtgcaacaacattgtaccggagctgcacgaaatctcctttcgaattctccctaaaagtgacgtttatatcaccgacacatggcgaattcgttcggcaaactttgccttcgtgcaagttacaggacttcctccgatttacagtcgaggcactcccccagtgtgtgggcttgttccctttttggccttcccacgttgcgcccagagcgagaacttggattggaaatttccttaactttgtgccttggtagacggaattacacacttggggttttgaccccatcgtataggcctctaacgcttttacccaaccttagggtcggcgcccaacttcgggtttgtgtgggcccaaggtatgcaacagggcctttaccaaaaccgcttatagaggtgcgccacacttagagtcggagcaggggttgcgcccccagagcagtagattggcgcagagagttataggccgctctgagaactgaggcgccttttaggtggcacatttagtgaggcgcagagattgtcccgaaccgtgttatttcacaaaatagacggctgtgggtgctttgtgaaacaggagcaagcgggtaattcggcgcgacatttaacaaccccagcgccgctggcatctaggtttggtcggacctccccagcaacagatgttctgcgcccgtgtaacacaacgccggcaccctccattaacactatggtggacaacctgcgcacacatggtgcaattgatctgtatgaacgagccctgtgccggcgtccccccatgattaagcatttcgtgcagcggcaaccaccatcacgtgcaccaggcactgaccagtttcgttacacactttcttgtaggcgtgtctcctccacgaaccatgctattgctgtccatcgccgttattaatcacagttaggtgtaccttctggcagacgcaacatgtaatagacagaacagcataatgcaaccacgatatttaatgtccgtgtgacgcaagcacgtccgatacgatcgtatt

SEQ ID NO: 592684 - DNA, 281 bp, Homo sapiens
agtgcgaggcagcctgggcaacatagcaagacttgtatctacaaaaaaatttttaaaaattatccaggtgtggtggtgcacacctgtagtcctgggaggctgagctgggaggattgcttgagcccgggaggtcaaggctgcaatgagctgtgatcgtaccactgtactccagcctgggtgacacagccagaccccatctcaaaaataagaaataaatgaaacttatgtttgtcaagggacattatcaagaaaatgaaaagacaactcacggagcggtggag

SEQ ID NO: 592685 - DNA, 654 bp, Homo sapiens
ggcatagctgttcagagttcccgtagctagacacgatctgcacgtatatagaaaattgagtacaaagtgtatgggtacgtgattagatcctaccactgctaaccaacaaaacagaactcatttatcatatccattttattcactccaaattttaataatacacttcccatatgacatggcctgtggtaagactctcaggaattagaagaggaagaacgagacattctgctgccctccccttaggtgaaggtggtaagcagtgctgatacacataaacaagcatttacaattcggtgtgttgagtaagtacgagatcctagaccacatggaaagagcacctaacttactctagatgggtcaggagttcaagaccagtctggccaacatgctgaaaccccgtctctctaccaaacatagaaaaatcagccaggcgtggtggtgcatgcctgtagtcccagcccctcaggaggctgaggcaggagaatcacttgaactgggagatggaggcggcagtgagcagagatggagccactgcactccagcctgggcgacagaacaagaatcatcttaaaaacaaaaacaaaaaaactaaaaggatattaatatattacactattttagacatgctatttcttcttaaccaaagatattttg

SEQ ID NO: 592686 - DNA, 479 bp, Homo sapiens
  misc_feature (321)..(321): n is a, c, g, or t
agttcgacggagactctctcccttcttgggtctctctattccctgagacaaaacagtattgaaattaggccaatgaataaccttccagtgacttctgcaggttcaagtagagcaaagatccacacgtctctcactggaaatcaaaaactagaaatgattaagcttagtgaggaaggcatgtcaaaagctgagatcagccaaaagctaggcctcttgcaccacttaggcttagttgccaatgcaaagcaacgtttcttgaaggtaattagaagtgctactccagtgaacacaggaataagaagaaagcagaatagccttatngctgatatgcagaaagttttagtggtccgtaaagaagatcaaactagccacaacattcccctaagccaaagcctaatccagagcaaagccctaactctctttaactataactcttaactctctttaattctagagttatagttaaagagagtctccgt

SEQ ID NO: 592687 - DNA, 475 bp, Homo sapiens
taagaaagagaaaaggcacctatggccatgctaccctgaacatgcccaatctcgtctgatcccagaagctaagcagggtcgggtctcgttagtattggcatgggagaaagagaaaaggggtacaaattcattagcatgggggcgtgaggggatcacaaagtgattatgcaaacttttgagggcctgtttgatattatgaaaataaaatatttttaaaataaaagcacacgattagtctatcaactaaattcaacttgatcatttgtaaaaatagaaattggaaacactaccctccagtggtaatatataatatttcattgaccagttttcctaacatttcacataaaaccttgaaactcaaaatagagattacagtaatcattaatttcactaaataaaatgaatgtgggtaaactgaattgtctttagtgggccactgaatagcacgctcactggagaaaagttgccagcaggg

SEQ ID NO: 592688 - DNA, 306 bp, Homo sapiens
tgttctggctgtcatgaagcacaggtgtccaatgttgggctgggacttggtacatagtgttcggaccacctctacgtcgaagaagtaattcacgcccccaacggtctgtagcctggctcttagtacccgcagcggacgtctgtagtagtcatctttggtggccttgttttaactctctgatggcgaagtgaagggcacgctgtaccccctccatcattgaggtctgcgttatagattccacccgggattatcctattcttctccttttggctccaggccagggccccagttcgggtggtcagcagg

SEQ ID NO: 592689 - DNA, 319 bp, Homo sapiens
cgctgatttccagggatgaatttcccttttcggggacccttctggagaaaccaaaacggggggaatttaacaaaaaggggttaaaattaaagcccttttaaaaggggattttggggaacccccgggattgggcaaaaaatccccaaatcggcaacaaatttggaaaaaatccaaaaaaaatttttaaaaaaaagggggaaaaaaatcccccgggggaaacccaaaagaaggggccccccctaaaaaacctttttggcccccaccggggcttttccaaaaaatttttaaaaaaaaattccgtagggaaattagggacttt

SEQ ID NO: 592690 - DNA, 113 bp, Homo sapiens
gcgaatctcaatgcagggtctaaaagactggtgttattgctgttattgtggttgtggtgatacacagttgttgctggaattgttgtgctggttatttcagaaagaagagaatg

SEQ ID NO: 592691 - DNA, 458 bp, Homo sapiens
tcttctccccgtacacataacaaataaaatttcctctgataacaggagcataggtcgaaaaaatgtgttacagtgcagatgagaattttccttagcactttcaactgtgaggtttatgtagatggggtggccaggaaaagcatccctgaggaggggccttgtccatggtgagtggattgactgggaggcaggcatctgcccgtctgaaaatctcttacttcagagagaatggtaaaacactaaatttgagaacctggtgcgatataggactagaagggctgacatggttggcaccaagctaaattgaggggtgaacgtgagagggatcagatggcagaagtacacggggcccagcgggggtctgttagccacggaaaggggttcgggctctgattcattcttaatgcccctggaacgtataatcgtgggcaaatgatgggtatgtatgctcaaaaagt

SEQ ID NO: 592692 - DNA, 344 bp, Homo sapiens
agaatttccttcaataccagtctgaacccctgtacatccataagccaattcttcactaattaccagagcttcaaaagttccaagtccaagacctccacagttctctgaaatgtgtgtgttcatatcatattctgcagcctctggaatgatttcctctctggcaaatttacgaccagtagcttgaaattctttctgctgttcggtgaactcaaaattaaatcctaatcgtggttcacgttgtcgattggcttttgtatgctgtgatctacaatgaaccagagaaatacttctcaggaccgtacagcatcgcgcgaaccccgctgacatgttggctcgcgttgcgg

SEQ ID NO: 592693 - DNA, 898 bp, Homo sapiens
taaaaaaaggcagggtctgacggtgtctccttagtctagggggcaggggggcaatcacagctcacggtagcctcaaacctccggggctccaggggtcctcccattctttctgccagcgtggaacgttgctaggactacgaaggtgactaatttaaacaattttttattgtgggtagaagaagtggggtactggaactccgcggggcctcgaggcgagtggctcacagtgtggtgcctcccagagggcagcgtgggactcatagggcgctcactacacacacgcgtgggcatcgtgaagcagggttgtgcgagggcgtggtgggggcaccgcgtggggcctctatctcaagcgtggccccatctcgtgtgggcccacactgtgtgtcccgcggacgtcgtggggtcatcatacactacgtgtgagaaggggcgtgaaaacggcccctctcacctgtgtggagagagaagacactccgagggaggcgtgtgtctcccctctcttttaatcgccaagggggcctacggagtgtgtgggaggcatcctccagaacgcacggcgtattctcacttgggggaggaatggtaggcgcaccccgggcgcccggggagctcccccgggcgcacttcgggtgagcatcagcacacgcgtgtggcccccaacccacgtggggcagaaatgagctgaggaggcagacggctcaaaggaggaccgccataggagtacaacagggagagggaatgacgccacaaacgcaacagggtggggggtaggagaaagcaatcacagaagaggagcgacacgccaggggtatgaaatacgaaaaaactcacaaggggcccaaagcggggcactaactaaaccactggggggaaacaggaccaaggggggcagcaccgg

SEQ ID NO: 592694 - DNA, 1013 bp, Homo sapiens
  misc_feature (30)..(31): n is a, c, g, or t
  misc_feature (35)..(35): n is a, c, g, or t
  misc_feature (153)..(153): n is a, c, g, or t
  misc_feature (179)..(179): n is a, c, g, or t
  misc_feature (188)..(188): n is a, c, g, or t
  misc_feature (211)..(212): n is a, c, g, or t
  misc_feature (216)..(217): n is a, c, g, or t
  misc_feature (229)..(229): n is a, c, g, or t
ggtcctgcttttcctgcctctgcctacctnngagncaggaaaagcaaggagccagaattaagaggttgggtcagtctgcagtgagttcatgcatttagaggtgttcttcaagatgactaatgtcaaaaattgagacatctgttgcggttcttntttttttttttttttcccccgggaangtgcggggngtgatctcagctcacggcagccnncgcnnctccggggttcnaggtgatcctagtgcctcagccctccgtgaagaatagcgtgggaataagcgggcgcgtgtgtgtgccaccagtgccccagccataattttgtggtacttttaagatatctaaagtgggcgttccatacatttgtgaccacaggctgtggtttcttcacaactctcttgtgacctctacagctgtgatgtgcggcctgtgcccttgtgcgcctctcacacaaaacgggtgggtgagaatttacgacagatttgttgagcgcccaccggtgaccctatacacttacatttttctgtgatacacaagagcgctataaaggcgtgtgaaaacacttggggttgcgactcgttcccttgagagagggagaaagcgcatatatttgggggcggctctaaaggcgctgatgaaacgctgtcaacagtgctttatattccccatctcttcatacacttacactggggcgggcgacacttctccccttatgtcgtaacgagcgctcctacaaaaaagcgcccagggataccttggcgcgcggcctaaacacaggtacaagtgttcactccccactgggagcggaagggcgcttatacaaggggggcgcgccaagcaaccatcacctcctgtggcaccttgaacgcccaagggtaacattggagttcgtggaaccccactcattagagaaggccttctacccctataagcttttgggggcttaacgggagacagagcgctagcagaagccgttttgggggagaaacaccctgctagaccacaaatttataacgg

SEQ ID NO: 592695 - DNA, 377 bp, Homo sapiens
  misc_feature (62)..(62): n is a, c, g, or t
gaaggggaaggagcagcttgctattttcttggagttctgtagcatagacagctggaggaacnattttaaaaatcacctgcttccattatggagtcagattctcccttttattaccatctcttttcttggactccatgacagtctgttatttggatttttaatctgacaaaactgatgtccaagggaaaggaatgtattatttgagggctcaaggttatgtcaattttgctggttctcagtgatccacactgtctgttgggttaggctggcgtggacgaggctctttgggggaatctcagatcagacttagggatgtggggatggagaataaggagattattccggactctctcccctctgcccttctgtcgtcttct

SEQ ID NO: 592696 - DNA, 254 bp, Homo sapiens
tagtaagttcaactcttaatagaagttgggattccacgtgtgagatcacgtggtcgtctttctagtacctggctatattttactttacgtaatgtccttcagtacatcccatttctcgcaaatgacaggaattccttctttttttatttaagaaatagaagtaccactcttgtggcccagagctagaagtagtccacaggtagacacgtacagaacaaatgagtggttggatgacaagcatgtggtgtagagac

SEQ ID NO: 592697 - DNA, 933 bp, Homo sapiens
  misc_feature (30)..(31): n is a, c, g, or t
  misc_feature (35)..(35): n is a, c, g, or t
  misc_feature (153)..(153): n is a, c, g, or t
  misc_feature (179)..(179): n is a, c, g, or t
  misc_feature (188)..(188): n is a, c, g, or t
  misc_feature (211)..(212): n is a, c, g, or t
  misc_feature (216)..(217): n is a, c, g, or t
  misc_feature (229)..(229): n is a, c, g, or t
ggtcctgcttttcctgcctctgcctacctnngagncaggaaaagcaaggagccagaattaagaggttgggtcagtctgcagtgagttcatgcatttagaggtgttcttcaagatgactaatgtcaaaaattgagacatctgttgcggttcttntttttttttttttttcccccgggaangtgcggggngtgatctcagctcacggcagccnncgcnnctccggggttcnaggtgatcctagtgcctcagccctcctgattagctgggataccggggcgtgtgccaccccatgcccagctatttttggtttttttgagtatagagggggttccactctatttggcaccgaggctgggtctcaaactctgtgaacctcagttgatgcgcctgcctgggcctcccaaacggctgatgttcacgagtatgtgacgccaccgcaccctacctctttttctggtaaccaaaggctaaggcttgaccactggtggatggtcctggaggggagggcatatggggcgcttaaggctggtagggtcaaagtttatacttcttaaattttggggggattccctatgtaggatgtctaaaaacgccgggtcctgggtcgctacaggtcaggtctccctgcaggaggggttaagggggcagactcacctgcggggaggaggtcactgctggtagcatatagagcctctccctagctgtgggttatgggggcttggaggtttgcgcaaccctgaaccaattttacgcattagatctggtcaggggatcccttcccattaagggcgttggttcctccaggaaattttgtcccgggctgctggcgtaaatgtcggaacgtcttattgtgaaaaccctttttgccccttaagacctgggcttttcacccgctccgttgctacccgggggggtgacctggggtgggccctg

SEQ ID NO: 592698 - DNA, 231 bp, Homo sapiens
tggtactgtcaactgtgacttgttcaaaactctgctgtttgacaaaaagcttttctcgcgcattaacgaccctggattcattgcgaagatcaacgatcttcgcaagggaggtgagtgtgccaatcaggacttaatggtcggatacaaaagtgaaaagtcagtgcaaaaagcagagggtaaccaaaagccgtcgacgcggccgcgaatttagtagtagtagtaggcggccgc

SEQ ID NO: 592699 - DNA, 459 bp, Homo sapiens
  misc_feature (302)..(302): n is a, c, g, or t
ggctttactgcgaacatcctctcccttcaaaaagggaaatgctcagagactcagtactcctctgcctccaatgtacctgtgtcagtcttgcgtttcttttttctatgtgaattacacttgtatatccaactgggagcactttaggcatcgtgtgcgccatgggatggtcattctgtggaggccttgcttgtgaatttgctgctattttagtttcctcttgctgtaaaactagcattaaacaatcattgttgttaataggctttctttcagaacaattatgtgaaatatatagctgctcttcntgaaaagcagcttcgcatctttttctttggactttgaagctactgcattgaaaaagtgcacctacccctccctgtttgaatgctgtattaatgtagtataattattactggttttgtaaatttttcttataatgtcccctgtctttaaaacatggtt

SEQ ID NO: 592700 - DNA, 915 bp, Homo sapiens
gcaaaagtgaagccccgtagtaaacattatatgtaaccactcattcgagtcgagcgtccccagcccatctcaacagtctccggcgtgatgaagagcttcggtcgtcactccttggcggcctgcctgatccgtccaaagtcgagccacaggacgtattcctaggcacactgcactactgcaccagacgcactcaggccgcctttgtcatcaatcggcccacatcactcgagacgtaaattgagtggctgaatcatccgctaccgtgtcacgccagatggcgcctcaatattctattatctgcctcttacctacacatcgcggcgaggccatatattagcggatcatgctcgtctactcagaaacctgaaacatcggcagttatcctcctgcttgcgactatagcaagcagccttcataggctatgtcctcccgtgaggccaaatatcattctgaggggccacagtaattacaaacttactatccgacatcccatacatggggacagaccgtagttcaatgaatctgcaggaggctactcagtagacagtgccacacctcacacgattctatgaccatttcacgttcatcttagccttcatggtagcagcccttagcagacaactccagctcctattcttgcacgaaacggggatcaaaagaaaccccctaggaatcagctcccagtaccgactaaaatcaccttccacccttaactacccgatcacagaggccgctcggcattacttctcttaccttctctccttaaagaacaataaacaacaataacaacaccagaagctcctagggcgaccaagagaaaacaaagccaagaccacacaccataaacgcccgtccacaaatccagcccgaatgacataacaactcgcgacgacaaaaccccagaacaggcccaca

SEQ ID NO: 592701 - DNA, 92 bp, Homo sapiens
aaccccccccccccaaccccaaaaaaaacggggcacccaactaagggtctttgtttgggtttaataatcccggatttttgtttgttagttta

SEQ ID NO: 592702 - DNA, 89 bp, Homo sapiens
  misc_feature (58)..(58): n is a, c, g, or t
ataactttggatgaaagttcccaggtttggagaacaatggctgttgcttaatttcaantggaatcaaacattttctttcacccacccta

SEQ ID NO: 592703 - DNA, 242 bp, Homo sapiens
taagagaagaaggaaggaaaggacggaaggaatgaaggaggaaggaaggaaggaaagaaggaaggaagaaaatgaagctgtggcagcttcattttcttccttccttctttctctttcttgaaagaaagagaaagaaagaaggaaagaaagaaagaaagaaagaaagaaagaaagaaagaaagaaagaaagaaagaattagaatagtttatccctcgaattccttccttctttctctttcttt

SEQ ID NO: 592704 - DNA, 166 bp, Homo sapiens
tgtgtctggggatgaggagggcctgggttccaatggcagagcctggggcttggcttcagagctgagaaaggcctggactggaatctctcacaaggcctgcccggctggtgcctgggcctaacccctggtaagggtatacctgtctggagggggtaacccccagctt

SEQ ID NO: 592705 - DNA, 918 bp, Homo sapiens
gagggcgggtggagtcgcggagtagtcctcatggccgccccgccggacccggtgagcccgagagaggaagtcccttaagctcctaggattttagatgttgaaaatactccctgggcccggcaattcaatattgtatggttcatataggatctgttgtggcttggctttggacatttttgtgttcactagtagaattagaagatcatgtgatgttggagtaggagggttttatcttggtgaacttgggggatgctggtttcattgtacggtataattaatgcaaacgcaaacggaactccaggaaaagaattgccagagaagaaattaacaacagaagatattatatgaaggtacccaccttcgatcctgaaagaaaacacaagggaagcaaggcagaaatgtggaacaatcttgagcaatagaagtcaatgtaaaccgaagttaggatcaacacataaaacaatttcatgtgcaataagctctcaatccaagtaaataaagttaaaggtgtagtcatttttttttccccacactttgtggtgcgcactgaaaaccttgccagtgtattcctgggcccggtgtcctacctgcagggaatagacttcttgtcaggtgttacaatataggggggacttggtcatcccctttaacaactgttgacacccgcaacctcaattggccgtcgtggcacacggcacttatcacacccttcgtgtacactggaactcggagggtgccctgtaaggaacgaacggtacacccaggtcggcgtgcccacgcaacggtcccttacaagaaccttacgtttattatctatcccatttataacgacgcatcatctcagaggctcgcacagcccaagtgcctgggcacatacaaccacgggctaccatctgcaacaaatgaaagcgacaccag

SEQ ID NO: 592706 - DNA, 102 bp, Homo sapiens
tagaatcgagctcggtaccacacggccacccccttctgatggagggcgggaggagaggagttagacagcagcccatgtaggagtacatgcagcacccagtgt

SEQ ID NO: 592707 - DNA, 260 bp, Homo sapiens
gcagaaggaggtacagcaggagctgccggtgtttcagagtggttttcagtgttctctatgcctgggggaaggggcaagtcaacctcagggcctgctgatagaccaggcacgagcaatgcttgggctcctgggattgggctatcaattgatagcccaaccccgggatgagtggcgtcaactgccccctgatgataatactagcatacgggcattcgatgttggacaactaccgccatctagtctctctggcgtatgattat

SEQ ID NO: 592708 - DNA, 302 bp, Homo sapiens
ttcatgtatgacccaaaaaataggtcgggttttaaaattttttaaaaaaaaaagttccaaagtaaattgaccaatgtttttaaagttatttttgttttataaacttttttgtggtatgtatcacagtctttataattttatttaaagtatatttgtactttcaagtattgatggaaatagactcaaaacagttatttctctccaattaatttccaaaggaaaaaaaaattgttgccttttaaaacatttgctggatatattatatgcaattaatagtagttaaaaatttattcatttggtaa

SEQ ID NO: 592709 - DNA, 183 bp, Homo sapiens
  misc_feature (54)..(54): n is a, c, g, or t
taagacatcctcagacagcggaccccaccacggacagcagcactgctcagagcnagcacgatatgctgatgatgactgagggcgcgggcgcctgcaggtcctgcggcagtgcagcagtgagtcgtacaccttgcactgaatctggcctggtgctctgcacaaggcagttaatccataggccca

SEQ ID NO: 592710 - DNA, 114 bp, Homo sapiens
agtaggctcggtcctctgacacggtaagatgtagccagtggggcaatgtcatgcaatgtgtccatgcaaggcaccccagttgcaagcatgcagtgagaacctctcatcctgggc

SEQ ID NO: 592711 - DNA, 88 bp, Homo sapiens
ctctctggattgtcagtaatgtcctggaacagaagcctgtgggatggccttgggacggagaagccctggggtcagtgtcgtgcacgga

SEQ ID NO: 592712 - DNA, 115 bp, Homo sapiens
gagatcatgccactgcactccagcctgaatgaaagagtgagaaaaagaaaaaaaaataaacgttttaactattggtataaataaaactttatctgcattttaattaacttgagag

SEQ ID NO: 592713 - DNA, 364 bp, Homo sapiens
aaagaaaacataagtttcagccaggcatggtgggtcacacctgtaatcccaacactttgggaggccagggtgggagaactgcttgagcccaggagttcataccagtctaggggcaacatggtgagaagttgtctctactaaaagtaaaaagaattagctgggcatggtggcatgcacctgaggtcaggtcccagcgacttgggaggttgagaggttggaggattgcttgagcccaggagatgaggctgcaatagcatgatcacgccagctgcacttcagcctgggtgacagagcagagagcctgcctcaaaaaacaaatatgtttcaacttttttataataaatatgttcatttaacaactagc

SEQ ID NO: 592714 - DNA, 253 bp, Homo sapiens
  misc_feature (6)..(6): n is a, c, g, or t
  misc_feature (11)..(11): n is a, c, g, or t
  misc_feature (18)..(18): n is a, c, g, or t
  misc_feature (25)..(25): n is a, c, g, or t
  misc_feature (145)..(145): n is a, c, g, or t
  misc_feature (171)..(171): n is a, c, g, or t
  misc_feature (224)..(224): n is a, c, g, or t
gaaagnagaanaaaagtnacatttnagatggaggctgtaaatatctggacattttctatatattgtttatatgttttcttgtttttctcttgttgtttatatcatattttctttggggtttttttaaaatgcctttgtaacagcncatactttcctgctgacatatctgancatctcttacaagcagttgacaatgttaataactaaaaataatctggattatnataagaaaatgggaacttgcctctgtttt

SEQ ID NO: 592715 - DNA, 461 bp, Homo sapiens
gcggacatccccttaccccctcccccccgaatttccatctggtccagccctctcatcttgtaggtgaggaaaccgaaggcctgagggagaactgacttgccaggaacccctgttaaggagaattaacaaagagtggttattaaaggagaactgagttgggagtcagacctggaggcccacacgcttggttaagacattataccaccttgaatctggcatgctgactgagggtgagccactccatcctcgtctgattgtggggtcttgacctcaaggggtttcttgcaggaaaaagcaaataggcttgctttcctagctctgtccagtaccttagggaccctgaggaccggagagattcttggagagccatctggtgtatgtcatgggtgggccttttttgaaggtcagtctgcccagtgggctggctcagcccgaatgaactgtcttgaatctttggagtt

SEQ ID NO: 592716 - DNA, 548 bp, Homo sapiens
tgtcctcggttttctcggctgctgtggtcggtcccgcccacagctggggcggactatgtcgagtggcgcccatgggaaagagggctcagttcgcatgtggaagactctcaccttcttcgtacgcgctgcccccggggtggcacgtcagcatgctgaatgtgtaccctgaagtcgcacacatgggagagcgatcgaggagacccgagttcatcgtctagcccccatctccgtatcaggacctaagccggtttcccttggggagatggtaaccatactccttattccataagcctcatgtgaatcctacattccaactggctacgaagatgaataaagagaatctggaccacgtacccgggccgaccaggagcacatgcattggtttggaccgttactctgcacatggggcagaaaaagtatatgggaccttaagctcaagcttcttgacttgtatcaaatgatgactggctatactggtcctcccatcccttttgctgtggtggcaggagaatggcgttaaaataaataagcttaaaacttaacaaaat

SEQ ID NO: 592717 - DNA, 133 bp, Homo sapiens
gagccggggcgggtttgaagacgcgtcgttgggttttggaggccgtgaaacaacccttttgagttttggctgccggtggagaacgtttagtcaagggcccggccaagaaggaaggcccgctattacgtggtat

SEQ ID NO: 592718 - DNA, 479 bp, Homo sapiens
  misc_feature (187)..(187): n is a, c, g, or t
  misc_feature (194)..(194): n is a, c, g, or t
  misc_feature (199)..(200): n is a, c, g, or t
  misc_feature (266)..(266): n is a, c, g, or t
  misc_feature (279)..(280): n is a, c, g, or t
  misc_feature (314)..(314): n is a, c, g, or t
  misc_feature (324)..(324): n is a, c, g, or t
agtaaataaagggtgaacttcttaattattcgaaaactgcttttaatattaggatatactcttttagctcatcttcgctggtcttgaggcttattataattgtcaaatcaacaaagtttctaatagagaagtagaagaaatatcttttgagatgtaagtagcttggtctgtcttctaaagtaatacnatacctngcttnnaaacttgcagcggttaacttctatattatcaattacgtgacacggcattttctaacagtttggtcnactgtcacaaaanncagtagtttaaacaggaagcaagcaaacggcaancttttaaagntattcagaataagcctgtaggtgtgaaggaataagtgttgcaaaatagttatttatccaagctgtcaattaattgattgaagtagttatcaaaatgtttctgtttctttctttggtatctattaactggtcagtcaaaagctattaaagaatgtt

SEQ ID NO: 592719 - DNA, 249 bp, Homo sapiens
  misc_feature (84)..(84): n is a, c, g, or t
gagctgaggaggagcagtccggtgagcaggctgagtgagcacagcgccacctcaacgcagagcggcagcggttgcaggacgagntgaagcagatggaacagaacatttccagctggatccagaagctgtgcaggacaatcagagacaaaagaaaagctccgagattttgaaatcgctggcaactgcacgaatcagactggaccagttgctgtccataacccagggaggagactgagagcctgcgccgcc

SEQ ID NO: 592720 - DNA, 164 bp, Homo sapiens
agaccctgacattatagcagacaccatagcagacacatccaccgaccgtatctagcacgaaacgggatcagacaaccccctaggaatcacctcccataccgataaaatcaccttccaccctatactacacaaatcaaagacgcccatcggcttactatctcttc

SEQ ID NO: 592721 - DNA, 449 bp, Homo sapiens
ggtacccggaaattcggccataatggccgggtccatagcaaataccctttttaggattcatatttacacgagacatttcctttcaatttttaactggtccaaatatattaattaactttgggggaataataggccatatggaattagaaatcagaaaaccagaatttaaggtctgtaacccagtagccaacccaggttccataaaatagtaaaaggggacctattcttaacatcgggtccaattatgaggggaaaaaatttaattaatatccagcaaacccttgaataccatccttcggtaataccagaggatgaggaaaaaggtcttcctgggttttttcaaggtaccctggtcagtttcttccaacatccggaggatatgcatgttaggcaaacggttgggcctatgaagtccaagtttgaccgatggtggttgttggtaagtctgc

SEQ ID NO: 592722 - DNA, 629 bp, Homo sapiens
acagtccaactcggggtgtggagccccagccaggggtccggccccttgcgcggctcagggcaaatcttctggctaccgggtccacagcagttactgggggggctgggcagggtgaagtgtgtgtcaccagagcctgacacagtttcttctcacagataacagcgctgacctcagttggagggcgctcagggctctagaaaaccccaaccaggggaggagcagcaacaccaaagaagtcccatcaggcaagaagcaacactcaccgcagttgccaccagtgctcagccagccggtggacactatgccaccagcactgcagcagaacaagacagtgctatgcccaaggtcatctgtgcaaacccaccacggtgcacacccagggacacggtgcacacccagggccatggtgcacttccatggtgcacacttaccacagggtacacccacagtggtgcaggcccatagtcactatgcacacccatggtgcatgcccaccaccgtgcacgcccagcaccgtgcacacccaacagcatggcgccacccatcctatgcagggtgccaccaatatgctcacccaagaggctgtgcaacccaaagacacgatttgcaacccagtgtgcacggcacac

SEQ ID NO: 592723 - DNA, 411 bp, Homo sapiens
  misc_feature (8)..(8): n is a, c, g, or t
  misc_feature (395)..(395): n is a, c, g, or t
  misc_feature (405)..(405): n is a, c, g, or t
  misc_feature (409)..(409): n is a, c, g, or t
tactcctnaaaaaatatgcagactataaacctaaatttagatgaaacgaatgtacattttcctgctttttgagactgggtttccctctgtcatccaggctggagtgcagtggcaggatcacagctccagcctgggcaacagagagagaccctgcctcaaaaacaaaaaacaaacaaaaagttccaagcaagaaaatgttcttcacggtttatgtcccaggtagtagtcactcttgataatacacaatctctgacacaattttttttttttttttttgagaccgagtctcactctgtcacccaggctggagtacagtggcatgatcttggcccactgaaacctccgcctcccaggtttaagccattctcctgcctcagcctcccgagaagcttcantttacttacntcanct

SEQ ID NO: 592724 - DNA, 808 bp, Homo sapiens
  misc_feature (776)..(776): n is a, c, g, or t
cagacaccttggagttttataatgttttcaactacgttatctaaacctttggtcgttatatgtctcttgtgtggaactgtacttctttgagtatcctgtattatgatcctttctcttaaatgtatattgataattcgataccaacactggaaggggtacagacatgaaaacatgctactctttgtcattgggatatgttttttttttggagaaagccttgtatctgacagaatttacctggttccatccaaattcggagaactagtctaccttcacgatgctgctgcaaaggacaacctatgaaagactttactatcttcccaagctcgtatttatctataacaagatagtgcataagttaccagaatatctgtatgtactattgtacatgtttatacaactgcatgtttctgtagacactaatctgtgtttaatgattacttgtccactgagcctgtactcgtgctttccataccaagtaaatatgaaataatctactttgcacagtaagcagcacaaacgtataatctcaccttggctgttcggagatttgtacgttgagtataaatgtacaccagtttttgctactttgtgaacgtcactctgtgggaggagtgaaagaaaatccaaaagcacttttcaatgttttgttgtttgttctataaagatatgaaaatgtatttttacacttattttacttagtttggaactttacagagcacactataagcaattgaggatataacaaaactactgaaccattttgcaaccagttntaactccgggggggttcttagtttttacgtta

SEQ ID NO: 592725 - DNA, 712 bp, Homo sapiens
aaaactatagactaatatccctgataaatatagatgcaaaaatcctcaacaaaatactagctaatcaaatccaacagcatatcgaaaagataatccaccatgatcaagtgggtttcataccagggatgcagggatggtttaaaatatgcaagtcaataaatgtgatataccacataaacagaattaaaccaaaaaatcacacgatcatctcaatagacacagaaaaagcatttcacaaaatccagcacttctttatgattaaaaccctcagcaaaattggcacagaagggacacaccttaaggtaataaaagccatctatgacaaacccacagccaacatttcactgaacaaggaaaagttgaaagcattccctctgagaactggaacaagacaggtatgtccactttcaccacttctatccaacatagtactggaagacctaaccagagcaatcaaataagagaaagacataaagggcatccaaatcagtaaagaggaagtcaaactgtcactgttcactgatgataagattgtatacctagaaaaaccctaaagactcataccaaaatgctcctagaaactcgtaacatcgaattcacgtaatcctttcagcgatacaacacaactcactgttaccaaatcagtagcactggttatacactaaacaggcaaccaaagctgagattcaagtcaagaactccttttacatta

SEQ ID NO: 592726 - DNA, 427 bp, Homo sapiens
ggcaggccctgggctggaggtcagggataactggccaggaccgcagttgggggtgaagttcccagacctggctgcctcctgagtaggccctgccagaacggctccctcccgatgtgaggttccgcatgtcctcttctgatttatccagctctctgacctcgaggagccaccaaactgcagactgggtccccagggccagtctctggcagggaaagtggctggtgatgcccagagtccccacagtccccccaaggcccccggatgtgaagatgtgcttggcccgggagccccgtcccactggacgcagtctgtggcgtggcccccacctcactgtttgctccacaacgcaggctagaagcactctggggcctgaaggggccgccctggaagccaacccaccccacactcctttaccctttcccagctg

SEQ ID NO: 592727 - DNA, 103 bp, Homo sapiens
aggagtagcagtggtatagatcttggctacactagtaacctaccgcctacccgggtacaagccataacacctgcctacagtactcctaagtagctagggataa

SEQ ID NO: 592728 - DNA, 804 bp, Homo sapiens
agccacttaagacctttaagcccttgaggggccatccctcagaaccgtgtttgaccccacacggggcaattaccaaccccattcacattaatttgtttgtaatatatttgggggtctccgagactggagattttataacaccacgcaactgttatttccccttgaaagatttctgattcacatatgtctagaatatattcaccacgaaggaatggggaacttattctcccatccaagtctaaaattttcagaagtctgtaaaaatggagaacaccccttgaaagaggccgaaccggtaagggggatatattcttagaaaacctcgttggttaaggcacgctgcactgtgataaaagtggtacttgaagcttggtagtgtttccctagaagcctccctccccaaaatatgcactttaccccggggcttgttacccaatttttgaccgtttttcatccactgtccaaaacttcaacccctttaaacctagatataaatgcttacatgtttaagaaaggaagctaagccgctgggtacctcgggatctctctgaactatttttataactttcttgtgagtcttaagtatttccaaataaaagtggtttttaagtaaattcatagattaaatgtatccttatctatatataaccctgatttaaaccttaattttctaaacatagtattccacttagttggataaatatatgatagaagttaaataggatttttatttcattcttaaggaaaactcatgtttgtaaccaatgatattctaaagatctattttgccctacccggaaagga

SEQ ID NO: 592729 - DNA, 493 bp, Homo sapiens
taaagaggaccaaaacaatacaattgtctgtgaatgacaaaaagttttaaggcaaccaaagtcaaagatacaattgacaaggaaatttgttacctctgtggcaatatagcaattataattactgctaataatgtacactaagtcatataagaattataggagtttcccataattttagaacaaataccaataatatacttatacaaacacagcccaaaaaaaccaaacaccatttcatattcaacaacgttctctgtataatttttataagaaataagcaaaattatgtcatttttaaactttagggaacataatattttaaaggattaggtaagaaaaatacataatttataatttgattttggaaagtttgatggaactttgttccacagaaagaatctcagtcaaatatcaaagatttaaaacacctgatgtcacaggtcattgtaaaataagtcattaatttgaccaaagtaataaagatttcaaaaac

SEQ ID NO: 592730 - DNA, 954 bp, Homo sapiens
  misc_feature (663)..(663): n is a, c, g, or t
ttccgcggtgcccttatatattgcgcacgttcctccgttttagcgccgcctttgcacccacctggtgctgcggaactctgcgttactgaccccctcgtgtaattcccatgggggtttcctctgggaccgccacccccttttactggccggccacagtggcccttccacacaaaggtttggtacttgccacgccccatacaaggtgcttgccccaggttgacactgccgcccacatcaagtgctgggtccacgaacgccacttctttcacaaggcaacgtgtatcccaagcgacgcttgttcggtggcaccgaaaattatctcctcccgcggggtttcccccccgaggggattcttccaccacatttatgggtggaaaaaagcgagcgccacacttatttcccggccggaacctccctttggggcttgaactcccccctgaaagagcaaccacccttgggaaaaacaacgcattatgacgtcttgggaaaccactttcgctcgtgttaaaaatattaatatcagaagagtactcggacattatgaaatcccgatttttaactccccgtgtcttctacgcgcctacaaagcagcatactttttatacaggcggccacacccccacggtacaccctaacactagtagtgaatttcctcactctganatctaactttatatggagcaccttctctccactcataccatatatggatattctgtgctcccatcagcactaacccactatcaactccttgtacaatccccaattctccaacgtaactgtaatcttctctctcaaccacaccctgtccataaacaaagtcattatttctagtccgcagactatttgccacaccagatactttttctacacacacggtagttcaatcgcacgccacgcttgttttaaaagaccccctataaatccctaaaaaccttttaaacccacaaaaca

SEQ ID NO: 592731 - DNA, 1011 bp, Homo sapiens
gggatgcttgccagtgggccgggcctgaccgctgcgtgggaggcgggctgcattatttcccgctagggccgcgctccaggaaggaaggggccagacacgtgccctctcagccccgaaccggcgcgctgcttgccctggcgggcggggatccagggcgcggtccgaggcggcgggcgcttgaaccccctgggcctgtggcccgtgcgaattcccccggtggggctttctccccaactgcttcggtggccccgtgggtcctaacccttttcctttccttttcccttcccccttcgggtgcttccccggggagaggctgccttcgggaaaaaccgccccggagctttttgttggggggcgcccggggggggccccaagcaggagacgcccctcggggggcgggcccaaagtttgggacattcatcccggggaacgggacaccccgagaaggcggggaaccttggggaagggcggtggccccggggattgggcaaggcgagggaccgcatatggaagagcggcacgatagaggggctaccaccgggacaaagccgcgaggataaggcgaagcggtaggacaaggcgtccggcaccggcgaacaacgtggaccctggggggcagagcatcccggccactacgccgagaaacacactattttagacgtcgttgatgcggcgccccaggatgcagaggtcacaggggtacactccggggaggagatcacatggggccacacgctgtgccgccggacaacaggcgcggagaatggcccaagaacgccagaggtgccccccggagggcggtaaagggcgcccatcgcgagcaagacggtccccgtggcccgggcgcgtcggcacccacgtatggagacgggccgggacacgctgatttgggcggacggcccttggagcaggcggatgtgcaacgcaccaaggagactcgagggaagggccacttggggacgcgacaaaaggccgagcaggcgctgggaagaggacccaagaccctcggag

SEQ ID NO: 592732 - DNA, 854 bp, Homo sapiens
  misc_feature (255)..(255): n is a, c, g, or t
acccgggagttaccgtgcgggcccatcctggccatgtggggcacggcgaggcttatacggcgcgggcttcgacctgtggtgtttggtcctgcccccgtggggggccctccgtcgtctgggagcaggccaacccggccgcgctgtgtccgcggctgcccccatgctggtcgcctccgaggggcttcctctggcttcttgagcccattcatgccgtgaggccttggccaggatgaatactgtgtcgagttggttgcncctggacaagagacttccacctgaagggttacaagtgtggaggacttcgggaagcccctgtcgagtgaggcagatgaccatggctggcttccccctggacggtcacgtgctctgtcggaagtggccaccactgctaggagccccgacctgagtgaggacaggccctcttctagaccgccaaggtccatgcccccttgtggaccacccaccgctgagacccacctgcccccacctcagttattgttttgatgtctagccccgtcccgatttccgaacccctccgctagcattcccggtgccctgacacccaggaccccacatggtctagggatcgaggatccccgccctggggtctggtcctcgcccaatcctgcagggattgccccccgtgttcccagacacccccccctgaggggggcacccaggtttagtgctgcgtgctttcactgtgcacccgcgccctcggccggccccccgagcagacctttgtactttgcttcggagggctgggagaccctcccggacattcccccaccctcccccctgctgcccagttgtagctatagctaccaaataaaaaaaaaccttgttttcccaga

SEQ ID NO: 592733 - DNA, 516 bp, Homo sapiens
ccgctcacggatacctcaaagatattcatattacagagttatttacagttgcctagttgaattgtatttcatcagatatttatgaggttgtgtttccgttttgtttagtgcatgtttctatgcacatttcacctatttgggacaacagtacatttaatataacgcctcttaatttttaaaataaaagtgacatgttgatctgtggctatgattattatgtttcaatgtttgtcccctccaaatctcacattgatatttaagtccccaattgttgcatgcaacgccccagttgtgaggtattttggtcgtgagggcaagctcccgtgaagggcttggtaccttcctcttggcaatgagtgagttattattgcattagttatcaggataactgattgttcaaaagagcctggcacctccttcctctctcttgctttcttcctctttccatgtgatgattgctcccctttgacttctgccatgagtgaaagcaatctgaggcccttaccagagacaggt

SEQ ID NO: 592734 - DNA, 107 bp, Homo sapiens
ctgatagctaggaccacaagtgtgcactacaccatacccgagctaatttttctgatttccagtagagacaaggtctcactatgttgtccaggctggtcttgaactcc

SEQ ID NO: 592735 - DNA, 346 bp, Homo sapiens
cgtcgacatcagagaggtcttcactgtagtgcgctgccaacccacagctctctgcgtcctcccccaacaggacaggtagcctatcctcatcagagaggtcttcaatgtagtgcgctgccaacccacagctctctgggtcctcccccaacaggacaggtagcctactctcatcagagaggtcttcaatgtagtgcgctgccaacccacagctctctgcatcctcccccaacaggacaggtagcctatcctcatcagagaggtcttcaatgtagtggtctgccaacccacagctctctgcatcctcccccaacaggacaggtagcctatcctcatcagaggtcgacgc

SEQ ID NO: 592736 - DNA, 155 bp, Homo sapiens
gtatcgatcagaatcaggctttggtcgatggaccttgcactccagttaggagacaggccatgcctttcaagtgcatgcagctcactgattgcatcctcaaattaccgcacagtggccaccagaagtatgtgcgacaagcctggcagaaggcagac

SEQ ID NO: 592737 - DNA, 415 bp, Homo sapiens
aggggaggggagttaaaaaggggaagggaaaaaaaaaaaggtcccccggttccgcctccaggatggggggctcccggaaaaaacaagaaagggggctttttatttggattgggggggaaccaaagccttttggttggatcctttaaatgaactggggacccctgggccccttctttttttcaacgggggggggccgggaaacaaattttcccccaaaggttggcttttgggggaaagccggaaaaaaaaatttttttgtttttcaaagccggtttttgggaaaaaaaattttttaaagggccaaggggggggccaaaaggttctttgaaaaaggtggtttcgaaaaatttccattaaattttaaaaaaaccttttggccccccttttaggtaaagaaaaaaaattttgaaccgga

SEQ ID NO: 592738 - DNA, 488 bp, Homo sapiens
  misc_feature (236)..(236): n is a, c, g, or t
ttaaatgaatacatttattctctcacaggatactacactgttacccagtgtgaagggagcagccatgtggtcccaagctcccttagcaaaagggtggttctcaaaactgctccattcacaagtcctgcaaccaaaggcctgggctcaactcacacaaagttctaagcaatggccagcaccttggaatactcaccttcccacttgcacaagctggtggggatgggtgtcttaattcntgtccccacaaggttcccattatcctcaataaagaccacgttattgaaatcaaatctaggggtcattcgaaggccagacatacagtaccccacaataaacacctttttcttctatcccttgataaccaataatatctaatcacccaccttacccactccattcttcttatatacatagatacaacaaaaagcccaataatataaactattgcccaaagcactattatccaccactcgtacccacgtcatctt

SEQ ID NO: 592739 - DNA, 666 bp, Homo sapiens
ggtccatcccggataattgctgaagggtcagcgctgcgaccgtgtgtgttactcttcctcctcctcctcctctggagatacgacgtcttcgtgacgtcgcatgcgttctccgcgcggctgcctacgatgcctctcggacgacgtgcagacgccgagagcctccgctgcccagagtcacctcctgcgccatcgtcgagggacgcgatggcatgctcgccggaggaggagctgaaggatggcgagcgccgctggctccgcccgtccaccgcggcgacctgcggctgctgcgggtgctggtctccggcctcgtcctcggcgactcgccactgcgtgtgggtcctgccgccgggcagcgcggatgtagccgcctgtcccgggagcctggagctgtgccctgaagaggcgggcaaggtgtcttcctggtgcggcatgctcgtgtgggccctgtccttcatggcccttccaggaggaccagcgagggctctgtgtgcccaggatgcgccggctccaggcgggggccggcccagccatgactgaagatgagatgacttcctgttcccaggagtttgtccggcaggaggtctggacagctcaatccgcccctacccaaggaacgacagcgggtcccggaggctgtctccctgggttctcgtgaggggggcgggt

SEQ ID NO: 592740 - DNA, 179 bp, Homo sapiens
gggaactccagagttgtcttggcctgaggaaggtcattggctaaggtcgtactgacgtaccccgtagtggtagtaaagggacacagcagtaggagggtgtaaggtgttgggctgttggagttacactcagtgttcagaggggggtgacaacctggcagaggggttcttggtaggcaccc

SEQ ID NO: 592741 - DNA, 128 bp, Homo sapiens
caggtcaacaaggtcctgcattactcatcaacttagttgatatccattttgtcatgggccgccttcatggaccttggcggatagcccatgttcttgagcacctcggtttgggcgctcggcgtgtgcac

SEQ ID NO: 592742 - DNA, 94 bp, Homo sapiens
  misc_feature (60)..(60): n is a, c, g, or t
  misc_feature (75)..(76): n is a, c, g, or t
gtgccatcctgcagcgaggctgctccaaagggcaaggttaggtagggcagagcacttttnaaatgtagtccgttnncaaagtaggcaccttctc

SEQ ID NO: 592743 - DNA, 815 bp, Homo sapiens
attgacaactgagtggcccacgattgggaagaggggacagcccaggtgtaccggatgcctctgggtgaaggcagaggctaacatggggttcggacgcgaccttggccgtatggcctgaccatctttgtgctgtctgtcgtcgctctcatcatctgcttcacctgctcctgctgctgcctttacaagatcgtgccgccgaccagcgtccggttgtcgaccaccaccacatccaccgagctgtggtgcatgccccttatcctcatgcctccatagtgtgccgcccgaggctaccctggaccaagctaccagggctaccacaccatgcctggctcagaccagggtatgccagctagcaccctacccaatgcagtacccacgcaccgttagcccagcccagcccatgggcccaccggcctaccacgagaccctggctggaggagcagccgcgccctacccctgtcagacaggctccttacaatcccggcctacagtggatgccccgataggcgttgtcctctgagcattccctgtgcctctcgtggctgtccacttggttcatgtacgtgtgtgtgcgtgagtggtgtgcagcgcgcggttccttacgaccccatagtgtgctgtgtgtgtccaggcacggctcttacgccccatgtgtgctgtgtgtgtcctgcgcttgtactatgtggcttcctctgatgctgacaaggtggggaacaatccttgccagagtgcgctgggaccagaacttgtgctcttcctcacctgaaattatgcttcctaaatctcaagccataggtcaaacgaatggggtgatg

SEQ ID NO: 592744 - DNA, 752 bp, Homo sapiens
tccccctgtggcaaggtacctcccgtctgcacatgccagtgcgcctggactacacgtcgccgcacaaagaattctgaagccacatccactctcaacgcattgggaccactcccgttgcacggctggacagtcccagatattatctctccggaaagaccgcttcaatcctcttcttcggtcgcaaacaggggcgatgagtgcccaagtgtggggaatcgagacaaagcgatggccacaccagtcccagtattgaacaactacgggttatttcgaccacatttggggccgcgaagcccagtttttaagtaagcatgtctccgcgccgcgggcgcaataatgttacatgggaagtgcgcccaaggcggggcagtggccgtatatttcgtgcctattcttattgttgcactgaaaagaaatggcgtcctcccccgcaaagatcccctgtgtggcgcgtaaaacacctcgggagtgactccacaaggggggacaaccttccaccgggggcgacagaaacacaaggtggatcctcaggcggctcgggacccaaacggttgctaccacccctgctaagagaaagccccaaggcaggcatcgttggagagagacccgcagcaagaaaacgagggggggcttcagaagacaccactggaccgctgaaggcggagaagaccgccccaactcctcggcggctgtgggaaagaaagcgaaaaaaaagcagcgcgcgggcgtttaacaaaaaggagccgccattc

SEQ ID NO: 592745 - DNA, 827 bp, Homo sapiens
tcaggaacgaggctacatgcacgctgtgtcatgtctccggaaccagctgacctgtggcgaccccatggcgggcagcggaggcgcccccgtgctgcgggtgggccatgaccacggctgccaccagccagcccttactgcaacgcgcccctccctggaccctggaccctatcgggtgaagttcctcctgatggacaccagggggctcacccagggactgagaccaagtggctacagacccgcatacactactccaccaagggaagacccccggataccatcagacacctggccagggacggcgaagtggacagcatgatcgtcatatacctaccatcctactcttactctggccggcctcctactcttggcctatcttggcagcactctaccatgcgcttctccagacctgtggtggcccggagggaggccccggagacagactgacggatcggctccttcatgggacaagcgactacatgacccacccacatcccacccagacgaggaccgaccacactgaccggatgggagctgccaagaccctggaacatgacacaccccatcacacaggactcagaacccatagacatgagacaatcatatgcactggggcacggcggaagactgacgcaacagggaagataagcagccatggcgcataagcccaaaaaccgagccaaccaaagggacggcagcacgtgacgcagccacacacgggccaacgggacacgacgcacgcacgaagacagagaccgacaaggaacaggacaaccaacaaaaacaccggcacccgaaaacagcaagacgacaggcgagcacgagcaaca

SEQ ID NO: 592746 - DNA, 705 bp, Homo sapiens
atgaaaagcattgggattctactcctaacgaatatattcaatggcgttatgctactggtgaagatcgtgaagaacttgacaagaatgaccgtatgcacggtgatgctaacaagaaggtcatggaacaagtcttcgtcatgatggtgagaagcgtactgtgaagaactcgtggtcgtagaaagcttaagcaatcttacgaatacgaaatctctgggtggtcgttcttccgtcgataacacctggatctctcgtcaaaagcttgaagatatgggtttcggcacagaagattgctgaagtcgattccgctgaagccgccaagatgggtcttaaccgtcctcttactgctaaggaaattgagaagcatttaactgatgtcggtcttgaagccgaattcgccactcactctcgtattcgtggtctttccggtggtcaaaaggtcaacgcttgtcgttggtgctgccatgtggaacaagccccatatgtctggtctcttgatgaacctaccaattacttggatcgtgaatctcctcggtgctttggctatggtatcaaggcttacggtggtggtgtcgtattgttactcaacaacgtgaatcactgaagctctctgtaaggagtctggatggttgaggcggtcgttgacccttctggtcacagggtttccggtacggggccctaaatcgaggcaacgacctgcgccccact

SEQ ID NO: 592747 - DNA, 402 bp, Homo sapiens
ccgagtagctgggattacagggccacaccaccacacccagataatttctgtatttttagtagagacggggtttctccatgttggacaggctggtcttgaactcttgacctcaaatgatctaccccctgtcagcctcccaaagtgctgggattatacgtgtgagccaccgtgtccagccccttcccgagttttctcatctggaaaatgagaaagtccaggttggtgctgtctgatggaaataaaatctgagtctcaggcgtaattttacattttctagtagccacagtaaaagtaaaaagaaacaggtgaaatcagttttagtaatgtatttatttatcaaacccaatatagccagaatgttatcatttcaacatgtaatcaataaaaaatctagtaatgaaa

SEQ ID NO: 592748 - DNA, 936 bp, Homo sapiens
gactacaagcgactgtgagctgggctggatggtgcatcctccatcagggtgggaagaggtgagtggtacgatgagaacatgaacacgatccgacgtaccaggtgtgcacgtgtttgagtcaagccagaacaatggtacggaccaagtttatccggcgccgtgggcccaccgatcacgtggagatgaagttttcggtgcgtgactgagcagcatccccagctgtgcctggctcctgcaacgagagcttcaactctattactatgaggctgactttgactcggcaccaaagaacttccccaactggatggagaatccatgggtgaaggtggatacccttgcagcgacgagagacttctcccaggtggacctgggtggcgcgtcatgacacatcaaccaccgaggtgcggcagcctcggggcctgtgtcccgcccgccggctctctacctgacttccacgacctattggcctgcttgcatgtccctcatcagcgtgcgtgtcttctaccgccagtggcacccgggattcattcctcgcattgggcggccacttctccggaaacacctgtcccgcgggcctgagcagccaccctccctgtgagtgcatgctcccgcgcgccacgcatcgcttgtcccactgcgcgacacaccgatgctgacctgctaccccctcttaaagccgtcgtcaccctgtcacccgggcggcccacccggacaccgtggcctcgtctcgtcccccatcgctcgcccgccctgtcccatgctccccacacccacatgggatttcaagggcccgcttcccacacatcgtccaccccctctgtgcgcaccgctagtcccacctctgggcaccgcttctcacggcgcgcccacacagtggcttaagtcgcgtgtcccccgttcgtcccctaccgaccccagcccctcttcacgtagcac

SEQ ID NO: 592749 - DNA, 354 bp, Homo sapiens
gtacagtggaacgactgacatcttgtgcgaccgccgccttcctatttcgctcgttctcggtcactgcttgtacccggtcctcttctgggacaccagcacactgttcttcgtgaacaccttggcacgatcatacgtgacggtagcatgcatgcaggtgtacatgtgcatgtcatagcctgagaacgtacagcccagtgcaagggagcctcgtcatactgcattcatggatgagtgggaccactgagcacttaggactaaggacagtgatgcagccgacttagacacggaccaagtgacctatgacatgtatgcttgtcaagtcaagaattggctctaacatgctgggttctgtgg

SEQ ID NO: 592750 - DNA, 415 bp, Homo sapiens
  misc_feature (36)..(36): n is a, c, g, or t
  misc_feature (61)..(61): n is a, c, g, or t
  misc_feature (94)..(94): n is a, c, g, or t
  misc_feature (282)..(282): n is a, c, g, or t
  misc_feature (415)..(415): n is a, c, g, or t
actttgtcaaccccgggctggagtgccagtgggtanaatcctcagctcactcccaaccctnccgccccccgggctcaagtgttaaattttgtanttttacctacagacagggtttcactatgttggcccaggcaggtctccaactcctaacctcaagtgatccgccccacttcagcctctcaaagtcagggattacaggtgtgagccactgtgcccggcctcctcagtccatttttaatactgaaggtataaattgtataaagatgtttagaaagttctaantcattttatgcatttttgcaaatttgactccatgaaagtgcattatcacgaagctgaatttgtgtaagcattgtgcatgtatgtaaaaacattgcaacttcctcaataaaatatcttctttttgtacatccan

SEQ ID NO: 592751 - DNA, 409 bp, Homo sapiens
gaccacggcgatccacggcggcgacgaagttgttcggagcatcatcgacggcgaccgggatcaggatgaaaatgggggaggcgatgaagggctgaccatgcttcgctgagattgcggcgagacgtatgctgccgtagaatcgttgctcatccgatgtgagcagcgtccgattcttcattgggactccttcgctaactgactaatagtagtctatacgcaggaagccggcctgtctaccgatgcgctgagccaattggaaaccggatcatgtctccttcttaggcggtggctcctgttccctgatgatgccctgcaccttgcccagtctcatgatccagtccagatccgcgaatcggtcccaccagccacggcagatcgcgttctgttgcggctcggggtaccgagctcg

SEQ ID NO: 592752 - DNA, 380 bp, Homo sapiens
  misc_feature (20)..(20): n is a, c, g, or t
  misc_feature (25)..(25): n is a, c, g, or t
  misc_feature (75)..(75): n is a, c, g, or t
caaccccccacatgtattgnattgncaagtacactcccctcacaagccttccttgagacctaatctcctctgccnccccgggagaccccaacctgtgacaattactgatttaacagattgaaaagatagtattgtataaaataatattttgggcaaggcgggtggatcacgatgtcaggagttcaacaccagcctagcccaagatggtgaaaccctgtctctactaaaaatacaaaaattagccgggcatggtggcaggtgcctgtaatcccagctactcaggaggctgaggcagagaattgcttgaacctgggaggtggaggttgccgtgagctgagatcgcaccactgcactccatcctgggcgacagagtcagattc

SEQ ID NO: 592753 - DNA, 1049 bp, Homo sapiens
tcagtccactagcacccaagtgaattaacagccttgtgctcacacaaagcctgtttaggtggtcttctatacggacatgcttgacaactatggtgccataacatctgggccagggggactccttcgtgagaccaggaccccatgatccatggccctcattccgtgaagagatccacctgacgacctcgaggatccgtcagcacagagccaaggaacatctcagccaatattcaacatcggggtcccatggagctctggctcaaagctctctggacatgaactccttccacagataatacctcggcgttagaggctgaagactgactgctgcaccgatcgaactccagaagccccattgagacacatcacagaatgccgcagcctccgagagataacatactatacaggagagagggactctgcaatcagaactactagaacaacgtcccatacacgaccgccacatcacacactatgcggacaacgggtgtaccacagcagaacccctgagtccacactacagacagacggtccgggagaaaactatcaagcccctcaccccagagacatcacccagacggcaactcaccacgacggaggcaaccaacccctacaacgctccatataacaccaccataaacccgcaccaaaaatgtccaggcccgaggcagcacggaagactaacacaaggtaacccccgatgacctgacaaataatccgccacagtggccatacaggagacagaagaacggaacagcccaaaccaccaaacacggaaacaacaggacaggcgtaacgaatcaacaccaaaaaacaataacgcaaacagtactggccccaaaatgcatgcacgaacgagcaacgggaacaacccggcaatctcatcttgacagtaccaagtcaccaggcagtggaacccatagggaaccagtcaggactcacaccaacctagaacacatcaggaactagagacccacagaaagggccagagggaaaaacccaaacgagctacacaaacgcctgaccactacttccagcggctgcgtagg

SEQ ID NO: 592754 - DNA, 5832 bp, Homo sapiens
  misc_feature (5731)..(5731): n is a, c, g, or t
cacactctggggaggggctcctttgcctgctcagttggggaagggacagactcataaactcaagtgcagtgggatgggagaagaagttgtccatgttcacactgggtgaaggaagctgaaaccacagacatgactgagtcctccatgaagaagctggcctccaccctgctggacgccatcaccgataaggaccccctggtgcaggagcaggtctgcagtgccctgtgctccctcggggaggtgcggccggtggagacgctccgtgcctgcgaggagtatctgcggcagcatgacaagctggcacacccataccgagcagcggtcctgagggccatggagagggtcctgagcagtcgcgccagtgagctggacaaggacacagccagcaccatcatcctcctggcctccagcgagatgaccaagacgaaggacctggtctgggactggcagcaggcggcgagtggcgtcctggtggccgtgggaagacagttcatcagcaaggtgatggaggagctgctgcgcaggctgcaccctgggaccctgccacactgcgccgtgctgcacaccctcgccagcctctcggtggccaacgcgttcggcgtagtccccttcctgccatccgtcctgagctccctgctgcccgtgctgggcgtggccaagcaggacacggtgcgcgtggccttctgctccgctctgcagcgcttcagcgagggtgccctggagtacctagccaacctggaccgagccccagaccccacggtcaggaaggacgcctttgccaccgacatcttcagcgcctacgatgttctcttccatcagtggctgcagagtcgagaagccaagctccgtcttgccgtggtggaggctctggggcctatgagccatctgctgcccagtgagaggctggaagagcagctgcccaagctcctccctgggattctcgccctctacaagaagcacgcagagaccttctacttgtccaagagcctgggccagatcctcgaggcagctgtgagtgtgggcagccgcacactggagacccagctggatgccctcttggctgcactgcactcccagatctgtgtgcctgtggagtcctcaagccccctggtgatgagtaaccagaaggaggtgctgcgctgcttcactgtgctggcctgcagctcgcctgaccgcctactggccttcctgctgcccaggctggacaccagcaatgagaggacccgcgtgggcaccctgcaggtggtcagacatgtcatcaactcagctgctgctcagatggaagataaaaagccctttatcctgtcttccatgaggcttcctctcctggacaccaacagcaaggtgaagcgggcagtggtgcaggtgattagcgccatggcccaccacggctacctggagcagcctggaggtgaggcgatgatcgagtacatcgtgcagcagtgcgcgctgccccccgagcaggagcctgagaagccaggccccggcagcaaggaccccaaggccgacagcgtgcgggccatcagcgtgcgcaccctctacctggtcagcaccaccgtggacaggatgagtcacgtcctctggccatacctgctccagttcctcacccctgtgcgcttcactggggccctgactccgctctgcaggagcctcgtgcatctggcgcagaagaggcaggaggccggggccgacgccttcctcatccagtacgacgcccatgcgagcctcccgtctccctatgctgtaaccggaagactgttggttgtgtcttccagcccctacctaggggacggacgtggggcagcggcgctgcgcctcctcagtgttctgcacccaaacattcaccctttgctgggtcagcattgggaaacgactgtcccgctgctgctggggtacctggatgagcacacagaagagaccctgccacaggaggagtgggaggagaagctgttgatgttcctgcgagacaccctggccatcatttctgacaacgcgtggatctgccagctgagcctggagctgtgcaggcagctgccctgctacgatgaggcaccccaggagaagaacttcctgtacaaatgcataggcaccaccctgggtgctgcttcaagtaaggaggtggtgaggaagcaccttcaagagctgctggagacggccagataccaggaggaggcagaacgcgagggcctcgcctgctgcttcgggatctgtgccatctcccacctcgaggacacgctggcccagctggaggacttcgtgaggtcagaggtcttcagaaaatccattggcattctcaacatttttaaggatcgaagtgagaacgaagtggagaaggtgaagagtgctctgatcctgtgctatgggcacgtggcggcccgggccccccgggagctggtgctggccaaggtagagtcagacatcctccggaacatctgccagcacttcagcaccaaggacccagccctgaagctgtgccttgtccagagtgtgtgcatggtcagccgcgccatctgcagcagcacccaggctggctccttccacttcacccggaaagcagagctggtggcacagatgatggagttcatcagggcagagcccccggactccttgaggacacctattcggaagaaagccatgctcacctgcacttacttggtctccgtggagccagcgctggacgagcaggcccgggcggatgtgatccatggctgcctgcacagcatcatggccctgctgcctgagcccaaggaggaggacggaggctgccagaagtccctgtatctggagacactgcacgcccttgaggatctgctgacgagcctcctgcagcggaacatgaccccccaaggcctgcagatcatgattgagcacctgagcccatggatcaagtccccaagaggtcacgagcgggcgcgggccctgggcctgagcgccctcctgctgcgctacttcctggagcacctgcgtgtcagcgccctggtgcccttccacaacctgggccttctcatcggcctcttctccccacggtgtgcggacctgtggcctgccacccgccaggaggccgtggactgtgtctactccctgctgtacctccagctcggctatgagggcttctcccgggactaccgcgatgacgtggcggagcggctcctcagcctcaaggacggcctcgtgcaccctgaccccgccattctcttccacacctgccacagtgtaggccagattattgccaagcgcctccccccagaccagctcatcagcctcttgctaaccatgtttgaggccctgggagaccccgaaaagaactgctcccgagcagctaccgtcatgatcaactgcctgctgcaggagcggggcggtgtgctccaggagaaggtgcccgagatcgtgagcgtcctgcgctccaagcttcaggaggcccagggagagcacgtcctgccggccgcccagcacagcgtgtacctcctggccacccagcactgcgcagccgtggtgtccagcctcctgggcagccccttgcccttggacaggtacccagctcagactccaggcttaggggtccctctggaatgatgctccccctggaatgatgctccccgagccctccacccggctctgcaccccgactttctgcatgagttcccatggctgtaggccacgtgggacagaaagtgacatggagctaggccccagtctctcaggtacccacggggacctctcctctccaggcgttttgggatcctcactggctccggtgggccctgcacagcacccccacagggaagctgctgtttctgccttcctctaaggtcccaaaactgcctggctgctctgttggccccaggctccagcacacactggaggctgcccctcaccctgtgtcttggttccggctactccaagccttgtcctctgcagggcatccactgctgcctgtgagcagacccctgggaactgcctgatctgagccccctcaggagcccaaggacaaccttgtctgtaccatacatcactatgtcttcccaagctcacacctcccagctcccagcaaagggcagggcgtgtctaccacccaccagcccactggggtcccccttcctcgccgaggcctccggagcatgggtctgctggcccttcctttctttgccatcttagtcatggacagaggctggcccaggggcacctggcttcctgtgacctccgggagactccatgctgggcaaggcagagtgacccttcccctggcaggcgggggcatgaggctgccacggggaacacaggtttccttgcacctggccctttaccctgtcagctttgctgttttcatgtgctctgacgccctcccattaggtgcatccaagctgcaatgcccacttcctcctggcaggggggacccgcaggcaccttctgctcagaggtgcacttgtctggtggccctgctccttcctggtactgttgacctttctgtgtgtttgttttaaatctcttgcatggtaaatagctgcattttgttactgataagagtgagtttaaatccactgtcatatcttttgcgtctttgttacacattttgttttttaaaaatcttctttcttgtccttttttagattgacagtgtccctcttacctcactttctccactcagtttgtaatcctgcagtctgttgcttttcttttagcgtttgccctaaaggtggctgcatgtgtcctcactgaagtccagcatgggccccaaatgcaggctgaggtctgggtctggctgggctgctgggcgcccgagtcatcatgaccattgttcctgggcacagccggcgttgacttgtatttcctccgtgattaccgcctggctcatcaatcactgttttcgttttccgtggaggcgtggctcacacaaagggcaagcacggagtcactgggtcctgcaggactttccaggtcaaggcagaggaggtgtccggtccccagcaggctcctgtgtgcccctcagtcccctagagggtcacggccacctgaccgccaccactagaggttttggcgattgtgctgtgtggtgggtcttcccggcctctgcttagcacagcagtgctgctgcccatccttcctccttgccaggtagtgccgggtgctgctgcccatccttcctctgccgggcagtgccgggtgctgctgcccatcctttctccttgccgggtagtgccgggtgctgctgcccatcctttctccttgccggacagtgctgggtgccgtgtgggctgcactgtgtgtgtgtttctaggtgatggacattcagattgttttttggtttggggctgctggggatggcgatgctttgaatgttcctgggagtgtctgttggtgggtagagcatgcatttctctttcgtgtgtatataggagtggaatcaaggccgggcactgtggctcatacctgtaatcccagcagtgtgggaggctgaggcaggaggattacctgaggtcagaagtttgcgaccagcctggccaacatggcaaaaccccgtctctactgaaaatataaaaattggccaggcatggccaggcgcagtggctcacccctgtaatcccagcactttgggaggctgaggtgggtggatcacgaggtcaggagatcgagaccatcctggctaacatggtaaaaccccgtctctactaaaaatataaaaaattagccaggcgaggtggcaggcgcctgtagtcccagctactcgggaggntgaggcaggagaatggtgtgaacccaggaggcggagcttgcagtgagttgagattgcaccactgcactccagcctgggcgacagagcaagaactctgtctc

SEQ ID NO: 592755 - DNA, 1658 bp, Homo sapiens
  misc_feature (1557)..(1557): n is a, c, g, or t
tgggccctgtgtgtataggcccagatttttctctgtgtcctttattaccagctctgtttacagatccctggcaggcgggggcatgaggctgccacggggaacacaggtttccttgcacctggccctttaccctgtcagctttgctgttttcatgtgctctgacgccctcccattaggtgcatccaagctgcaatgcccacttcctcctggcaggggggacccgcaggcaccttctgctcagaggtgcacttgtctggtggccctgctccttcctggtactgttgacctttctgtgtgtttgttttaaatctcttgcatggtaaatagctgcattttgttactgataagagtgagtttaaatccactgtcatatcttttgcgtctttgttacacattttgttttttaaaaatcttctttcttgtccttttttagattgacagtgtccctcttacctcactttctccactcagtttgtaatcctgcagtctgttgcttttcttttagcgtttgccctaaaggtggctgcatgtgtcctcactgaagtccagcatgggccccaaatgcaggctgaggtctgggtctggctgggctgctgggcgcccgagtcatcatgaccattgttcctgggcacagccggcgttgacttgtatttcctccgtgattaccgcctggctcatcaatcactgttttcgttttccgtggaggcgtggctcacacaaagggcaagcacggagtcactgggtcctgcaggactttccaggtcaaggcagaggaggtgtccggtccccagcaggctcctgtgtgcccctcagtcccctagagggtcacggccacctgaccgccaccactagaggttttggcgattgtgctgtgtggtgggtcttcccggcctctgcttagcacagcagtgctgctgcccatccttcctccttgccaggtagtgccgggtgctgctgcccatccttcctctgccgggcagtgccgggtgctgctgcccatcctttctccttgccgggtagtgccgggtgctgctgcccatcctttctccttgccggacagtgctgggtgccgtgtgggctgcactgtgtgtgtgtttctaggtgatggacattcagattgttttttggtttggggctgctggggatggcgatgctttgaatgttcctgggagtgtctgttggtgggtagagcatgcatttctctttcgtgtgtatataggagtggaatcaaggccgggcactgtggctcatacctgtaatcccagcagtgtgggaggctgaggcaggaggattacctgaggtcagaagtttgcgaccagcctggccaacatggcaaaaccccgtctctactgaaaatataaaaattggccaggcatggccaggcgcagtggctcacccctgtaatcccagcactttgggaggctgaggtgggtggatcacgaggtcaggagatcgagaccatcctggctaacatggtaaaaccccgtctctactaaaaatataaaaaattagccaggcgaggtggcaggcgcctgtagtcccagctactcgggaggntgaggcaggagaatggtgtgaacccaggaggcggagcttgcagtgagttgagattgcaccactgcactccagcctgggcgacagagcaagaactctgtctc

SEQ ID NO: 592756 - DNA, 188 bp, Homo sapiens
cacgaggggacacgagggggcaccctcctgctctgtgggggaccttgcagttggggtttccacctcacctgccttgggctttcccgtcggacatatcgaaggttcacttgcactcaatgtgcctcagggcttcacacatgtttcgtgtgtatagagagaatcacacatgtccattcctgtgtggtccc

SEQ ID NO: 592757 - DNA, 333 bp, Homo sapiens
  misc_feature (97)..(97): n is a, c, g, or t
  misc_feature (99)..(99): n is a, c, g, or t
  misc_feature (102)..(102): n is a, c, g, or t
  misc_feature (104)..(104): n is a, c, g, or t
  misc_feature (106)..(106): n is a, c, g, or t
  misc_feature (126)..(126): n is a, c, g, or t
tcgccactccgggcccctgctgggcgggaaggcggcgccccggccgaggtggcggcggctcctcaggacggaagctcctgctctcttgtcagccgcnanctnangnccattcgcagcttctccagnccacctgcattccttgtctcagagcctccctcctgcatcctccaagccagcagttgtgggatgggagaagaagttgtccatgttcacactgggtgaaggaagctgaaaccacagacatgactgagtcctccatgaagagtgagtgcatggggattgggagtggccgggtgtgaggcctctcttgcctctgggtggtcagtatagata

SEQ ID NO: 592758 - DNA, 5324 bp, Homo sapiens
  misc_feature (97)..(97): n is a, c, g, or t
  misc_feature (99)..(99): n is a, c, g, or t
  misc_feature (102)..(102): n is a, c, g, or t
  misc_feature (104)..(104): n is a, c, g, or t
  misc_feature (106)..(106): n is a, c, g, or t
  misc_feature (126)..(126): n is a, c, g, or t
  misc_feature (4140)..(4140): n is a, c, g, or t
tcgccactccgggcccctgctgggcgggaaggcggcgccccggccgaggtggcggcggctcctcaggacggaagctcctgctctcttgtcagccgcnanctnangnccattcgcagcttctccagnccacctgcattccttgtctcagagcctccctcctgcatcctccaagccagcagttgtgggatgggagaagaagttgtccatgttcacactgggtgaaggaagctgaaaccacagacatgactgagtcctccatgaagaagctggcctccaccctgctggacgccatcaccgataaggaccccctggtgcaggagcaggtctgcagtgccctgtgctccctcggggaggtgcggccggtggagacgctccgtgcctgcgaggagtatctgcggcagcatgacaagctggcacacccataccgagcagcggtcctgagggccatggagagggtcctgagcagtcgcgccagtgagctggacaaggacacagccagcaccatcatcctcctggcctccagcgagatgaccaagacgaaggacctggtctgggactggcagcaggcggcgagtggcgtcctggtggccgtgggaagacagttcatcagcaaggtgatggaggagctgctgcgcaggctgcaccctgggaccctgccacactgcgccgtgctgcacaccctcgccagcctctcggtggccaacgcgttcggcgtagtccccttcctgccatccgtcctgagctccctgctgcccgtgctgggcgtggccaagcaggacacggtgcgcgtggccttctgctccgctctgcagcgcttcagcgagggtgccctggagtacctagccaacctggaccgagccccagaccccacggtcaggaaggacgcctttgccaccgacatcttcagcgcctacgatgttctcttccatcagtggctgcagagtcgagaagccaagctccgtcttgccgtggtggaggctctggggcctatgagccatctgctgcccagtgagaggctggaagagcagctgcccaagctcctccctgggattctcgccctctacaagaagcacgcagagaccttctacttgtccaagagcctgggccagatcctcgaggcagctgtgagtgtgggcagccgcacactggagacccagctggatgccctcttggctgcactgcactcccagatctgtgtgcctgtggagtcctcaagccccctggtgatgagtaaccagaaggaggtgctgcgctgcttcactgtgctggcctgcagctcgcctgaccgcctactggccttcctgctgcccaggctggacaccagcaatgagaggacccgcgtgggcaccctgcaggtggtcagacatgtcatcaactcagctgctgctcagatggaagataaaaagccctttatcctgtcttccatgaggcttcctctcctggacaccaacagcaaggtgaagcgggcagtggtgcaggtgattagcgccatggcccaccacggctacctggagcagcctggaggtgaggcgatgatcgagtacatcgtgcagcagtgcgcgctgccccccgagcaggagcctgagaagccaggccccggcagcaaggaccccaaggccgacagcgtgcgggccatcagcgtgcgcaccctctacctggtcagcaccaccgtggacaggatgagtcacgtcctctggccatacctgctccagttcctcacccctgtgcgcttcactggggccctgactccgctctgcaggagcctcgtgcatctggcgcagaagaggcaggaggccggggccgacgccttcctcatccagtacgacgcccatgcgagcctcccgtctccctatgctgtaaccggaagactgttggttgtgtcttccagcccctacctaggggacggacgtggggcagcggcgctgcgcctcctcagtgttctgcacccaaacattcaccctttgctgggtcagcattgggaaacgactgtcccgctgctgctggggtacctggatgagcacacagaagagaccctgccacaggaggagtgggaggagaagctgttgatgttcctgcgagacaccctggccatcatttctgacaacgcgtggatctgccagctgagcctggagctgtgcaggcagctgccctgctacgatgaggcaccccaggagaagaacttcctgtacaaatgcataggcaccaccctgggtgctgcttcaagtaaggaggtggtgaggaagcaccttcaagagctgctggagacggccagataccaggaggaggcagaacgcgagggcctcgcctgctgcttcgggatctgtgccatctcccacctcgaggacacgctggcccagctggaggacttcgtgaggtcagaggtcttcagaaaatccattggcattctcaacatttttaaggatcgaagtgagaacgaagtggagaaggtgaagagtgctctgatcctgtgctatgggcacgtggcggcccgggccccccgggagctggtgctggccaaggtagagtcagacatcctccggaacatctgccagcacttcagcaccaaggacccagccctgaagctgtgccttgtccagagtgtgtgcatggtcagccgcgccatctgcagcagcacccaggctggctccttccacttcacccggaaagcagagctggtggcacagatgatggagttcatcagggcagagcccccggactccttgaggacacctattcggaagaaagccatgctcacctgcacttacttggtctccgtggagccagcgctggacgagcaggcccgggcggatgtgatccatggctgcctgcacagcatcatggccctgctgcctgagcccaaggaggaggacggaggctgccagaagtccctgtatctggagacactgcacgcccttgaggatctgctgacgagcctcctgcagcggaacatgaccccccaaggcctgcagatcatgattgagcacctgagcccatggatcaagtccccaagaggtcacgagcgggcgcgggccctgggcctgagcgccctcctgctgcgctacttcctggagcacctgcgtgtcagcgccctggtgcccttccacaacctgggccttctcatcggcctcttctccccacggtgtgcggacctgtggcctgccacccgccaggaggccgtggactgtgtctactccctgctgtacctccagctcggctatgagggcttctcccgggactaccgcgatgacgtggcggagcggctcctcagcctcaaggacggcctcgtgcaccctgaccccgccattctcttccacacctgccacagtgtaggccagattattgccaagcgcctccccccagaccagctcatcagcctcttgctaaccatgtttgaggccctgggagaccccgaaaagaactgctcccgagcagctaccgtcatgatcaactgcctgctgcaggagcggggcggtgtgctccaggagaaggtgcccgagatcgtgagcgtcctgcgctccaagcttcaggaggcccagggagagcacgtcctgccggccgcccagcacagcgtgtacctcctggccacccagcactgcgcagccgtggtgtccagcctcctgggcagccccttgcccttggacagccacacctgcatgctgtggcgggcgctggcggtggagcctcgcctagctgcccaggtcctggggctgctgctggagaagatgagtagggacgtccctttcaaggagagccgggccttcctgctgggccgcaccccagaccgcgtggccacgctgctgcctctctcggctacctgtgcactgtttgaggtcatgtccacgcctgcagcggggccgcggtgctcgagctctacccccagctgtttgtggtgcttctgctgcgcgtcagctgcaccgtgggtgtccagctgccccggaacctgcaggcccaggaaaggaggggtgccagtccagccctagccaccaggaacctggaaccctgcagctctgcagtggacaccctgcggtccatgctactccgcagcggcagcgaggatgtggtacagcgcatggacctggagggaggctgggaactgtcaggactcggggggcatgaggagggggccacaggttggcaggncatggctgagcacgcagggccccgactccccctggtgctgaagacgctggcatgcacacacagcagtgcgtatgagaaccagagggtgaccaccaccgccttcctggccgagctgctgaacagcaacgtggccaacgacctcatgctcttggactcgctgctggagagcctggcggctcgccagaaggacacatgcgccagcgtgcggaggctggtgctccgcggcctggccaacctggcctccggctgccctgacaaggtgcgaacccacggcccccagctcctcacagccatgattggcgggctggacgacggggacaaccctcacagcccagtggccctggaggccatgctgggccttgcgaggctggtgcacctggtggagtcctgggacctgcgctcagggctgctgcacgtggccatccgcatccggcctttcttcgacagtgagaagatggagttccggacggcatctatccgcctctttgggcaccttaacaaggtctgccacggagactgtgaggacgtcttcctggaccaggtggtgggcgggctggcgcccctgctgctgcacctgcaggaccctcaggccactgtggccagcgcctgcaggtttgccctgcgcatgtgtggccccaatctggcatgtgaggagctctcagctgctttccagaaacacctgcaggagggccgagccctgcacttcggggagttcctcaacaccacctgcaagcacctgatgcaccatttcccagacctgctgggccgtctcctgaccacctgcctgttctacttcaagagcagctgggagaacgtccgagctgctgcacccctgttcaccgggttcctggtgctgcactcggagcccaggcagcagccgcaggtggacctggaccagctcattgcggcgctccagatcctgctgaaggacccggcccccgaggtgcggacgagggctgctgaggccctgggccgcctggtgaagctcgcctaaggctccggccagcacccccagcgaggagtatgcacccagacctgtgcctgagctccaagacagggcctcctgaggaccacagcctgggcacacgactggaggggcctggccccagaacaggcactgctggggaccaaacccaagcccttcagtgagggatgtgcccaataaactcatctgctcccagcga

SEQ ID NO: 592759 - DNA, 252 bp, Homo sapiens
gatgctgactcatactagacagctgtgcacagtaagcgcgttactcataccagctgctactcctgacggtgctcgatcaggctgtctgtacatgtccctgcacaagcccaaatagtgtactacaagatgttatactttttgtaataactctatctcaactactgcgctctccgatttaaattcttttatgggcaagtctggaatagcctcggtcttttacaacaattgcagcttctcgagatacacctatac

SEQ ID NO: 592760 - DNA, 428 bp, Homo sapiens
  misc_feature (264)..(264): n is a, c, g, or t
  misc_feature (325)..(326): n is a, c, g, or t
  misc_feature (354)..(354): n is a, c, g, or t
  misc_feature (380)..(380): n is a, c, g, or t
  misc_feature (399)..(399): n is a, c, g, or t
  misc_feature (404)..(404): n is a, c, g, or t
  misc_feature (409)..(409): n is a, c, g, or t
  misc_feature (411)..(411): n is a, c, g, or t
  misc_feature (422)..(422): n is a, c, g, or t
ttctacgtgcctctccctctgccttctctcacagtgcccccggctccagagctcaggggtaggggttctcctgagggtgcaggggatccttctcatctcctggaccctccagggcactctggtccctattccccagctcctaggcagctgagccggtgtcccttagggaaaggtgaccaggaagctttggtgcagggagctcttggttggggacaaagggcttggacccctgcacagtgttctgtggacaatggttaatatgcnccgggaagaggggggtgacagggcccacagggtatggcccccaatttcccacctctgtttnnattcttgtaaactgcaacctatttaaantaacctttagccattccctattgtanacaaaattaatttttcagnaattnaattntntttacatagtntaaata

SEQ ID NO: 592761 - DNA, 5087 bp, Homo sapiens
  misc_feature (3903)..(3903): n is a, c, g, or t
ccaagactttcacgaagctcccaatccttcctactattgtttctcctccaaacgaccttgtcacgctttccttcaaatgtcctgcgtggctgtcttcactgagccggtagcacttctcctatgtgggcccacctccacctgccgtggcggccatagctgtcagagtggatgagctggcacacccataccgagcagcggtcctgagggccatggagagggtcctgagcagtcgcgccagtgagctggacaaggacacagccagcaccatcatcctcctggcctccagcgagatgaccaagacgaaggacctggtctgggactggcagcaggcggcgagtggcgtcctggtggccgtgggaagacagttcatcagcaaggtgatggaggagctgctgcgcaggctgcaccctgggaccctgccacactgcgccgtgctgcacaccctcgccagcctctcggtggccaacgcgttcggcgtagtccccttcctgccatccgtcctgagctccctgctgcccgtgctgggcgtggccaagcaggacacggtgcgcgtggccttctgctccgctctgcagcgcttcagcgagggtgccctggagtacctagccaacctggaccgagccccagaccccacggtcaggaaggacgcctttgccaccgacatcttcagcgcctacgatgttctcttccatcagtggctgcagagtcgagaagccaagctccgtcttgccgtggtggaggctctggggcctatgagccatctgctgcccagtgagaggctggaagagcagctgcccaagctcctccctgggattctcgccctctacaagaagcacgcagagaccttctacttgtccaagagcctgggccagatcctcgaggcagctgtgagtgtgggcagccgcacactggagacccagctggatgccctcttggctgcactgcactcccagatctgtgtgcctgtggagtcctcaagccccctggtgatgagtaaccagaaggaggtgctgcgctgcttcactgtgctggcctgcagctcgcctgaccgcctactggccttcctgctgcccaggctggacaccagcaatgagaggacccgcgtgggcaccctgcaggtggtcagacatgtcatcaactcagctgctgctcagatggaagataaaaagccctttatcctgtcttccatgaggcttcctctcctggacaccaacagcaaggtgaagcgggcagtggtgcaggtgattagcgccatggcccaccacggctacctggagcagcctggaggtgaggcgatgatcgagtacatcgtgcagcagtgcgcgctgccccccgagcaggagcctgagaagccaggccccggcagcaaggaccccaaggccgacagcgtgcgggccatcagcgtgcgcaccctctacctggtcagcaccaccgtggacaggatgagtcacgtcctctggccatacctgctccagttcctcacccctgtgcgcttcactggggccctgactccgctctgcaggagcctcgtgcatctggcgcagaagaggcaggaggccggggccgacgccttcctcatccagtacgacgcccatgcgagcctcccgtctccctatgctgtaaccggaagactgttggttgtgtcttccagcccctacctaggggacggacgtggggcagcggcgctgcgcctcctcagtgttctgcacccaaacattcaccctttgctgggtcagcattgggaaacgactgtcccgctgctgctggggtacctggatgagcacacagaagagaccctgccacaggaggagtgggaggagaagctgttgatgttcctgcgagacaccctggccatcatttctgacaacgcgtggatctgccagctgagcctggagctgtgcaggcagctgccctgctacgatgaggcaccccaggagaagaacttcctgtacaaatgcataggcaccaccctgggtgctgcttcaagtaaggaggtggtgaggaagcaccttcaagagctgctggagacggccagataccaggaggaggcagaacgcgagggcctcgcctgctgcttcgggatctgtgccatctcccacctcgaggacacgctggcccagctggaggacttcgtgaggtcagaggtcttcagaaaatccattggcattctcaacatttttaaggatcgaagtgagaacgaagtggagaaggtgaagagtgctctgatcctgtgctatgggcacgtggcggcccgggccccccgggagctggtgctggccaaggtagagtcagacatcctccggaacatctgccagcacttcagcaccaaggacccagccctgaagctgtgccttgtccagagtgtgtgcatggtcagccgcgccatctgcagcagcacccaggctggctccttccacttcacccggaaagcagagctggtggcacagatgatggagttcatcagggcagagcccccggactccttgaggacacctattcggaagaaagccatgctcacctgcacttacttggtctccgtggagccagcgctggacgagcaggcccgggcggatgtgatccatggctgcctgcacagcatcatggccctgctgcctgagcccaaggaggaggacggaggctgccagaagtccctgtatctggagacactgcacgcccttgaggatctgctgacgagcctcctgcagcggaacatgaccccccaaggcctgcagatcatgattgagcacctgagcccatggatcaagtccccaagaggtcacgagcgggcgcgggccctgggcctgagcgccctcctgctgcgctacttcctggagcacctgcgtgtcagcgccctggtgcccttccacaacctgggccttctcatcggcctcttctccccacggtgtgcggacctgtggcctgccacccgccaggaggccgtggactgtgtctactccctgctgtacctccagctcggctatgagggcttctcccgggactaccgcgatgacgtggcggagcggctcctcagcctcaaggacggcctcgtgcaccctgaccccgccattctcttccacacctgccacagtgtaggccagattattgccaagcgcctccccccagaccagctcatcagcctcttgctaaccatgtttgaggccctgggagaccccgaaaagaactgctcccgagcagctaccgtcatgatcaactgcctgctgcaggagcggggcggtgtgctccaggagaaggtgcccgagatcgtgagcgtcctgcgctccaagcttcaggaggcccagggagagcacgtcctgccggccgcccagcacagcgtgtacctcctggccacccagcactgcgcagccgtggtgtccagcctcctgggcagccccttgcccttggacagccacacctgcatgctgtggcgggcgctggcggtggagcctcgcctagctgcccaggtcctggggctgctgctggagaagatgagtagggacgtccctttcaaggagagccgggccttcctgctgggccgcaccccagaccgcgtggccacgctgctgcctctctcggctacctgtgcactgtttgaggtcatgtccacgcctgcagcggggccgcggtgctcgagctctacccccagctgtttgtggtgcttctgctgcgcgtcagctgcaccgtgggtgtccagctgccccggaacctgcaggcccaggaaaggaggggtgccagtccagccctagccaccaggaacctggaaccctgcagctctgcagtggacaccctgcggtccatgctactccgcagcggcagcgaggatgtggtacagcgcatggacctggagggaggctgggaactgtcaggactcggggggcatgaggagggggccacaggttggcaggncatggctgagcacgcagggccccgactccccctggtgctgaagacgctggcatgcacacacagcagtgcgtatgagaaccagagggtgaccaccaccgccttcctggccgagctgctgaacagcaacgtggccaacgacctcatgctcttggactcgctgctggagagcctggcggctcgccagaaggacacatgcgccagcgtgcggaggctggtgctccgcggcctggccaacctggcctccggctgccctgacaaggtgcgaacccacggcccccagctcctcacagccatgattggcgggctggacgacggggacaaccctcacagcccagtggccctggaggccatgctgggccttgcgaggctggtgcacctggtggagtcctgggacctgcgctcagggctgctgcacgtggccatccgcatccggcctttcttcgacagtgagaagatggagttccggacggcatctatccgcctctttgggcaccttaacaaggtctgccacggagactgtgaggacgtcttcctggaccaggtggtgggcgggctggcgcccctgctgctgcacctgcaggaccctcaggccactgtggccagcgcctgcaggtttgccctgcgcatgtgtggccccaatctggcatgtgaggagctctcagctgctttccagaaacacctgcaggagggccgagccctgcacttcggggagttcctcaacaccacctgcaagcacctgatgcaccatttcccagacctgctgggccgtctcctgaccacctgcctgttctacttcaagagcagctgggagaacgtccgagctgctgcacccctgttcaccgggttcctggtgctgcactcggagcccaggcagcagccgcaggtggacctggaccagctcattgcggcgctccagatcctgctgaaggacccggcccccgaggtgcggacgagggctgctgaggccctgggccgcctggtgaagctcgcctaaggctccggccagcacccccagcgaggagtatgcacccagacctgtgcctgagctccaagacagggcctcctgaggaccacagcctgggcacacgactggaggggcctggccccagaacaggcactgctggggaccaaacccaagcccttcagtgagggatgtgcccaataaactcatctgctcccagcga

SEQ ID NO: 592762 - DNA, 2847 bp, Homo sapiens
ttatagttattcttttccttatgaaaaacaaaaaggggactgggcgtggtggctaacacctgtaatcccagcacttggggaggctgaggcgggcagatcacaaggtcaggagttcgagaccagactggccaaaaggatgaaaccccatcactctactaaaaatacaaaaaattagccaggtgcggtggggcgcaccagtaatcccaactactagggaggctgaggtaggagaatagcttgaacccgggaggcggaggttgcagtgagccaagatcgagccacggcactctagcccaggtgacagtgtgagactctgtctcagaaaaaaaaaagaaaaacgggatcgagatggtttgcaggattagcaagtgatagagatatattgaagacatagaaagccagtgtggttgctcacacctataatcccagcactgtgggaggccaaggcaggaggatcacttgagtcaatgagttagagaccaacctgggcagcaaagtgagaccccatctctacaaaaaaattttttaaaaatcagccaggtacggtggtgcacacctgtaatcccagctactaaggaggctgaggtaggagaatctcttgaacccgggaggcagaggttgcagtgagccaagatcgagccacggcactctagcccaggtgacagtgtgagactccatctcagaacaaaaagaataacaggatagggatggtttgcaggattatcaagtgatacagatgtactgaagacacagaaagccagtgtggttgctcacatctataatcccaacactttgggaggccagggcaggaggatcacttgagttgacgagttagagaccaacctgggcaacaaagtgagacccccacctctacaaaacattaaaaaaaaatgagctgcacatgttggcacgcacttgtaatcccagctacttgggaggctgaggtgagaggatcacttgagcacaggaggttacagtgagctatgatcacgccactcgacaccagcctgaatgacagagcggagaccctgtctcaaaaaagtggggggaaataaaaggatatagtgcactggattgaaactttctcctgtcgttatcataagcagaagaattgaagtaactaaaaagagaatcatagtctcaatgtgtgcttgaatgttatttaacatcacgtctctgctacctcatcattaaccagctgtggtaatgattccacactttgaacccatcccacctgttgacagaagcgattgcatgccagcatcatctcagtgacggctcatcatgtaggcccagaatactgattttgtgacttctaagcttgtgctccattcccaacacaaagtcttctgaccagcctttgagtaccattattgtagaggaagctcatcttaggtaactattactagagcagaaatcacttaatataaaatatttcatgtatcaaatttaaaactcacttttgggttcattgatgtagtaactcaaccaggaaacttaaatggaattagtgttttcactgacaataatgatgctgctttttcattataggcccataagatggcctggcctttccttgaaccagtagaccctaatgatgcaccagattattatggtgttattaaggaacctatggaccttgccaccatggaagaaagagtacaaagacgatattatgaaaagctgacggaatttgtggcagatatgaccaaaatttttgataactgtcgttactacaatccaagtgactccccattttaccagtgtgcagaagttctcgaatcattctttgtacagaaattgaaaggcttcaaagctagcaggtctcataacaacaaactgcagtctacagcttcttaaagttcagcgtgttaacctaacataaaacacagcaagaatctggttgtctgaactattttaaattaaggagccagatgtttttagtcaggctatcctgacaagacttgacctaaacttcgtttttattggtcataacagtccaattatattcttggccaattttgtccaacggacaagaaaaaagcaaagtcaacgacaccattatcttgtcaagatcagatggttttactattgtggcagaagcgagaaaactttgtttattgaaaaaaaaagaaaaagaaagcaagaaaaaaagatactatggggtcaagtgtaactccatggaaatgccacgtctgctcttcagtgaagaagctggtttagagtctcacagaaaacttttgactgtatttatttattgttgcaaaaaagacgcttttttattgctgccctcatttgtcagctaagtattttttcttataaaatccagccccggttacatataatcatctgtatcttatcatgattcctgtaggtaaaagtacaagacgacctctagatgtcttttctttctatgaaaggagctgctatgtacacatgtgcacacacacacaactgggaatcaacaatgagtttattgttcatggtagattaaaattaagcttgcataaaggttgggctaagtggtcctggactacagactctgttgccttgaatataacagtacaatttgtcaattactctgcaccaggctaaagtgagtaaaatctatttgaaggtatcttgtttgtaaacatttgtcagattctaatttttttcttttgtattaaaattcaactatggatgtatatgaaacaaaataaatggagataatttttctcccacaaacaaaaaaattacacattgtttataactgtctctcgtctctctcatgttatactcgcttatcttcattcatatctatctctatcgatttactctcttgttatattccccttgacctactct

SEQ ID NO: 592763 - DNA, 161 bp, Homo sapiens
tagaactgtgaggaaaggtataccggctaatgctagagactgcaatggtgagggaggttgaagtgagaggtatggttaacgagtagtcctacctattttatcgaatatctatgtccattgtataaggttagtggatcatggacccgagagcacataaatag

SEQ ID NO: 592764 - DNA, 157 bp, Homo sapiens
cctgtgaccctctctcaggatgaggcaagaagcccaagccaaggctgataaaattaagctggcgctggaaaaacagaaggaggccccagttaaaacgcacggtcctacgtggtgtcgcgtaagtacattatactgagatttctacagctgggggtct

SEQ ID NO: 592765 - DNA, 5377 bp, Homo sapiens
  misc_feature (97)..(97): n is a, c, g, or t
  misc_feature (99)..(99): n is a, c, g, or t
  misc_feature (102)..(102): n is a, c, g, or t
  misc_feature (104)..(104): n is a, c, g, or t
  misc_feature (106)..(106): n is a, c, g, or t
  misc_feature (126)..(126): n is a, c, g, or t
  misc_feature (4193)..(4193): n is a, c, g, or t
tcgccactccgggcccctgctgggcgggaaggcggcgccccggccgaggtggcggcggctcctcaggacggaagctcctgctctcttgtcagccgcnanctnangnccattcgcagcttctccagnccacctgcattccttgtctcagagcctccctcctgcatcctccaagccagcagttgtgggatgggagaagaagttgtccatgttcacactgggtgaaggaagctgaaaccacagacatgactgagtcctccatgaagaagctggcctccaccctgctggacgccatcaccgataaggaccccctggtgcaggagcaggtctgcagtgccctgtgctccctcggggaggtgcggccggtggagacgctccgtgcctgcgaggagtatctgcggcagcatgacaagctggcacacccataccgagcagcggtcctgagggccatggagagggtcctgagcagtcgcgccagtgagctggacaaggacacagccagcaccatcatcctcctggcctccagcgagatgaccaagacgaaggacctggtctgggactggcagcaggcggcgagtggcgtcctggtggccgtgggaagacagttcatcagcaaggtgatggaggagctgctgcgcaggctgcaccctgggaccctgccacactgcgccgtgctgcacaccctcgccagcctctcggtggccaacgcgttcggcgtagtccccttcctgccatccgtcctgagctccctgctgcccgtgctgggcgtggccaagcaggacacggtgcgcgtggccttctgctccgctctgcagcgcttcagcgagggtgccctggagtacctagccaacctggaccgagccccagaccccacggtcaggaaggacgcctttgccaccgacatcttcagcgcctacgatgttctcttccatcagtggctgcagagtcgagaagccaagctccgtcttgccgtggtggaggctctggggcctatgagccatctgctgcccagtgagaggctggaagagcagctgcccaagctcctccctgggattctcgccctctacaagaagcacgcagagaccttctacttgtccaagagcctgggccagatcctcgaggcagctgtgagtgtgggcagccgcacactggagacccagctggatgccctcttggctgcactgcactcccagatctgtgtgcctgtggagtcctcaagccccctggtgatgagtaaccagaaggaggtgctgcgctgcttcactgtgctggcctgcagctcgcctgaccgcctactggccttcctgctgcccaggctggacaccagcaatgagaggacccgcgtgggcaccctgcaggtggtcagacatgtcatcaactcagctgctgctcagatggaagataaaaagccctttatcctgtcttccatgaggcttcctctcctggacaccaacagcaaggtgaagcgggcagtggtgcaggtgattagcgccatggcccaccacggctacctggagcagcctggaggtgaggcgatgatcgagtacatcgtgcagcagtgcgcgctgccccccgagcaggagcctgagaagccaggccccggcagcaaggaccccaaggccgacagcgtgcgggccatcagcgtgcgcaccctctacctggtcagcaccaccgtggacaggatgagtcacgtcctctggccatacctgctccagttcctcacccctgtgcgcttcactggggccctgactccgctctgcaggagcctcgtgcatctggcgcagaagaggcaggaggccggggccgacgccttcctcatccagtacgacgcccatgcgagcctcccgtctccctatgctgtaaccggaagactgttggttgtgtcttccagcccctacctaggggacggacgtggggcagcggcgctgcgcctcctcagtgttctgcacccaaacattcaccctttgctgggtcagcattgggaaacgactgtcccgctgctgctggggtacctggatgagcacacagaagagaccctgccacaggaggagtgggaggagaagctgttgatgttcctgcgagacaccctggccatcatttctgacaacgcgtggatctgccagctgagcctggagctgtgcaggcagctgccctgctacgatgaggcaccccaggagaagaacttcctgtacaaatgcataggcaccaccctgggtgctgcttcaagtaaggaggtggtgaggaagcaccttcaagagctgctggagacggccagataccaggaggaggcagaacgcgagggcctcgcctgctgcttcgggatctgtgccatctcccacctcgaggacacgctggcccagctggaggacttcgtgaggtcagaggtcttcagaaaatccattggcattctcaacatttttaaggatcgaagtgagaacgaagtggagaaggtgaagagtgctctgatcctgtgctatgggcacgtggcggcccgggccccccgggagctggtgctggccaaggtagagtcagacatcctccggaacatctgccagcacttcagcaccaaggacccagccctgaagctgtgccttgtccagagtgtgtgcatggtcagccgcgccatctgcagcagcacccaggctggctccttccacttcacccggaaagcagagctggtggcacagatgatggagttcatcagggcagagcccccggactccttgaggacacctattcggaagaaagccatgctcacctgcacttacttggtctccgtggagccagcgctggacgagcaggcccgggcggatgtgatccatggctgcctgcacagcatcatggccctgctgcctgagcccaaggaggaggacggaggctgccagaagtccctgtatctggagacactgcacgcccttgaggatctgctgacgagcctcctgcagcggaacatgaccccccaaggcctgcagatcatgattgagcacctgagcccatggatcaagtccccaagaggtcacgagcgggcgcgggccctgggcctgagcgccctcctgctgcgctacttcctggagcacctgcgtgtcagtggcgcccaagtagataccaggtttccatctgagcccaggatcctgtgcaatgcgccctggtgcccttccacaacctgggccttctcatcggcctcttctccccacggtgtgcggacctgtggcctgccacccgccaggaggccgtggactgtgtctactccctgctgtacctccagctcggctatgagggcttctcccgggactaccgcgatgacgtggcggagcggctcctcagcctcaaggacggcctcgtgcaccctgaccccgccattctcttccacacctgccacagtgtaggccagattattgccaagcgcctccccccagaccagctcatcagcctcttgctaaccatgtttgaggccctgggagaccccgaaaagaactgctcccgagcagctaccgtcatgatcaactgcctgctgcaggagcggggcggtgtgctccaggagaaggtgcccgagatcgtgagcgtcctgcgctccaagcttcaggaggcccagggagagcacgtcctgccggccgcccagcacagcgtgtacctcctggccacccagcactgcgcagccgtggtgtccagcctcctgggcagccccttgcccttggacagccacacctgcatgctgtggcgggcgctggcggtggagcctcgcctagctgcccaggtcctggggctgctgctggagaagatgagtagggacgtccctttcaaggagagccgggccttcctgctgggccgcaccccagaccgcgtggccacgctgctgcctctctcggctacctgtgcactgtttgaggtcatgtccacgcctgcagcggggccgcggtgctcgagctctacccccagctgtttgtggtgcttctgctgcgcgtcagctgcaccgtgggtgtccagctgccccggaacctgcaggcccaggaaaggaggggtgccagtccagccctagccaccaggaacctggaaccctgcagctctgcagtggacaccctgcggtccatgctactccgcagcggcagcgaggatgtggtacagcgcatggacctggagggaggctgggaactgtcaggactcggggggcatgaggagggggccacaggttggcaggncatggctgagcacgcagggccccgactccccctggtgctgaagacgctggcatgcacacacagcagtgcgtatgagaaccagagggtgaccaccaccgccttcctggccgagctgctgaacagcaacgtggccaacgacctcatgctcttggactcgctgctggagagcctggcggctcgccagaaggacacatgcgccagcgtgcggaggctggtgctccgcggcctggccaacctggcctccggctgccctgacaaggtgcgaacccacggcccccagctcctcacagccatgattggcgggctggacgacggggacaaccctcacagcccagtggccctggaggccatgctgggccttgcgaggctggtgcacctggtggagtcctgggacctgcgctcagggctgctgcacgtggccatccgcatccggcctttcttcgacagtgagaagatggagttccggacggcatctatccgcctctttgggcaccttaacaaggtctgccacggagactgtgaggacgtcttcctggaccaggtggtgggcgggctggcgcccctgctgctgcacctgcaggaccctcaggccactgtggccagcgcctgcaggtttgccctgcgcatgtgtggccccaatctggcatgtgaggagctctcagctgctttccagaaacacctgcaggagggccgagccctgcacttcggggagttcctcaacaccacctgcaagcacctgatgcaccatttcccagacctgctgggccgtctcctgaccacctgcctgttctacttcaagagcagctgggagaacgtccgagctgctgcacccctgttcaccgggttcctggtgctgcactcggagcccaggcagcagccgcaggtggacctggaccagctcattgcggcgctccagatcctgctgaaggacccggcccccgaggtgcggacgagggctgctgaggccctgggccgcctggtgaagctcgcctaaggctccggccagcacccccagcgaggagtatgcacccagacctgtgcctgagctccaagacagggcctcctgaggaccacagcctgggcacacgactggaggggcctggccccagaacaggcactgctggggaccaaacccaagcccttcagtgagggatgtgcccaataaactcatctgctcccagcga

SEQ ID NO: 592766 - DNA, 1167 bp, Homo sapiens
gttcttttctattcgcttgccaagggtgaatgaaagaacatggctgcttctcccagactgactgaccttggcatccgcataaagcatcattgttttcaaaaatgaagggtgcttaattgttcccttttttctatattctgtaggtctcataacaacaaactgcagtctacagcttcttaaagttcagcgtgttaacctaacataaaacacagcaagaatctggttgtctgaactattttaaattaaggagccagatgtttttagtcaggctatcctgacaagacttgacctaaacttcgtttttattggtcataacagtccaattatattcttggccaattttgtccaacggacaagaaaaaagcaaagtcaacgacaccattatcttgtcaagatcagatggttttactattgtggcagaagcgagaaaactttgtttattgaaaaaaaaagaaaaagaaagcaagaaaaaaagatactatggggtcaagtgtaactccatggaaatgccacgtctgctcttcagtgaagaagctggtttagagtctcacagaaaacttttgactgtatttatttattgttgcaaaaaagacgcttttttattgctgccctcatttgtcagctaagtattttttcttataaaatccagccccggttacatataatcatctgtatcttatcatgattcctgtaggtaaaagtacaagacgacctctagatgtcttttctttctatgaaaggagctgctatgtacacatgtgcacacacacacaactgggaatcaacaatgagtttattgttcatggtagattaaaattaagcttgcataaaggttgggctaagtggtcctggactacagactctgttgccttgaatataacagtacaatttgtcaattactctgcaccaggctaaagtgagtaaaatctatttgaaggtatcttgtttgtaaacatttgtcagattctaatttttttcttttgtattaaaattcaactatggatgtatatgaaacaaaataaatggagataatttttctcccacaaacaaaaaaattacacattgtttataactgtctctcgtctctctcatgttatactcgcttatcttcattcatatctatctctatcgatttactctcttgttatattccccttgacctactct

SEQ ID NO: 592767 - DNA, 198 bp, Homo sapiens
  misc_feature (126)..(126): n is a, c, g, or t
agatccatcctgctctttcaggctggctgactcctgaccagcctcaaccgcctgggtcccgccgccggccggaccccggccctcggtctctagccccgggctgggaccctgcgccgggctcctacncgcgcggctcccagctccggcgcccagcccagccggactccttaaaggcgcagcgtgccggttcgcgtcctc

SEQ ID NO: 592768 - DNA, 3454 bp, Homo sapiens
  misc_feature (2270)..(2270): n is a, c, g, or t
gtcgggggcaacctctcaccctgcctggtgagccaactgtggcatggctgtcccctgagggttggctctgccgcccccggcctccgctggaaggcggtctgcagcccctgcagccacagcacatggggatgtgcccaggctccagccagccctgtgaggggtcgggctcccagcccctcagtggcatcttggcctgcagttcctgcgagacaccctggccatcatttctgacaacgcgtggatctgccagctgagcctggagctgtgcaggcagctgccctgctacgatgaggcaccccaggagaagaacttcctgtacaaatgcataggcaccaccctgggtgctgcttcaagtaaggaggtggtgaggaagcaccttcaagagctgctggagacggccagataccaggaggaggcagaacgcgagggcctcgcctgctgcttcgggatctgtgccatctcccacctcgaggacacgctggcccagctggaggacttcgtgaggtcagaggtcttcagaaaatccattggcattctcaacatttttaaggatcgaagtgagaacgaagtggagaaggtgaagagtgctctgatcctgtgctatgggcacgtggcggcccgggccccccgggagctggtgctggccaaggtagagtcagacatcctccggaacatctgccagcacttcagcaccaaggacccagccctgaagctgtgccttgtccagagtgtgtgcatggtcagccgcgccatctgcagcagcacccaggctggctccttccacttcacccggaaagcagagctggtggcacagatgatggagttcatcagggcagagcccccggactccttgaggacacctattcggaagaaagccatgctcacctgcacttacttggtctccgtggagccagcgctggacgagcaggcccgggcggatgtgatccatggctgcctgcacagcatcatggccctgctgcctgagcccaaggaggaggacggaggctgccagaagtccctgtatctggagacactgcacgcccttgaggatctgctgacgagcctcctgcagcggaacatgaccccccaaggcctgcagatcatgattgagcacctgagcccatggatcaagtccccaagaggtcacgagcgggcgcgggccctgggcctgagcgccctcctgctgcgctacttcctggagcacctgcgtgtcagcgccctggtgcccttccacaacctgggccttctcatcggcctcttctccccacggtgtgcggacctgtggcctgccacccgccaggaggccgtggactgtgtctactccctgctgtacctccagctcggctatgagggcttctcccgggactaccgcgatgacgtggcggagcggctcctcagcctcaaggacggcctcgtgcaccctgaccccgccattctcttccacacctgccacagtgtaggccagattattgccaagcgcctccccccagaccagctcatcagcctcttgctaaccatgtttgaggccctgggagaccccgaaaagaactgctcccgagcagctaccgtcatgatcaactgcctgctgcaggagcggggcggtgtgctccaggagaaggtgcccgagatcgtgagcgtcctgcgctccaagcttcaggaggcccagggagagcacgtcctgccggccgcccagcacagcgtgtacctcctggccacccagcactgcgcagccgtggtgtccagcctcctgggcagccccttgcccttggacagccacacctgcatgctgtggcgggcgctggcggtggagcctcgcctagctgcccaggtcctggggctgctgctggagaagatgagtagggacgtccctttcaaggagagccgggccttcctgctgggccgcaccccagaccgcgtggccacgctgctgcctctctcggctacctgtgcactgtttgaggtcatgtccacgcctgcagcggggccgcggtgctcgagctctacccccagctgtttgtggtgcttctgctgcgcgtcagctgcaccgtgggtgtccagctgccccggaacctgcaggcccaggaaaggaggggtgccagtccagccctagccaccaggaacctggaaccctgcagctctgcagtggacaccctgcggtccatgctactccgcagcggcagcgaggatgtggtacagcgcatggacctggagggaggctgggaactgtcaggactcggggggcatgaggagggggccacaggttggcaggncatggctgagcacgcagggccccgactccccctggtgctgaagacgctggcatgcacacacagcagtgcgtatgagaaccagagggtgaccaccaccgccttcctggccgagctgctgaacagcaacgtggccaacgacctcatgctcttggactcgctgctggagagcctggcggctcgccagaaggacacatgcgccagcgtgcggaggctggtgctccgcggcctggccaacctggcctccggctgccctgacaaggtgcgaacccacggcccccagctcctcacagccatgattggcgggctggacgacggggacaaccctcacagcccagtggccctggaggccatgctgggccttgcgaggctggtgcacctggtggagtcctgggacctgcgctcagggctgctgcacgtggccatccgcatccggcctttcttcgacagtgagaagatggagttccggacggcatctatccgcctctttgggcaccttaacaaggtctgccacggagactgtgaggacgtcttcctggaccaggtggtgggcgggctggcgcccctgctgctgcacctgcaggaccctcaggccactgtggccagcgcctgcaggtttgccctgcgcatgtgtggccccaatctggcatgtgaggagctctcagctgctttccagaaacacctgcaggagggccgagccctgcacttcggggagttcctcaacaccacctgcaagcacctgatgcaccatttcccagacctgctgggccgtctcctgaccacctgcctgttctacttcaagagcagctgggagaacgtccgagctgctgcacccctgttcaccgggttcctggtgctgcactcggagcccaggcagcagccgcaggtggacctggaccagctcattgcggcgctccagatcctgctgaaggacccggcccccgaggtgcggacgagggctgctgaggccctgggccgcctggtgaagctcgcctaaggctccggccagcacccccagcgaggagtatgcacccagacctgtgcctgagctccaagacagggcctcctgaggaccacagcctgggcacacgactggaggggcctggccccagaacaggcactgctggggaccaaacccaagcccttcagtgagggatgtgcccaataaactcatctgctcccagcga

SEQ ID NO: 592769 - DNA, 436 bp, Homo sapiens
ctccagggtgaaccagcctggctccaggactgcttgcacagtaaacatatatacttgttagaacttcggagaatattcacattggaaaaaccttaaagctctgaaaatgttttacattttgtgtttttaagaccttgccaccatggaagaaagagtacaaagacgatattatgaaaagctgacggaatttgtggcagatatgaccaaaatttttgataactgtcgttactacaatccaagtgactccccattttaccagtgtgcagaagttctcgaatcattctttgtacagaaattgaaaggcttcaaagctagcaggtgagcagatgggttcggtattctgaattaattcaactcttcacactctttatactattctgtctaacgattcaaccagtgcagtttatggtaaatttaaccttaaatatctttaaaa

SEQ ID NO: 592770 - DNA, 2049 bp, Homo sapiens
  misc_feature (865)..(865): n is a, c, g, or t
tgaaacctggcgttgggggtgccccccttccctcaagctctggcatcgccttcctcctagattattgccaagcgcctccccccagaccagctcatcagcctcttgctaaccatgtttgaggccctgggagaccccgaaaagaactgctcccgagcagctaccgtcatgatcaactgcctgctgcaggagcggggcggtgtgctccaggagaaggtgcccgagatcgtgagcgtcctgcgctccaagcttcaggaggcccagggagagcacgtcctgccggccgcccagcacagcgtgtacctcctggccacccagcactgcgcagccgtggtgtccagcctcctgggcagccccttgcccttggacagccacacctgcatgctgtggcgggcgctggcggtggagcctcgcctagctgcccaggtcctggggctgctgctggagaagatgagtagggacgtccctttcaaggagagccgggccttcctgctgggccgcaccccagaccgcgtggccacgctgctgcctctctcggctacctgtgcactgtttgaggtcatgtccacgcctgcagcggggccgcggtgctcgagctctacccccagctgtttgtggtgcttctgctgcgcgtcagctgcaccgtgggtgtccagctgccccggaacctgcaggcccaggaaaggaggggtgccagtccagccctagccaccaggaacctggaaccctgcagctctgcagtggacaccctgcggtccatgctactccgcagcggcagcgaggatgtggtacagcgcatggacctggagggaggctgggaactgtcaggactcggggggcatgaggagggggccacaggttggcaggncatggctgagcacgcagggccccgactccccctggtgctgaagacgctggcatgcacacacagcagtgcgtatgagaaccagagggtgaccaccaccgccttcctggccgagctgctgaacagcaacgtggccaacgacctcatgctcttggactcgctgctggagagcctggcggctcgccagaaggacacatgcgccagcgtgcggaggctggtgctccgcggcctggccaacctggcctccggctgccctgacaaggtgcgaacccacggcccccagctcctcacagccatgattggcgggctggacgacggggacaaccctcacagcccagtggccctggaggccatgctgggccttgcgaggctggtgcacctggtggagtcctgggacctgcgctcagggctgctgcacgtggccatccgcatccggcctttcttcgacagtgagaagatggagttccggacggcatctatccgcctctttgggcaccttaacaaggtctgccacggagactgtgaggacgtcttcctggaccaggtggtgggcgggctggcgcccctgctgctgcacctgcaggaccctcaggccactgtggccagcgcctgcaggtttgccctgcgcatgtgtggccccaatctggcatgtgaggagctctcagctgctttccagaaacacctgcaggagggccgagccctgcacttcggggagttcctcaacaccacctgcaagcacctgatgcaccatttcccagacctgctgggccgtctcctgaccacctgcctgttctacttcaagagcagctgggagaacgtccgagctgctgcacccctgttcaccgggttcctggtgctgcactcggagcccaggcagcagccgcaggtggacctggaccagctcattgcggcgctccagatcctgctgaaggacccggcccccgaggtgcggacgagggctgctgaggccctgggccgcctggtgaagctcgcctaaggctccggccagcacccccagcgaggagtatgcacccagacctgtgcctgagctccaagacagggcctcctgaggaccacagcctgggcacacgactggaggggcctggccccagaacaggcactgctggggaccaaacccaagcccttcagtgagggatgtgcccaataaactcatctgctcccagcga

SEQ ID NO: 592771 - DNA, 2153 bp, Homo sapiens
  misc_feature (1902)..(1902): n is a, c, g, or t
ttatagttattcttttccttatgaaaaacaaaaaggggactgggcgtggtggctaacacctgtaatcccagcacttggggaggctgaggcgggcagatcacaaggtcaggagttcgagaccagactggccaaaaggatgaaaccccatcactctactaaaaatacaaaaaattagccaggtgcggtggggcgcaccagtaatcccaactactagggaggctgaggtaggagaatagcttgaacccgggaggcggaggttgcagtgagccaagatcgagccacggcactctagcccaggtgacagtgtgagactctgtctcagaaaaaaaaaagaaaaacgggatcgagatggtttgcaggattagcaagtgatagagatatattgaagacatagaaagccagtgtggttgctcacacctataatcccagcactgtgggaggccaaggcaggaggatcacttgagtcaatgagttagagaccaacctgggcagcaaagtgagaccccatctctacaaaaaaattttttaaaaatcagccaggtacggtggtgcacacctgtaatcccagctactaaggaggctgaggtaggagaatctcttgaacccgggaggcagaggttgcagtgagccaagatcgagccacggcactctagcccaggtgacagtgtgagactccatctcagaacaaaaagaataacaggatagggatggtttgcaggattatcaagtgatacagatgtactgaagacacagaaagccagtgtggttgctcacatctataatcccaacactttgggaggccagggcaggaggatcacttgagttgacgagttagagaccaacctgggcaacaaagtgagacccccacctctacaaaacattaaaaaaaaatgagctgcacatgttggcacgcacttgtaatcccagctacttgggaggctgaggtgagaggatcacttgagcacaggaggttacagtgagctatgatcacgccactcgacaccagcctgaatgacagagcggagaccctgtctcaaaaaagtggggggaaataaaaggatatagtgcactggattgaaactttctcctgtcgttatcataagcagaagaattgaagtaactaaaaagagaatcatagtctcaatgtgtgcttgaatgttatttaacatcacgtctctgctacctcatcattaaccagctgtggtaatgattccacactttgaacccatcccacctgttgacagaagcgattgcatgccagcatcatctcagtgacggctcatcatgtaggcccagaatactgattttgtgacttctaagcttgtgctccattcccaacacaaagtcttctgaccagcctttgagtaccattattgtagaggaagctcatcttaggtaactattactagagcagaaatcacttaatataaaatatttcatgtatcaaatttaaaactcacttttgggttcattgatgtagtaactcaaccaggaaacttaaatggaattagtgttttcactgacaataatgatgctgctttttcattataggcccataagatggcctggcctttccttgaaccagtagaccctaatgatgcaccagattattatggtgttattaaggaacctatggaccttgccaccatggaagaaagagtacaaagacgatattatgaaaagctgacggaatttgtggcagatatgaccaaaatttttgataactgtcgttactacaatccaagtgactccccattttaccagtgtgcagaagttctcgaatcattctttgtacagaaattgaaaggcttcaaagctagcagattgtgatatctttagtctgaatttttaactggaatcagaactggatgttggggtcactctttgttttattgtacctcngtgattacctaattcaaaattgccccccaaaaagtcagattagttaatataattttttaatgttaaagatgtatcgtggtaaaaaatttactctagcagccatgttgaacaatgtatttaaaaattgtaaactcttggaatactgtatttatctgctatttcaatataaagtcctttgactttagtcctggtaactgtacagtaatttggtttactaatgaaagttgtgaataaaactggtgaaacctaga

SEQ ID NO: 592772 - DNA, 387 bp, Homo sapiens
cgtgtagatgctaaaggaatacgtagctgatagctacaggaatcgtgctggtgcttctcatcttctatccatttatgacggtagttctcatggatttctgagacagaatgtcacagacaaaagccaataggttgtccaaaagttcatacctgttctgccggaagatatgtctggaggatggtcctcttctcctgggtctccttctccacttcagtgctgcaactgccacgggatcccaatgccgcagcttccttggccttgaattctttctccctctgcaggcggtactgttcaatttcagcctgagcttcttctttggcctgcttcagcctccggttctttcttttgcgggcctcggacaccttctcggctgcccgcttctcggcc

SEQ ID NO: 592773 - DNA, 5542 bp, Homo sapiens
  misc_feature (97)..(97): n is a, c, g, or t
  misc_feature (99)..(99): n is a, c, g, or t
  misc_feature (102)..(102): n is a, c, g, or t
  misc_feature (104)..(104): n is a, c, g, or t
  misc_feature (106)..(106): n is a, c, g, or t
  misc_feature (126)..(126): n is a, c, g, or t
  misc_feature (4140)..(4140): n is a, c, g, or t
tcgccactccgggcccctgctgggcgggaaggcggcgccccggccgaggtggcggcggctcctcaggacggaagctcctgctctcttgtcagccgcnanctnangnccattcgcagcttctccagnccacctgcattccttgtctcagagcctccctcctgcatcctccaagccagcagttgtgggatgggagaagaagttgtccatgttcacactgggtgaaggaagctgaaaccacagacatgactgagtcctccatgaagaagctggcctccaccctgctggacgccatcaccgataaggaccccctggtgcaggagcaggtctgcagtgccctgtgctccctcggggaggtgcggccggtggagacgctccgtgcctgcgaggagtatctgcggcagcatgacaagctggcacacccataccgagcagcggtcctgagggccatggagagggtcctgagcagtcgcgccagtgagctggacaaggacacagccagcaccatcatcctcctggcctccagcgagatgaccaagacgaaggacctggtctgggactggcagcaggcggcgagtggcgtcctggtggccgtgggaagacagttcatcagcaaggtgatggaggagctgctgcgcaggctgcaccctgggaccctgccacactgcgccgtgctgcacaccctcgccagcctctcggtggccaacgcgttcggcgtagtccccttcctgccatccgtcctgagctccctgctgcccgtgctgggcgtggccaagcaggacacggtgcgcgtggccttctgctccgctctgcagcgcttcagcgagggtgccctggagtacctagccaacctggaccgagccccagaccccacggtcaggaaggacgcctttgccaccgacatcttcagcgcctacgatgttctcttccatcagtggctgcagagtcgagaagccaagctccgtcttgccgtggtggaggctctggggcctatgagccatctgctgcccagtgagaggctggaagagcagctgcccaagctcctccctgggattctcgccctctacaagaagcacgcagagaccttctacttgtccaagagcctgggccagatcctcgaggcagctgtgagtgtgggcagccgcacactggagacccagctggatgccctcttggctgcactgcactcccagatctgtgtgcctgtggagtcctcaagccccctggtgatgagtaaccagaaggaggtgctgcgctgcttcactgtgctggcctgcagctcgcctgaccgcctactggccttcctgctgcccaggctggacaccagcaatgagaggacccgcgtgggcaccctgcaggtggtcagacatgtcatcaactcagctgctgctcagatggaagataaaaagccctttatcctgtcttccatgaggcttcctctcctggacaccaacagcaaggtgaagcgggcagtggtgcaggtgattagcgccatggcccaccacggctacctggagcagcctggaggtgaggcgatgatcgagtacatcgtgcagcagtgcgcgctgccccccgagcaggagcctgagaagccaggccccggcagcaaggaccccaaggccgacagcgtgcgggccatcagcgtgcgcaccctctacctggtcagcaccaccgtggacaggatgagtcacgtcctctggccatacctgctccagttcctcacccctgtgcgcttcactggggccctgactccgctctgcaggagcctcgtgcatctggcgcagaagaggcaggaggccggggccgacgccttcctcatccagtacgacgcccatgcgagcctcccgtctccctatgctgtaaccggaagactgttggttgtgtcttccagcccctacctaggggacggacgtggggcagcggcgctgcgcctcctcagtgttctgcacccaaacattcaccctttgctgggtcagcattgggaaacgactgtcccgctgctgctggggtacctggatgagcacacagaagagaccctgccacaggaggagtgggaggagaagctgttgatgttcctgcgagacaccctggccatcatttctgacaacgcgtggatctgccagctgagcctggagctgtgcaggcagctgccctgctacgatgaggcaccccaggagaagaacttcctgtacaaatgcataggcaccaccctgggtgctgcttcaagtaaggaggtggtgaggaagcaccttcaagagctgctggagacggccagataccaggaggaggcagaacgcgagggcctcgcctgctgcttcgggatctgtgccatctcccacctcgaggacacgctggcccagctggaggacttcgtgaggtcagaggtcttcagaaaatccattggcattctcaacatttttaaggatcgaagtgagaacgaagtggagaaggtgaagagtgctctgatcctgtgctatgggcacgtggcggcccgggccccccgggagctggtgctggccaaggtagagtcagacatcctccggaacatctgccagcacttcagcaccaaggacccagccctgaagctgtgccttgtccagagtgtgtgcatggtcagccgcgccatctgcagcagcacccaggctggctccttccacttcacccggaaagcagagctggtggcacagatgatggagttcatcagggcagagcccccggactccttgaggacacctattcggaagaaagccatgctcacctgcacttacttggtctccgtggagccagcgctggacgagcaggcccgggcggatgtgatccatggctgcctgcacagcatcatggccctgctgcctgagcccaaggaggaggacggaggctgccagaagtccctgtatctggagacactgcacgcccttgaggatctgctgacgagcctcctgcagcggaacatgaccccccaaggcctgcagatcatgattgagcacctgagcccatggatcaagtccccaagaggtcacgagcgggcgcgggccctgggcctgagcgccctcctgctgcgctacttcctggagcacctgcgtgtcagcgccctggtgcccttccacaacctgggccttctcatcggcctcttctccccacggtgtgcggacctgtggcctgccacccgccaggaggccgtggactgtgtctactccctgctgtacctccagctcggctatgagggcttctcccgggactaccgcgatgacgtggcggagcggctcctcagcctcaaggacggcctcgtgcaccctgaccccgccattctcttccacacctgccacagtgtaggccagattattgccaagcgcctccccccagaccagctcatcagcctcttgctaaccatgtttgaggccctgggagaccccgaaaagaactgctcccgagcagctaccgtcatgatcaactgcctgctgcaggagcggggcggtgtgctccaggagaaggtgcccgagatcgtgagcgtcctgcgctccaagcttcaggaggcccagggagagcacgtcctgccggccgcccagcacagcgtgtacctcctggccacccagcactgcgcagccgtggtgtccagcctcctgggcagccccttgcccttggacagccacacctgcatgctgtggcgggcgctggcggtggagcctcgcctagctgcccaggtcctggggctgctgctggagaagatgagtagggacgtccctttcaaggagagccgggccttcctgctgggccgcaccccagaccgcgtggccacgctgctgcctctctcggctacctgtgcactgtttgaggtcatgtccacgcctgcagcggggccgcggtgctcgagctctacccccagctgtttgtggtgcttctgctgcgcgtcagctgcaccgtgggtgtccagctgccccggaacctgcaggcccaggaaaggaggggtgccagtccagccctagccaccaggaacctggaaccctgcagctctgcagtggacaccctgcggtccatgctactccgcagcggcagcgaggatgtggtacagcgcatggacctggagggaggctgggaactgtcaggactcggggggcatgaggagggggccacaggttggcaggncatggctgagcacgcagggccccgactccccctggtgctgaagacgctggcatgcacacacagcagtgcgtatgagaaccagagggtgaccaccaccgccttcctggccgagctgctgaacagcaacgtggccaacgacctcatgctcttggactcgctgctggagagcctggcggctcgccagaaggacacatgcgccagcgtgcggaggctggtgctccgcggcctggccaacctggcctccggctgccctgacaaggtgcgaacccacggcccccagctcctcacagccatgattggcgggctggacgacggggacaaccctcacagcccagtggccctggaggccatgctgggccttgcgaggctggtgcacctggtggagtcctgggacctgcgctcagggctgctgcacgtggccatccgcatccggcctttcttcgacagtgagaagatggagttccggacggcatctatccgcctctttgggcaccttaacaaggtctgccacggagactgtgaggacgtcttcctggaccaggtggtgggcgggctggcgcccctgctgctgcacctgcaggaccctcaggccactgtggccagcgcctgcaggtttgccctgcgcatgtgtggccccaatctggcatgtgaggagctctcagctgctttccagaaacacctgcaggagggccgagccctgcacttcggggagttcctcaacaccacctgcaagcacctgatgcaccatttcccagacctgctgggccgtctcctgaccacctgcctgttctacttcaagagcagctgggagaacgtccgagctgctgcacccctgttcaccgggttcctggtgctgcactcggagcccaggcagcagccgcaggtggacctggaccagctcattgcggcgctccagatcctgctgaaggacccggcccccgaggtgcggacgagggctgctgaggccctgggccgcctggtgaagctcgcctaaggctccggccagcacccccagcgaggagtatgcacccagacctgtgcctgagctccaagacagggcctcctgaggaccacagcctgggcacacgactggaggggcctggccccagaacaggcactgctggggaccaaacccaagcccttcagtgagggatgtgcccaataaactcatctgctcccagcgagtgactgacagggtgcgatgccgagcctcttaggggatgggccagagggtgccctggactggctgtgttgtccccactgtttttgcaaaattgagtgaggggaaggctcggcgctgtggtgtgggcggctttgttggcaacccctactcaagaaggtgggagcaccagctagcacagggtaaagtactcttagttcagcacaactcttctcatagcat

SEQ ID NO: 592774 - DNA, 1941 bp, Homo sapiens
ttatagttattcttttccttatgaaaaacaaaaaggggactgggcgtggtggctaacacctgtaatcccagcacttggggaggctgaggcgggcagatcacaaggtcaggagttcgagaccagactggccaaaaggatgaaaccccatcactctactaaaaatacaaaaaattagccaggtgcggtggggcgcaccagtaatcccaactactagggaggctgaggtaggagaatagcttgaacccgggaggcggaggttgcagtgagccaagatcgagccacggcactctagcccaggtgacagtgtgagactctgtctcagaaaaaaaaaagaaaaacgggatcgagatggtttgcaggattagcaagtgatagagatatattgaagacatagaaagccagtgtggttgctcacacctataatcccagcactgtgggaggccaaggcaggaggatcacttgagtcaatgagttagagaccaacctgggcagcaaagtgagaccccatctctacaaaaaaattttttaaaaatcagccaggtacggtggtgcacacctgtaatcccagctactaaggaggctgaggtaggagaatctcttgaacccgggaggcagaggttgcagtgagccaagatcgagccacggcactctagcccaggtgacagtgtgagactccatctcagaacaaaaagaataacaggatagggatggtttgcaggattatcaagtgatacagatgtactgaagacacagaaagccagtgtggttgctcacatctataatcccaacactttgggaggccagggcaggaggatcacttgagttgacgagttagagaccaacctgggcaacaaagtgagacccccacctctacaaaacattaaaaaaaaatgagctgcacatgttggcacgcacttgtaatcccagctacttgggaggctgaggtgagaggatcacttgagcacaggaggttacagtgagctatgatcacgccactcgacaccagcctgaatgacagagcggagaccctgtctcaaaaaagtggggggaaataaaaggatatagtgcactggattgaaactttctcctgtcgttatcataagcagaagaattgaagtaactaaaaagagaatcatagtctcaatgtgtgcttgaatgttatttaacatcacgtctctgctacctcatcattaaccagctgtggtaatgattccacactttgaacccatcccacctgttgacagaagcgattgcatgccagcatcatctcagtgacggctcatcatgtaggcccagaatactgattttgtgacttctaagcttgtgctccattcccaacacaaagtcttctgaccagcctttgagtaccattattgtagaggaagctcatcttaggtaactattactagagcagaaatcacttaatataaaatatttcatgtatcaaatttaaaactcacttttgggttcattgatgtagtaactcaaccaggaaacttaaatggaattagtgttttcactgacaataatgatgctgctttttcattataggcccataagatggcctggcctttccttgaaccagtagaccctaatgatgcaccagattattatggtgttattaaggaacctatggaccttgccaccatggaagaaagagtacaaagacgatattatgaaaagctgacggaatttgtggcagatatgaccaaaatttttgataactgtcgttactacaatccaagtgactccccattttaccagtgtgcagaagttctcgaatcattctttgtacagaaattgaaaggcttcaaagctagcaggtgagcagatgggttcggtattctgaattaattcaactcttcacactctttatactattctgtctaacgattcaaccagtgcagtttatggtaaatttaaccttaaatatctttaaaa

SEQ ID NO: 592775 - DNA, 166 bp, Homo sapiens
cggacggagaatccttgggtcacggagacggacggttgcgtgcacccagcttgtacccttgcactgcagcctgggcaacagagcaagactccatctcacagaaataaataagaatttctaataagggttttgtgcatactgtagccgttaatagtcctccggccta

SEQ ID NO: 592776 - DNA, 5296 bp, Homo sapiens
  misc_feature (97)..(97): n is a, c, g, or t
  misc_feature (99)..(99): n is a, c, g, or t
  misc_feature (102)..(102): n is a, c, g, or t
  misc_feature (104)..(104): n is a, c, g, or t
  misc_feature (106)..(106): n is a, c, g, or t
  misc_feature (126)..(126): n is a, c, g, or t
  misc_feature (4140)..(4140): n is a, c, g, or t
tcgccactccgggcccctgctgggcgggaaggcggcgccccggccgaggtggcggcggctcctcaggacggaagctcctgctctcttgtcagccgcnanctnangnccattcgcagcttctccagnccacctgcattccttgtctcagagcctccctcctgcatcctccaagccagcagttgtgggatgggagaagaagttgtccatgttcacactgggtgaaggaagctgaaaccacagacatgactgagtcctccatgaagaagctggcctccaccctgctggacgccatcaccgataaggaccccctggtgcaggagcaggtctgcagtgccctgtgctccctcggggaggtgcggccggtggagacgctccgtgcctgcgaggagtatctgcggcagcatgacaagctggcacacccataccgagcagcggtcctgagggccatggagagggtcctgagcagtcgcgccagtgagctggacaaggacacagccagcaccatcatcctcctggcctccagcgagatgaccaagacgaaggacctggtctgggactggcagcaggcggcgagtggcgtcctggtggccgtgggaagacagttcatcagcaaggtgatggaggagctgctgcgcaggctgcaccctgggaccctgccacactgcgccgtgctgcacaccctcgccagcctctcggtggccaacgcgttcggcgtagtccccttcctgccatccgtcctgagctccctgctgcccgtgctgggcgtggccaagcaggacacggtgcgcgtggccttctgctccgctctgcagcgcttcagcgagggtgccctggagtacctagccaacctggaccgagccccagaccccacggtcaggaaggacgcctttgccaccgacatcttcagcgcctacgatgttctcttccatcagtggctgcagagtcgagaagccaagctccgtcttgccgtggtggaggctctggggcctatgagccatctgctgcccagtgagaggctggaagagcagctgcccaagctcctccctgggattctcgccctctacaagaagcacgcagagaccttctacttgtccaagagcctgggccagatcctcgaggcagctgtgagtgtgggcagccgcacactggagacccagctggatgccctcttggctgcactgcactcccagatctgtgtgcctgtggagtcctcaagccccctggtgatgagtaaccagaaggaggtgctgcgctgcttcactgtgctggcctgcagctcgcctgaccgcctactggccttcctgctgcccaggctggacaccagcaatgagaggacccgcgtgggcaccctgcaggtggtcagacatgtcatcaactcagctgctgctcagatggaagataaaaagccctttatcctgtcttccatgaggcttcctctcctggacaccaacagcaaggtgaagcgggcagtggtgcaggtgattagcgccatggcccaccacggctacctggagcagcctggaggtgaggcgatgatcgagtacatcgtgcagcagtgcgcgctgccccccgagcaggagcctgagaagccaggccccggcagcaaggaccccaaggccgacagcgtgcgggccatcagcgtgcgcaccctctacctggtcagcaccaccgtggacaggatgagtcacgtcctctggccatacctgctccagttcctcacccctgtgcgcttcactggggccctgactccgctctgcaggagcctcgtgcatctggcgcagaagaggcaggaggccggggccgacgccttcctcatccagtacgacgcccatgcgagcctcccgtctccctatgctgtaaccggaagactgttggttgtgtcttccagcccctacctaggggacggacgtggggcagcggcgctgcgcctcctcagtgttctgcacccaaacattcaccctttgctgggtcagcattgggaaacgactgtcccgctgctgctggggtacctggatgagcacacagaagagaccctgccacaggaggagtgggaggagaagctgttgatgttcctgcgagacaccctggccatcatttctgacaacgcgtggatctgccagctgagcctggagctgtgcaggcagctgccctgctacgatgaggcaccccaggagaagaacttcctgtacaaatgcataggcaccaccctgggtgctgcttcaagtaaggaggtggtgaggaagcaccttcaagagctgctggagacggccagataccaggaggaggcagaacgcgagggcctcgcctgctgcttcgggatctgtgccatctcccacctcgaggacacgctggcccagctggaggacttcgtgaggtcagaggtcttcagaaaatccattggcattctcaacatttttaaggatcgaagtgagaacgaagtggagaaggtgaagagtgctctgatcctgtgctatgggcacgtggcggcccgggccccccgggagctggtgctggccaaggtagagtcagacatcctccggaacatctgccagcacttcagcaccaaggacccagccctgaagctgtgccttgtccagagtgtgtgcatggtcagccgcgccatctgcagcagcacccaggctggctccttccacttcacccggaaagcagagctggtggcacagatgatggagttcatcagggcagagcccccggactccttgaggacacctattcggaagaaagccatgctcacctgcacttacttggtctccgtggagccagcgctggacgagcaggcccgggcggatgtgatccatggctgcctgcacagcatcatggccctgctgcctgagcccaaggaggaggacggaggctgccagaagtccctgtatctggagacactgcacgcccttgaggatctgctgacgagcctcctgcagcggaacatgaccccccaaggcctgcagatcatgattgagcacctgagcccatggatcaagtccccaagaggtcacgagcgggcgcgggccctgggcctgagcgccctcctgctgcgctacttcctggagcacctgcgtgtcagcgccctggtgcccttccacaacctgggccttctcatcggcctcttctccccacggtgtgcggacctgtggcctgccacccgccaggaggccgtggactgtgtctactccctgctgtacctccagctcggctatgagggcttctcccgggactaccgcgatgacgtggcggagcggctcctcagcctcaaggacggcctcgtgcaccctgaccccgccattctcttccacacctgccacagtgtaggccagattattgccaagcgcctccccccagaccagctcatcagcctcttgctaaccatgtttgaggccctgggagaccccgaaaagaactgctcccgagcagctaccgtcatgatcaactgcctgctgcaggagcggggcggtgtgctccaggagaaggtgcccgagatcgtgagcgtcctgcgctccaagcttcaggaggcccagggagagcacgtcctgccggccgcccagcacagcgtgtacctcctggccacccagcactgcgcagccgtggtgtccagcctcctgggcagccccttgcccttggacagccacacctgcatgctgtggcgggcgctggcggtggagcctcgcctagctgcccaggtcctggggctgctgctggagaagatgagtagggacgtccctttcaaggagagccgggccttcctgctgggccgcaccccagaccgcgtggccacgctgctgcctctctcggctacctgtgcactgtttgaggtcatgtccacgcctgcagcggggccgcggtgctcgagctctacccccagctgtttgtggtgcttctgctgcgcgtcagctgcaccgtgggtgtccagctgccccggaacctgcaggcccaggaaaggaggggtgccagtccagccctagccaccaggaacctggaaccctgcagctctgcagtggacaccctgcggtccatgctactccgcagcggcagcgaggatgtggtacagcgcatggacctggagggaggctgggaactgtcaggactcggggggcatgaggagggggccacaggttggcaggncatggctgagcacgcagggccccgactccccctggtgctgaagacgctggcatgcacacacagcagtgcgtatgagaaccagagggtgaccaccaccgccttcctggccgagctgctgaacagcaacgtggccaacgacctcatgctcttggactcgctgctggagagcctggcggctcgccagaaggacacatgcgccagcgtgcggaggctggtgctccgcggcctggccaacctggcctccggctgccctgacaaggtgcgaacccacggcccccagctcctcacagccatgattggcgggctggacgacggggacaaccctcacagcccagtggccctggaggccatgctgggccttgcgaggctggtgcacctggtggagtcctgggacctgcgctcagggctgctgcacgtggccatccgcatccggcctttcttcgacagtgagaagatggagttccggacggcatctatccgcctctttgggcaccttaacaaggtctgccacggagactgtgaggacgtcttcctggaccaggtggtgggcgggctggcgcccctgctgctgcacctgcaggaccctcaggccactgtggccagcgcctgcaggtttgccctgcgcatgtgtggccccaatctggcatgtgaggagctctcagctgctttccagaaacacctgcaggagggccgagccctgcacttcggggagttcctcaacaccacctgcaagcacctgatgcaccatttcccagacctgctgggccgtctcctgaccacctgcctgttctacttcaagagcagctgggagaacgtccgagctgctgcacccctgttcaccggcagcagccgcaggtggacctggaccagctcattgcggcgctccagatcctgctgaaggacccggcccccgaggtgcggacgagggctgctgaggccctgggccgcctggtgaagctcgcctaaggctccggccagcacccccagcgaggagtatgcacccagacctgtgcctgagctccaagacagggcctcctgaggaccacagcctgggcacacgactggaggggcctggccccagaacaggcactgctggggaccaaacccaagcccttcagtgagggatgtgcccaataaactcatctgctcccagcga

SEQ ID NO: 592777 - DNA, 212 bp, Homo sapiens
tcatcagctcggtaccgcatactgtgacttctgcataagtgaatttaactaggagataacttgcaagggaggagcccaagctaccgacccccgaaaccagacgagctaccttagaacagctcaaatgagcacacccgctctatgctagcagatatagctgggaaagattcataaggtagtaggcgatcgaaccgtaccgtagcctgggtgat

SEQ ID NO: 592778 - DNA, 297 bp, Homo sapiens
gggcccccaaaaaggggggaagggttctgggtgctttttttaaaaggggggggtcctttttttggttttttcccaacaaaaatttttttttgggtttgagggtgaagggtttttggcccctttgtaagtccccccccccccccccccccaagttaaagccgaagattttttaaaaattatgtttttcccccggggggggtgtttggggcccctcccggaagtgaaagcccttttttttttgccgggttttttttcttttttttgggggggtaattaaaaaaaccggggggcctttta

SEQ ID NO: 592779 - DNA, 138 bp, Homo sapiens
cgtttgagtggggctggagctcgggtgcaagaatgagtgcgtgaggagagacagaagtatctggaagcgaacatgacacaaagtgcgtgccaaagatcattaaggctgggttggcagcactccaactagaatacttgt

SEQ ID NO: 592780 - DNA, 531 bp, Homo sapiens
  misc_feature (42)..(42): n is a, c, g, or t
  misc_feature (61)..(61): n is a, c, g, or t
  misc_feature (64)..(64): n is a, c, g, or t
  misc_feature (69)..(69): n is a, c, g, or t
  misc_feature (104)..(104): n is a, c, g, or t
  misc_feature (366)..(366): n is a, c, g, or t
tatctatactgacgcgtgaaaaataatatctatgaagatganagattcttaaggaattccnctnttttnccatagagcccaaagtttccttgacccaagcaagnccatcaaggagctatctggattgtatgatactggacctcagtagaactacttttactgaattgctggagccaaaactaggctgcagcaagagaaggcaattagggtacaaaatctaaggaagctgtcattctgaggatcatatgatagatgctgggttaagacatatggctgggcatggtggctcatgcctgtaatcccagccctttgagaggccaaggcaggtggatcacttgaggtcaggagttcaagaccagcctgggnaacatggtgaaaccccacatctactaaaaatacaaaaacagctgggcgtggtggcatggacctctaatcccagttacttaggaggctgaggcaggagaatagcttgaacccaggaggtggacgttgcagtgagccgagatcatgccactcgactccagcgtgggc

SEQ ID NO: 592781 - DNA, 118 bp, Homo sapiens
cgctatatcgacgaagagcttcttcctttatcacaccatcttgagcccaggctgtccccacttgctagtcctgctgtgttacgtctaggtcgactacagtacccggcttttcgtattc

SEQ ID NO: 592782 - DNA, 292 bp, Homo sapiens
aagtcggaggcaagcgaggatcgagctgctgcggcccagcgaaattccgaccgactgagctggagaccgcaggaagctgaggtcaggccaggaggagcgagcaggcctgcagcggtctctgagaggccgagctctggccaacgtgccccagtgtgaaggccaccgcgtccaacaggcctcatcagagtccacacaggccaggagtgaaggaccaggccacccctcgagtcttgtgcttcagcagtcctgttgacccaggcgtgccgagaggaggacttgtccttcctgcttc

SEQ ID NO: 592783 - DNA, 269 bp, Homo sapiens
tcccctcagcttatacttcacactgtggcatctaccctgaattctttcttgcacaagatccaagaaccctctcttggggtctagattgggacccctttgcctgtaactatcatgctactgcactccagcctgggccacagtgtgagatctgtctcaaaacaagaaaaaaaacaagcaaaaaaaaaaccaacttgctattgtcgttcaatacaaagctctccttcacctcttatcaattcaacaagagctgtgctgatcccacacccatt

SEQ ID NO: 592784 - DNA, 382 bp, Homo sapiens
cttccatgtagcatttcaaggaaaagatatcctgagtttccaaggaacttctttgggagccaacccaagaggccccacttttgggtaaactttggccattcaaaggtgcttaacccaggacaaggtgaccgagggaaacaagttcagtgtggtctccttatttgcaccctccccccatttttgtaagtggcctcctttgtgtaaggggagtgtcggatctaaggaggcatgtaaggcccaaggtctgtctgtcctgtggccccagtcctggccctggccgtcttgctgctggtgtccatgtctaaggattctacccaaggcctgtatgggtaaggtggatgcggggtgagcaggagcagcaggcaactatgccaggggacat

SEQ ID NO: 592785 - DNA, 144 bp, Homo sapiens
cctctgccttttgtgccccacccccttttttgtccgtaagtctttcgcccacagtggcactggagtctctctgagcctattttggtttggggggttccctgattcctgaatcattctttgctcaattaaactctgtaaaattta

SEQ ID NO: 592786 - DNA, 636 bp, Homo sapiens
  misc_feature (213)..(213): n is a, c, g, or t
  misc_feature (487)..(487): n is a, c, g, or t
  misc_feature (569)..(569): n is a, c, g, or t
tcgatctagaggatcccgcccatgcacagttgtgtgtatttggaatgtcttgggcgtcagttctatagtcacatattttaaaatgtctatggtgcacatattggaaagggcacttaccaaagtgtgaatatctccttcacttgagggcaagatcccgctatagtggatgagatggtcccgtctcacctgtgcccgggcaacctgtgtcattcnttttcagtgtgttggcaaagaatgagatcttaattctcaaggggtggatctccatatctgaagtgcagttcatgggtccatcaatatcataatgaaggatatacaacagagtgtaattattatatgggtaaggccactgaagatggagcatggccttgctgaatgaactgggaccatggtttctcagctaaggagaaaaaagaaaaggtatctacacctggggcaaaaatcggttccataatccttcccctacatcaactttagaaatcaggtnagcaataggttttaaataacagcaatttccacaattaacctctaattacaatgtgaccatttttatgcaaaaatgatcaaantcaacatttgtctctaacacagagtcacctgtgtccggataacatataaacccggtggggccagtgg

SEQ ID NO: 592787 - DNA, 1425 bp, Homo sapiens
aaagtgagtgtcgatccgagctgtcggcaacgattagcattcttagttagtgtcttgtcgtttatctcttgcgtcagcttctttctactcttcctcttctctataccttcgcgcgtacggcttgtcgttatcgtcttagctcgctctatctccttctctgtagttgtatgtttgggtgatgtagtgtggttgttgacgtcgatctttttctttctttcctttcttgttcgttctctgtatcgtctgttctggtgttgactttgtctccggttcgatgcgtctctctttcttctttgtcttgtgttgcccgtcgtttgccgctgtctgtcatttctctcatcctctgtcgatgtagtttggttattctatggtttttatgtagaatatttgatgtgcgatttaaggggtaatgggtatatgattattttttttagtgttttgatttattgtatttttagagtttttatgtaagtgatagggagtagtaggtgtagtaggtttagttatagtattatttagtttgagtttaatttttattgtgtgtgtttagtttttttgttgtatagttgtttatgtattgtgtatcttttttgttgtttttggtgatggcgcggtagtcattgtaggacacgctctgtcttgttgtgctgtgtgtgtctttgggttgtgtgttatgtgtgtggaggattgtgtgctgttatgggtgcggtgctcgtctgtagtccgtgttgcccatcatgttttcctctcggtctgtatctgtcgtctcgtcgcgtcgctcgttcgtcccttcgcttcctttctcgatgttcgtgtgtgtgttgtgtgtgtatgtagagctgcgtcgtttgtgcggctggcggcttctctctctctctctcgcgctcgcgctccgcgctctcgctctgtgctgagtgctcgttggtgtatctgtttgtctttctttcttttctgttctcgtcgcgcgcgcgctcgcgctctccgctcgcctttctgcgctctctctctttctctctcttctctctgctgtctgtcttgctctcgcgcactctgcgcctcgcttctctgcgctgcgtgtgcaagtagtagagtagttgcaatgtgtgcgtgcttcttcgctgctctctcgtacgcgtcgtcctttctcctcgtcccctgttgcgcgtctcgtgctgcgcgcgggcgcgcgcgcgcgccgccgcccgcccccgccgctcctctcgcgttcgtgtgtggtgtgggttgtggtgtcgtgtgtacctcgtttctgttttccttccgctcggcgagaggtagtgcacccctcccccctccccccctctctctttttttctttttttttttttttgtttctctctctctctctctctctctctctccctcgccgagcaagaaaaatataatatataattagtactattaata

SEQ ID NO: 592788 - DNA, 362 bp, Homo sapiens
aaactttgttgacagcggtgtctggatggaccagcagagggcactctcacccacggggaaaatcgtgcgcccggcctcgtccaccgtcagaagacgccgctacacaatggagtctcgctctggcgaccaggctggagtgcaatggtgcgatctcggctcattgcaatctctgcctcccggtgagaggagaagcccgctagactttcctgggctagtggggacttggagaacttttctggctagctaaagatttggaaatgcacctataatggttgggtctagctaaagtttgtaatcgaaccaacagcacttttgaaaagagggcccattagtcacttcgtaaaaggaccaatcaccactct

SEQ ID NO: 592789 - DNA, 302 bp, Homo sapiens
tgcagtgatgactatcgtctgcaatatagagactactacgttgcgaattggggaggtgttcctctagtgttttctctattacagaagtgtgcaatctctttgcagctacttctgatcttcagcggagcacatttgactcagtcacataagatgagattgttccatttctactgtttggtaacatatcagatttataagataacagacaggtttctgtagaaaaggccataaatcgagctcagcagtgaaatgttcactacgttcaaccatctgctaaaacaagagctaatgtttactaggta

SEQ ID NO: 592790 - DNA, 147 bp, Homo sapiens
gtgaaccactcgttcagcagctcctatgacgtgctgtgcgcctcctcttgtagaatcttcatcagctatgctcgtgatcctatctgagtgacgagacatgctcagtaggagggtacgcttatcgatcgccaggagtcagaggccaca

SEQ ID NO: 592791 - DNA, 191 bp, Homo sapiens
ctaaagcctggagaaaggaggtcttctcggacccgagaccagtgttctgggctggcacagcgacttcacatggagcagtgccaccagcacgggcagcagctggcaccttattgaccagcaacatgtccctgatctcagtgaggacctccttgatgaacacagagccgacattcccaccgatatgaggcagc

SEQ ID NO: 592792 - DNA, 761 bp, Homo sapiens
  misc_feature (9)..(9): n is a, c, g, or t
  misc_feature (266)..(266): n is a, c, g, or t
  misc_feature (273)..(273): n is a, c, g, or t
  misc_feature (292)..(292): n is a, c, g, or t
  misc_feature (309)..(310): n is a, c, g, or t
  misc_feature (321)..(321): n is a, c, g, or t
  misc_feature (323)..(323): n is a, c, g, or t
  misc_feature (332)..(332): n is a, c, g, or t
  misc_feature (334)..(334): n is a, c, g, or t
  misc_feature (347)..(350): n is a, c, g, or t
  misc_feature (352)..(353): n is a, c, g, or t
  misc_feature (357)..(357): n is a, c, g, or t
  misc_feature (360)..(360): n is a, c, g, or t
  misc_feature (366)..(366): n is a, c, g, or t
  misc_feature (371)..(371): n is a, c, g, or t
  misc_feature (388)..(389): n is a, c, g, or t
  misc_feature (392)..(392): n is a, c, g, or t
  misc_feature (394)..(394): n is a, c, g, or t
  misc_feature (399)..(399): n is a, c, g, or t
  misc_feature (408)..(410): n is a, c, g, or t
  misc_feature (416)..(416): n is a, c, g, or t
  misc_feature (418)..(418): n is a, c, g, or t
  misc_feature (421)..(421): n is a, c, g, or t
  misc_feature (471)..(471): n is a, c, g, or t
cccaaagangtctatttcctcccacaggatggctagagtttaggggccacgttctcctctatagctcaccagaggatgcagcctgaagagctcagggtttgaaggttgggccttgggcgggagtcagctactatttctagtctgttctagaaagacctagaaacttcctgtgtgaaaacaggattaggaagctctgggggtgaaaatgccatgcacggagctggcccatgccaagtcccttctaactattttaaattacatctttngccaggnacggtggttcatgcctatnatcccagcactttgggnngtcaaggtggntngtttttctntngttaggtgttccnnnncnncctngcnaacatngtgtnaccctgtctctactaannatncnaaatnattatctgnnnatagtngngcntgcctgttatcccagctactcaggtggctgaggcaggataatcgcttgancccaggaggcagaggttgcagtgagctgagatcatgccacgttacactccagcccgggtgacagagcgagactcttgtctcaaaaacaagaaaaagaaaaaaaaatacagcctcatcaacatctcctgcttctctgagacaaagggaacaaaccaaatcaggaaaatcgtgacagataaatgacaggcagccattgtcatttccattcttattcgtggtttctggtttttttggttttgttttcccttttaatttttttctagaaaaaaaaacacaacccggggaattta

SEQ ID NO: 592793 - DNA, 100 bp, Homo sapiens
ggcacgagcttaaccttggaggcggaggttgcagttagtccgagattttcaccacttcacttctagcctttggcgtcagacatggactctctctcaaata

SEQ ID NO: 592794 - DNA, 1187 bp, Homo sapiens
  misc_feature (1)..(1): n is a, c, g, or t
  misc_feature (5)..(6): n is a, c, g, or t
  misc_feature (16)..(16): n is a, c, g, or t
  misc_feature (21)..(21): n is a, c, g, or t
  misc_feature (26)..(26): n is a, c, g, or t
  misc_feature (42)..(42): n is a, c, g, or t
  misc_feature (68)..(68): n is a, c, g, or t
  misc_feature (88)..(88): n is a, c, g, or t
  misc_feature (257)..(257): n is a, c, g, or t
  misc_feature (404)..(404): n is a, c, g, or t
  misc_feature (524)..(524): n is a, c, g, or t
  misc_feature (815)..(815): n is a, c, g, or t
  misc_feature (855)..(855): n is a, c, g, or t
  misc_feature (861)..(861): n is a, c, g, or t
  misc_feature (868)..(868): n is a, c, g, or t
  misc_feature (1030)..(1030): n is a, c, g, or t
  misc_feature (1078)..(1078): n is a, c, g, or t
  misc_feature (1174)..(1174): n is a, c, g, or t
ncccnnccccgccccnccccntctcnccgaaccacctcgccnacgcgccgcgcccttctataagacanaacgccgcactgccgactcnacagcactctggttccgcaggcgcgatactacgccacgatcacggcctccgcgccgctccgacgcacgctgtgtgttaaggtcagccggacgcgggccggcggcctgccgccgcccagcgtacccggcgccagcgcgcgcgcgcgcccgcccccccccccgacgcccancgatggggacggcgagggaggggggggggggaacgggaggcggcgggggcgagggcgcggggaaggcggggacggcaaagggagagagagagccgcctcgcataacaacccaggcaccagccgtcgtaacgtgcgcgtgcgcggtgntccaagatggtagatcatcgtccacatcactatgatatacaatataattacccatacgtcatacttcaataatacataaacataatacgatcgatcatggatgtaatgaaatatcagatnaggaagtatatgaggatcgtgcgtagggagcaagaacgtagaatgcttttcgtaatcagattcaagtcagtgacagccggcgcgacgtgggagcgaggtacaggcgcgtatatgttctcgttattctcaactcgacctcgtgtccagttgtccggcagcagtacgtctagtggctctgggcgacgccgctgcaccacgtgattatctagtgtctgtgccgatcgcgtctatgtattactatttgctcatacgtaatcctgtcactgatcatagtatacgggtgatgctcgncggtcagcgcgtgctcgtgctgaggcgacgcatcgcgtancgagcngttcgangtcctgctcatacacgacgtatctcgcgcatagctgcaagcgagtgatcttagtcactctcatccgcacgtacgatcagatactgtgctgataagtatgatcatgtgtatatgagaacaccatcacactgcgaactagtcacgtgtccgtgtgctcgatccngcgacgcaacgtgcgcgcgtcatgctcagcgagacgcgagcgtagtcntgcggcggtcgtctataggtcgtacggcgtagtgtgcggtcacgcgcgcaccacgcattcaccgcatccgccgccgcagaccgctcgtgctgcagntgcgagcctgtcg

SEQ ID NO: 592795 - DNA, 308 bp, Homo sapiens
tctttaccgaggccccgtctaaaaaaaacaaatgagccgggcgcggtggctcacgcctgtaatcccagcactttgggaggccgaggcgggcggatcacgagccaggagatcaagaccatcctggctaacatggtgaaacccccatctctactaaaaacacaccacgcctggttaatttttgtatttttagtcgagacaggatttcaccatgttggccaggctggtctccaattcccaacctcaggtgatccgccttcctcggcctctgaaagtgctgtgctccagcctgggcgacggagactccgcaa

SEQ ID NO: 592796 - DNA, 152 bp, Homo sapiens
gggaccttacgcgatatatagtcatgcccggttccagccctttgatgtgtagtatcctactgaggagtcacaaaatcttcaaaaatagggataccttctcctgccgcaactactgtgatgcggtacccaattaagtggtgcgaagagtttag

SEQ ID NO: 592797 - DNA, 311 bp, Homo sapiens
tggtaggggtaccagaaaggaactggctaccgtgcggactatttgtagtcttgttacagaacatgatcaagggtgttacactgggcttccgttacaaaatgagttctgtgtatgctcacttccccatcaacgttgttttccaggaaaatgggttctctgatgaaatccgaaattttctttgggttgaaaaattttttccgcagggttcggattgagaccaggttgttgcttgttcagatattctcagtgcccagcaaagatgaatttattcctttgaagggaaattgagatttgagctttgttttcaaatt

SEQ ID NO: 592798 - DNA, 162 bp, Homo sapiens
agatggattggcgatgaacagcgctggagtgggcaggtgtggtgcgtgatggtggcctcactcagagtggaccaatggcccagctccttgcccaaaaccaaagcccttgggccgaagtttttagtataacatcctttgcagtaaatctcgccaacccgatcg

SEQ ID NO: 592799 - DNA, 1059 bp, Homo sapiens
gcaggctcgagccgagcaagccaaggccgcggaccaagctgctatggcggacatggaggacctcttcgggagcgaagctgagagcgaggccgagcgcaaagattccgagtctgagtccgactcggactctgaccaggacaacggcgcttctggcagcaacgcctctggcagcgaaagtgatcaggatgacagaggtgactccggacagcccagtaacaaggaactgttcggggacgacagtgaggaggagggggcctctcatcacagtggcagtgacaatcactctgaacggtcagacaataggtcggaggcttccgagcgctctgaccacgaggataatgagccctctgacgaggaccagcacagtggctctgaagcccacaacgatgacgacgatgagggccacaggtcggacgaagggagccgtcactcagaggcagaagggtctgaaaaagcccagtcagatgatgagaaatgggatggagaggataaaagtgaccagtcagatgacgagaagctgcagaactctgacgacgaggatcgggagcaagggtccgatgaggataagctgcagaactctgacgacgacgaggagaaaatgcagaacacagatgacgaggaccgggcccagatttctgatgatgacagacaagcagctgtctgaggaggagaaggggaattctgacgaatgagcatccaggtagcttctggtaatggcgagggagaagcgaaatttggaccatagggaccaaaccgccaggtggtccgaagaacggtcgacaaatggcgaacgccgcaacagtggagagtgcccacaaacttcgaataaaacaagtaaaggagtacgaaagggagagaagaggaacacaaagacaagagatgagaaacagctgcaaaggcagcgacacaagagcaagcaacgatccagaaacagagagcacaacaacgagcgagcactgacgaaacaacaaagacacacgagacacaaggatgccccacaaaacaagagagcgagcacgagccgcagcacgaaagacaaataactacagcaagagagga

SEQ ID NO: 592800 - DNA, 214 bp, Homo sapiens
gatccttaaattgaggtcctgggtggggagtccaacgccgctgtctctggctctggtctagccacaacgaggtcaatgctcgcttgcaggtgccccagcgaggacccccagttccccaaggtgcagtggtcaccccgtgaactttgttcttgcctgccacaatgaacgcctggatgtgcccgtagtgggaacgtgcgaagccacccctcaactt

SEQ ID NO: 592801 - DNA, 633 bp, Homo sapiens
gatggcagtaactctcatcagtctatgttgtgggcgggccattcatccttctgtctttaacctgtgcctaaatgttattgattcttgaatccctcttgtccgcccagagctacctactaaacatttcttggccacaaaatgttcggagcagggccactgttacagatggtggaaattataatttcctcctttcctcaagtgcacaggtccaaaccaggattcattcttcctcaaaattaacacctctgccttagcataagcatgcaaaccaaaatcaatacaggctagtgtctactccactgcaacgctaatgcaaaacatatcactgaaggaaaagagggctgatagaacaaaagcaaggcttaaacttcagattcaaaggctcctgtagaaaccagagagtccctacagcaattaagtggaagtgagggcacatgttttgaaagtatttctttaaccccttggaaagcaaagtttggttagtgctataagcagaatgcctcaggtcagagcttcgctgtgagactactggttaaagcacagaatggccacagaattatgcgtgccaggcaggcttactattttcagcagtcaagctgatgcagcatatctaatgtttggtggaggcacaga

SEQ ID NO: 592802 - DNA, 441 bp, Homo sapiens
ttagaggatccttcttgtgtggagctgcatctctgcctgagggggcaggaaaggctctctgtggaggtgacatctgaaggtggctaaactgacatgaagggtgagctgcatgtggagttctgggaagagcatccagtgcgagtaaaccagcgacagagggagccaaagagggagcgtgtagagaggtgagcagggccctgacaaggtagaacagccatgagaaggttcctgggggcttggagcaggacgtgcacgtgagttttaacagtgacctctgacagctgtgcccagactgcagtgtagggccctgaatggaaatgaggagagccatggggaatccagtgcaactgtccaggaaggcgagggaggcgtccacactcttagcacggacagcacaaaaaccaccagcaaagaaacacagggtaccgaggtcggattcgg

SEQ ID NO: 592803 - DNA, 296 bp, Homo sapiens
gagatggagtcttgctgtgtcgcccaggctggggtgcagtggtgcgatctgggctcactgcaacctccacctcctgggttcaagcagttctcctgcctcagccttccgagtgggtggaactacaggtgtgtgccactacacttggctaattttcatattttttgtagagacggggtttcaccatgttgcccgggctggtcttgaactcctcctgagttaaagcagtctgcttgtctctgtctgccagagtgctggcattataggcatgagccaccacccccttctgtcgtcttctc

SEQ ID NO: 592804 - DNA, 252 bp, Homo sapiens
gtgcgtcatgaactgctggcaagcctggtagatgctgatctgaatctgctgcccatgctgctgccagtaccactgccctgtcatctggaatccactgcaactgtgtatgccaatggtgcaatgctgcagtgtgacctgtaccagcatgctgttctgtgccaccgtgctatgctgctgctgaccgtgatctgggctgtgggatccatctatgagtctgcacctgcatgtgcatgcaatgctttgtgcacttgg

SEQ ID NO: 592805 - DNA, 834 bp, Homo sapiens
ggtaaactcgttcgagaatctagaattggaggaaaaacacagcagcagggtgtcttacattccccaccaaacagaaaaaggtggctcagacccaacattttctgactctaaacaagcaacagaaggcagtctaggtaaggtcattcctcctatggctcgaacagaccctctgacaacaccaggtaagcctctagtcccatgtaagagcggttggttgggagccccactaacaataaactggccggagaagtgttccccttttctgctgtgcttagactcccctccccacaataaagatgctctccgaccttcctgcttgggtggctcccaaaaaaaaaaaaaaaaaaatacacaagaaaagaaacacaaaacaaaaaaaaaaacaagggggggcggcgccgccatgataatgatctcccccgcgggcggggcgcgcacaccgatgataagcgcgatctccacacaagtttttgttgggacaaaaggggcggccccaaaataggagagaggaggcgcgactataagtagaggccgagcgagccaccgggggcgcagcgtgtatacacaaacaagcgtgagaccagcgtggcgggaaaacaacacgggtgatccagcacgggggagacacactctgtgggcgaagagcgaccacacaaccaccaaccgggggggggggacgacaccacacataggtgggcgcacaacacaccaccacacagaaagaaaatttaacaaaccggccctcaaggggagaaaacgtacaccacgccttacaacaaggcggagaaacgagggggtacaaccacaaacgccggacaaaatactagcgcagga

SEQ ID NO: 592806 - DNA, 230 bp, Homo sapiens
tcccccccgaaatttttatttttttaaggttctcaaaggaaaaggccctttaatccaccagggtcatcagaagataacttgagccccgtcagggcttaatgtttattcctgataaaaattgatcaaattcatttttttcccgggggttccattaatgttaattcagccctgatttccccccagatcaatttgtaattgcttccatttttccaataaataatctgtacgta

SEQ ID NO: 592807 - DNA, 916 bp, Homo sapiens
attattgtccgagtggccggaacgggagccaacatggcagcggggttcgggcgatgctgcagggtcctgagaagtatttctcgttttcattggagatcacagcatacaaaagccaagtcgacaacgtgaaccaggattaggatttagttttgagttcaccgaacagcagaaagaatttcgaagctactgctcgtaaatttgcccagagcaggcaacatccatcccagtggctgcagacatcatgcatcaaacactggtgcaatatccagtcccccttaattcagcaagagcctgggaacttggtttaatgcaaccacacacattccagagaacttgtggaggtcttgcgactatgggaactttggcatgcttgttgtaaattcagttgcacagcacaccggcttatggcatgtcccaggggtttcagcaactgctcattgcaccaggcacacattcttttgggggccaaatgccgtcattcattcattgcttggcaaacttgcatcaagcaaaagcaaaggcaagtcatttgcgcggagcaatgcactgcaggcagcccattggatgtgtgctttaatgagtgtaacagcaaccctggcagcagggctctggaatggtagctgggtcataaacaggaacacaagcaggaacaagcaccaggcaggatgcaggtcatcattcatttccatcgggtcagcacacgactggtggacataaaacccagacagggacggcgcaccaacacgactcacactcggggaactgcagtgatactagagacaccggtatgcaggagtccgaagagtcccgtaacagccttccgtgggtaaattcacagaccctctaactggggatatacatagtagggacaagccgccatacccccaaggacacatgcacgactaggggccgacaa

SEQ ID NO: 592808 - DNA, 1674 bp, Homo sapiens
acgtgaggggtgcggaaggggtcgacagcccgcttatgagagctgttggggaaggtacgtggcaggggcagcgcgggtaaagagtgggtgggtcgacccacggtctcggagtagatgggcgccgcgtgccccaccgcctggggtggctgcggcggggctgtcgaagaggaggggcccggttgggagttatgcaagccagggagagaggttgcgtgggtcaaggggcaacacagtgagaatccatgattaggtcggacggggtcgttccaggagaaggtggtagaggataggtggccgacagagccaggtgtggggtgctggtgaacgtggctggtaagagagggatgcgtgggcgagttggtgtcgggtgctgtaaagggtgttgtgcgacaatgtgaatgtcttgtagaggggattggttagatgtagagtgtgttgttctgagtcttgcgtgtgggtgtgattgtgttgttccctgtgagagtagtgtggaaagtcgcgtccagtttgggggtttagacctgtgtttagtaagtgaacgggggttaggtttatgccgtgacgagaagagagtgatggctgtcggattttgggggggatgggtccatggagggtggaagttgttgtgagggagacgaagtgtgtgtgcgctggaagggaatggtagtgtgggtagtttattgtatgttgaagtgtgttgttaagggctgagaagttttagcgttggatattgtttgcgagttgggaagggaagttgagttggggagatgtcattagggtgcttatttgggcgcttatgggtggaggatatgtaagaagtgatgggaggtcgttgtagggcctaggttggttagaatggtgtaaggaagaaagcggttgggcgttcagagcttaacgagtaggtgcgttgtgtgagtagttggttaatttgggagcaggtgtaggctggcgtgtagaggtagagatagttgttgttgtgtgcgcgtgatcgcgtgtgtggtgtggcgtgcagatgggcgtggttgtagaaggtgggcagggggctggagggaagcgctcaaggcgctttggtgtgtgggtagagggttagcagggatagagagagtagaggtgcgcaggcgcggttgtgtgtgtgtagcagagagagccgcgtaggatgcagaaagggggggtgtagagaagagagaggtgtagagggaggtatggcgtgtgtgccagttggtttgtgagagagtgtgtaggcgcagtgtggaggagggtgcagagtggaagggttgggctagtgtgttggaggtgtgtaggcaggttggagtagtgtggtgagagatagtagaggtgcagagtgtgtgggagtgttgcagtgtgtgtgcgtgtgaagtagtgtgcagttgctgtgtgttgcagcaaagtgagagtgagttaagggaagttatgcagtcagtaaagggaacgctaaggtgagggtagtatgagtgagtgtagttgtgctttgcacacagcagtagtacggtagtagttcgtgaatagcaagcttattcacattttgcttcctaatctgttttgttgtacagggattcaggtctctgattcttacaacatgattgtttatatgtgaagcacatcttgctgttgccttatttttgatgcttacagttcagggtcagatttgtcaag

SEQ ID NO: 592809 - DNA, 177 bp, Homo sapiens
tggatttttatttgggggggagggctgggacagttttttttctaaaaaagtctgttgagatttccccccttagtttcccaccctctcccccacccctggagctaaatgcgttgtaaaatattgcccaaatgaaaagtgttttgtaatacccccataaaggccgcttgtttttgtgga

SEQ ID NO: 592810 - DNA, 248 bp, Homo sapiens
  misc_feature (20)..(20): n is a, c, g, or t
  misc_feature (100)..(100): n is a, c, g, or t
  misc_feature (110)..(110): n is a, c, g, or t
  misc_feature (152)..(152): n is a, c, g, or t
  misc_feature (185)..(185): n is a, c, g, or t
caattcgtgatggcgggggntggttccgccgctgtatcgggggcagggaccggttggcgggcccacaggcgcgaccttttcgccgaagcttgctggagtnctgcgacccnctgtcagcagctcgactctcacgtacacgccgtcagagagancaggtagagctcgggaacaaattgacaacctancacagaactgtgccgcataaatgaggatcagaaggtggccctggatcttgacccctatgttaa

SEQ ID NO: 592811 - DNA, 113 bp, Homo sapiens
tggggaagagacggggtctggctatgtggcccagacgggtctcaaactctgggtctcaagaaatccttccacttaggcctcccaaagcatggggattataggtatgagccact

SEQ ID NO: 592812 - DNA, 1044 bp, Homo sapiens
  misc_feature (14)..(14): n is a, c, g, or t
  misc_feature (21)..(21): n is a, c, g, or t
  misc_feature (435)..(435): n is a, c, g, or t
  misc_feature (476)..(476): n is a, c, g, or t
  misc_feature (487)..(487): n is a, c, g, or t
tccgctaggactcnggcagtnggtgagcatcatggcaaccgttacagccacaaccaaagtcccggagatccgtgatgtaacaaggattgagcgaatcggtgcccactcccacatccggggactggggctggacgatgccttggagcctcggcaggcttcgcaaggcatggtgggtcagctggcggcacggcgggcggctggcgtggtgctggagatgatccgggaagggaagattgccggtcgggcagtccttattgctggccagccgggcacggggaagacggccatcgcccatgggcatggcgcaggccctgggccctgacacgccattacacagaccatcgccggcagtgaaatcttctcccatggagatgagcaagaccgaggcgctgacgcaggccttccggcggtccatcggcgttcgcatcaaggagnaagacggagatcatcgaaaggggagagtggtggagatccanattgatcgacngccaacagggaccggctccaaggtggcgcaaactgcccctccagaccccagccatcgagaccatctacgacctgggcaccaacatgattgagtccctgaccaagcgacggggtccaggccggggacgtgatcaccatcgacaagcgcgcacgggcaagatctccaagttgggcccgctccttcacacgcgcccgcgactacgacgctatgggctcccagaccaagttcgtgcagtgcccagatggggagctccagaaacgcaaggaggtggtgcacaccgtgtccctgcacgagatcgacgtcatcaactctcgcacccagggcttcctggcgctcttctcaggtgacacagggggagatcaagtcagaagtccgtgagcagatcaatgccaaggtggctgagtggcgcgaggagggcaaggcggagatcatccctggagtgctgttcatcggggagggtcccatgttggacattgaaaacctctcctttcctcaaacgggcccggggcagtagctgcggccggcctggatcctgggccagcggggattcagcgaat

SEQ ID NO: 592813 - DNA, 703 bp, Homo sapiens
  misc_feature (14)..(14): n is a, c, g, or t
  misc_feature (21)..(21): n is a, c, g, or t
tccgctaggactcnggcagtnggtgagcatcatggcaaccgttacagccacaaccaaagtcccggagatccgtgatgtaacaaggattgagcgaatcggtgcccactcccacatccggggactggggctggacgatgccttggagcctcggcaggcttcgcaaggcatggtgggtcagctggcggcacggcgggcggctggcgtggtgctggagatgatccgggaagggaagattgccggtcgggcagtccttattgctggccagccgggcacggggaagacggccatcgtctccaccatccccactacagcgagaaagacacgaagcaggatcctccgccatccggttgcgaggaaagcaagatagtggagatgagtgaggacgcctacacggtgctagacccgacactcgggctggagacgtacactgcgctacagccatccagctcatcaaagctgcacagacttggatgtgccaggacaacgcacagggtaacggccaaagatggccagtgactgcgacatgacaccttccgagacgcccggggttcattacttccaccgtcctcgcccatgaggaacgaaagcatccgcggtcatccgcacggcaagcatcccaactggcaacgggagaaacgccgagggcacagtcccgtgacccatccgttccagcagacaacgtacacaaagagcgcaacagcca

SEQ ID NO: 592814 - DNA, 923 bp, Homo sapiens
tctgaaacggagtctcgatctgtcgcccaggtgggagtgcaggggcgcgatctcggtcagtgaattccgcctcccgggttcaagcgattctccggcctcggcctccgttgagttggggatctacagatgcccaccaccagccgggtaatttcatttttagtagagagggggttcactatgtgggccaagctggttctcgaactcctaggctcaaatgatccgcccgcctcggcctcccaaagtgctggggatcacaggcgtgatgccaccgtgcccgggccgattggcgttaaaagtcgctctgaacaataaaatccggaaggactgggaggggaggctccgaccttcatccctgtctgggcaggtgtgctggctgccgggccagcaaacgggcgcctggcggacagccgggccgggctcccacaaggggcccggggcgccaagtaatatcccgggggccgctcaaaaccccatttaccccaacaagaggggcgcggatccaccatccgggagcggaccggcaatattagggaccatgatcggcaaagtgagggtgaacctccaggccaagagtctcaagagccggtccggagacaaaccgtgctgtaacaaaaagaggcgaggatcaacgaggcccaccagaagatccaaaggtggctaaacccggggggggggccctgatggagaaaaaatggggactgggggccgtgtttaacgccaaaacacggtcaatcgcggagaaagaacacggccccctggacggaagcacagaagacgaggcacagccaaggctgcaactgtctgtatgcccaaacggaaacactctaagcaaccgcaaggagacaacacgatacacacggccagagaacccacagacaagtgacgccaacaaccgaagagcgaacaaatacaaccaagaataa

SEQ ID NO: 592815 - DNA, 612 bp, Homo sapiens
ggtcctagtggcggcgcagtgtcgcaggccggagggaagatggcggcgcctggtgggagccgcgctgtgcgagtgtcggagatggcggggttcaagcacctcggcgtcctgggccggggaaacccccgctggggcggatgccacaacaagtggacatcgagttggagcaaacctgtgagcgggcttggaagaagtcaccgggagctttcgaccgttacgggcggccgggcagaagcagggaggccggcagggcccgcggcactggtgtgggggggaaccctaccggaggagtaatccggggggaagaagggcacaggatcccacaaaaggaggaaagaatcgcgataatggggggcgggcgttcaccaccccaaaaggtcctacccgggaacccaaacgaagctttaagtgggaacgggggaaaacgaggccccaatcccaagggaagctttcggggggcccaactgggtggggaaacgaaggcgacgcgggctgggcacacggcctttccgaggaacaaggccaaggtggtcccacggctgaaattgctcgtgtgggggcgcccgaagtggggcaggacaggaccttggtgggcccattaaccagaagcag

SEQ ID NO: 592816 - DNA, 111 bp, Homo sapiens
ccgtcctttccaaaacgattttttgttgccccttgtagtggattttgcatatcatctttcccccctaaaaatgtttgaatgcttacccaaataaattttataacccgctta

SEQ ID NO: 592817 - DNA, 683 bp, Homo sapiens
ggcaggcgcctgtagtcccagctattcgggaggctgaggcatgagaatcacttgaacctgggaggtgggggttgcagggagccgagatctgccactgcattccagcctgggcaacagagtgagactctctcaaaaaaaaaaaaaaaaaaaaaagaaaaactctgaggaaaagtcctgcgagttgggggaaaaccttcaaagtgaaaaacattctttacggaaggtcagtataccacaatagaaacaaatttctatctttctatagggtgggaaacgctctagtcttatccagacataaactacaggaagagagtggtatcatggtacagagcatctaaggcagaacttatcaggatatggtaaaaatcagtgtgggaggtatccagtcaaaagtcacgaaggaaacgtatcatccgcgactaactccgtcaaaccttcaagaaaagcgctacatttcaccaatgggatatccaattttgtgggactacaggtacgaggacaacacttacattcccctcaatatccttaaatggcctttataatcaatatgcacccttaccccctgaacgcttagaagccctacactttatggcctaagcccagataccctattccaaatccacgcgggtacacatggctaatacgcgtcaccgacgtagtcaacagtaacctaaggctacagt

SEQ ID NO: 592818 - DNA, 254 bp, Homo sapiens
  misc_feature (144)..(144): n is a, c, g, or t
gagcggacgggtaggggggttagatgaattactacgagtcaaagttgagcggtggtaatttccaaatccagaccggatacagaattttacgggtgcatatatacgcccccggatgcacgttctcttcgacccctacctttaatnggtaaatgatgtctgatctattattttttcccgtgtcgatgccggatgaaatgctgcactctcgtgtcacccgctatcactatctgttaggcaatagaaccgcggcagaa

SEQ ID NO: 592819 - DNA, 140 bp, Homo sapiens
ctcgatactttctatgtatagagctcggctcattccaggcttgtgtgacgaacataggcgcacggtaagtgtgagatgcgctgatggacctaatatccagatgactgtttcgaagcctttgtgtgccgtgattgatgggg

SEQ ID NO: 592820 - DNA, 404 bp, Homo sapiens
  misc_feature (32)..(32): n is a, c, g, or t
  misc_feature (70)..(70): n is a, c, g, or t
tgactacctccatcccgagttacaattatgcntctcaaaatgagctttctatgggatacactctacctcnaaaaatagtatatacacttgaacttggcatctcaccctctattaaattgagaacttttctactcctggaaagttactcagggatgtgatcctatttcatcatttgtgcttatctcatttttctccaaacttacttagtctgttctcaacgttagaaccaaagaatcaagtgttggtaagttgatacatagctctacttaactctttaggagaaaggtctgtgtgttacttggcctatcacataattttccagatgaaatgtaagataagcaaacaaaaggaagttacccgtgtgataccaggttagaaaatcttcacaaacactgcaaaaaaaa

SEQ ID NO: 592821 - DNA, 325 bp, Homo sapiens
ctggggggctactctttgtggttggtgtttccccccggcatgtctgaatgcgggcgccaagggcaggccctctggcgtgagcccacacgcgcgcgtggagcctttctcgcctaccctcgtggttggtttttctggccgggcgccacagggtcgtgaccgggcccgctcatgggggggtgcaacgttcctggcgttgtcttatgggccgcccgcggcagaccggaggagagaattggcggtctgtttacagggaggcccaaggcctggcgcgaccgtgtagggccgccgattgtggcgccgccaggagagcggagacgacacgtgc

SEQ ID NO: 592822 - DNA, 100 bp, Homo sapiens
gatagcgttggggaagagatagcgttgtgaagtgcttagctgtacttggagctattggggtctgaccccaaacaccttccagctcctgtaacatactgga

SEQ ID NO: 592823 - DNA, 142 bp, Homo sapiens
tgtcgtgcctggactattcggctccccttcgccaaggtcgaagggggttcggttggtctctgctagtgtggagatagtcgatattatggcctaggttcagaggcaggcctaagttcagagccaggcctaagttcagagccgg

SEQ ID NO: 592824 - DNA, 357 bp, Homo sapiens
  misc_feature (349)..(349): n is a, c, g, or t
  misc_feature (356)..(356): n is a, c, g, or t
agggccaggcggtgaagcccgaacccacctgaggacggcagtgaggatgagcacctctagcagcctggactccgcagtggctgtgtcagcctcaccctttgtgtgcacccgcatgggagggtcggagggtgctgcccgcccttggtgctggaggcgggcttggtgtccggctcaagtagccttcctttgctctgggaccagtggttttttttcccgcaaacctggatggattgggggcgggacgttttaaaaaaattggttccttttcccccctaaagcagtcgaggagatttgtaatcccctttttagtgcaacaaaagccccagtttaggctgttaaaacatatttnaccgggna

SEQ ID NO: 592825 - DNA, 242 bp, Homo sapiens
ggggtctcacagcattcagagccgagaacccccaacaaagatttacccacgtatttattaacagcaaaccagtcattagcattgtttctatagatgttaaattaactaaaagtatcccatatgggaaatgaagggatgggctgaattaattgcagcagggaacacgcctttaaggacacagattgctcatgcttttgtttgtgggcttaaggaatgcctttaaggcagttttccgccttggg

SEQ ID NO: 592826 - DNA, 274 bp, Homo sapiens
cagggggcagcagaggtagaccaggatatacaacgagctgctaaagtcctaacagtggaagatgctcaaacaccatccatcctctgctggagcagctagaaacgagcagatttaacgtgggtagtcccggatggcaaacctcacgcaaggcgaagaacagggctatctgcgggtcaccacggtggattcccacacttctgactcggacgttccttccggtgtcactgaggtggtcgtgaagctcatatgactctgatcccatcactgacaacgg

SEQ ID NO: 592827 - DNA, 381 bp, Homo sapiens
  misc_feature (53)..(53): n is a, c, g, or t
  misc_feature (152)..(152): n is a, c, g, or t
ctgggcgactagaggatctctatgtctcgatgtactatagccatcttgctggntgtgctctttggagctgctggatacactgtagactaacacagacagacaggcatacaggattatatgaaattaccatagtgaaacttctgatgttttanaccaagtgactggcttaagatttgtgaggctatcagcagctttcacgattgtctccgttcctggcaccaaatttaaatgggcttttgatgcctcaaaaatttttttcttggccgggcgcggtggctcacgcctgtaatcccagctctcagggaggctaagaggcgggaggatagcttgagcccaggagttcgagacctgcctgggcaatatagcgagaccccgttctcc

SEQ ID NO: 592828 - DNA, 423 bp, Homo sapiens
ggtatcggttacccgtatcaaattatcaaaactgttttaaaatgctcatgttaaaacaaaggagcactgtactttgaaatgactgctctgatgctttccaaggttgacgtgtagaacattaaaaaaacctgttcattatctgagctctaacccccaatcctgattttaggccttaagtctcttagaaggtaagcaatagttagagcaaccatactcccttgattttgggaagagttcatactttatatatactttcctagaaattatagctttctgtcataaaatgtgaagaatgcatctccctcccacacatggttaccagatccattgttagacagtggtggtgtgttcatgatattgtattttaattatttatgtggagttttaatttaataaggtaccatgttcatggacctgaaacat

SEQ ID NO: 592829 - DNA, 958 bp, Homo sapiens
gggctcccgcctgttggtgttaacaaggagcgctgtgttccgcctgtcttttgagggctggtgccacccgctgtcgggtgtcagcgcgctccatgagtgcgcggtgttccgtatttgcgcggttctcgagtgtgctcgtggtggccccctctggtcggtgaggaaagcagcagcagcacaagtcactgtgcttgatgtgatggggacggtttctcgagacgctctcctggggagtttgtagagggcccgttctgtggagtttattctttctggccgcccgccgctgcactactccttatgtgcccttgctattggtgggcctccccaaatccctaaggggatcgctcgttatacagatgaacacacaggccgagggggtctcaacggtagtctccgtacccgcggtagaccacagcagaagcagcagtgggcgaagccccagaggggggcgttgaagcaactcatcgagaggttaaccccggactttcggcgggggactaatatattgtctaaacacttcccaagacaaaagacgtttcgcccgcccgtatgtttcgtgagtagaccacagcgagggagacctgtagagagtcctgtagcagttggaccaatccgggtgttggtcatctcccgggtgagcgccccccattcaggtgatgatagaagtacgcatcgaccaggacgggtttcgacactatgaaggcgtgtcgcccaaacaatagggggttaaaaccagaggcgtattctcccggaaggttgttaacaccaacaaccacggttctacccggtacaacacgacgcgggggggataataccgggccaaagctttcttggaaatttgtggggcacaaaacccaattttaagccctttttctaaaaattatttcccctaaaatttttaattggggcccttttttcccctttggacccccttttccccctttggggcccacaaata

SEQ ID NO: 592830 - DNA, 785 bp, Homo sapiens
agcggtagagacgggttttcaccgtgttagccaggatggtctcgatctcctgacctcgtgatccgtccgccgtgggcctcccaaggtgctgggattataggcgtgagccaccgcgcccagccccgagtaatacattgtgtaaaaaacacaaattaaacatgttctcgaggggtatctaatagactttaccgtatgaagtttacgtatacttctattataatgcaacaatgctttgtttaacagacaaagatctttcctcttttcaaaatgtagtatgactcaagcacctgggcctttcctgctgtttctctgtatttgcactgtagcttaaacccaatgcggggcaggtcaggactcagccttgctgtgggaggtggcatatcagtctgggagagagtgggaggtggacggcattctgggcacgagccggcagggacacatgagcttccccagacttggggacttgcaaattggacatgcctggctacaagggacagtccaggaagatcgggcatctgggacaggttctaccagagcccaaagacaagggcctcttctacgtgcaagattcagacgtggagcccagtctgggcattttctcatgggccgcaatctggatcacgtggggtccccacaatgggccctttcctaattaacaggtaggtggcaggaggcaccaatacgaagactgagaatcaacctaggggccggccagtaactaatccattggtcacgtttctgtataacaaagaaggacattcaacggcaaagaactaagaatattg

SEQ ID NO: 592831 - DNA, 883 bp, Homo sapiens
ctccggttgacgagcctgaggcctgtgatcagatgtacgagagcttgagcgcgactccattcaaactactacaaacacaagtaccctcggcccagagacaccagcttcagtggcctgacgtgggaagaggacaagatgatcctgtggacagacacgcttgggagagcttaaggaagtagataaaggtatggggaagaaactgggggagaaggaagattcctgggccctgaggaggagcataaggtcagagctaacgtctatcctagattcttctactgtgtagagttatttaataactggtattaaattgaatatttatcatcttgcatcctatatcatgtaaatatgtgatcatagaggagagatccggcgaattttttagctaagcttgacagattgaaagaccagggccgtttttttttggagagggtgactataccatggagatgaagaaagacatcttagagttagacgaaaaaaataatacggccttgctggctcttacaggtggggccttgcggacatttccttccacgaggggtagatatggatcgggttcactgactcgtgcgctttgtaattaagagtgcgccaggggtatcagtctactaaatgcgctattgtcggttttcaacgaatcccggcttaactcgcgccaaatcatctcaggtataggcactacgtgcgtccgcactctaaaagaggctgcgcgggtgcttattatttctgccagatccccggcacgctcgcacacgtttgctgtgctctagtggctccaacccaatgcaagacactatgctttgtgagattaaggaagctccactcgcccttgtattattctataatcgccgatcttgacgggatctgctgggatgcggtcgcg

SEQ ID NO: 592832 - DNA, 229 bp, Homo sapiens
cgcaacggcggcggaagcatgaacgcccttacagccttcgagtcgctcttgctcttcgagggcaagaagatcaccattaacaaggacaccaagctacccaatgcctgcttattcaccattaacaaagaagaccacacactgttaaacatcattcagtcacaacttctaaaagacccggatgtgctatatgttgtctacaaagacacgcaccccttggagcacatgatca

SEQ ID NO: 592833 - DNA, 318 bp, Homo sapiens
aacgatggtctcagctctattaaaagtatgaaaaattagccgggcatggtggcatgcagctgtggtcccagctacttcgcaggctgaggtgagaggatctgcttgagcctgtggaggcagacggttgcacttgagcttgagatcacacccaccacactccagcgttgggtgacatgagtgagaagaaaacaaaagtctggcatgaccagacagtatttgtagttggcttaacttttattttatttaacagctatttctaagagatttctcatcagggaatgtgataaagtaaagttatctcaactaggcatcaggatt

SEQ ID NO: 592834 - DNA, 988 bp, Homo sapiens
  misc_feature (365)..(365): n is a, c, g, or t
  misc_feature (476)..(476): n is a, c, g, or t
  misc_feature (969)..(970): n is a, c, g, or t
gggctcattggcgaggaaagggagaagcgcgggcacaagaaacggtcccgggggatcaagtaaggagaaaagagaatctcgaattcggaaggagaagaccaaattgagtaacgaacctggaaacccttccggtccaaactaacagcagacaatcctggggtgggtggtggacccagataccacattcaaccggggggctaagggtctctaactcgggggctggctcggggcacacacgggtctccccaggtctctggacatcggttgggtccgggatgggtcctaatctatagcagtccgaagttctcccacacggctctgggccgtggaactcattaaacttgtggcacagaagaaggaacaancatcaattcctggtgaatcgaaggatgtctcgaacaacccaacacaaagtatccggactggctcactcggcaactgggtggactggtgactctcttggctgaatggtgggnccacggcacgaaccaagaacgcggacttggtggtgccctgtaatggccaacaacgtttcctggggtaactggaaggacaaccttggtggatttccacttaaagggcgcactgtgattggacttccacaggccttcaatccgaagggcggtggtttggcctccgaaaggtgtaaaaaggatggccagcgggagaaccttgaaatcctgcaggaacagttgtacccttgaagccatagaaacagaaccaggcggtggtcccgggaagtttacgggccacccccaggttacgaacgtaggtccacgccgcaggatgcaaaaaggtggtcaccggagccgggttttgcaatgaccctcgggaacaacacaaccccggggggggccccccctcgccagggacgtaacaagcgcggtacacgggggaaccgtggcactacgacaccctgcgagacgcagcacccgacggggaatatctttcgccccagaagaccactanngcgcgcccacgagccggc

SEQ ID NO: 592835 - DNA, 1209 bp, Homo sapiens
tctggtagacacaggatagataactctttggatagcatgtcttttcttctgttaattagttgtgtactctggcctctgtcatatctgcgacaatggtgctcatttcatggggtattatccattcagtccatcgtagcgtgcatttgcacaggtcttgatcctgttttcagcacatgatgcgacatttcatgtcattcccagttagtttcattacttcatttaggggttgccatccagcacaatgtcttggagcacatcacattctttggattcatgcacgtgcttctccttcaccactcaggcaaccattggcaccattcaagcgatccaccaaatgcattattcacaccacattgtgctccaggtctgcaactccttgcatcggggggcatcccttcgctacccacagctaatccgtgccctattgccaggcacaacccagcaatcattgcgtcgcaactcttcgcacatcctcccatatcttccgcagcttaactcttcgcatctggctcctcctccctcagcttccaatggccagcacctgggaatagttctcacgttttcagcccacattgtttcaattcctctggggacagcgtggttcccagggaggtgtcaagggtctgtcacacgattcaaccccgtggtcccattcgactcatccccttggcatcattaagcgatccaacattaaaccaggtaatgggccgcgaggtcccatccacagcctcatttctagatctggggtaaggcgcattccaagggacgacaaacggaccacagggccagaaacagcagctcccgcagaaccccggaaataggactcccccagcagtttgcaggtctcctctccccgtggaagtcacgggcacaccgtatcgggcgtcgaacagacacctcacaacaacgtcctcgacccggtgcggcaacacacggcgaaggcaagcacacagcgcccccctaacagtgacctttttcgttgtgagaccacagctttgttgttgcgtattactccccacaagagtcgagctcacacccacccaatagcgacctactgttcagaaatctctatggagactcgcacggtagcctatgattctatacccccgtctacccgtactcgcctcctctgctgtcacttcatgatatagtgccccatgcgtaaacgaacccgcgacacggctcgacactgtcccagccatcgaccca

SEQ ID NO: 592836 - DNA, 490 bp, Homo sapiens
  misc_feature (360)..(360): n is a, c, g, or t
ggcttgctgcacatttataccttacttttaataacatgcaaatatggccgggtgtggtgctcatgcctgtaatcccagcacattgggaggcggagccaggcagatcacctaggtctggagttcgataccagcctagttagcatggcaaaaccccgtctctattaaaaatacaaaaattagctcggcatggtggtacacacctgttatcccagctactcgggaggctgaggcatgagaatcgcttgaacctgggaggcagaggttgcagcgagccgagatcatgccactgcactccagcctgggagacagagcgagactttgtctcaaaataaatcagtgaataaaaataacatgcagatnagagggcagtttatgcagaaatttctagggaagggggccgggcgcggtggctcatgcctgcaatcccagcacttcgggaggcgaaagcgggcagatcacctgaggtcaggagttcaagaccagcctgagc

SEQ ID NO: 592837 - DNA, 308 bp, Homo sapiens
ttgctaatcctcctcttagcctcacaggtccttgggctgcttcatgcaaacaccaagaagtggggcctccgtactggtagtcattaagtgctgggtgggtccagctgggcctggattttcaaggtcaggctctgggaaaaggcttccagatgcagcaatcagctcacccctccattaggcctagcaagcagccctcaaggcctgggaaactacggaggaaagagagggtgggaagccagaggtggagaagccagggtctcaggtcagctgagccaaaccgactccaggagtagatgatttactgattt

SEQ ID NO: 592838 - DNA, 114 bp, Homo sapiens
tcagtcgagttcaagacctacccatgcaggccacacacgaacacgacgccctgcgccaggccaatgcacgagatgattgaactaccgacaccagatccaggagctgcgtgtcct

SEQ ID NO: 592839 - DNA, 102 bp, Homo sapiens
atcctgttttgggctgtgtgcaatggtcacgtgaagatgcgaggtggggacgcccctgtgtacggctctgctctgaacgttcctcaacaggacggcacacag

SEQ ID NO: 592840 - DNA, 862 bp, Homo sapiens
gaggggatttagtaagaaaccccacaaaaaaggcaactcatgggccactgggtattgatctgtcgcggaggcggggagtagaaatggacatcttacctcgaatgaaaacgtagtgtgttttttaaaagtaacgatgttggatgggaggagacctctccgtatcgtctaggggcccagggaagagagcgcattgctttccccacgtgccctcttcctcatcacgcctcgtcccccgcggggcgccccccctcatacctcccgccctccacgaatcaccccacccgtcctatacatggcgccacgggtgggggtagaagaaagctccaacagagaatatatcgggaaaaacacacggggacgacgacaacgacaagaccgagagactggagagcgggggaacggaagttaacagtaaacaaattaatcataaacagaagcgacaggaagaagggtgcggccgcgctacacggacccaagagcacgcagcaagacgactcctctcacccacccacccacaccccagcccggaccaacatacacccagcgaccactcatcgacccacgaaaagagcaaaggaaagaccaccacacaccccgacaccaaaccaccgcaccacgcgacaccacataacaccaaagcctagataagaacattgcgacgaatagaagaaatactctcacgtcataaacttacgaatcagaatacgcgcaccccctaacaacaacaggaccaacgagaaagcatgcgaggagccaggtaggtggcgtggagggtgtgtcatcatgaactgatgagaatcggcgggagggagactgaacgaattaaaaactgaatagaaagcaggatagaaagatgataaat

SEQ ID NO: 592841 - DNA, 397 bp, Homo sapiens
  misc_feature (96)..(96): n is a, c, g, or t
cggcaggctgactatagaggatccctacgaactgtgaaggtcggagcccgcccccagtgtggttgctgcagagcccggtgctcagccctgatgtcntggagctgaggcattgctgtggtttgttttatttttggagccttgttctttcaagaagtgtcagggcagccccctcccctggagcctcgtggagggtcatgattcatgaactactcaggttggacgtgagatgccccagaaaggttcaggttccaagtttccaggggatgggaaagataccagggcaagggccttgcaggtggaaggcccccacaacctgggcaatttggcaggctccctttttctgcaaccccttcccaacattgtgcccagccgtgggcttcattcctccttcattttt

SEQ ID NO: 592842 - DNA, 622 bp, Homo sapiens
  misc_feature (64)..(64): n is a, c, g, or t
  misc_feature (234)..(234): n is a, c, g, or t
ttataaaaggggggccgtggagaatattcagcatctttgatgggagcgtcagggtgtgtgtctnaggtgttaaaaagggacatgtggtcacttgtgctttggtcttgtcccccgggtcttcccctttgcatatgaaccgtgaactgtgcatagtgctgggatggaggggagtgttgggcctgtgatcccccctggctaataaggctttaggggatttatttaattaattaattnatttgtttttcctttatccccttaatcatttcccccaaacccaatggcctaaaactggcctgacttggggggaccatgggtttgttttttatgtggctgttgatccccaaatgactgggggggggggtctttctaaaatgggaagggtcataaaaagggcctttacctcagttcctttgggtggactccctaaagcccgcgttggtccaaaacggaggctgtgggcctgggggggtttttctttatacatttttccccccccctagggttcctgttttttctcccggtggcccagagcaacctttccctccccctgccccgtttcccagttgcccccccctttgggggctttaaattgggccccccctttaagttttgatccgggcca

SEQ ID NO: 592843 - DNA, 257 bp, Homo sapiens
  misc_feature (127)..(127): n is a, c, g, or t
  misc_feature (153)..(153): n is a, c, g, or t
  misc_feature (172)..(172): n is a, c, g, or t
  misc_feature (214)..(214): n is a, c, g, or t
  misc_feature (239)..(239): n is a, c, g, or t
tgagacagagtctagctctgttgtccgggctggagtggtgcagtggcgtgatctcggttcactgcaacctccgcctccagggttcaagcggttctcctgcctcggcctcccaaagtgctgggattanaggcatgaaccaccgtgtccggccanatattttcgtcttttgaanactgttatatacatgaaattatatggtatgtagcattttganagcgacttcttttgctatgagtaanacatttgagattcatcca

SEQ ID NO: 592844 - DNA, 164 bp, Homo sapiens
gggagatctacagcccagcaggatcaccagcaccaggaaggcagcatcatgcggccgcccttgtgcaggatgcgcgagacccagttctgtagccgtgcgtggtggcgtcgaacttgcggttgaaccagccgaagaagcccttcttgtcgttgtggtgtcccttg

SEQ ID NO: 592845 - DNA, 373 bp, Homo sapiens
tccctgaactacagcccatttttttatttgaaagattatcacattggggatattaaagttgggctcactattttttaattataattaacatcggggaaaatgaacttttttacccttttgaaatatattacattctggcttcatcgctggagttggtcttgactggcccaagttgaaattctccatccgtaagttattcctcgaataaaagggcttttttggccagtctttctaatttggaaaatttggtttataaaaactgctgcaaaaaactgggcatgggggcacatgcttggagccccagctactcgggaggctgagcccagaaatccaaatcccgcctggccaatgtagggagacccatcctttgccc

SEQ ID NO: 592846 - DNA, 245 bp, Homo sapiens
atctggctccctcttcaataactttgatgataacagtttatttgtgggctgggagcggtggctcatgcctgtaatcccagcactttgggaggccgaggcgggcggatcacgaggtcaggagatcgagaccatcctggccaacacgatgaaaccctgtctctactaaaaatacaaaaaattagccgagcgtggtggtgggcgtctgcagtcccagctacatgggaggctgaggcaggagaatggtg

SEQ ID NO: 592847 - DNA, 1015 bp, Homo sapiens
gccagcttccaactaggtcacaagggcgtgctcggtgaacccagctggatcacacactgcctgtgcacgtcgtcccttctctccctgacgttgacgtgcactttcatggagttggatctagaagcgagtgctggctgtggctgtctccggtggcaggcactaggggaatctgtgtaaccttatgacgcttaaatctaagagttataacatttgtgctagtagtagtgatgaaaagactagaaatttgtgtgcgtagaaaagctgaatgtattagggtccaaaggcatacagagagggttcccatggtacgataggaagagcttcagggctactaaaatggaaataggaggagtctagagtggactcaaataattcttgaacgaagtcggcagagtcttttcatgtatcttgagtgagaaggagtgtctatcagggactatatgagcgtgatgcatattgaatcctatcatgaatctgtgcaagttgtgcataggattgtatcatgtgcaacagatggtgacatctctgaatggcataatggggagtgtgggacctttcatgcttgtgttctgctcactaagctgtgtgcagtgccctgggtgtggggactacttctccctgagaagaacggagtgccttccctaatttgcaaggtgccattatgggcgtccaatgaaccctggaggaggaagggcctcaaactgtgggcattgtatgcctttgtgttggttctgctcaggatatttctggatattacctcttcttggtcaagaattctattctcagggtgtgtaccatgatgtgtctgctaagcacgaacggggttcctgctttgcacgagaatgcgccggggaccacgttgatgactggtctgggaccgcgcttggccatttgtgaattcaggcctcctggggggtttccatacattatggatgtgttggaaactcgtggctcccctccgtggttcagtggggacggcactgcgccgttgtcgtggcacgcaaaacgcggtttc

SEQ ID NO: 592848 - DNA, 369 bp, Homo sapiens
tttaataaaaaattgggaatcccccaaaaggcctcctggtcccaaagtatgcatataatttcagggaatgttcaaatccctggagatgggtccatttatagattccttagggcgggtccccgtttgtgagcccagcggatttttttggtttaaaaatacgaacccctgttaaagtcctttcattttttaaggtacccttccccagctataaagaggggccgccttttaaatttttgaggtgaagaaattttgttatagtcctttaattttgaaaatgaacgtttccgggtatgggataccccctttatcccgagggaatttttaccctttggatgcctttaaaaaggaattaattaattttgaaaatca

SEQ ID NO: 592849 - DNA, 235 bp, Homo sapiens
tttttattacataagaaaggcatcttttctaatagatgttggttgactcagaataaatgttaacatctagaagcaaaacgatacctgaatgattcaactgaactttaaaaaaaattttttgaataggaatgagtgtaaactctagacagtatttctagttgcatatatgagtattttgcctggggtacagcaccctttgggaaatgagtgggccaatcaaaaatggcccacaggc

SEQ ID NO: 592850 - DNA, 278 bp, Homo sapiens
  misc_feature (52)..(52): n is a, c, g, or t
gaagaggtcagaacatgtgtgttactcatttccattcttcagggagtttgtnagggtatttatttgtttagagtttgagtaccacagctttcttctgtctatatttctgtcttagaattcagctgtgccatctctcagtcacctccaacccttccctctccagctactttaaacctccatcttcatcttctcttagctgtgatgttcctcttccatttaataggccccttttcttctgagtattaggtgagttgatttgtggagaagccccttccccc

SEQ ID NO: 592851 - DNA, 356 bp, Homo sapiens
gggctatagcactgcagcagatcattatcatatcgcatccgagcggtgtggagagtcagctcaattacttagacgccggtggggatagcgatgattatggtagcggaggtgaaatatgctcgtgtgtctacgtctattcctacggtacatatatggtggtgcgcacacgatgaagcctaggaagccaattgatatcagtagctcagaccatacctatggtatccaaatggttcgtgtgttccggagtagtagttacaatataggagattattccgaagcctggtaggataagaatataactacagggatgaccgacaaatcagaatagcggaagtatgtagtcattctatggtggt

SEQ ID NO: 592852 - DNA, 976 bp, Homo sapiens
cttgaataacttacgcattggtttttcccatgcaatgagggcggaggaatagcaaagtcgttgtgagagcctgggtcaggcccctgggtgggccagctcctgagatcgtctcgtgtcggagacccttggccacttcatccacctggagcttctcctcctctcacagtgtcattgttgctattggtctgaagctggcaaagtgtgatggacacattgggaatgggggcactggtcgcatcctcagggctacgctatctcgtgagttggtcaattcttggactgaatactgggagacaaccactggctggttgaccgtgtccccaataggagggctcgagcacgtggttagtatgccaacgaagagaactaaatgtaagtcccacccgtcaacgtgttcttcaatgtcaacgatcgtaatccgaatgtgagacatgtcctaatgataacacgctgcagaaggtttatagcgtcacccacgcttgggcgcaccagatccagctgagttatgaacatgatgcatatactaactatttacacatcgaaaatgcttactacaccactgggggttgcattgctggatatagcactgttgtggatggaaacattgtatgagcctgcaagtgctatagtaattcgcgttataaatatgcaggtctgaatctcacttgcctttgcgtatcctgatgtcatataaacgttactccctttcttgtgagttgagttttctattcactagctctacctgaaatgaggttgggtaggcctgattgttgaccctcgtctaatgtacgaagatggagcatgtctgggcctcctgcaccggtgttcagtctcatctgggccaattattgccccgttactcttagtgtgatagactaccacgctggtttatgttcagcgttcccctatattgttgtttcggggcacacaggggtttgagccccgccgttggaacgggcgggcctgttcggaagtg

SEQ ID NO: 592853 - DNA, 159 bp, Homo sapiens
gtcaacgagctggccttcaccgcccgcaagatgatgggctgacggagggccctcgggcagtcgggctcggtcagccgggtgcgttcccaggacaaaggaggctcatgctggatgctgccttagcgtctgggcggcccgagattttccagcaagagcccc

SEQ ID NO: 592854 - DNA, 1401 bp, Homo sapiens
tacctgcgcatcacgcggtgaaggaccacgggctccaggccccgcgggctgacctgcatcctgtgcaagctgtgcagcgtgcactgcagagacccctgtcccagctggccggccacatgctagacccatctggggggggccgcccctccctgtcccgggacgacgccccccagcccacgagcccaccttgctgcagcggggacccccgtcacctcatccagcgctactggctgacgcgtttgctcctacctggcgtgcggcagcggccatgccggccggcacgcctggcacgctatgccgcgcaggctagtacgcccgccgccgtccccaccacgccctcgtgcggcatccgctcctccgcgggcgcgcgcacggcgcggctgccctgctcgagcctctcaagcgcactctccccgtccccagagccccttggctgcacgcccccccacatgcctcggccttcgcgcgcgctcgcagcacggcggcacccaccgtgcgcacgctacgaagctcccccccttgcgcctcccctcacgccctcgtcgttcctcgcccggcccccgtccgtctttcccccgagcccctcgccgtcccccttacgctcccccccgcctcaccccacaccccagcgggccctccccttcccgcaccaacacgcggcacaccggcgccagcgccccactcaccccctgctccgccccttgtacgcggcgcacgacttcgcgcctccgcgacctccccgacccggcccactccccgcccccccccctcccctggcctctcccctcctttcccgtactccaggacccccttgccaccccccaccagcgcgccaccgcaccccctgccgtccgccccgcttcgcgcccccggctcgtcctcgctccccctgcttcccccctccgtgcgcgccacaccgcccgcggtgccaccacgtcgtcgctctgccgcccccgcccaccctccatccacccgacacgtcctcacggctcaccgcagctgtgactccatgtttatcccccccgcaactcgctttccgttccgttgcgtcggcgtcgtcgagtcccgcgctcatggctcacgcccgcgcctgcttgtctcacgcatcgtcggcagcacccttccggcggacacgcccccgcttctactcaccgccgcctgctccgggggcccacacgatccgtctctcactctcgccccagttcctccaaccggctcgacatacaacacgccccgcctgccgcctctcgctcctcgtggcaccgagcccccgctccgcccgcggcgcgcacaaccacacgactcgcccccgcccgccgttggccccccgcccgtcgggtccgagccccgcatcgacgcactcggtggtcgatcacggtccgcccaccagcctcgccggcg

SEQ ID NO: 592855 - DNA, 171 bp, Homo sapiens
  misc_feature (108)..(108): n is a, c, g, or t
atagccggaccaactgtgctgatgactgccagcgttctgacttcgtggcctgtggagggtgaggtgtacttatttgtcacctgaacctaatgtatattctccttgagncccccagattccttcaagctggaagggatggggctgttggtggggtcagggtccaacgaggaa

SEQ ID NO: 592856 - DNA, 140 bp, Homo sapiens
  misc_feature (59)..(59): n is a, c, g, or t
gtttagtaggcattcaccccagcaaggtggttatcactaggctagccactgggcaatanacagcaaaaagatcctcgaacggaaagccaaatctcgccaagtaggtaaggaaaagggtaaatacaaggaagttgctaggg

SEQ ID NO: 592857 - DNA, 193 bp, Homo sapiens
acccctgatcaggagatctcctgagttcatgccaccatggaccttgggtccaactacagcagaactggtgtgtgtgtctcaggcatgagcatgctgctcagtgcacatacgagtgacccagggaattttatatatcgtctaggcgccagagatccctcgagcgaaggggggcatatccagtactgtatattat

SEQ ID NO: 592858 - DNA, 389 bp, Homo sapiens
tctcgagcttttgtctttcattttatagggcccattttgaattttttggtttccaattagggaaatagttggtattaggattaggattgtggtgaagtatagtacggatgctacttgtccaatgatggtaaaagggtagcttactggtttgctccctccgatttcaggtttaaaatgaggaggctctgcggctaggagttcaataaagtgatgtggcttaggtgggcgaaatattatgctttgttgttgtggatatattggaggagtggggattatctgcataggattgaggattggattacgataattagggcaagcgaccccctccatagtttgtgctatcgcgagaccgcgatctcgagaagacatttgttgttacgcgcagacat

SEQ ID NO: 592859 - DNA, 731 bp, Homo sapiens
caacatggtgaaaccccgtctctactgaaaatataaaaattagctgggtgtggtggcaggagcctgtaatcccagctacacaggaggctgaggcacgagaatcgcttgaactcaggagatggaggtttcagtgagccaggatcacaccactgcactccagcctggcaacagagcgagactccatctcaaaaaaaaaaaaaaagggtaaaaaaaaaaagggactcccttaaaatggggaaaaaaaattcttaaaatttggagctgatcccctgtattatagaaaatttaagcgttttctcgaaaagcgtgttctagtgtttggctgtaatttaaggtcttaaatcctctttccttaaggtgggcagaaaacaaggtaccaatttggaggggattattttaagtggtggtacttggggtttctgtcagttagaaaattaaccattattggtgcttacccaaattttcggctgcacaacatgtttccagggttactcattatttctagagtattaagcctcccccatagtttatgaggagttacccgtgaagatgccccttattgggtggacacctgggataatttggtacttgggtgaaaaacatctactcttccggggaaattctttacagggtttttaccattctaaaagaatcgacagactgcccaccatggcaatttgaccgttctaataccctgccaggttggttgcagaaaagaagcggttctagcc

SEQ ID NO: 592860 - DNA, 348 bp, Homo sapiens
tattctttttattttaagtttatttttttgagatggagctttgctctgtcacccaggctggagtgcaatggcaccatctcggctcactgtaacctccacctcctgggttcaagagattctcctgcctcagcctcccgagtagctgagactacaggcatgcaccaccacacctggccaaatgtttttgtatttttaatagacatggggtttcccatgttggccaggctgctcttgaactcctggcctcaagtgatccacctgcctcagccttccaaggtgctgggatataggtgtgagccaccaccccagctgctaactgattttaatgttggaatttggtcgacgcgg

SEQ ID NO: 592861 - DNA, 300 bp, Homo sapiens
  misc_feature (155)..(155): n is a, c, g, or t
agaaggagattcaaactcaatatgctaccatgcctttccaaaattttcaacccccgacattatcttggatcctatggtttctccaaccaattctttgaatttcccagtctcccctatgtaaaaattaacaatttggggggcctcattcctggggntatgctgtaaccaaattattgtcccaggctatatttttgggatgaaaaaaatttgaggaagggagttaaaaaccctcctggggctctcagtgtgccataaaggacagcaactggtgattgtttcaaaaaaataaactttggtgga

SEQ ID NO: 592862 - DNA, 906 bp, Homo sapiens
  misc_feature (227)..(227): n is a, c, g, or t
  misc_feature (621)..(621): n is a, c, g, or t
ggatgcctctgaaatcttcagtttattagagtctgcgcgaaaacctacagaattcataggaggggttacttctacttctcaaagctgggttcagaaaatggaaaccaagacggagtccagtggaatagagacggaacccaccgtgcaccacctgccgcttagcactgagaaggtggtgcaggagaccgtgttggtggaggagcggcgtgtggtgcacgcgagtgggnatgcttcttactcggcgggagacagcggggatgctgcagcacagcccgcattcacaggcattaaagggaaagagggctctgccttgacggagggggctaaagaggaaggaggggaggaggtcgctaaagctgtcctggaacaggaagagacagccgctgcttcccgtgagcgacaagaggagcagagtgcagccatccacatttcagaaactttggaacaaaaacctcattttgagtcctcaacggtgaagacggaaaccatcagttttggcagtgtttcaccgggaggagtaaagctagaaatttccacgaaggaagtgccagtagttcacaccgaaaccaaaaccatcacatatgaatcatcacaggtgagatattctgtgaagaccagagncctggctgcttatttcacccctctatggcctagtgtgtttacatagaactgcacgatatttaattcatgagacttagaggatccagcagccagaccatttctattaaaagtgatgcaataatggtcattttattagtgatcagggagcagcagatgacttaaccaagtctttatgtgtcttgaagtgtagaaaaaggctcagaaacctgtttccctagccacagagaaagaaaaatattcactcacccatccacctagacgtcgacttccagcctagggggatcc

SEQ ID NO: 592863 - DNA, 1869 bp, Homo sapiens
  misc_feature (227)..(227): n is a, c, g, or t
ggatgcctctgaaatcttcagtttattagagtctgcgcgaaaacctacagaattcataggaggggttacttctacttctcaaagctgggttcagaaaatggaaaccaagacggagtccagtggaatagagacggaacccaccgtgcaccacctgccgcttagcactgagaaggtggtgcaggagaccgtgttggtggaggagcggcgtgtggtgcacgcgagtgggnatgcttcttactcggcgggagacagcggggatgctgcagcacagcccgcattcacaggcattaaagggaaagagggctctgccttgacggagggggctaaagaggaaggaggggaggaggtcgctaaagctgtcctggaacaggaagagacagccgctgcttcccgtgagcgacaagaggagcagagtgcagccatccacatttcagaaactttggaacaaaaacctcattttgagtcctcaacggtgaagacggaaaccatcagttttggcagtgtttcaccgggaggagtaaagctagaaatttccacgaaggaagtgccagtagttcacaccgaaaccaaaaccatcacatatgaatcatcacaggtcgatccaggcacagatctggagccaggcgtgctgatgagtgcacagacgatcacatctgaaaccaccagtaccaccaccactacgcacatcaccaaaactgtgaaagggggcatttcagagacaagaattgagaagcgaatagtcatcacgggggatgcagacattgaccatgaccaggaggaataacttagcttgcacatgaatgcagtcatgcaaaccgttaggaaaaccagagcctatatggagttccctcttctaacccaactgacttgtatctgtccgtggaaaatttcagtccagaagaattgaccttgaccattaataaagacactggcagagagatcttcccataataaagcaatctgattcagcatcactaaaccgataatgcatgaagcaacgataaaattacaaaagagcagcatttttaattttcacaaaatgtctcagttttcagctatacctgcacgttcataaccaacaatataaaccgtggtctcatgtaacacataaacaattcatgcctttcatagtttattattattaaagtctaaacaaaattgcaatttcttaggtaaccttatatttacaataaatgaagattaccctcaaatgctagaagctgtctaggtccgtccggtgtgtcagattttcctcagattagatgtgccaataaccaagtttattcagtaaacaacttgtacttgtttcatctggttttattactctcacccataaacagtaatgactctctgaccctctggaaatatgtaatgcttccaatcttgctttgtgtatctcatttaatttgttataaggtagtactgattttagcatattaatgcgatttcttccttgttgtttgctttggtctgtgttcaatccagagagcttaaattgtcattattttgggaagaaaacctgtatttttgttagtttacaatattatgaaatttcacttcaggagaaactgctgggcttcctgtggctttgttttcttagttactttttccgtgccgtgtattttttaattgatttttcttcttttacttgaaaagaaagtgttttattttcaaatctggtccatatttacattctagttcagagccaagccttaaactgtacagaatttccactgtaattaaaactatttagtgttagttataaatagccttcaaaaagagagattctccattacacgatcacctgcatcacagcccatggtgaatgtatgtttctgcatagcgaaataaaaatggcaaatgcactga

SEQ ID NO: 592864 - DNA, 124 bp, Homo sapiens
ctccacagtggcatcgagaggaaagacaggacatacgctctgagaagcgcaaggctggggtgttaataatgcaggcccttgtggaaatctgtgagtgcccctgttcccgctcgattatgatccc

SEQ ID NO: 592865 - DNA, 1983 bp, Homo sapiens
  misc_feature (227)..(227): n is a, c, g, or t
ggatgcctctgaaatcttcagtttattagagtctgcgcgaaaacctacagaattcataggaggggttacttctacttctcaaagctgggttcagaaaatggaaaccaagacggagtccagtggaatagagacggaacccaccgtgcaccacctgccgcttagcactgagaaggtggtgcaggagaccgtgttggtggaggagcggcgtgtggtgcacgcgagtgggnatgcttcttactcggcgggagacagcggggatgctgcagcacagcccgcattcacaggcattaaagggaaagagggctctgccttgacggagggggctaaagaggaaggaggggaggaggtcgctaaagctgtcctggaacaggaagagacagccgctgcttcccgtgagcgacaagaggagcagagtgcagccatccacatttcagaaactttggaacaaaaacctcattttgagtcctcaacggtgaagacggaaaccatcagttttggcagtgtttcaccgggaggagtaaagctagaaatttccacgaaggaagtgccagtagttcacaccgaaaccaaaaccatcacatatgaatcatcacaggtcgatccaggcacagatctggagccaggcgtgctgatgagtgcacagacgatcacatctgaaaccaccagtaccaccaccactacgcacatcaccaaaactgtgaaagggggcatttcagagacaagaattgagaagcgaatagtcatcacgggggatgcagacattgaccatgaccaggcgctggctcaggcaattaaagaggccaaagagcagcaccctgacatgtcagtgaccaaagtagtggtccataaagagacagagatcacaccagaagatggagaggattgaccagaggaataacttagcttgcacatgaatgcagtcatgcaaaccgttaggaaaaccagagcctatatggagttccctcttctaacccaactgacttgtatctgtccgtggaaaatttcagtccagaagaattgaccttgaccattaataaagacactggcagagagatcttcccataataaagcaatctgattcagcatcactaaaccgataatgcatgaagcaacgataaaattacaaaagagcagcatttttaattttcacaaaatgtctcagttttcagctatacctgcacgttcataaccaacaatataaaccgtggtctcatgtaacacataaacaattcatgcctttcatagtttattattattaaagtctaaacaaaattgcaatttcttaggtaaccttatatttacaataaatgaagattaccctcaaatgctagaagctgtctaggtccgtccggtgtgtcagattttcctcagattagatgtgccaataaccaagtttattcagtaaacaacttgtacttgtttcatctggttttattactctcacccataaacagtaatgactctctgaccctctggaaatatgtaatgcttccaatcttgctttgtgtatctcatttaatttgttataaggtagtactgattttagcatattaatgcgatttcttccttgttgtttgctttggtctgtgttcaatccagagagcttaaattgtcattattttgggaagaaaacctgtatttttgttagtttacaatattatgaaatttcacttcaggagaaactgctgggcttcctgtggctttgttttcttagttactttttccgtgccgtgtattttttaattgatttttcttcttttacttgaaaagaaagtgttttattttcaaatctggtccatatttacattctagttcagagccaagccttaaactgtacagaatttccactgtaattaaaactatttagtgttagttataaatagccttcaaaaagagagattctccattacacgatcacctgcatcacagcccatggtgaatgtatgtttctgcatagcgaaataaaaatggcaaatgcactga

SEQ ID NO: 592866 - DNA, 3441 bp, Homo sapiens
  misc_feature (227)..(227): n is a, c, g, or t
  misc_feature (922)..(923): n is a, c, g, or t
  misc_feature (931)..(931): n is a, c, g, or t
  misc_feature (944)..(944): n is a, c, g, or t
  misc_feature (976)..(976): n is a, c, g, or t
  misc_feature (987)..(987): n is a, c, g, or t
  misc_feature (997)..(997): n is a, c, g, or t
  misc_feature (1015)..(1015): n is a, c, g, or t
  misc_feature (1020)..(1020): n is a, c, g, or t
  misc_feature (1026)..(1026): n is a, c, g, or t
  misc_feature (1372)..(1372): n is a, c, g, or t
  misc_feature (1376)..(1376): n is a, c, g, or t
ggatgcctctgaaatcttcagtttattagagtctgcgcgaaaacctacagaattcataggaggggttacttctacttctcaaagctgggttcagaaaatggaaaccaagacggagtccagtggaatagagacggaacccaccgtgcaccacctgccgcttagcactgagaaggtggtgcaggagaccgtgttggtggaggagcggcgtgtggtgcacgcgagtgggnatgcttcttactcggcgggagacagcggggatgctgcagcacagcccgcattcacaggcattaaagggaaagagggctctgccttgacggagggggctaaagaggaaggaggggaggaggtcgctaaagctgtcctggaacaggaagagacagccgctgcttcccgtgagcgacaagaggagcagagtgcagccatccacatttcagaaactttggaacaaaaacctcattttgagtcctcaacggtgaagacggaaaccatcagttttggcagtgtttcaccgggaggagtaaagctagaaatttccacgaaggaagtgccagtagttcacaccgaaaccaaaaccatcacatatgaatcatcacaggtcgatccaggcacagatctggagccaggcgtgctgatgagtgcacagacgatcacatctgaaaccaccagtaccaccaccactacgcacatcaccaaaactgtgaaagggggcatttcagagacaagaattgagaagcgaatagtcatcacgggggatgcagacattgaccatgaccaggtagtgtgtgtgagacggtaaataccctggcagagaaacaaagaaaaacctgtggtcctacagtttcaatgctattcctctagtccagcatgtattccgaagaaaattccgaattaactttccaatatatgatttatgattcctttnnaatcatgnacctcattgtaantgtggatatagatctagctcataagtctccanctcaccactgntcatgcatgntccacctccttttgtttntgccnttctgngatttcccggggatagcgctggctcaggcaattaaagaggccaaagagcagcaccctgacatgtcagtgaccaaagtagtggtccataaagagacagagatcacaccagaagatggagaggattgaccagaggtaagaggtgatgccgattctctaggcttgcctaggctggcatgaggcatggggcacttccctctcatccttcacctgatccctcctttcctctgttctctcactggcatttgtgggctggttaccaagaggatggagaatggtttatgggttgtctcacatttggagcttccattcttgtggagttttgcatgcactgcagttagaggataanggangagcagagtctatgcttctatgcttgtgtggtcttcctggtgttcccttttattccatggcctgcactctttgattatccaaatttgtaatggcaaatttgattttacttgccatgtggcctaattggaacaaaggcagttttgctctgagaggctcaatttgtgtgttccaaatactagggaaataatatatacccctttctccttctgatggcaacattatcccgtcgtaagctttctcttcaactgtgtttgattgtaacctgtttatgcttttgtctttagtttgtttttttaatttgaaagctgagcactcactttctttttggatgtcttatatttcctgtattctttgggatgatttttctccctagcgtagcactgtctcagaaggaggcaaaaaaaatgcagtcttgtggtcctgtagaaagcacatacctttccagtgactgtttggccagcatcatgagcagactatatcatctatgtgagcacagacttgtcatgcatagtcacctgccatgcaagatctcatggggccatgagcgtttctgagagggctttgaatgctgaatgcagcagtcgagcgacttgcacaacttggtgatgtgataaaatgtttaagagatttcatatattagtaagttttctaacatcggtttaagaaacaaattgatgagtggcatctcttaaaagagaaatataaaaaatactcattttactcaaatgaataatatattttggacgatagcaaaaaaaataaaacagatttcttccatgagcttcagccacttgggcgttgttgtaattacttaagagaaagcatgtaattggcagtgacttaacgctggaatgtcatggcatcttgtccaaacgagcattctaacttccaggatactttttttgtgtccttgatctgagaaaatctttcagttgttttcaaatgagtaactaatcaaatgtcttttttgcaggaataacttagcttgcacatgaatgcagtcatgcaaaccgttaggaaaaccagagcctatatggagttccctcttctaacccaactgacttgtatctgtccgtggaaaatttcagtccagaagaattgaccttgaccattaataaagacactggcagagagatcttcccataataaagcaatctgattcagcatcactaaaccgataatgcatgaagcaacgataaaattacaaaagagcagcatttttaattttcacaaaatgtctcagttttcagctatacctgcacgttcataaccaacaatataaaccgtggtctcatgtaacacataaacaattcatgcctttcatagtttattattattaaagtctaaacaaaattgcaatttcttaggtaaccttatatttacaataaatgaagattaccctcaaatgctagaagctgtctaggtccgtccggtgtgtcagattttcctcagattagatgtgccaataaccaagtttattcagtaaacaacttgtacttgtttcatctggttttattactctcacccataaacagtaatgactctctgaccctctggaaatatgtaatgcttccaatcttgctttgtgtatctcatttaatttgttataaggtagtactgattttagcatattaatgcgatttcttccttgttgtttgctttggtctgtgttcaatccagagagcttaaattgtcattattttgggaagaaaacctgtatttttgttagtttacaatattatgaaatttcacttcaggagaaactgctgggcttcctgtggctttgttttcttagttactttttccgtgccgtgtattttttaattgatttttcttcttttacttgaaaagaaagtgttttattttcaaatctggtccatatttacattctagttcagagccaagccttaaactgtacagaatttccactgtaattaaaactatttagtgttagttataaatagccttcaaaaagagagattctccattacacgatcacctgcatcacagcccatggtgaatgtatgtttctgcatagcgaaataaaaatggcaaatgcactga

SEQ ID NO: 592867 - DNA, 525 bp, Homo sapiens
agcggagttccggagtggagggatgaagtccaatcctgcgccaggctccctccgtcccgcccctccggctcccagggggaactcaggcaagctgccgtccctgacctcacctgagagtggagagggacagggaaaaagccttctactcgcagctgcatggttgccccaccgagggcatttattccgcaccgagggggcggggggcagaatgcacgccagaagaacctaatgtgcgctgggtttaaaatatgcaacaacaacgaaaattacaaataaccaaaaaacagcataagaattaaaaacagttatattccaatgttacgaatacttggttcacattaaggatgctctccccagggatccgacggacgctgctggaggcggcagcgatgttagggatcctagagagaaagcatcagaccagactcaggtctggactgtccctcaagtggcccggaggtaccgatattagtgtcaccagccgtcagtgccctgcccagaaataaaacctttgtactgagagac

SEQ ID NO: 592868 - DNA, 884 bp, Homo sapiens
gaggcagatggtgaaaggagagagaggagcgcgctatcctttcctcgctccgctggccgtccaccctggggagagagctttggcaggggagggaaggcggagctcgaggacatgccagctccgacctcccaaggctgtgcgttcctgagggccaggtcgggggcaggcatggaggggaggaaaggcgtccctcttggtcctccaccagaggtggctttcctggtcaccctgtgcctgggtgtctggttctgttattctgtttcttcgcccttgtgttatccagtcaccataacttcccttcctcggggtcgccccggcacgcatgcctgctcggatgatccaccagaggaagacttaatcacagtgtactcaggaggcctcttggtgcatccgcacgcgtccttctagacctccccctcttctcttcccatttgaaagactgacacgctgataggacattcagagctacccggggctagggaatgcccgcggggctggcctgggccagacgcctgtagcaagtacgcctccctgtgcagtctggtctgccactgtgctgcttgtcgtcgtgtactgagaggtctgccaatcggcgcaagatacacagcttgcatcagtaactactagcgatctggaagttgacgcacccttgaaccgcgagcacgtcatagctgagtgcaccagctgggtaactccttatagccagcccttcctttcggccctcgtcccgtcccgggtgccttgacctctctcgacctctctgccttcctgggcgtgactcccttggcagcgccttgtgccgggcgccacgctgggggccctccgggcccggcctcgccccggccctgccggcaggccctcccgtcggcacccgcccattcccg

SEQ ID NO: 592869 - DNA, 2017 bp, Homo sapiens
  misc_feature (227)..(227): n is a, c, g, or t
ggatgcctctgaaatcttcagtttattagagtctgcgcgaaaacctacagaattcataggaggggttacttctacttctcaaagctgggttcagaaaatggaaaccaagacggagtccagtggaatagagacggaacccaccgtgcaccacctgccgcttagcactgagaaggtggtgcaggagaccgtgttggtggaggagcggcgtgtggtgcacgcgagtgggnatgcttcttactcggcgggagacagcggggatgctgcagcacagcccgcattcacaggcattaaagggaaagagggctctgccttgacggagggggctaaagaggaaggaggggaggaggtcgctaaagctgtcctggaacaggaagagacagccgctgcttcccgtgagcgacaagaggagcagagtgcagccatccacatttcagaaactttggaacaaaaacctcattttgagtcctcaacggtgaagacggaaaccatcagttttggcagtgtttcaccgggaggagtaaagctagaaatttccacgaaggaagtgccagtagttcacaccgaaaccaaaaccatcacatatgaatcatcacaggtcgatccaggcacagatctggagccaggcgtgctgatgagtgcacagacgatcacatctgaaaccaccagtaccaccaccactacgcacatcaccaaaactgtgaaagggggcatttcagagacaagaattgagaagcgaatagtcatcacgggggatgcagacattgaccatgaccaggaggaataacttagcttgcacatgaatgcagtcatgcaaaccgttaggaaaaccagagcctatatggagttccctcttctaacccaactgacttgtatctgtccgtggaaaatttcagtccagaagaattgaccttgaccattaataaagacactggcagagagatcttcccataataaagcaatctgattcagcatcactaaaccgataatgcatgaagcaacgataaaattacaaaagagcagcatttttaattttcacaaaatgtctcagttttcagctatacctgcacgttcataaccaacaatataaaccgtggtctcatgtaacacataaacaattcatgcctttcatagtttattattattaaagtctaaacaaaattgcaatttcttaggtaaccttatatttacaataaatgaagattaccctcaaatgctagaagctgtctaggtccgtccggtgtgtcagattttcctcagattagatgtgccaataaccaagtttattcagtaaacaacttgtacttgtttcatctggttttattactctcacccataaacagtaatgactctctgaccctctggaaatatgtaatgcttccaatcttgctttgtgtatctcatttaatttgttataaggtagtactgattttagcatattaatgcgatttcttccttgttgtttgctttggtctgtgttcaatccagagagcttaaattgtcattattttgggaagaaaacctgtatttttgttagtttacaatattatgaaatttcacttcaggagaaactgctgggcttcctgtggctttgttttcttagttactttttccgtgccgtgtattttttaattgatttttcttcttttacttgaaaagaaagtgttttattttcaaatctggtccatatttacattctagttcagagccaagccttaaactgtacagaatttccactgtaattaaaactatttagtgttagttataaatagccttcaaaaagagagattctccattacacgatcacctgcatcacagcccatggtgaatgtatgtttctgcatagcgaaataaaaatggcaaatgcactgaaaaaaaacaaaaaaacaaaaattgtgggcgccggcccgaaaatttaacccttcttgggccgccgataagcatggcctacttgcccaggaccggcgagggtgtccccaaaaccgggccggtcgcaccggggggtcgcaccggcgcacgg

SEQ ID NO: 592870 - DNA, 1929 bp, Homo sapiens
  misc_feature (227)..(227): n is a, c, g, or t
ggatgcctctgaaatcttcagtttattagagtctgcgcgaaaacctacagaattcataggaggggttacttctacttctcaaagctgggttcagaaaatggaaaccaagacggagtccagtggaatagagacggaacccaccgtgcaccacctgccgcttagcactgagaaggtggtgcaggagaccgtgttggtggaggagcggcgtgtggtgcacgcgagtgggnatgcttcttactcggcgggagacagcggggatgctgcagcacagcccgcattcacaggcattaaagggaaagagggctctgccttgacggagggggctaaagaggaaggaggggaggaggtcgctaaagctgtcctggaacaggaagagacagccgctgcttcccgtgagcgacaagaggagcagagtgcagccatccacatttcagaaactttggaacaaaaacctcattttgagtcctcaacggtgaagacggaaaccatcagttttggcagtgtttcaccgggaggagtaaagctagaaatttccacgaaggaagtgccagtagttcacaccgaaaccaaaaccatcacatatgaatcatcacaggtcgatccaggcacagatctggagccaggcgtgctgatgagtgcacagacgatcacatctgaaaccaccagtaccaccaccactacgcacatcaccacgggggatgcagacattgaccatgaccaggcgctggctcaggcaattaaagaggccaaagagcagcaccctgacatgtcagtgaccaaagtagtggtccataaagagacagagatcacaccagaagatggagaggattgaccagaggaataacttagcttgcacatgaatgcagtcatgcaaaccgttaggaaaaccagagcctatatggagttccctcttctaacccaactgacttgtatctgtccgtggaaaatttcagtccagaagaattgaccttgaccattaataaagacactggcagagagatcttcccataataaagcaatctgattcagcatcactaaaccgataatgcatgaagcaacgataaaattacaaaagagcagcatttttaattttcacaaaatgtctcagttttcagctatacctgcacgttcataaccaacaatataaaccgtggtctcatgtaacacataaacaattcatgcctttcatagtttattattattaaagtctaaacaaaattgcaatttcttaggtaaccttatatttacaataaatgaagattaccctcaaatgctagaagctgtctaggtccgtccggtgtgtcagattttcctcagattagatgtgccaataaccaagtttattcagtaaacaacttgtacttgtttcatctggttttattactctcacccataaacagtaatgactctctgaccctctggaaatatgtaatgcttccaatcttgctttgtgtatctcatttaatttgttataaggtagtactgattttagcatattaatgcgatttcttccttgttgtttgctttggtctgtgttcaatccagagagcttaaattgtcattattttgggaagaaaacctgtatttttgttagtttacaatattatgaaatttcacttcaggagaaactgctgggcttcctgtggctttgttttcttagttactttttccgtgccgtgtattttttaattgatttttcttcttttacttgaaaagaaagtgttttattttcaaatctggtccatatttacattctagttcagagccaagccttaaactgtacagaatttccactgtaattaaaactatttagtgttagttataaatagccttcaaaaagagagattctccattacacgatcacctgcatcacagcccatggtgaatgtatgtttctgcatagcgaaataaaaatggcaaatgcactga

SEQ ID NO: 592871 - DNA, 1897 bp, Homo sapiens
  misc_feature (227)..(227): n is a, c, g, or t
ggatgcctctgaaatcttcagtttattagagtctgcgcgaaaacctacagaattcataggaggggttacttctacttctcaaagctgggttcagaaaatggaaaccaagacggagtccagtggaatagagacggaacccaccgtgcaccacctgccgcttagcactgagaaggtggtgcaggagaccgtgttggtggaggagcggcgtgtggtgcacgcgagtgggnatgcttcttactcggcgggagacagcggggatgctgcagcacagcccgcattcacaggcattaaagggaaagagggctctgccttgacggagggggctaaagaggaaggaggggaggaggtcgctaaagctgtcctggaacaggaagagacagccgctgcttcccgtgagcgacaagaggagcagagtgcagccatccacatttcagaaactttggaacaaaaacctcattttgagtcctcaacggtgaagacggaaaccatcagttttggcagtgtttcaccgggaggagtaaagctagaaatttccacgaaggaagtgccagtagttcacaccgaaaccaaaaccatcacatatgaatcatcacaggtcgatccaggcacagatctggagccaggcgtgctgatgagtgcacagacgatcacatctgaaaccaccagtaccaccaccactacgcacatcaccgctggctcaggcaattaaagaggccaaagagcagcaccctgacatgtcagtgaccaaagtagtggtccataaagagacagagatcacaccagaagatggagaggattgaccagaggaataacttagcttgcacatgaatgcagtcatgcaaaccgttaggaaaaccagagcctatatggagttccctcttctaacccaactgacttgtatctgtccgtggaaaatttcagtccagaagaattgaccttgaccattaataaagacactggcagagagatcttcccataataaagcaatctgattcagcatcactaaaccgataatgcatgaagcaacgataaaattacaaaagagcagcatttttaattttcacaaaatgtctcagttttcagctatacctgcacgttcataaccaacaatataaaccgtggtctcatgtaacacataaacaattcatgcctttcatagtttattattattaaagtctaaacaaaattgcaatttcttaggtaaccttatatttacaataaatgaagattaccctcaaatgctagaagctgtctaggtccgtccggtgtgtcagattttcctcagattagatgtgccaataaccaagtttattcagtaaacaacttgtacttgtttcatctggttttattactctcacccataaacagtaatgactctctgaccctctggaaatatgtaatgcttccaatcttgctttgtgtatctcatttaatttgttataaggtagtactgattttagcatattaatgcgatttcttccttgttgtttgctttggtctgtgttcaatccagagagcttaaattgtcattattttgggaagaaaacctgtatttttgttagtttacaatattatgaaatttcacttcaggagaaactgctgggcttcctgtggctttgttttcttagttactttttccgtgccgtgtattttttaattgatttttcttcttttacttgaaaagaaagtgttttattttcaaatctggtccatatttacattctagttcagagccaagccttaaactgtacagaatttccactgtaattaaaactatttagtgttagttataaatagccttcaaaaagagagattctccattacacgatcacctgcatcacagcccatggtgaatgtatgtttctgcatagcgaaataaaaatggcaaatgcactga

SEQ ID NO: 592872 - DNA, 133 bp, Homo sapiens
ctgagttgtcctcgcatcccgctgccaggtcagtgtgatctccgcaggtagaagcccaggcccagcacctcagggtggctcatggtcagagatggggtggtgggtcacatgtgtctttggggggtccgcgcga

SEQ ID NO: 592873 - DNA, 1929 bp, Homo sapiens
  misc_feature (227)..(227): n is a, c, g, or t
ggatgcctctgaaatcttcagtttattagagtctgcgcgaaaacctacagaattcataggaggggttacttctacttctcaaagctgggttcagaaaatggaaaccaagacggagtccagtggaatagagacggaacccaccgtgcaccacctgccgcttagcactgagaaggtggtgcaggagaccgtgttggtggaggagcggcgtgtggtgcacgcgagtgggnatgcttcttactcggcgggagacagcggggatgctgcagcacagcccgcattcacaggcattaaagggaaagagggctctgccttgacggagggggctaaagaggaaggaggggaggaggtcgctaaagctgtcctggaacaggaagagacagccgctgcttcccgtgagcgacaagaggagcagagtgcagccatccacatttcagaaactttggaacaaaaacctcattttgagtcctcaacggtgaagacggaaaccatcagttttggcagtgtttcaccgggaggagtaaagctagaaatttccacgaaggaagtgccagtagttcacaccgaaaccaaaaccatcacatatgaatcatcacaggtcgatccaggcacagatctggagccaggcgtgctgatgagtgcacagacgatcacatctgaaaccaccagtaccaccaccactacgcacatcaccaaaactgtgaaagggggcatttcagagacaagaattgagaagcgaatagtcatcacgggggatgcagacattgaccatgaccaggcgctggctcaggcaattaaagaggccaaagagcagcaccctgacatgtcagtgaccaaagtagtggtccataaagagacagagatcacaccagaagatggagaggattgaccagaggaataacttagcttgcacatgaatgcagtcatgcaaaccgttaggaaaaccagagcctatatggagttccctcttctaacccaactgacttgtatctgtccgtggaaaatttcagtccagaagaattgaccttgaccattaataaagacactggcagagagatcttcccataataaagcaatctgattcagcatcactaaaccgataatgcatgaagcaacgataaaattacaaaagagcagcatttttaattttcacaaaatgtctcagttttcagctatacctgcacgttcataaccaacaatataaaccgtggtctcatgtaacacataaacaattcatgcctttcatagtttattattattaaagtctaaacaaatgctagaagctgtctaggtccgtccggtgtgtcagattttcctcagattagatgtgccaataaccaagtttattcagtaaacaacttgtacttgtttcatctggttttattactctcacccataaacagtaatgactctctgaccctctggaaatatgtaatgcttccaatcttgctttgtgtatctcatttaatttgttataaggtagtactgattttagcatattaatgcgatttcttccttgttgtttgctttggtctgtgttcaatccagagagcttaaattgtcattattttgggaagaaaacctgtatttttgttagtttacaatattatgaaatttcacttcaggagaaactgctgggcttcctgtggctttgttttcttagttactttttccgtgccgtgtattttttaattgatttttcttcttttacttgaaaagaaagtgttttattttcaaatctggtccatatttacattctagttcagagccaagccttaaactgtacagaatttccactgtaattaaaactatttagtgttagttataaatagccttcaaaaagagagattctccattacacgatcacctgcatcacagcccatggtgaatgtatgtttctgcatagcgaaataaaaatggcaaatgcactga

SEQ ID NO: 592874 - DNA, 407 bp, Homo sapiens
  misc_feature (254)..(254): n is a, c, g, or t
gcacgagggatcacgaggtcaagagatccagactatcctgacaaacatggaaaaaccccgtctctacttaaaaaaaaaaaaaaaaattagctgggtgtggtggtgtgcacctgcagtcccagctacttgggaggctgaggcaggagaatcgcttgaacccaggaggcagaggtttcagtgagccgagatcacaccacagcactccagcctggtgacacagtgagactccatctcaaaaaaaaaaagctgaattnggtcccccgcagtaattgggtcccccgcagtcgctcacgcctgtaatcccagcactttgggaggctgaggccggcggatcacctgaagtaacgagtgctcaatcagcctggcccacatagtgaaaccccgtctctaataaaaatacaaaaatt

SEQ ID NO: 592875 - DNA, 170 bp, Homo sapiens
tgagaccgcgccattacactccagcctgtgtgacagactgagactccatctcaaaaacaaaaaaaaaaaccaacaacaacaaaaaaagatttggactttaagaacaatactgctgtgaactccttggtacttgttccctggtgcttttatgcaagcgttttggagagggt

SEQ ID NO: 592876 - DNA, 190 bp, Homo sapiens
gtgggaggggggggcccccccccccccggagggggttcctttttttttttggggggggttttttggggcccccccccctttttttttaaagggggcccccccttttgggttttttttttttttggggggcccctgggcccccccccccccccttttggggggggaaaaaaaaggggggccgggcccccca

SEQ ID NO: 592877 - DNA, 1875 bp, Homo sapiens
  misc_feature (227)..(227): n is a, c, g, or t
ggatgcctctgaaatcttcagtttattagagtctgcgcgaaaacctacagaattcataggaggggttacttctacttctcaaagctgggttcagaaaatggaaaccaagacggagtccagtggaatagagacggaacccaccgtgcaccacctgccgcttagcactgagaaggtggtgcaggagaccgtgttggtggaggagcggcgtgtggtgcacgcgagtgggnatgcttcttactcggcgggagacagcggggatgctgcagcacagcccgcattcacaggcattaaagggaaagagggctctgccttgacggagggggctaaagaggaaggaggggaggaggtcgctaaagctgtcctggaacaggaagagacagccgctgcttcccgtgagcgacaagaggagcagagtgcagccatccacatttcagaaactttggaacaaaaacctcattttgagtcctcaacggtgaagacggaaaccatcagttttggcagtgtttcaccgggaggagtaaagctagaaatttccacgaaggaagtgccagtagttcacaccgaaaccaaaaccatcacatatgaatcatcacaggtcgatccaggcacagatctggagccaggcgtgctgatgagtgcacagacgatcacatctgaaaccaccagtaccaccaccactacgcacatcaccacgggggatgcagacattgaccatgaccaggcgctggctcaggcaattaaagaggccaaagagcagcaccctgacatgtcagtgaccaaagtagtggtccataaagagacagagatcacaccagaagatggagaggattgaccagaggaataacttagcttgcacatgaatgcagtcatgcaaaccgttaggaaaaccagagcctatatggagttccctcttctaacccaactgacttgtatctgtccgtggaaaatttcagtccagaagaattgaccttgaccattaataaagacactggcagagagatcttcccataataaagcaatctgattcagcatcactaaaccgataatgcatgaagcaacgataaaattacaaaagagcagcatttttaattttcacaaaatgtctcagttttcagctatacctgcacgttcataaccaacaatataaaccgtggtctcatgtaacacataaacaattcatgcctttcatagtttattattattaaagtctaaacaaatgctagaagctgtctaggtccgtccggtgtgtcagattttcctcagattagatgtgccaataaccaagtttattcagtaaacaacttgtacttgtttcatctggttttattactctcacccataaacagtaatgactctctgaccctctggaaatatgtaatgcttccaatcttgctttgtgtatctcatttaatttgttataaggtagtactgattttagcatattaatgcgatttcttccttgttgtttgctttggtctgtgttcaatccagagagcttaaattgtcattattttgggaagaaaacctgtatttttgttagtttacaatattatgaaatttcacttcaggagaaactgctgggcttcctgtggctttgttttcttagttactttttccgtgccgtgtattttttaattgatttttcttcttttacttgaaaagaaagtgttttattttcaaatctggtccatatttacattctagttcagagccaagccttaaactgtacagaatttccactgtaattaaaactatttagtgttagttataaatagccttcaaaaagagagattctccattacacgatcacctgcatcacagcccatggtgaatgtatgtttctgcatagcgaaataaaaatggcaaatgcactga

SEQ ID NO: 592878 - DNA, 146 bp, Homo sapiens
gggttttttaaaaaaaaattttgtttttttttttaagccccgggtttgggccattttttttgttccccctttttttgcccccttcccccccccaaaaaaaaaaaattttttttgtttttttttaaaattgggggggggggggccca

SEQ ID NO: 592879 - DNA, 1568 bp, Homo sapiens
  misc_feature (227)..(227): n is a, c, g, or t
ggatgcctctgaaatcttcagtttattagagtctgcgcgaaaacctacagaattcataggaggggttacttctacttctcaaagctgggttcagaaaatggaaaccaagacggagtccagtggaatagagacggaacccaccgtgcaccacctgccgcttagcactgagaaggtggtgcaggagaccgtgttggtggaggagcggcgtgtggtgcacgcgagtgggnatgcttcttactcggcgggagacagcggggatgctgcagcacagcccgcattcacaggcattaaagggaaagagggctctgccttgacggagggggctaaagaggaaggaggggaggaggtcgctaaagctgtcctggaacaggaagagacagccgctgcttcccgtgagcgacaagaggagcagagtgcagccatccacatttcagaaactttggaacaaaaacctcattttgagtcctcaacggtgaagacggaaaccatcagttttggcagtgtttcaccgggaggagtaaagctagaaatttccacgaaggaagtgccagtagttcacaccgaaaccaaaaccatcacatatgaatcatcacaggtcgatccaggcacagatctggagccaggcgtgctgatgagtgcacagacgatcacatctgaaaccaccagtaccaccaccactacgcacatcaccaaaactgtgaaagggggcatttcagagacaagaattgagaagcgaatagtcatcacgggggatgcagacattgaccatgaccaggcgctggctcaggcaattaaagaggccaaagagcagcaccctgacatgtcagtgaccaaagtagtggtccataaagagacagagatcacaccagaagatggagaggattgaccagaggaataacttagcttgcacatgaatgcagtcatgcaaaccgttaggaaaaccagagcctatatggagttccctcttctaacccaactgacttgtatctgtccgtggaaaatttcagtccagaagaattgaccttgaccattaataaagacactggcagagagatcttcccataataaagcaatctgattcagcatcactaaaccgataatgcatgaagcaacgataaaattacaaaagagcagcatttttaattttcacaaaatgtctcagttttcagctatacctgcacgttcataaccaacaatataaaccgtggtctcatgtaacacataaacaattcatgcctttcatagtttattattattaaagtctaaacaaaattgcaatttcttaggtaaccttatatttacaataaatgaagattaccctcaaatgctagaagctgtctaggtccgtccggtgtgtcagattttcctcagattagatgtgccaataaccaagtttattcagtaaacaacttgtacttgtttcatctggttttattactctcacccataaacagtaatgactctctgaccctctggaaatatgtaatgcttccaatcttggttgggatctccatcacactgtctaacaggggacggatttgcaattaaaggggactccaggagagggg

SEQ ID NO: 592880 - DNA, 430 bp, Homo sapiens
gagaatcgcagatacaacctgataacaccaataatcagcagagagagccaaatcaatgagtgaacacccattcaccattgcttcaaagatcatcaagtacctaggaatccaacttacaacggatgtgaaggagctcttcaaggagcaacgtacaaaccactgctcaaggagagtgaaagaggatacgaacaagtcattcatgagagttggcatcaacttcttttaaacttcttttcatgttgatattttaatctcctcccatgaatcattacagttctcaatggcatctagaatggtaaattctttccaggttaataatttatttttaccaaattaatcagagaaatcacaacgtctggtagttatagccttatgaatgtatttattaactcgtaagacttgaacttcaaaattattccttgatccaagg

SEQ ID NO: 592881 - DNA, 147 bp, Homo sapiens
cagcagcacatcgctcccaccaactcaagcaacggccatgccacgaccaccccacggcacatcgcagcaacagcagctcatccacatctgtccatccaagcacacggtgacatcacatttcgtcccagcgtttcacaacagtcacag

SEQ ID NO: 592882 - DNA, 1866 bp, Homo sapiens
  misc_feature (303)..(303): n is a, c, g, or t
tcgtagctcacgagagaacatgtgttatagcaatgcttgtagctgaacctgatcatgacataagagaatgtatcaacattaatcgcatatatcgtgtggcatagattcagagataaatcgggtatcctgtttactcaacaacattacgggatctcggactcgagattgcgagttctcatagaaacccgttgcggaccaaggtgtaggtagaaattatgataagatactgcatctaatatcacgtgttgtgtgtctaagtcgccataccgtttgcctatgcaaaggcgtgagatgatatccgcnataggctaagccgcgattagtcatccatgagattcatcaccctctctacatagcaattgtgaactggtctatagtcatagatcgcatcctggtgtaccgtagaccgggttgtgaaccacaacacaggaaagcgaaagctctatcgatctcctatgctaggtatctcagagccgaattaccgctactgtaggtgtgaataacccacttgtgcggcgctgaggtgctgcacacagaagagccatagtaaccgcacggcaatgtgccattttgcccttgaacggtggacacagtccatttgcgatcacaaataccgataccattacggacataacactgtcccgtgggtggtcacttttctgacctcctttggcctcacgaaggttggttgagatggtgcacaagtacaccccaaatgtagaaaacctttccatacaggataaattaaaccaagcccatctcctctccaccatgtaaagtggaccgctgtccatatacgtgcctagttagatgcggccgagactgcacacgacaaaaactagaccctcttggacggcagtcctcggtcgcaagataacatttgaaccgtttactccataatggtgacctttaccataattccacggtttcagagacatccagggagaaatggcctctatagtttaacactcatactaaatataccgttgaactatgaattgcatgtccttaacaactgtttggggtagaaacgtcaaaacgcgcctcaaagcactaaacggacatatgtcacacctgtacttggtgcagggtggaaaccccacatgacaccgcaagttaggctcaccccgttacactctgaatgtcggcagcatcaaaccaacgttggccttgttccaaaacgaggtgaaagaactcatacatatgggcacaactggccaaagcatagccatagagtaccttgtcgcgatggagccccgggattaaacgaaccttatcaccactgaagcgctatagccgaaaagagcacgcgcacagggaaacacacaacgccccccgatgtgagcacgcgcgcaacgcaacccaccacgaaacataagacacaccacacacagcgccagcatccaccccagcgccgcaaccagccaaacaccacccccgatgaaatggcaaccgacaccacaatgacgaacaaacgagaaaaacacacacaacgcaaacaacaaaaacacacaagccgcaacagcccacagccaaatgcgagacacacagcgggataggaggcgaccaacacacacgaaagaaaccaaccaagacgagaagagaccagcgaaccagcatagcgacgaggagccgaccacaaaagaccaggaacgaagcgagagaatagaagccaaacgagaaataaagagacaagacgcgcgacacaaaaaaacgaacagacagacgagccgaaagcagcagaagacacgaagaagacaagcacaagagacaacaaataagacgagacaacgactgaccaaatagagcaagagagcacagcctcgaccatgagagaagggcaagctaacgagccagccgacagct

SEQ ID NO: 592883 - DNA, 672 bp, Homo sapiens
  misc_feature (44)..(44): n is a, c, g, or t
  misc_feature (62)..(62): n is a, c, g, or t
  misc_feature (92)..(92): n is a, c, g, or t
  misc_feature (106)..(106): n is a, c, g, or t
  misc_feature (110)..(111): n is a, c, g, or t
  misc_feature (113)..(113): n is a, c, g, or t
  misc_feature (116)..(116): n is a, c, g, or t
  misc_feature (119)..(123): n is a, c, g, or t
  misc_feature (125)..(125): n is a, c, g, or t
  misc_feature (127)..(127): n is a, c, g, or t
  misc_feature (129)..(129): n is a, c, g, or t
  misc_feature (133)..(133): n is a, c, g, or t
  misc_feature (135)..(135): n is a, c, g, or t
  misc_feature (138)..(138): n is a, c, g, or t
  misc_feature (198)..(198): n is a, c, g, or t
  misc_feature (237)..(237): n is a, c, g, or t
  misc_feature (240)..(240): n is a, c, g, or t
  misc_feature (245)..(245): n is a, c, g, or t
  misc_feature (273)..(273): n is a, c, g, or t
  misc_feature (276)..(276): n is a, c, g, or t
  misc_feature (280)..(280): n is a, c, g, or t
  misc_feature (291)..(291): n is a, c, g, or t
  misc_feature (295)..(295): n is a, c, g, or t
  misc_feature (323)..(323): n is a, c, g, or t
  misc_feature (325)..(325): n is a, c, g, or t
  misc_feature (328)..(328): n is a, c, g, or t
  misc_feature (358)..(358): n is a, c, g, or t
  misc_feature (380)..(380): n is a, c, g, or t
  misc_feature (394)..(394): n is a, c, g, or t
  misc_feature (409)..(409): n is a, c, g, or t
  misc_feature (562)..(562): n is a, c, g, or t
  misc_feature (580)..(580): n is a, c, g, or t
  misc_feature (582)..(582): n is a, c, g, or t
  misc_feature (633)..(633): n is a, c, g, or t
ctgctggtggaaagggttcagctgctgtgcaaaacgggctgganattcctcagtaagttatncctaagttaccgcatgacccagcaagtccncttatgggtatatncccnngnganacnnnnncntncntccncngtncatggattcacagcagcattactcatcgtagccaaaaagtgctcatcggctgctgaaganacaaattgtggtccaaccttacaatggaatattctttgnccnccaanaggaacgaagcccttgacacctctgacngcntggncgacccttganaacntgatgctaagtgaaagaggccagttgcnanagnccacgtagcgtacaattccattcacatganatgcccagaacaggcaaatccntggagacagaaatngatgagttgttgccnggggctgggggagggcgcatggcgagtgactgctaaggctaggggattctttgggagaggatgacaaacgtgcaggaattagatagtggtaatgcttgcacaacttagggaatatactacaatgcattaaattgtacactttaaaagagtaantgttattatcagtttctnanaatgaaccagaagctcacatagcctgcactggtcagggagactgacgctcnctcaggtgatctggaaggcgtggcccgtgcaggggaagg

SEQ ID NO: 592884 - DNA, 1320 bp, Homo sapiens
cgacctggagctcactgcaacctaccactatcccggagttcaacgtgatctgtaaccacctacagcctcctgaatagctagggattataggtagcatgctaccatgcctgtctactactaaaaatacacaaaattgtttagctctgtatttacataatagaaatagaaaaggtaacaatcgctatattacttctcgaaacagaacaagtataagtaacataccaagaaccggtttcaagtcgactagaatcagcagtagcctgaccctagtacatagctcgtgcttacaaaaaaccctccagcatgacttagctgtctggcagcacacaaccaacggcaagcacaagcccaaatcacagacaactggcaccattctatcctagctacgcttgacccctcatttacgcacaatacacttcaaactttccgcatgtctgaacgcaacatccacaaaacttcacattcgtcaccactatcatagccaaccttcgaacatctctatagctcctctaacaactgaccgcatcccgaatctcctaacaagaacgcgccctcctcaacacaaagttaataaccacaacccccataaacacgctttcaaacattcctaatgctactaattcagacagtccaataatttcatacaaaaacccacagtaacttaaccacccactaaccactttgtcattaaaccacttggttacctcaactatccaaccggcgcaaacgcacacatggacaacgggacaaaacctaataacataacacgaaaacatgcttcctatacacaacactataacatgcaattcaaacaacatcttcactaatcactcaacccataaaatggaatcccaattaacaacattacatgttacattgtaccttcatatcccaaattgtgccattccatcagccctatgatcaccattatactgtacaacaaacccatactacaagggcccctgcaatcaaattcatcagcttatcagactaaacacaaaactgacacgaaacacacatctatctaccaccacaccgtcggtcgagccacgcattcccgccaccgtcataaacacaatcaaccatgacggaacacaatcaacaacataacacgacatacaactaaagatcaaatatacctacaaacatacaattaacaaaaaacaaaataagataacaccacactcgaactacaaaaaacaaaacaacataacatcaccacataacagaaccacttatcactctacccaccaccctacaacacacacatccagcacccacacacacgacgcaaagtaaacaacaatcaacaaaactatt

SEQ ID NO: 592885 - DNA, 106 bp, Homo sapiens
  misc_feature (3)..(3): n is a, c, g, or t
gcntcaccgtacgggctggtactcatgacatgctagtgaagggcctccgccgctggggctgtgatatggagccgggctgacatggtgggtaggcatagtctgcgtg

SEQ ID NO: 592886 - DNA, 147 bp, Homo sapiens
caaccattgccaaataaaaatgtgtgaggtatacaacaatcacacaatattattacaataaacacacggaaacaaggcacgagtaagtttgccagatttgtgagggttctccaactgtgtggtggtaggaggaggaggaattcgccc

SEQ ID NO: 592887 - DNA, 1019 bp, Homo sapiens
ggtcccggtgtgtgcggtcgtttaccacgcgcgtttcttggagggtttaattgtaggctcgcggtttgtgccccgtggttccccaagcattacttgggcttccccgtgttgggggcccccctgcccagggcaccagtgtttgccggccccgggtccttacccgggcacagggtagcttgatgcccgggtgtgcctgaatggaggggccctctttgtagggcctcccacgggggttctcacggttgtttgtgaccttttgaccccgcgtggtatttgtcctgccccgttgaggtgccgggggcatctacccctgctgttggcgccgggacgaccctctttggggcgtttgattttttttaaggtcttccccgggcccttgtctgtaacacccccggtccgtattgactttcccagacacgtgctcgatgtttatctttgctggttggggcgccccttctgggcggggtgtaccccatctctttcgggcccgcgtacacgttgggctagggagttctcccccagtgcgcatacggggcagcttgtataaattccgcatgggatcactcccatgaacattcggccgctccgggacaatgtgaccctcgagggggtaaaagcagccgcttcatcacttgttttgaggagacccaagatacagcaccctaagaggggtgttgatccgcacctccgatagttggggattcaggcacatacaccggatggtcgcgcacccccgttgttgttaaggtgatctttttgttgcgcaacgagggtcgacagtatctcacgtggtttggggtgttcaaccggggtgtatcccggtgccctgtgtttatttagttctaatttctccctcgttcgataggtagcaacaaagaaataaagggctaggttcttccagggccgtttccaccctgaatgatttgtatttccactttggtattgtgccccccccccccccagaccagggtggttaataaccactagaaaaataaatacaaataaaaaaaaaataaata

SEQ ID NO: 592888 - DNA, 431 bp, Homo sapiens
agtacgcggacgggtccttgtcgtcactattattaacttatttatttatttttttgagtctcgctcgcatcccaggctggagtgcaatggcgcaatctcagctcactgcaacttccgcctcccgggttccagcaattctcctgcctcagcctcccaagtaaccgggattacaggcgcatgccaccacacccagctaattattttgtattttagtagagacgggtttcattgtgttaccaaggctggtctccaactcctgaactcaggcaatccacccgcctcggcctcccaaagtgctgggattacaggcgagagacaccgtgcctggcctgtttttctttttcgagattattatggctgtttagggttccttgcatttccatatgaatagtgatcagttttccatatctgaaaaaagacaaagggaaaca

SEQ ID NO: 592889 - DNA, 684 bp, Homo sapiens
gcagatgggtaaggatgaacctctccctcctttgccgctttagctttagctggcaaacaaacctgctctgtaacctcttctgttacttcgttatactccccttcctcctcatcatcagtgtgaaaaggttccaaggtggaatgaaccagagtccacccttgtcccattgttaccttgatgcctccgagctccccttcttactgaccatggggactgctttaagagtactcgggtgtcctccagcttagttccacgttctccaactgtcgctctggtgatccttcgacctggattcgagcccccacgtatgggcgctgcttgccgagaccagcttggtcagggagacactaacccagtggtgctagaggaattaaagacacacgcacagaaatatagaggtgtggagtgggaaatcagggatctcacagccttcagagctgagagcttcgaacagagatttacccatgtatttatcgacagcaagtcagtgataagcattgtttttatagattatagattaactaaaagtattccttacaggaaacaaagggatgggtcaaaatgggatggtttagctagttatctgcagcaggagaatgtccttaaggcatagattgctcatgctattgtttgtggttgaatgccctttttggtttctgccctgggtatgccgtgttttttgct

SEQ ID NO: 592890 - DNA, 596 bp, Homo sapiens
  misc_feature (380)..(380): n is a, c, g, or t
  misc_feature (566)..(566): n is a, c, g, or t
  misc_feature (577)..(577): n is a, c, g, or t
atggatgtaaattggatgtaaatattcagtttatataattatatctaatttgtacccttgttgaaattgtcatttatacaataaagcgaattctttatctctaaatatgatgaagttttcttaacatgataatttttagttaaaatctgtgtattaactgaggtccaaattgtttacctctcatatgtaaacagatgttaccactgtttacatgcactatctactcttgggaaaataccatggtcattaggagcatgctgaaacatcacagggcatgtattgcctagctttcttcattctgagtctttggcattgctaacttttaaggatgagaatgtcacacatacttattgtatctgcagtactagcacaaggcctgngtcctagtccagtgcctggcacctagtaaataattgttgaaatgaattgaaagctgtgaatatttttcaaagaaacgtcctagattacagtggtggcattttctttgtcacagtattccaggataggatatgtttctgctttcaggttaagtaggagaattaaagtagaaatggaaagagaagtgngaaggactggnggatttaaaggaagagaaa

SEQ ID NO: 592891 - DNA, 1687 bp, Homo sapiens
  misc_feature (116)..(116): n is a, c, g, or t
gatgatgccgagaacccctgtgtcacggctatgagaagatttcatggaaaacttttctcaagtattctgaagaagttttagctgtttttaagagttataaattagatgaactcagncctcaagcaaacaacagatggcaagacattgcacaaaccaggaggcagaaccatgtcatattttgcgacacacattctttcacacacagtgcacacacagctgcatggcatttcaccaactgcagtgcacagtcaactttcgctcagcaccaccatcctgcttgccagttatctccattattcattcccacatcatctccaaggcggcaggtccaacattccacacaagttcaacactcatgcttattcacactgcatgcagcacatccactttggcattgcacagcatcactcaccaacaatccagtttcatccaactcactccatcttgcaagaacctcccccgcatggcacgaacagcattttccaaagcatggtcagcagcatcatcattcacacaccacctggcatagcaaacacctggcacactccgtggcacacacttatgcacaggtatgccctacagtttctcgtcgcaacagcaacagcaaccatccagcatcacccacaaccctcacgcagcacatcacactcccgcgccagcagcacagcatgcgaccacgcaggtactctcgctcagggcacaaggcaccccccccaaacaacacagttatctggactcggtagcaacatgaagcgcacgttctcagtccccacgggctttcagggcaaactcctttctcgcctctgcattacacttcttcgtcgcacagcacctgctaaacacatccacctagcaccactggacgcacactacctattgctccctacatactggcaaccgaacactccttctctgaaacagcacagcccctagttggcactccagtgtccaagcaaccccgtgacgaaagacactcaatgcgtctgccacacacatgccaaccttactcatctgcacctgcttaatcccacacttcacacactttacatggacttggcactgcacacccctatcagcacatctatatctatgtacctgggtcgtatagcgctcttatcctttacatttcccacactacacatccaacaccagccagcctagtacaagatcttatcacaacgacacatatctcttttcacagccattatggactacacttaaatgcgtatgagtccattgaatcgttctaccggagcccctctatcatgtgggaaacattactacacacggcgacacgcacttgctacaactaacgcagtctacatcggctgcgccacagtatagggtcactacgcaagtccatcctacgatccaggtgagaacacaccacgtcagtcagccacagcccacctacggagatctcgcagctccatggtgcaaacaatggctcaatgcagaccaccatcgaacgaagtagatcacccgatactgcaccagggacgtagcacgagcagatcacaactagaacaccctctccgctcgcgcccgacggcgactgacggaacgatgtgaaacgccacgataccactgaagcagacagccagaagatcctagccgagcgtaccaacgtatagacatacgactaggtgtcgtacacctcgcctctccacacgacgcgtaagcagca

SEQ ID NO: 592892 - DNA, 246 bp, Homo sapiens
taggcactggggtgcgaaagaagatcacaaaagtcctgtctcacggagctcacgctgtcatgggggggaagacagacatgcatgagttctagaatgtgaggtcaggtgttgagaagaaccctggagggagcagagcagggaaaggtcagaaagggaagacccagggtctctgaaggaggcgtcaggaaagaagtctcaggatgccctgatgtgagcaggacctgagggcaggatggaaagggggat

SEQ ID NO: 592893 - DNA, 893 bp, Homo sapiens
agcggggcttagtctgatttacggctctgctgaaaaccgcttcgctcccgcagcatcagcaccggaggcggcggctgcagcagcagccacaagtcggagactctcttacgcagtaatcgcaagcagacaggcttccgacggaacagcagactactccctggcaggagtcctttgagaatgttgctgtgtgcctgccattccgctgcccgaggtgtggagacataccagatcttagaacgcttgtcatccttgagggcccatctggagcttcagtcacagctacgaagacagaaccctcttgacacaactgccgtctctttccactccctcacaagacactagacctagtcaccttccatcagcaactcctgacacacgggcacgacactatgccagcagcacgtcggcacagacgcgtacacagccgcacacacccgcgcgtacatgtcaaacctcgtcgctacgaagttatcaacactgaacattttccaacggcacacggaaagccaacttatgacagtgcgcgcaacacaacacggaccagcatgatccctacatgctgcactcagccatacacacccgcgcacaccgcgacaccccacacatgcacacaccctcgcaccggccactgcggcaaccacgcgacccgcagcatcccacaggtgctaaacaagcgctcccaccaccataccgcgaaacaacacaaaatcacaccaccacctattacaccaggaaccctcgacactagacacaacaaaccaacgacaagcctgcccaaatcgcacaacgggattccgacgcgaagcctgcgaaccaatcacgcacacccagatgagacagcacacaacacgagtcacccacagacacacacagagaacgtaccccagaacact

SEQ ID NO: 592894 - DNA, 560 bp, Homo sapiens
cttcaacatagtgaaataaacaggaggagggtttcgagctctggatcctcagccatggcaatgtcacaatttaatcccaaaggtttgctgcgaagttgcaagcacgacagtgcgaaactggacagattattcttgaattctttgttcgttttggctgcgacccgactctcataagatttatgctctcttgcaaacccccagggtgggtggccatatgacttacccacacaccaacattgcggcccccccactgacgagccatcacttctacttcgcttcacccgcccactcgcgctttgtatccacctcgcctcccattgtttttatggcggtgcaggattatcctccctgtgcctgcccgcccctcgtgtcctcgcccccccctactttcccccacgccctcccggtccttcatcccattatgttttgtttttcactccgtcatactctcggcttctatccctatcttcctcctccgctccttaccaccccgcccgcttccaccacctccgacccacagagcgtacgcgctccgtctctcctttccccccatctatcta

SEQ ID NO: 592895 - DNA, 882 bp, Homo sapiens
ctgtaatcccagcactttgggaggccgaggcgggtggatcacgaggtcaggagatcgagaccatcctggctaacacggtgaaaccccgtctctactaaaaatacaaaaaattagccgggcgaggtggcgggcgcctgtagtcccagctactcgggaggctgaggcaggagaatggcgtgaaccccagggggcggagcctgcagtgagccgagattgcgccactgcactccagcctgggcgacagcgagactccgtctcaaaaaaaaaaaaaaaaggaaaaagaaagaatttccaccatactgtttatgttggtccgttggtagttactctgggctcactttaacggttttcagtcacactttattaattaacctcaaggactaaattttggtggtaaacatttgggaagaattattattttgattattcagcatttctctgtgccccattcattcttctttccaaccttttttaaaaattattattattggcgggattttaaaaaaaaaaaaaaaaaaaaaaaaaaaaaaaaacaaaaaaaaaaagaaaaaaacaaaaaaagaaaaaaagaacaaaagaaaaataaaagagaaaacaaggaaaaaccaataagaaagagagggggggggcatgaaaactatacaggggcggagcgaatatagtacaaaccaactagtttgtaggaaggggcaactaaagaggtcattataataatgcgggggcgcggcgtagtaaagacggtgtaggaagaagacaactcgtggctgtgttatggaggcacaatctttggtggggaaagtgatgagccccactacagtaaagtcacgtgcgaataatattctgggttggtatacccagtttattggacaaggggggttaaac

SEQ ID NO: 592896 - DNA, 396 bp, Homo sapiens
ccgctatactggttcagtctgggaaactttcttgttggtcaacatcacaccacatttacatctcaatgcccatcctaccttgcactcatacgtatcatgcatccccgcagctacacacacacgaacacacagcacacagcataacacagcacacacacgagcacagcacacacacgagcatacagcacacacacaaacgcacagcacacacagcacacatatgagcacacatgcacacacacaaagggcacatgcccaacacactctcacacatgcacacacatgcacacaaactgcacgtgacacacactgcacacacatgcacaccccgcacacacgcaaacccacagcacacacaaaacgcacagcacacacgcacacacagcacacacacga

SEQ ID NO: 592897 - DNA, 171 bp, Homo sapiens
gcaccatggaaatcctgagtgatgtgcagctgatcaagacgggagacaaagggggagccagcgaagccacgcggctgaacatgctcaacatctcccccttctccttggggcgggtcatccagcaggtgttcgacaagggcagcatctacaaccctgaagatggctgggggg

SEQ ID NO: 592898 - DNA, 807 bp, Homo sapiens
gtggggggacctggcggtggggctggtcctgctatatgccggcgcctcggtagagtgagcggcggcgacgcctctttcctccatctctttccctgtcgctgcgagagcgacgggcggggaggcggtggcggcggcggggccgggatggaggacgttagctccaacgtgaacgcgggccaggaggtgctggaatctgcaggagtctggtgaaggaagcctgagatgctatgaagcgaacagctgtgggcacgcctgttcggtcgcgccgtgctgggtgccggctcccgttgggcccggtaccccggttcgggccggcgcgtccattccctcctctgggcgctgggtcttcctcgggtagcctcccccttgggggctcagcgccgaagtcgtggcgggggggccctggggtcggcgcccgagggtgggacgacgttgcgcgaactaacggctagtggtgccgccacccttccttgctggccggacgggcgaggagcgcttttggtggaccatgttggcagcctgtttggggccccgacggaagcttgacgcgccttgtcacggcttgggacggtcgcaggcaggagcatctggctgttattcattcacccaagtaggtcaaaaaatagaacccttcggcgcgatcaattgtcgggggggcggaacacggtgacgttattgcgcgcaatggccccctgggtgccttgactttggtccccggccccccgttttttgtgccaggggggacaaattccggggacccccaattgggggggcacaatttcagtacgccgggtcccgtataacctg

SEQ ID NO: 592899 - DNA, 872 bp, Homo sapiens
  misc_feature (477)..(477): n is a, c, g, or t
  misc_feature (486)..(486): n is a, c, g, or t
  misc_feature (516)..(516): n is a, c, g, or t
  misc_feature (553)..(553): n is a, c, g, or t
gcacttggggaataagtagccaggcgggcgggcgggcgggaacgccaggcagtggtatgttttaactgggaaaaagtcttccctggaaaacgcttcacttttaacaaacataacgttatgtgcactctcggttttcctacaaaagaactggaaacttgggtgggcgaaccacattcttataggggccccggtgggttactgaactggtggcgttcacggtttcctaaatggtcttcctggctaatgggcagaacacttccttggaacactcttggggcgggtgtgaattcaccacgaatagacacttctgtagatgggctctccattacacctggtgtggatattctccttttagggcccacatgagggaatattatcatctccagagttgggagaggttaccctcgctgggaagacgttaaccatattccttcatcattcaagaccagcatggttcatggggaagaccaaggttcnaccaaattnacaccccaatggttccaacacgtctccttnatagggattattggacatccctcataatggtattggncatggtggtgcacatctcaacacatgggtgggtatcaatgcaaggagaccttgtgaagcatgttacaaccacggcaagcacatccctggtggcatggtccagcacacctttttccttccccaggttcatccaaaattcaagtggaccaaagaaagtgtgtgggaacccaagggtggaaacaatataagacatctcaaaatttgggagtccctttattaggagaaaaggtcttggattgaattttgagttcctttggaagggattcttgaaagttaaattgaatttcgggaagaaaaattggggcttccagcgagggtcc

SEQ ID NO: 592900 - DNA, 409 bp, Homo sapiens
  misc_feature (88)..(88): n is a, c, g, or t
  misc_feature (291)..(291): n is a, c, g, or t
ctgagtttttttttttaagaatttttttattgaggtaaacttcacataacataaaattaactattttaaagtgagaagttcagtgccncttagtattgttaacaatgttgcataaccccccctttatttaaagttccaaaaaaaatgttctcctctaaaaggaaaccccatcccattaagcagatactctccattccttccttcctccagcccccagcaaccaccaatttgctttctgtctctatggatttatctattcttgctattttatataaatcgaattgtatgagnccttttgtgtctggcttctttcacttagtacaagtttttgagatttatttacatagtagcatgtatcaacccttcatttttatggccaaataaaattgtattatgtgtttatagccca

SEQ ID NO: 592901 - DNA, 588 bp, Homo sapiens
actctccccatattgacgcggactaataaactgatttttgttgctatttctccacttttccttcatttttattcatttttttttcattctggagaactagatttttatgtacaactcttgtattgatttttcattccatctatcatatctctaagttcccaaaccattttcttgttctttgattgttccttttttatatagcatcctcttgttgttttgtagacacattatctttgcttgtctgtctgagcatattataatagttttttgaagactattttgcaccagtattgactcagatgtctccaagttcctttttctctactttgtttttgagtgtgctatgcatatctgataatttcatctattttgagatttgttccatctttgtgtaccccaagagacagaatctgaaatgaggatctaagtgcaagaagtttatttgggatgtaattctagaaaacactggcagtaaagtgcagacatgagacagtgaagggaatgaaccaataaaggccgtactgttagttgctcagtccctctagagctcagcatgtcccaattgaaagtgagtgagaaagccggtct

SEQ ID NO: 592902 - DNA, 349 bp, Homo sapiens
gtagagcctgctcacagctcattctaaccttcgaaccgccatcatgcagctcactattgaatcacgcgttcatgtcgcagaggggaaggaggtgcttctacttgtccacaatctgccccagcatctatatggctacagttggtacaaaggtgaaagagtggatggcaaccgtcaaattataggatatgtaataggaactcaacaagctaccccagggaccgcatacagtggtcgagagataatataccccaatgcatccctgctgatccagaacatcatccagaatgacacaggattctacaccctacacgtcataaagtcagatcttgtgaatgaagaagcaacttgg

SEQ ID NO: 592903 - DNA, 116 bp, Homo sapiens
ctgacatgcccaggagctgggtctctgtgttgggagtgtttggccagctgaccctgtgtcccaggaatgggagagtcacagggaagtggcgagggtctcacgtcgtgggcttgctg

SEQ ID NO: 592904 - DNA, 166 bp, Homo sapiens
gatcacgctctaaggttgcttaacttttaacacgtccacgatttaaaaatatctacaattatattagcacacagtctaataataaggaggcagatcggatcccgccatgcttcatttagaggacactggtgatccctgcagcacaagctccatgggcacccacaag

SEQ ID NO: 592905 - DNA, 141 bp, Homo sapiens
tccggttggacgactgctggccgtaccactcatacagggagaacagaaaattcaatgctgaataacacactggcagacattaacagaggcaactaaacaacagctattaaacaataaataggcttgggcacctgtggcatc

SEQ ID NO: 592906 - DNA, 285 bp, Homo sapiens
tgggggttttccccgggggggggaccctttttggggttttttttggggcccccccccccgggggtttatttgggggtttttaggggccttgtgtttccaagggggcttttttggggcccccggtttttttcggtaaaaaaaaagggtctttggggttttccgggggcccaccaggtttttttttttttttggggggggggggggtttttccccccccaagggggggtttttttgggtccccccctttttggtttccccttaggggaaccattttccccttttcca

SEQ ID NO: 592907 - DNA, 175 bp, Homo sapiens
taggcggtcagcgcatgcagcagtcacatcagcatcagggctccggcgtttgtgtatgctatgtttgcggtttcgctgctgtggtctttggagtcgacacctgtgcggcccggtcttcctgctaatgctcggctgccaatggtgcgggcggttgcagtgcgcggtatggtggggt

SEQ ID NO: 592908 - DNA, 999 bp, Homo sapiens
ggacaatggtggcggcggcgacgggcgggcgctcctgaagcagcagttatggagacttcctctcagggaccggggccgtagcggctctttgactcgcaccggcttccgtgtgactgcttcctactgctcgtgctgctgctctacgctgccagtcgaggttctgcctcctcgtcctgcgcctgttcctcgggcatccacggtctgtccctggtcagacgtgcggcgctgccagaaagcgatccttcgcagattcgtagtgcgcgaccagggtgtggcacgatgcgtagggcatcggtgtggccaggcctaggagggtacttccgtggacctccgagtgatccactagatgctcgaggggtcctccattgtccagaccaatggtgactaccatttctgactcgacaaactagtatgtcaattggcgttagccacctggtagactagccccatctactcaatagtccccccagctttgtgtgctggtctcggggcttcagtggagatgaatgggcggggggagttggtggagtcactcaagagattctgtgcgttccaccgagggttccccccactccatctgatgctattcccgtgaggaaggaggcacaatgggcgggaggggctctgcgcttcagttctggcagttctatccaagatgtggtgcaagctcttaccctgcaagttcagagacccctggtctctgtggacgggtgtcagatgctccgtgggtctcaaactgctgtggtcacttttcggcctttcagcggggaccaaggaagggggtgcggcgtgtaatgcgcgctctgggaaccgatgtaggagttggcccccgtgacacgccgtggcgcaggattgggccaccgggcagggcgtccccctggaaggggcgctgttggaaaaaacccattggcgccggacacgatttccacccggagaccaggggagggaggcaccagagtgccacggctgcacaaaccccggaggccacaaggcgcgacc

SEQ ID NO: 592909 - DNA, 340 bp, Homo sapiens
acaatcagacaccagctttcctgagaagtgcagaagagagagccccatagaagcagtggggtgctcagacaggttctgtgggtccacaggggagcagaggctcctgagggcttactcagacagtgaagcagccccccaaaatatacttccccttctcctctcctctctgggttttgcaaccgcagagaagggaagaggtactcgcgttgaccaaggacgtcatactcccgcttgatgatcctctctgcgaatagccttctctggtttgtcctctctgcgtttgaaacgccagagaggaaacagcacaactgataaagcaaacctggacatacacactgga

SEQ ID NO: 592910 - DNA, 553 bp, Homo sapiens
ccctaaaagataattaaatagcttacacagaaaatattattgcctggaagtatatgatctttaagttacaggtctaaaagagttttatgttgttgttgttgttgttgttgttatacaacacacagtgaagaccgtctaataagcaaggccactgttcctcctgttgggacaatgatcctgtctcatacacctgtccttctgctcctttagaatatagaaccagcacagtgtgcacaccgacagcagttactaggggcataatcctccgggtcgcggagggtggagttgaagcagagctcagtggtgtccacaaaaagcattagtcttaggtactgtgttaaaacaatcaagaattcattcatgtttaagaggttaataaccataatattaaaggattaattataaacacctggcaaaaaaccacatcatcccttttcaaaaataaaatgttcatattcctctgagcaaacatcacaagagcagtggccatctgcctcaggcctgccttgtctgtaaacagctgtaaaggaaagctagcacagcgccagggaca

SEQ ID NO: 592911 - DNA, 325 bp, Homo sapiens
ttatatgtggatctaagaaaacttcaaaaattcatccactgggccaggcgcggtggctcatgcctgtaatcccagcattttgggaagctgaggtgggtggatcacaaggtcaggagatggagatcatgatggctaacatggtgaaaccctgtctctactaaaaacataaaaaaaaattatccaggtgtggtggcgggcgcctgtggtcccagctactcgggaggctaaggcaggagaatggcatgaacctgggaggcagagcttgcagggagcctagatcacgccactgcactccagcccgggcgacagagcgagactccgcctc

SEQ ID NO: 592912 - DNA, 255 bp, Homo sapiens
  misc_feature (43)..(43): n is a, c, g, or t
  misc_feature (47)..(48): n is a, c, g, or t
  misc_feature (50)..(50): n is a, c, g, or t
  misc_feature (69)..(69): n is a, c, g, or t
  misc_feature (72)..(72): n is a, c, g, or t
  misc_feature (86)..(86): n is a, c, g, or t
  misc_feature (100)..(100): n is a, c, g, or t
  misc_feature (106)..(106): n is a, c, g, or t
  misc_feature (112)..(112): n is a, c, g, or t
  misc_feature (118)..(118): n is a, c, g, or t
  misc_feature (173)..(173): n is a, c, g, or t
  misc_feature (181)..(181): n is a, c, g, or t
  misc_feature (185)..(186): n is a, c, g, or t
  misc_feature (197)..(197): n is a, c, g, or t
  misc_feature (201)..(201): n is a, c, g, or t
  misc_feature (206)..(206): n is a, c, g, or t
  misc_feature (211)..(211): n is a, c, g, or t
  misc_feature (251)..(251): n is a, c, g, or t
  misc_feature (254)..(254): n is a, c, g, or t
ctgggatggaacttcacccatactctctgttctttctataagnacanngngaaataaaaagtgagaagnagnttcaatcgtaactntgtcaacagtattntgaagngatcanttcttntaaaacttgtaaataaactatcatctttgtagatatcttaaaggtgtaaagtttncaaatttnaagnnatatatattancacngtggncaggnacattccttaaaactaattaaatgtacatttctataatanatnt

SEQ ID NO: 592913 - DNA, 964 bp, Homo sapiens
  misc_feature (105)..(105): n is a, c, g, or t
  misc_feature (305)..(308): n is a, c, g, or t
  misc_feature (311)..(314): n is a, c, g, or t
  misc_feature (365)..(365): n is a, c, g, or t
  misc_feature (383)..(383): n is a, c, g, or t
  misc_feature (385)..(385): n is a, c, g, or t
  misc_feature (423)..(423): n is a, c, g, or t
  misc_feature (435)..(435): n is a, c, g, or t
  misc_feature (439)..(440): n is a, c, g, or t
  misc_feature (447)..(447): n is a, c, g, or t
  misc_feature (449)..(449): n is a, c, g, or t
  misc_feature (456)..(456): n is a, c, g, or t
  misc_feature (471)..(471): n is a, c, g, or t
  misc_feature (481)..(483): n is a, c, g, or t
  misc_feature (485)..(485): n is a, c, g, or t
  misc_feature (490)..(490): n is a, c, g, or t
  misc_feature (492)..(492): n is a, c, g, or t
  misc_feature (495)..(495): n is a, c, g, or t
  misc_feature (497)..(497): n is a, c, g, or t
  misc_feature (502)..(502): n is a, c, g, or t
  misc_feature (504)..(507): n is a, c, g, or t
  misc_feature (514)..(515): n is a, c, g, or t
  misc_feature (517)..(517): n is a, c, g, or t
  misc_feature (524)..(527): n is a, c, g, or t
  misc_feature (531)..(531): n is a, c, g, or t
  misc_feature (536)..(536): n is a, c, g, or t
  misc_feature (539)..(539): n is a, c, g, or t
  misc_feature (542)..(543): n is a, c, g, or t
  misc_feature (553)..(554): n is a, c, g, or t
  misc_feature (915)..(915): n is a, c, g, or t
cagccgccgccggtccgcgcggcctcgggtggccggagctcagcctgcgcgcgccgccctgtgtctccgggtggggcagaagactcgccccttgaacctcccgcngggactctccgtggtgtggcggccctggggctctttcttaatagccccggactgagtcccctccagtcgaggaccctctcctagtccactgacgagcggtggacacctgccgctgtatctcccccagaccgagtccttgccctgctgcctcctcatacccacacggcggcagagaccctcaccatagcgttcgctcaacnnnncgnnnntccgacctccgctagttcctgcgggcctttgcccgcttcccggtgcacccnccccgggagacacctcananccccgacagcctgggcaggctcggtgcctgcgggtgcngttcctgatcancccnnccctctncngtggggntgatggtggattggnttgttttgannntntgtgntntgngngtgantnnnnttgtganntnttggagnnnnctcntaacnagnggnnagtgggtttnncataccccaggatgtgagcctctttaacctgtaatgctgtggctagcccttggcccctttcctgccatggagaaccaggtgctggtaattcgcatcaagatcccaaatagtggcgcggtggactggacagtgcactccgggccgcagttactcttcagggatgtgctggatgtgataggccaggttctgcctgaagcaacaactacagcatttgaatatgaagatgaagatggtgatcgaattacagtgagaagtgatgaggaaatgaaggcaatgctgtcatattattattccacagtaatggaacagcaagtaaatggacagttaatagagcctctgcagatatttccaagagcctgcnagcctcctgggggaacggaacatacatggcctgaaggtgaatactcggg

SEQ ID NO: 592914 - DNA, 562 bp, Homo sapiens
ccgtacacaaatatactgcatcaggatatcttttgagtctattgctggtttggaattatgctttttaagttcaaacgttatttactgctttgacataattttagtttgtattgactttttctttttaaggaatgggaatggaaggcataggatctggaataaataaaatgggaggtaagaaatttaaaatgaagtacaagcataatcacttttaggcatagttttctctctttcctcttttctttcttgtttaaaccctgcatgaaattctctttggtttcagtttgagtctagaaatgacttcctcctgcctgtccatccttccagcgggtgtcttggcttttggttctggctgtctcactaactagctctgtgaccttgggcagaccactccatctctatgcctctttttgcttgtctattcattgagggggttggatcagaccagctttttgaagatgggtgatttttaaacaagggtgctagcattttttttgttcttcaaaagcctttaaacttggtcagttcttggcagaagatacccagttgaacatgtgatagg

SEQ ID NO: 592915 - DNA, 303 bp, Homo sapiens
tgtgttaggcatggaccttaaagacgagaaaagattacagaagaaagaaccattatacatccagcatcaagaaaaaaatgaccaacgttgcagaagcaaaaaaagtaatgaagagaaattttaacgtgaatacgaagataacatttactgatgaaggggagttggttcagcagtggccacaaatgcagaactcttttatcacggatgctgaggaagatgatgacacaggtggtatcaacttacatacagcaaaggaaagacttcaagaagaggacaaatttgaccaagaagaatataggataa

SEQ ID NO: 592916 - DNA, 659 bp, Homo sapiens
caacttcgtgcagtacaagtttagtcacttgccatcgaaatgagaggcagacaacgatcgagctggccaagatgtttctgaaccgcatcaactactggcatctggaggctccatctcagcggagactacggtctcccaatgatgacatctctggatacaaggaaaactacacaaggtggttgtgctactgcaatgtaccgcagttctgtgacagcttacctcggtacgaaaccacaaaggtgtttgggagaacattgcttcgctcggtcttcaccatcatgagacgacagctcttggaacaagccagacaggaaaaagacaaactgcctcttgagaaacgcacgcttatcctcacacatttcccaaagtttctgtccatgttggaagaagaagtgtatagtcaaaattctcctatctgggatcaggattttctctcagcctcttccagaaccagcccgctaggaatccaaacagtaatcagtcctcctgttactgggacagcattgttcagttcaaattccacttcccatgagcagatcaatggagggagaacaagtcctggatgcagaggctcttctgggcttgaagcaaacccgggagaaaagaggaaaatgaacaactctcatgctcccgaggaggccaagagatctcgagtgatg

SEQ ID NO: 592917 - DNA, 340 bp, Homo sapiens
  misc_feature (51)..(51): n is a, c, g, or t
  misc_feature (94)..(94): n is a, c, g, or t
  misc_feature (264)..(264): n is a, c, g, or t
  misc_feature (298)..(298): n is a, c, g, or t
cgtggaggtggatgacctgatccaggtcggcctgatcggcctgactgatgngctgtcgcgcttcgatgccgagcagggcgtgcagttcgagacnttcgccacgcagcgcatccgcggtgccatgctcgacgagttgcgcggcggtgactggatgagccgtggcacgcgccgccagcagcgcgagatcgaggtggcggtgcacaaggtcgagcagcgcctgggccgcgcgccgagcgaagccgagatcgcggccgagatgggccngccgctgaccgaataccaggagctgttgtccaangtgcgcggtacgcagctggtgtacctggaagacatgtccggc

SEQ ID NO: 592918 - DNA, 401 bp, Homo sapiens
  misc_feature (9)..(9): n is a, c, g, or t
aatgtgtcnctcgaggtatctattaccctgctgtctatgttagccaaagtacatctgttagcctgctagctatagtgaatcaccatactgaatgtgttagccacagtaaatctattaccctgctgtctatgatagccaaagtacatctgttagcctgctagctatagtgaatcaccatactgaatgtgttagccacagtaaatctattaacctgctgtctatgttagccaaagtacatctgttagcctgctagctatagtgaatcaccatactgaatgtgttagccacagtaaatctattaacctatggtgatctgtaatctatggtccatctgtcagccagtggaaataacttctctacagtcatcactgcatcagtacccagcagtaaatatgtccatg

SEQ ID NO: 592919 - DNA, 188 bp, Homo sapiens
tgcagagtcctggcaagccatagctaggccaccaatcagcttaagaaattctgagaaatctcgctgaccgacactgtaggtgtccagttacttcatcctgcggtcaaggacacccacgggtccttctagttctatgtgaagtgcaaatagttctgtattcctgacacgcttacggatcctctgcgccg

SEQ ID NO: 592920 - DNA, 536 bp, Homo sapiens
agctggggtgctactatgacaatctcggtgcactgactaacctctgtctccctggggcgacagcagatctcgtgcctcaggctcgtgagtagctaggattacaggtgtccacaccacgcccagctaattttttgcatttttagtggagacggggcttcaccatgttggccaggctgatctcaaactcctgacctcaggtgatccagccaccttgtgcttcccgaagtgctgggattacaggcgtgagccaccgtgcccaacctatacagctgtttttaataaagtaacaatatcagactaatcttgtccagagttactcaagtcacaagaacttgaaacagaatgtttggcttcgttgctatatttctgagagctttagaacatgtttcatataaatgctcatgtctctctaagccaatttgaatagaactcctttacgggatttgattaattaacttggtaataccatcagagggagaataatttcacgtatacataacatacatgcgtagacttaccgtatgtatgcataaaac

SEQ ID NO: 592921 - DNA, 395 bp, Homo sapiens
catagaggatccccctgagagtaaatggggcagtgtcaccaaagtcagccctgccctattagtctgctcagccccttgaggtctggagggcggccttggttcccagggcaggggctgggcccagggggctcttcattcttggaaggtgggaggaacatgaggcgaggggatgcaggaggccaggttagtgctaaggggaaggggcatccggccggggcgggtaaggttcacatgcgggggtgcatttcccctcccgcccggacgggattggacagcccccagcggggggagccttaaagccaaggacttgtgtctccattttcctcaagaaaacataagccgcatgaggccagggatgtggtcggtgtacttccttgaatgggagcgaaagggta

SEQ ID NO: 592922 - DNA, 377 bp, Homo sapiens
atgcccacgtacctgtgcctacaagtagactcagtggacccacgcatcgccaacgtcttcaccaatgccttcctgctacgggcacaccctcatccaagccttccttgtcccgcctgggcaatcggtaccagcccatggaacccaacccccgtgtccccctcagcagggtctactttgcctcctggagtttcgtgctggaaggtggcattgaccccatcctccggggctccatggccacccctgccaagctgaatcgtcagaaccaaattgcagtggatgagatccgggagcgattgtctgagcgggtcatgaggattggtctggacctgcctgctctgaacatgcagcgaaggggggaccacggcctcccaggatac

SEQ ID NO: 592923 - DNA, 852 bp, Homo sapiens
  misc_feature (809)..(809): n is a, c, g, or t
tcattttgccaatgagtctgaggctgtggtctctggatccagtcattatgtttttatagaataattaaaccggatgctaacggtgttttaaaaaataataataaaacaacttgtttccttttggccacccccaggaagggctgatttcaaaatctgggggcgagcaacctcaaggaacacaatttccctccctatcaacaagaggattttaacagcaaagaagagaggcagcacctcccattggcagaatgaccgctgagccaggctgggtttgggtttcttctcttctgattctgctgctcactgtcatagccttttgtgtatagtgatgtgtctgtatctttaatgtaaatagagagatgatgaaaaaagagtctattttagtgttaggaagccccagcaggggagtcggaagagcttggaagagctggggagagggtaggggaaaggtttttccaggggccactgggtttgagccctgcttctgtgcacagccacaccaccctctcccgacagccctcaaagacgtagcaactctttctctcaaggtgctaaaggactcagaaggtgcagcacgtccagtgggtaggtacttgttgcatgcaaaagctgtagtgtatctggtccttcctccccagcttttgtgtggggttcttgctttgtgtggtattttgttttcccctctaatgagagggcatggcctgagtcagaagagctaccccaggtgaaactggaagtgcatgaggcagagcgtccgtagcatttccagtttgttctgtataggaacagaggtgcctccgggaaggagnagcgaggtaggtagctatgataggcacctaatgcttctcaagg

SEQ ID NO: 592924 - DNA, 905 bp, Homo sapiens
  misc_feature (307)..(307): n is a, c, g, or t
agggatggaaaaagtgctgaatacaagaaaggaaggttgaattttatatatttgtctataaagtgtcactctgggaataaagcttaaattgtctcacttatttaaaaaacagttccagtttgcccacgtgcaacattagtgagtacctaccctgttcccatgggttctccacccacccgaaacaagcacacactgggacaatctgagggtgctcacgtctgccggtgataaggaggtgttcatttgcatgatggcatttgtgcataaaatggtactgctccagaagtggttctagtgccctgtcttnaccctagtgtggcaggccgatggaacagagcatctgcattgactgccatgcgccgattggaggcattgaccacaaacctcgggacggctttcatctggtcaagtatgtgggtcaggattctatttcctaagtactcaaactttggggtgttgggctgtttttattccagctgataaagtgatactcaagatagtactaattactccagtacatgtgggcctgtgtcatattgaatagcaatgccaaagtcccagcagtcacacagcagggaggcatctgatctgttgttggatccctgggccctgaaatgcaaagcaggctaccctttaacagctgtaatatgaatacaggtgtcttccttttgggccttgggtgcaccttctgtagaactatgcatgacataaacagatgctctaattcacgaggacatctatgtctgcaggaccacaacctgggcatccgtctgtctcagcagatgccatctcacttgccagcaatcttagctttctccattttttattttttgagaaaaatgaaggagacagacatagtcttatgaaataccagccttcagaatccaggtacaaatccgatcggg

SEQ ID NO: 592925 - DNA, 147 bp, Homo sapiens
ccgtagctagggacctgctgtaagaagaaaaagcacatggacaaaatgtatttatagttgtagaaaaactagaagcaactaaagaatagtaacagaggaatagttaggtacaggtgcatccatattacgtggataataagtacatgt

SEQ ID NO: 592926 - DNA, 433 bp, Homo sapiens
tagaggatcgcgtcgaatcgacggtttctctctgatagtcctatgctctcccctcaaaattaaggtaattctttaacaaataactttaacctgtacagtcctacctcaggggtttagaaatagcccacatttattcagacaagttctagtgaaaatctaactgagcaaactcttgagcgggggataacttctgcagtaggtagataacccccttatctgctccccctccacaggactcgcatagcaacatgtggtacaaaccttaactttctaaaagaaggaaaatgacttttgtctaattcaaaggttataaaggtaaagtggtcatttctgggtagggaaggctataacagaagagatattgtcagaaccaaaaaaaaatcttgtcatggtaaaattcttgtccttaaagtcaaaatgcactgcgtggttt

SEQ ID NO: 592927 - DNA, 451 bp, Homo sapiens
gccatatactagtctgtgccctgacacaagaggcccatgtgtaattagtaactggtacatcatctgcttcagtcctcctccatgtgctgctatgccagcgctcacagtggaactcgtgtgttctgtgtggtgcccccctgttggtgcctcccaagtttcgaaaggcttccctcagcacctgggacccaacagagaccatcttctagcacctgcggagcgccgttcagctgtgacgatggcctgaagcacaggattatgactgaagcgattatttccccttccctacttccccttgcggtcctccctgtgtcagggcacagactaggtcttgtgtgctcgtctggcttgcggcgcgaggatggttctctctggtcatagcctgttcccgtttggaagtcccaaaggaggcttacaactcctgcatcacaagaaacaggaagccactgccagc

SEQ ID NO: 592928 - DNA, 204 bp, Homo sapiens
ttctcagttaagcgagagtctattcatgtggaaacgaggctaggtgattaagagagcaaaagggagagtttaaaaacaggattagtgaaaacaaggttgggcattacaacacaaggaacaaaattttgtttagcatcaagaggaaaaagattttggagcaaacgctatggtaccagttttgagggagaaaaggaagaaaaaagg

SEQ ID NO: 592929 - DNA, 301 bp, Homo sapiens
  misc_feature (50)..(50): n is a, c, g, or t
  misc_feature (71)..(71): n is a, c, g, or t
  misc_feature (74)..(74): n is a, c, g, or t
  misc_feature (80)..(80): n is a, c, g, or t
  misc_feature (86)..(86): n is a, c, g, or t
  misc_feature (111)..(111): n is a, c, g, or t
  misc_feature (122)..(122): n is a, c, g, or t
  misc_feature (144)..(144): n is a, c, g, or t
  misc_feature (174)..(174): n is a, c, g, or t
  misc_feature (209)..(209): n is a, c, g, or t
  misc_feature (218)..(218): n is a, c, g, or t
  misc_feature (243)..(243): n is a, c, g, or t
  misc_feature (247)..(247): n is a, c, g, or t
  misc_feature (264)..(264): n is a, c, g, or t
  misc_feature (287)..(287): n is a, c, g, or t
  misc_feature (291)..(291): n is a, c, g, or t
  misc_feature (300)..(300): n is a, c, g, or t
agagagagagagagagagagagagagagagagagagagagagagagagangagagagagagagagagaganctnagtgtntcctanagtacaactacattgtttatggggnttttgctgttntttcaggagctatgtaattaanagtcttctgattctctacttttactttttnagaaattctgcagttttctgcttcttctcaagagnagtagtcancctttatgagatactgagcttggcncctntagcagaggtatcgggncacttttattaaatgcattttcncggnttactgttnt

SEQ ID NO: 592930 - DNA, 339 bp, Homo sapiens
cgtagtcggtgtactcgtaagttcagtaccattggtggcccattgatttgatggctaagggacggaatcgtaggcctcgatctgttatgtaagaggcatgcgtatagatgggagggcgatgaggactaggatgatggcgggcaggatagttcagacggtttctatttcctgagcgtctgcagcatgttagtattcagttcagttttgttgtgcagtgttaggcacaaagggccatacaggcactaggaagcagataaggaaaatgcattcatgcagggcgtgcatcatgaaaggtgcataagctcttctcatgcatcaggggcagtagcgccgtagcgg

SEQ ID NO: 592931 - DNA, 274 bp, Homo sapiens
tgctttaaactgtctcctactttaaaacgaatgtcagctaactaatcatatatctaacttatttgcataaaagacaggctattctattctaataactgcttactcaacactaccaacttttccttatactgtatataattattgcctacaatgttttatttgttatttattaaattgtgattgtctcattattgtttattccaaatgttaactgccaagcttggagtgacctagatgcatttattaaaaagcatgggtcgatttacttcagcta

SEQ ID NO: 592932 - DNA, 301 bp, Homo sapiens
ttggttgtaaacatatgattgttcattttttaaagtaacaatttatttgttctctgatctttattagctctttccttcaactaatttagggtttggtttgcttctgcttttctcatttttttaagatgcatcattagaaggtttaggtgaagttcttcctttttttgatgtagacagttatagctataaacttccctctttgtactgcttttgctgggtttcggtatgttgtgtttccttaatcatttatttcacgaaatttttcaatttccttctcaatttcttcattgacccactggtc

SEQ ID NO: 592933 - DNA, 977 bp, Homo sapiens
tttgactgtgcactcgttcaaccaatcacgccttgaggatagccaatcctatctataggccagagactggatcatgttgttgcaaagaagtctgtcccccatttctcagatgaggataaggatccacagtcaagagaagatgctagacgaaaacccacattacctgttaggcctcaccatggcttatgtgcacctgtaaatggagcccctgcgaatgacagtatgttacctaccctccatcatcatggatacaaacgcagatgtaccgtcgatagcggccttgtccttcataccggaccgatttcgccttctctgctatccctagaataacgagctttcacgatactagcggcccgagcaacggcaatcccgcccgacccccacaactaacccacgccaatgatcaccaactcacacaccttgcctactcaaaccgtccccaatactcctccctctctcacacctcgcacactccccgtcgccttatctttccccacatgcctcgcacacgagttcccttctactctcaactatactgacgctctacccgctcatgcgccatcccacacctctaccgcaccacacctcctctcaacgaccaccccctcacacctctatgctcctgatctcctcgcaacccaccaccacactaccctctctcactattatattatcactgtcatcctccgcagacacaccccgacctccctccctattcatccctctcctaaccgctcctccgcaccccacgctcacctcccccccttgtccgcgtactattccagccctataacccatctcatcaagtatcaccccaccacctcgccccccgccagcgcaccaccgttactcgaatacgcccccgctcttcccccgcctccacgacatccccaccctatattatccccactccttccccccgtcacgtcctccatccacttctaaacctcccccccgccatagatgcgaccgtatcg

SEQ ID NO: 592934 - DNA, 836 bp, Homo sapiens
ggttgagtgcgggtctctgctgcggacgccggggtgcctggcgctggtgttggcctgcccccgtgcctcgcctgagtgcagcgcgcccgaaggccagtgcctgcgctccgatccgcggccctgtgcgcccagtggatgggctgcgggatgtgcctgcctgatgcatgtctgccgcactgctacacctgctggctgcctgtcgctttcggcgtccctgcttccgggccacctgctggcctgccatttttgttcggcgctggaagcagcctgctgggtacgggttgggacacccgaatgctgggaggatgccgccgcggattatgcgtgcctgcctgcgcagtgcctgtcagtccccagctgcgcggtggcagcgtgcgtgttgctcagatgcaaaccaggaacccggagcatggatgtgctgcacaagaatcctcagggcaacacgggggattcacgctgtcccgatccgtttggaaacatggcgactcacggtgaacgcttccaggacgcagactcccgagcaaggcccaaagtgtctactgatttcaaaaagccacatattgaaccagatgtacaagtgatcgttcttagggaaagacaaaggaacctgtattcccaagcgggttgccctttaaaaaccccccgtgtggtcctcccctggaaggtgttacgttgtggctcgggcacaggaggcgtgtcacccttgttgcaggtgcacacacgttggctcctctgtacttatgcgaggagcttggttacctattccttggtgccacggtcggatcgtccacgggttagttcccagtgccacccatggcagtaagccgtgcgttgag

SEQ ID NO: 592935 - DNA, 166 bp, Homo sapiens
gcggctgtcggtcgctgcagcatctcccatggccgcgtatttcgccgtatgggcctcggtcccgagtcccgcatccatctgttgcggaacttgctcacagggctggtccggacgaacgattcagcaccaatggcgcgttttgacgaaatgagggctacggagaagt

SEQ ID NO: 592936 - DNA, 535 bp, Homo sapiens
ggggacatctttttccaaaccattgaccaggtaaagtataggcaatataatttgaaacctgccgcattaaatatagtcccgcaggggaaagatgaaaaatttacccaagcataatatagcagggactaccccttatactttttgcatagtgaattaactagaaatatcttttcaaggagagccagggttaaaacccccgaaaccagacgagctacttaagaacagttaaaagagcacacccgtctatgtagcaaattagtgggaagattattaggtagaggcgacaaacttaccgagccgtgggatagctggttgtccaggatagaatcttatttcacctttaaattggccaacagaaccttataaatccccttgtaaattaaactgtgagtccaaagaggaacagttctttggacattaggaaaaaaccttttagagagagtaaaaaatttaaccaccattagaggcctaaaaccagcccccattaaaaaaagcgttcaagcttaacaccgacttcgtaaaagaattccaaagg

SEQ ID NO: 592937 - DNA, 192 bp, Homo sapiens
gtaaggcctgttcgcacatggatccagcatgaagtacaccattacaaccagaaataggcacacatgcaaatgtgatcggggattgtagccaatatacttaatgtaagtgctgacaaccttaacaatttcctcatatctcttctaggctgtagggtgcctcagtggaatccatttagtagctgctggacgacg

SEQ ID NO: 592938 - DNA, 234 bp, Homo sapiens
gatctgcccaccttggcctcccgaaatgctgggattataggcgtgaccaccaagcacacaccattaggtttctattttatgttagtatgaacaggatgatgccatttattttataaattttatatgtacatttatgcatatacatatttgagttggatggtagacatataaatgaataataaagacatgacccaaaagttttggtgctagtgatctctcaatgatgcaggtata

SEQ ID NO: 592939 - DNA, 175 bp, Homo sapiens
ctcgtcaagtgaacaggtgatactggactagacaaggtactagatatacaggtggtcgtatcagacgccacctacttaggccagctaccgacatgtccagtaaagtccagtgtctgcagcagcctgaacagtgtcaacagcagtgactcccggtccagcggctcccactcgcatt

SEQ ID NO: 592940 - DNA, 111 bp, Homo sapiens
tagtatcctggaacgcgaatcatcttgccgtctttcagtacagctcgtcccccgtcattggtgccacattacagaaagggcacactgagtacccagaacgcagtcatggat

SEQ ID NO: 592941 - DNA, 557 bp, Homo sapiens
cgcaaagggtggtggggtccctaaagcggggggggggtggcaaaaaacaacctttaatttcggagggtccttaaggaggttttggtccaaaaggtttggcaattaaaatggagatttgtgggtttagaaaggaggagtccgtttgcaaataaatggtagtaaaaaagtttttaaataggggcaaagtaaggcctcctggtggttgggggggcatccggccaaagggtggtcaaccaaaacgggaattcctagggttccgaaaaaggttccatggcatggtggacagccagggtttaatgaaggtggagcaacgcgaatgccttgttcggtccaagcagtcaggtggtgacccggggacgtccgtcttagctagagctcagtgcctttttcccgggtatggttagtcacagggattaatgggatgcccgcgctagcttgtcagatgtcaagagcgtagagtcattgctcacgaagtcgataagcctatgttcatcaagttgccaataagtgcatcctttttacgaggattcagtgcctatcacattagtagacatgag

SEQ ID NO: 592942 - DNA, 218 bp, Homo sapiens
agtcactcagtggtagccccagtgtaaatggcctagcctcagttgaatatgtcatgaacagaggagaacaggcttatcttgagtacacaattactgaccagactatgaggcctgaaggtactggtcgatggactaactacctatataagccaactaatgccactgatcctaagatcatcaaagcaggcagtggcctttacgtttgactcctttgctga

SEQ ID NO: 592943 - DNA, 346 bp, Homo sapiens
  misc_feature (122)..(123): n is a, c, g, or t
cttaaaataaacccccacgagggtggtgggtggggttttttaaaccaaaaaaaacccacacaccccctgggggggtcccctgggggggggggggggaagaaaaggttttttttgggaccaanntccccctttgccccccccccccccctttttccccccccccccttttttgggggaaaccccccccgcccccccccccccatttttttttcccccaaaaagcttttttttttaaatttcccccatttttttccccccccttttaaatttttttttttttttttttttttttgggttttttttttttttctttttttttttttttaatttttaaagggggggccca

SEQ ID NO: 592944 - DNA, 933 bp, Homo sapiens
agcgctggccacactcatccatcaggtgctggaggcccctggtgtctacgtgtttggagaactgctggacatgcccaatgttagagagctggctgagagtgactttgcctctaccttccggctgctcacagtgtttgcttatgggacatacgctgactactagctgaagcccggaatcttcctccactaacagaggctcagaagaataagcttcgacacctctcagttgtcaccctggctgctaaagtaaagtgtatcccatatgcagtgttgctggaggtcttgccctgcgtaatgtgcggcactggaagaccttgtgattgaggctgtgtatgctgacgtgcttcgtggctccctgtggaccagtcgcagaccgagcaggcgtcgaggttgacatacgagcgatcgggcgggacatccagcgccaggacctcagtgccattgcccgaaccctgcaggaatggtgtgtgggctgtgaggtcgtgctgtcaggcattgaggagcaggtgagaccgtgaccagacctagcacaaggagcagcagctgggcctgaagcagccagattggagagtgaggttgccaaccttaagaaagagaccgattaacagttacgacggcagcagcagccgcagccacatctcaggaccctgagcaacacctgactgagctgagggaaccagcttcctggacaaccaaacagcgtcgagccagactaagaaagcctcacaatgggcaagtgggctccgagggagctgccatagatatggtccaagatcgaattgcaagaactgtcgttatcctccctggggatgtggggtcccaaggtgcctgcctgcctcttaggagtcctcagagaggccttctgtagccccgtgagcagatgatcaatcctaggttcaatgacccttcaactccctaacccaaaatagatca

SEQ ID NO: 592945 - DNA, 1141 bp, Homo sapiens
gggttctggaagacggcagatctgccgtgcatttagcgtgaagaggaggcgctgtacctgcagagctgcttttcttgcctagactcttaggaacttatccagagacatcctactcgccacacaacataactcaataggaacgagagagaaccgtggaactcgcgctctgatggggaacccaggaaactgatctgacaggatggcatctgaatgagcatattgactcctagctgatttgacgcgccactgctggtaatgctcccctaataataacaagaagaggatgagcaacaaaggataagaacgttacacataatggattagtcctatgcatgtaccaaccatggcagacacccagggaaacaggttggcacatagagaaccctagtgggaaagcagggcaacgccagtacgtggggagcacagatgcaagtcgttcatgtccgtacgactcggggaatacgagtattagatcggtagcaaatagtactgtgaggcccgaacaagttccgagagtcgcctagttgtccatcaaccggtagaccagtatcttgtggcaatcgatcgacattggaaatgctgaggatcgtgaaagttcgggatccaacctgtcgtgacgagcattcgatgtttccaatttgacatcggcagattccgttcgcaagttgtgccccaactggggataattaggacttgtaaggagctactacgtaacagtagattcctcgaatttccacaagaacgcagaggagaccgcagttcgaaggtaaaggcccgactttgcactagatttgtgaacagtccatggacggaagccggatgactgaccgcgaacccagggaagtcgtggaattgaaaggttagacaagaccgcgaattggcgggccttcgagaaacctggacgggactgtgttcgttctggcatgggagggaaacgtctggcgagttacgacgatatgagacaccaaacatccgcaacagagaaagatgcaaaggggacataccgaaagcgggaaagcgtaggcaaaatccaggcctggtagccctggcccgtcagggcttagcatgggaacacaatcgaagaacatgccaatcaatcggacaaggactaccaggggaccaaaaacagactgagcaagtg

SEQ ID NO: 592946 - DNA, 528 bp, Homo sapiens
  misc_feature (105)..(105): n is a, c, g, or t
  misc_feature (146)..(146): n is a, c, g, or t
  misc_feature (224)..(224): n is a, c, g, or t
  misc_feature (485)..(485): n is a, c, g, or t
aaagggaccccaaacccaaaaggtattaaaaggaaattcaggaaaatgggagacctcgggggtttagaagcctccttaaacatgcataaaatgcaaatggcagancggaaatggttgatcaatttgattacatcaaaaaaatatgnatatcgtcccaaatgccttaaagttaaaagcgagcaaaaaactgggagaaaggaactaaaatatgtatattaccttangtaaataaatgcaaattggggctgagctcagtggtacatgcccataatcccagtgctttaagaggctgaggtgggagaattgcttgagcccaggagtttgacaccagcctgggcaacatagagcaaccccatctctacaaaaaattgaaaaaattagcctataggtggcatgcacctataggcctagctgctcaggatgctgaggtaggaggatcgcttgagctcgggagttcgaggctgcagtgaactatgattgtgccnctgcacttcaacctcaacctgggggatggagcaagacgtttct

SEQ ID NO: 592947 - DNA, 536 bp, Homo sapiens
  misc_feature (163)..(163): n is a, c, g, or t
tgagcctctgttggcggcatatcctggctggaattacatcaatggccaccccacatccaatgctgcgctcttcctcatcgagcgtagacctcaccactggccagccatgaagtttcgcagccaccctgaccattccacctatgcggaggtggagccctcgggncatgagaaggagggcttcatggaggctgagcagtgctgagaacaccaagtctcccctttgaagactttgaggccacagaaaagacagttaaagcaaagaagagaagtgacttttcctggcctctcccagcatgccctgggctgagatgagatggtggtttatggctccagagctgctgctcgcttcgtcagcacaccccgaatattgaagagggggccaaaaaacaaccacatggattttttataggaacagcaacctaatctcatcctgttttgctgcaccggttctcttctgtgtcttgtagccatgaaacaaaagaagaactaacataactaactccatttttgtttgaggggaaaaggccctgggggct

SEQ ID NO: 592948 - DNA, 1549 bp, Homo sapiens
  misc_feature (1)..(1): n is a, c, g, or t
  misc_feature (133)..(133): n is a, c, g, or t
  misc_feature (139)..(139): n is a, c, g, or t
  misc_feature (865)..(865): n is a, c, g, or t
ngcccctctgtgtgtggcggtgctctgattgcgcaggccgttgggttctagcggctgctttgctgtcgtgctcgactcgaggcgccgttgtgtcgaccaaatgatgcaacgcgccgcctgtggggtttgtccntctacncctccgtcgtcgtgtgtgtccctcgtagtgcccccccctagttcttcccgggggcctctttttctttctgcggggcggggacgtctttggacagacccccctttggtgctgtgagtcgtggaggcatgtggtgcgcccaccccggtctctggtggacttcgcggtgtacgcagcaaacgtgttgtgtgcccccacggcgggaccgccgccaatactccctttgttttatgtggcggtacccagttcctcccgtctcccccggggttaatgaaatggaaaagggggcggttttttctacccacgggggcgaacgaagtgtgtattctgccccagcgaaaggcccccccccaactgggcctgtggtagctcccgcggcataatgtgtgaactggggagtgatatataacctgcggccgggggtcgttgccaccccccctgagctgttcccctttggtaggtggaacggcgcacagaacttgggggacgttgctaaaattcgttgtagacccactaggcctcctctgttgggacttcgtccgttggagggcccccccacgcggcccccaaaggggcccccccttccggctttcaggcctgtgtcccctcatcggatggtgacaccctctgtggttcgctttcgcgacttgagaatgtgtatactggcgccctcatggtgatgtctccgcgcactggagtgggagacagccaccctctctctcttgctgngcagccctcggcccaataatatttctctgtgggagagaaccccccctttgaatacacaggagccgtgccttgtgtcccccctgttgcgctatcctctacggaagttttttctcgccctttcccccctgagatggagaacctctacgctctctatggagcccgttctactttgagggcattgcaccatatctgtcgcagtctcccatgtggagatgttttctccagacgcacctggggacacaagactcgcagcggaagtaatagccccttctgcccaggtggtctataccctttttttgggacacaccgcaccaatatacaccagacctcccatattctctgtgggagtcttgggtctttctcgcagagcccaggagcctttccctttctcccctgagtcccagaattggccaggtgtgactcaccgcagtctcataccaccatggccgggtatacctgggatccctggccagcgtcagtgtagacccacgaacagcatggttcgagagtatctttgtcctgggaagggggccttccacagcaatgtggcgccaagcccttccaatacacagggcacaagaatccttcacagtgaacaatctccttgccatcacccttatgcttgccctgcaacctggcccttacagggagatgggggtcatttaaggaaactgaacccttgta

SEQ ID NO: 592949 - DNA, 396 bp, Homo sapiens
cgagagtcggtcctaccggcgctggtctccccgtatgccttgaggcacgagcatggatggagggagcctgaggctgcatgcagggtatgaccgggacaggcctgggctgcggcagttggaggtatggtcactggtagggcacagagcgttaggcctcatgttgtggggccagggacagtggaggaagggcccatggaagatggggctgcttggtttgaggctggagcgcttcctttgaaatttaattactgtttttcaagtgcgctggctcacagactgtgagaagacctgtgtgaagtgctggtggccacctacccaggtgtccctcccttttgttttggaggcctgtgtccttgtccagtggcagccctccttcccaggtgtggccagaagaac

SEQ ID NO: 592950 - DNA, 306 bp, Homo sapiens
  misc_feature (242)..(242): n is a, c, g, or t
atcgtgtgagctagcaaaaacatttaagttgcaggtacaccttgtcaaaaagatggagaatgtgttacatccatagttcagctaccctcccagcaggctcgagctgtgcattagcgctctcaacttaccacattattgagtgagaatgtcttctaagaaagcaaaaagcctctgaataaaacaagcacactcgagaggcctaaaaaggaaaattgggtgataaagcatattgagagagatgnactaacataaacttggccatacttacatctctaagaactatgcgttaatatttttaatttgtag

SEQ ID NO: 592951 - DNA, 115 bp, Homo sapiens
gagctggcacccgatttgatgtcatctggaatacctcggcaagactgcgccactttcaaatggagcccctgccccattatccgtgaccgccatggattcatatgcaccgagccgt

SEQ ID NO: 592952 - DNA, 147 bp, Homo sapiens
ataaacactaggagagagaactagtacgttgaggccatgcaatccatacgagataggacgacggaacaacagcgccagccagacagtaatgcgctatgtaaacaagctaactaactacgtaggttacaggatagctagcgtaagtac

SEQ ID NO: 592953 - DNA, 364 bp, Homo sapiens
  misc_feature (195)..(195): n is a, c, g, or t
gggaaaagggctggcaccgcccaccccagcagccgtcatggccctgcctggaatcactcgtgggcagctgtagcaaggagtgaaagacaaaaatgatcctgaattgtggcctggaaatatgagctttgtatagaggctcgtggtgtttaatgttcagaatattaaatgtaactgtgatgataatgacagcaactnacattcactgtacgcttactaaatatttttcatatattatttaaattgatcttcatcataagtctgtggtgcaggcactgctctgattcccatttttcaaggggaacccttaaggagggtcaggaatgtgtgggggtctcatggtagtcagcagtggaggtgggcgtta

SEQ ID NO: 592954 - DNA, 1895 bp, Homo sapiens
tgttacactttgtcggagccctctgtaggcctcctccctcctccccacgccttgctctcacaccccatctccgtcgatcccatccatgagtcagtgcaccacgtactctattatggtacctggctcacagaaaacaccgagcccacacatacctgacatcattaccggactagtagacccatccgagaggccctagcctggcaccactggctaccacccaagactacctaccttgccctagcaacccagaacctcaggaaccacccactacctaggacattagcccattcaattctatattagtatccgcacgacagtactctagataagtggatactcacagacacatacgcaatattacacacaccaaaatgcgaacttaacagactttgcacggcaagcgcacccaaattcggtagatcatccaacggcacccattgaacaccgcatgcatccccccaaatcccaccggaaacctcacacgacaactgttataactgacagttacatggatcactacccatccacccagtacactcaatgagactacacaatgagtccataataaatccccgccagttccaacatcccagcacatccttgtgcccacacccataggcagcccattccaagcggagccacccgaaaaaaagcgacacagaacacacactcgcggcactcgactcactcacacatcaacgcgcacacaccgagccacagcatccatgcacagacgcacacaatacacaagacaccacgagccggaaatatccaccacctcggacacgcagtgccgcacaagacgcagcgactccacgtacaggcatcgaaacaacttatacccatattgactacacacacccacgctaccaacaacagcaacggaccacactacagacattggacaactcacgaaaatccgccccatacacactcatgaacaaccaggccaagtcccaccgacaacgcgcagtgaccacaccgactacttgactaacaccgacgaacctcggcgacaaccatactccgccatggcagatacacattaaccatacccactcgacacgcgccacgcagacgcagacgcacaccaatcaccacagtgtacgacaccgaggtcactcgccgcacccgagcagtacaatcacatcatactacaatcaacacttctgcgtatgacaacaatgtacgcacacatcggtggacgacgcaactaaccgccaaacgctgtaggtcccacctcacgacacacatacatacacgcaactggccctgaccaacaagctacatgactgcaggacacatcacccaagaaaacagcgaagagagggaacgagccgcgcagtcgcatcgaagcacacactcgctccatcctactagctagcacgcgtcccccctccatcaccatacacagacgtatacaccacacagagcaacatcactgctccacacaccaacagcggaggcacaacaccaacccagtacacctcactacgctacaacacacactcccaaccaactccgcgcacgtaacacaatacccaaccacactacgtctcccgccgacgcacgcatcgagtcacacacagcgatcacctcgcgcatcacgcacccacaaacacagagacgcgagagcaacacgcagcggaacaacccacccacccacagagagcagccccgagctcacataacacaacgccagaacaaggcaccaccaacgaccagagcacacagaacaacacagccgacacgcagacaaaatcgcacgcaaaacagcctacccgcaccctcacaccgaacggccaacacgcatgatctcaccacgcacgcacatcaacaccgtaactatatgacagcaccacctagtcacagccagctgtatgcaaaagcaccat

SEQ ID NO: 592955 - DNA, 215 bp, Homo sapiens
taacttgcctggcaggctcatcacatttctgtctgcagtggtgcgatgacatgatacttggcatgtaacctggcacagtgcctggggtttccaaaggcgcctcgcatgcctgtttggagcctacattgtggtagtgcaaggtcagaaacatgaacatccacctgaaagggctgtctcccaggtcccttatagcaagccatacagaacccatgccg

SEQ ID NO: 592956 - DNA, 212 bp, Homo sapiens
gcaacttgtaaaactacgctatttatggcatgctgccaacaaaaaccttcacagaagaacaaggagggcaaggtagcatctaatatccagatgagtatatcccagaggatatgcttaagaatatagtagaggacccagatctggagggtgagcctcgagagctggcccaaattctgtagttcagctcaggagccatccagaccccaaagtca

SEQ ID NO: 592957 - DNA, 101 bp, Homo sapiens
agaggaggtgcaggaggctgaagtggggacaagggcaccaaaaagccagtgggggcaggtggtgccggccaaggtcagaggctgatgcaacaggccctctt

SEQ ID NO: 592958 - DNA, 460 bp, Homo sapiens
caagactcatactactaatatatttgagcctaggacataaacaacgaaaagctaaactagatattagacatatatataactaccaaatttaacattaacaagaaataagaataatctctagtagctacagttaaacatcaacagaaagcttcaacagatgattctagaaaataggcaggcacgattaactatttaataagtaaggcaattactataaacctggaaataaggctaaatagcatactaagtcatagtagggtacaacatccacattgcagtataacggtttcccgtatctagcttttatttattttttagcaatgacattaacaagatatagccaggtaataaaaaatagagggctattctagagacttacttatagtataccgagttgaataggcagcgcgcacgtaagccacatactggaggtaggatggatgacatactcccagtactg

SEQ ID NO: 592959 - DNA, 121 bp, Homo sapiens
ctgcaaagggcccagaataatcaggatagaggagtaaataatttgtatcataagtaggctaagcacccaacgccttgccatattgctatggtaggttttcaaatactcgcccccgaaccgg

SEQ ID NO: 592960 - DNA, 527 bp, Homo sapiens
tccactagtgtaggcatcctacatgtagtcttccctgcttaacttctccaacaaagatctttatgattatggagattatatcagaccaaggaggccaatcaagggttgcaggtagaaataggatttgactttgagtgttacagagggaaagcccagtttcctgtgaagcactagctaatattgctttctaagtcaaaactttagtgtaagttaaaaaaagcactcaagggtaactccctgccacaaacgttgggcacacagccagggcactgtgctattagcctcggggtgagcccagattcccagaacatgcaagtcagcatttttcatccaacgatagaggtgtcctgctgaaatctaaaatagaagaaacaggtctaccatctctgcaagcaaggatgttaattagtttttttttttccccagaagaatgttttcatctttcataaagcattatggtcaccagataaatgtaatcatttataatcataaagtacataagctaaggtctatatgccttttttttc

SEQ ID NO: 592961 - DNA, 905 bp, Homo sapiens
cgcagtggctcacacctataatcccagcaccttgggaggccgaggcaggtggatcacgaggtaaggagctcaagaccatcctggcaacatagtgaaaccccatctctactaaaaatacaaaaattagctgatgtggtgacaggcacctgtaatcccagctatgtgggaggctgaggcaagagaatcgcttgaacccaggagtcggagtttgcagtgagccgagatcgcgccagtgcactccagcctgggcaacacagggagactgtgaaagaagaaagaacagaaaagaaaccaaaggaaagaaagagacagagagagagacacagaaacgaacgacgagagagaaagacagaacagagaagacgataaagacagaacagagagacgacaaagacgaaccgagagacgagaagaggaagaggaggacagacggaacgaagagcacagacggaaagaccgacgaacgaccgacaagacatagaaaagaactttcaagttaatgaaatataattcctgagttttgctaaactaagcatttgtcaggcccgtgtaggcgtgcccttcaacacagtgcccagcaatcagtgttctgctctactgcagccccaaggctggagcaaattcctgtagtgctgcctagcatggcatcctttttactgaccaccaaaaacagggcgattgcaagacaggtctattctagcactgtttattcgaatcttggaatcctgtttggaatggctattgcactacaagtccactaaaatgttttagtgctggcatccctcagaagtctttttaaaagaccatcccctaggggaaatgacgggttctgaacaaacggcacatgttgacaagcgccgtccaaccgtgggccactggttctatcagacgcgacggctcgcgga

SEQ ID NO: 592962 - DNA, 373 bp, Homo sapiens
  misc_feature (242)..(242): n is a, c, g, or t
  misc_feature (275)..(275): n is a, c, g, or t
aaaaaatacatggaacacatatattcacttcacccacagtatggcactttgggtccaatacagtagtcgctttaagtttaaaaattctgaatattatagttcacctcttctcttcttttaagacgcttacgcatcttttcggcactggtttctattttcttggttttccgcttttctccctttacagcttgtttttctcttaattccaaagatttcttttagaacgcagatatcgaaaaaanccacgcgttaaatatagcagaatatataaaccncagtattcaaaagaccacccacaacgagaaccccattttagtaaaccaatctccccatagagccagcattacacagtatttttttaacataaaaaact

SEQ ID NO: 592963 - DNA, 290 bp, Homo sapiens
cacgaggccgaaggttacatttccacccttcctggttccagtgtggtgttccactggcctcggaatgactatgatcagctattgtgtgtcagactgacggacgttcccaaatgaatttggtctgtcggatttgaactcaacacaaataattccttccataacaacatgagggataccttcagaaacagcatcttcctacaagtggtaattactctccgaggagctatgtatatgatctcatttagtgacacatatcagttacctcctcctttccgaattgacaacttttc

SEQ ID NO: 592964 - DNA, 253 bp, Homo sapiens
gtggaggatcaggcgtcgcctacaaaggagtggtccctatctagccccaagtctggagcagaaagggcaggtccaatctggcccaagtgacattgttacgatcctgtacccacccccaatcactgctgctatgccaggatgcctcttacacagtacccatgtggcagcagaagtggcagaggcagacgtggacttatagtagatagcagtacagatacatggacacaatcatggacaaacagctcgaggaccc

SEQ ID NO: 592965 - DNA, 271 bp, Homo sapiens
aaacacacacttctccctccgtggccaggacttgtagtaataatcttgaccactacggtaagaagcatactatggtaagggccagtgtggtggctcacgcctgtaatctcaacaccttgggaggtcaaggctggtggaccacctgaggtcaggagctcgagaccagcctggccaacatggtgagaccccccccaacacacccccaccatctgcactaaaagtacaaaaatcagcctggcatgacggcaggtgcctgtaattccagctactt

SEQ ID NO: 592966 - DNA, 128 bp, Homo sapiens
gaactccgcggctgagtaaagcttcggtatcactcacatcagcgcagtcctgctccgaccgaactttccatagtgctcagatcacctgactccttgctctagtgagcctccataacacatcacgccag

SEQ ID NO: 592967 - DNA, 490 bp, Homo sapiens
gaggatgtcgtagcggatcaaataatagaggtcattgctgttctccgtcgctcaaaggctggctgcgcacctagcgcagacaccgatatctgtcgaaacgtaccaagggcctggaaaattacaggctggccacgggcgccgccaatgcacgcccgaacatctcagccacctggtcgacttcgccagcggtgatcaccagcggtggcaggaaacgcaccacactgccatggcgcccgcccagttccaggatcagcccgcgcttgaggcattcgcgctgcaccagcggcgccaactggcgatgcacaggtgggtggccctgactatcaggcgtgccaagtcgggtctaccagctcaaccccccagcatcagcccacgcccaaggatataccccaggtgcgggaagtcgcgctgcaggatgcgcaggtgttcgcccaggcgctcggccatggtcgccgcaatggcctgccaggtcgtgatccgcagggacccc

SEQ ID NO: 592968 - DNA, 1196 bp, Homo sapiens
  misc_feature (123)..(123): n is a, c, g, or t
  misc_feature (198)..(198): n is a, c, g, or t
  misc_feature (246)..(246): n is a, c, g, or t
  misc_feature (300)..(300): n is a, c, g, or t
  misc_feature (328)..(328): n is a, c, g, or t
aagctctgtggtttccaaatcatcgaatgctagagctgaagagggcctcagagagcaagactccagtcaaggaagaaaaagccatctcagaaaaaaaaaaaaaaaaaaaaaaaaaaatcagantcctaaaaacatattaagcaggttttatttctaaccttattattttgcaggtgaggaaactgaggcacaacaatnttaagtgacttgctagttaagcaatgaagccagatttgaacctggacnatctgactgcagaatcagtgctcttaaccattgtttcttatttagcttgctacntggcataaggctcttaaagatagtgacntgatgcagggtttctcaggatacaatctatagacagcattggaacagcagatgttgcaaatgagaaagtcaaactgagttaagcacacctccaaacctacaggtgaggcactaagctctgtggtttccaaatcatcgaatgctagagctgaagagggcctcagagagcaagactccagtcaaggaagaaaaagccagaccagaaacaataaaaagaaaacgagcaaacaaaggagtcacaaagaaacagaactgtggcaaatgacgcattagacgaagaccagcaattccacccacagaggagataccagcgggccaagtgtgagtcagaagggactggtgaggacttgcgcaccagtgagcctacagggaggggcctgccatgtggaaacaggagctgtgcctcagctcctgccatgtggaaacagaggcccaccattgccaggttcccaatttttcaaaaaaagccagatattcacattttgtgtgaaaattcctgttcttgaaagttggcaactaattcaaatctgagcttaggggtaaccccagccaggctagccctatcaggacagggacaaaggtgttcctgtttttggctgtatccccatatgtctggcatatggactttcaataaatatctgttgaatgaattaactaaaatgattaaaatacaacttaaatgtagttcaaaagataaggcttcctgacagaatagcaaaatttgacagtcaccccaaaccctgggctttgtgaaatcccaaattgctgtggaacctggctgaagaaggaggacttcgtaaggagagatggagaaagaagtttaactggagcttaaaaataaaatggctcaggagccctcatatacaacc

SEQ ID NO: 592969 - DNA, 981 bp, Homo sapiens
ggagcaacgcgtaagctcccacgtcgaccgaataccgctcacggctccgactggcacagcaccaccgatcgtgataggttgacaggccagatcgaatgccacaaagccacgccttcaggcatcagaccgtcgttggatcgcattccatctctattgtctcctctaacaatttcaacgatgcgccttgttctaccggacagggggcctgagccacgcctctgacgtaggtcctttaccatcagcacaagcagcccgaagtgaccaacccatgtgaccgcaagaaatgcgagtggctctgcctgctgagccccagtgggcctgtctgcacctgtcccaatgggaagcggctggacaacggcacatgcgtgcctgtgccctctccaacgccccccccagatgctccccggcctaggaaccttgtaaccttgcaagtagcttcaaacggtaggcagctagtttcctcaaatagcacggaagggcagcccaaagtagccgctgccaaccccgctacacaggagtagacaaagttgtgaaactaggaccagttgcttgggaagcactagtccgcaatagggggcacctgtgctagcctccccctctaggcatagcccacggtagccgatagcccacggggcttcacagggcccaaatgcacccagcaaagtgtagtagcgggctactggtgccaacaacagcactgcactagtcaacagcggcaaccagcccagtagcaatagctacccggctctgagcaacgctgcagacccggagtgcctggcacctgtgaaaccttctggctgccaaagctgtagaaggtccgaaatgcgggccgccaccttcaggaccggggcggacccgtcaccgcgccaagtccggggcccccacgcggcccccgccgagcgggcccacacgcccgcacacagtctccaaaaagcgggcccagcgggaaccacaaaccccccgcggaggaaacacggcacc

SEQ ID NO: 592970 - DNA, 877 bp, Homo sapiens
ggcaccggggactcccccggaagggcgcccccagggggccccgaaaaaggccccccggggagacgacacgatatgcgcgaaaagccaaagattctctggcagatcaataagcagaacccggggaacggggccttatgacgagcgcaacgaagggggagaacccgcgtccaccaccgatgattccgggtcggcccccaacgttccgagaagagtcgtaggatctaaaaaacgaccccgaacccggggtcaacgtcggagcacgggctaacagggggtacagaaaaaaaaaccggggccaacggggtggagaaccacgggcaacacccaggcggtggcttttccaggggggaacactattaacacacgaccggggatgtcattggaagacaatatgaaggccgacgccggcaaggcacagataggcaggagagcccccctcgattgtagaagagcgcccgatcaggagggagggccagaatatactgcgcgcacccagctcgcgccgcagaagacttgtgagatacacccgtgtaccggccgctcctccccagagaggaggaccatcacccctccagaggaatagcgtggaaagtggcggccaacataagagaacagttacagtagagagaccaagagggcgccaaccccctcgcgaacaagggtggaaccaccgccgcgagacaagtcgtcggcccccagggatccaccctcctccgggcaggcgaacccccccacgcgtgccagcaggcaaccgggggggcacaaggcaaccatcttcgaactaggtgcccaggtcaagaagacgccacccatgcttgcaaacagccgcgcggcaggccccaaaaacaaaacacccgcaaattcttcccacatgaca

SEQ ID NO: 592971 - DNA, 109 bp, Homo sapiens
  misc_feature (29)..(29): n is a, c, g, or t
  misc_feature (79)..(79): n is a, c, g, or t
gaaccaaccggttgtttggtgaccctacnccagagcctcccccggcccacagagcacagccctccttacagcctagaancaatgacagatctcgtagccgtttgggatg

SEQ ID NO: 592972 - DNA, 127 bp, Homo sapiens
gtaatttcattatcaaattcatttaaaacatgaattacagtacagcaagagaagtgacagcataaagtcttatataattcatgttttaaatgaatttgataatgaaattatactattatcattcttg

SEQ ID NO: 592973 - DNA, 117 bp, Homo sapiens
tcgtgctcggccccccattgtctaaataaattggatccattgtgctattttcaggttgcaatctataacgatttttttctttgtagaatcgtttaactgtagcctcatcatcttctg

SEQ ID NO: 592974 - DNA, 1376 bp, Homo sapiens
tgggtctctctgaccagcaccaggggggtgggcaagaaacaagcgcctttacgaaagggggcaaaagagggagccaagaagaagggtggtttgatccattttctaagaaaagaatgtggtatgatggtgaaagcaccgtgctagtgtttcaatataagaaatattgtggaaaagacgcctgcgttcaccgagaacccaggggaaccaaaagtggcattctgagtggtcctcagagggtcggtggtgttggaaggtgagctctgggcgtgattgtgccacgaaagtgattgaagttgtgccattttagaaaaaattctcaaagcgtgaatatcactgtggaagaattgttctcgaggggttaaacaagcgtgcgcgtgaacctataaacttctcacaaggagccatgtgggaactctttattaccgcgtgtgacaccacaacctgtggtgtttctccccaggtggggttcaacacaaaacagagtgggcccgagacaccacaagtgatactgtgcgagagaccctcccaccgtgtgctgaaagtgtctcgaaagaaaacttcacgcggaagggggggataacaactggggcctctgcggactgcgtggagtcccgtgagagagtgggggatacttattacactactaaacaaaaccaacacgcggcaaacacacaacctccaacagaatatcacggggggaaaagagaacccctctccttattatgtcgcctacaaaggccaagccacaaaaccagggggctcccccggcccaaaaaactccacgggggacacaagaacacagacgtcggaccggcgggaaacacctccatatgggaccccggagaaaaaaggtgtgcgccaagcaccacaatattgggatctttgggcacacagacaaaccgtgcgtggtacacaataaaaattttggtggattctcccccgggaacagcggtctctttgggcgccacccagcagacccttttcaccaacaccagggcggcttgggcccaaaatcccttaatataaaatccccttctccccatgtggaacgggccccaccccgggtcagacaacacaccatggcacaacacctccgcgctgcaacagaaaccccccaaacatgcctgcggacctcgcggggacacacaggccccacggtggagggctacccgggggggcgaaaaggggcacagcaaagaccctcggggcacaaaggccccagtggtggggcacccggagaacacgggggggaccaaacaaggtctgtgaacacacaacgcgtcgtccgtgtcatttatttgtacaccccccagcggctcgcaacaagaaacaccgctgcggtcacaacgggggccaacacacactccacacacatg

SEQ ID NO: 592975 - DNA, 287 bp, Homo sapiens
accttgcctgatgatgaagacgatggtgctgctggagcgtgtcctgctgctatacatgtttagtgggggtgatgctgctgccctggagcgccaagtctacatggaacgctaccaatgccatatgcatggtctggtgcccatcaagacttgtccctttgaggcctgcacacccctcctcatcagcctgtccaccctcatatacaatggtgccctgcgtgagtgtctgtgatgtgggttgatggggcttatgtggggacccaacctgacttggccaacccttctcccac

SEQ ID NO: 592976 - DNA, 260 bp, Homo sapiens
  misc_feature (13)..(13): n is a, c, g, or t
  misc_feature (15)..(15): n is a, c, g, or t
caaataaaacaantnttgtaaagctacaatagttatataccaaagcaatacctattacatgctttacacaatcccatgaaaaaataatttaatagctcctaatccctgatgcaaggcacttcaaagcacccgcacaaaactccatgaaacaacatacaatacatcatttaaataacataaacgactttcacacacttgacctaggaaaaaataaaatccatacaaccacagctaaaaacatgttaagattcacaataaga

SEQ ID NO: 592977 - DNA, 371 bp, Homo sapiens
accaatcctcccacctcagcctcctgagtatctgggactacaggggcacatcaccacgcctactttttgtattttttgtagactcagggtttactatgttgtcaggctagtcttgaactcctgacctcaggtgatctgcccacctcagcctcccacagtgctgggattacaagcatgagccactgcgcccagccgggattctacatttcttttttttttttcccttttttggtgttttgggacagagattacttttgttgccaggctggggagcgaggctgatcttggatcacttgaaccctcccagtcgacgcggacggaaattattattattagtctgcccggggaattcggaccgggacccggggggg

SEQ ID NO: 592978 - DNA, 390 bp, Homo sapiens
  misc_feature (374)..(374): n is a, c, g, or t
gactagagttggatggcgagttccgtacggatgtagcaggataatccgctatctgaggcctggctactctgtactgagccactatagggcacgaggactcaagaccagacctgggaggagactaccgctctgtcgagaagctttacctcgctgaccctatgaaggctcgcagcattctgagagataggcatactgatgggaacttgagtgtatccagatcagacgagatagtatgtattgatgattcaaccagacgatgctgaagatgacaagaagactgacatgttccacagtcatgtaaggcgactgatggtagccaaggctgcccgcaatgagaccatggctgagtgatatggttgaaccgaacactttgncgtgctctcatggcgt

SEQ ID NO: 592979 - DNA, 263 bp, Homo sapiens
agaggccgagaaaatatatcccatagttgctgagtcaattcccagttcatgagacattggcgttgctgccattgagagagttggacgaccaccgtaattaaaagccgtgaccaaaaaaatcatcgcaagaatgtagtcgcgagtttttggtatgcttggctctttgctgagtcacttacagcaatattagtttgcagattatccatatacaaactctttttaataatcgacctatttgcatatccgtgaaataggtgacgtca

SEQ ID NO: 592980 - DNA, 244 bp, Homo sapiens
ttttttttgggggggggggcccccccccaaagggggggttttttcaaaccacgggggggggtttggtcccctttttaaaaaaacccaaagcccctggccccctttttttttctttggttctccctttaaaacccaaaaaggggcccctccccccttttaaaaaggggggggaaaaaggcccctaaaaaaaaaaagggttttcttttggtttgggttttaacccgggaaatttaagggttcccca

SEQ ID NO: 592981 - DNA, 125 bp, Homo sapiens
tgtctcatgctgccttgctgttcgtgccctgtcccaggtgtctgtgttccattttgttgcggctggtgcctgggctttgtcctgggagcactgtcttggagctcatatgtctcctatgcttgtct

SEQ ID NO: 592982 - DNA, 175 bp, Homo sapiens
gtgaagacaggcacccatggattataaacgcacacgttatattctctgtatgctgagtacggagcgaaaacgatttattttggcggctgggagtatgccagtacaattctcaagacattaaagaagaacacgcaagcggttctgcacgcgtgccgggtttattatgcatgtgtcg

SEQ ID NO: 592983 - DNA, 193 bp, Homo sapiens
agaaccgaagcctgcagagaggccattctgacaggctgggaaatgtagcctaccgccagaagctagaagcaagcacttcctcctaaccgagtttttgaaagactaagggaaagagaatagagaagggatattcccatctaccggggaaaagatgcgcagtaacaaaccatctagggagacagccttctaacag

SEQ ID NO: 592984 - DNA, 132 bp, Homo sapiens
aactgggtcaatatcaaggatgccaatggtgcctgtggggccaggcctggcacactgctctgaatcattgaggaatttcagccgtagcacgagtggctcctgcggggagtccggggctgtcggagctgctga

SEQ ID NO: 592985 - DNA, 370 bp, Homo sapiens
cggtagtctcagctattcaggaggctgaagtgggagaccacttgagcccagaagattcagtgagttccctccactccatgatggcaccactgcactcaaacctgggtaacagagtgagaccctgtctcaaaaaaaagagatgttgaagaaataatttctggtatagtttgtatatttgtccccaccaaaatctcatgttcaattgtaatcctcaatgttggaggtgaggtttggtgggaggtgattggatcatgaggacagatccctcatgaatggcttgggccatccccttgtgagaagtgagctctcactctgagttcacaccagatttggtgatttaatgtgtgtggcacctccccctcactctcac

SEQ ID NO: 592986 - DNA, 292 bp, Homo sapiens
gatgactcttgttttagccgcagttgattggcttcggccgggaattgcactggcgtgctgcacagcgcctgatagcgcgcagcataggcgggtgcgtaaaattcgatgctaaggcgttctgcctgtatcgccatgccggccagatcggcaagttgcgcaagccagccgtcaagcagtgaatcgaccacgaagcgtttgtaggcgttgcaggcactgatggaatagaagcgcaaccaagcgcccttgtcatcttacacgaagctggaacggccacgttagttgactgcgtaca

SEQ ID NO: 592987 - DNA, 661 bp, Homo sapiens
cacgcgtcgccacgcgtccgagagaacactaagaggtgaacatgtatgagtgtgtgcgacgcgtgtgagtgtgcactgtgtgtgtgtgtgcaaaggtccagtacaccccggtcctcgcagcccgcaaggggtgtttggcgccttgccctgacatccagcaccactctccccctgagccatgtgtgggggtcgatcatgaatgtccgaagagtggcctttatcccgtagccctgcgccccctttctgtgcgctggatggagtgagacaggtcagaggccccccaccctctgccagcccctgcatgcaaatgactactgtacctggacagtctcctcttctctagaagtctatctatattgtcattctgataacacgtctagcccctgcccttattgggggacagatggtccctgtcctgcggggtgggccctggcaggaaaccatctgcctgatagaaccatggttcctagcccggtctagcgctagtcactctagagcgggccattcacagtgtcttcgacgtcgagtttatcaatataaaaatccgttgccgttaaccaatagacaaaagccacctctgcgtctgatccgtgcctaatcaacagcaggcctacttctcctatctctcccagtctagcgtgctaggatgactatactactg

SEQ ID NO: 592988 - DNA, 744 bp, Homo sapiens
ttctagcggctggatatacaatgatgaataggtctggctactaccttcatggagctcagccttattgaatagatacataagcagctgttctccctggactaggttagatgcccttcctctgtggctcttccatactttgtttaccgatcagcatatctgttgcattgagattacttgtgaattgcctcttcctttagaagctatgctctttcaggacagagcccgtgccctgtgctccataatatccccagctctggctcagtgtcagactcacactgactgctcaataatctttgttgaatgagcaaatgcagtgtgctacatgctattatcaactcttgggcacagcatcatgaaagtgaagagctatcagccgggcgtggtggttcacgcctgtaatcccagcactttgggaggctgaggcaggagaatggcttgaacctgggacgtagaggttgcaatgagccaagattgcgccattgcactccagcctgggcaacagagtcagactccgtctcagaaaaaagtaaagagctatcaaattagttgggtttaatcccatgaatttgcttcctgttgcaaattaatttattccttaaaaacaaaaaatagctttgttccaaaggtctcagttgaaaaattccagcatattaaatatccaaacttgccagaatttggataattttcagcagtaacaaattgagatgtaataaaatgatctaaattaatattttaaagttcaaa

SEQ ID NO: 592989 - DNA, 166 bp, Homo sapiens
  misc_feature (52)..(52): n is a, c, g, or t
ggtctgggtaggcatgtgttagtcaggggtgagatgagtgtgaggcgtattnatacatagcgctagtttaagagtactgcggcaagtactattgaaccagcgatgggggcttcgacatgggctttaaggagttataaggtgggagtccggtaaagagggtatcttt

SEQ ID NO: 592990 - DNA, 157 bp, Homo sapiens
agtaatcgatataccccgatcatcctcaccacctcttcaggtttccttagtacttctatataaactgtgtatccttcgtactttttctgtctcctcatcgactggtcaatagctgcccaatcatccaatccagcatcctcagtatcttcttcttctt

SEQ ID NO: 592991 - DNA, 526 bp, Homo sapiens
  misc_feature (7)..(7): n is a, c, g, or t
  misc_feature (34)..(34): n is a, c, g, or t
  misc_feature (57)..(57): n is a, c, g, or t
  misc_feature (80)..(80): n is a, c, g, or t
  misc_feature (83)..(83): n is a, c, g, or t
  misc_feature (516)..(516): n is a, c, g, or t
aaaaccncctaagggcaaatcaaataccccaacncctcacttaaaaaactgtctgangaaaattcaaggtaaagtgtgcnacngggcctttcccggctcctctctcccagtcatttccctcgtacccagcacaggcattccagaacaagttaccccactgtagaggttgggccttcgggtgttgctgtggacttacagcatatatctgtgttatgtttcagggatgtttaaaagcatgttaaaaatatgtcccaatatttctcttttcctcctagcttattccaagtctcaagagcagctacactgctcagtatcagttcagagaccacaggacagaggtaaacccagcccagccacccccagctgatcctgcagggcactgggaagccaccaaggtcattagaataagtacaggttttaggtcgggtgcagtggctcgtgcctgtaatcccagcactttgagaggccaaggcgggtggattacccaagagtttgagaccagcctggcaaatcgtngtaaaatccc

SEQ ID NO: 592992 - DNA, 272 bp, Homo sapiens
actctatggaatcgggtcgaggcgccccctcgcgtggtcccctggaatgtgacgctcttctcgctgctggtggccgcctcctgcctggagatagtactgtgtgggatccagctggtgaacgcgaccattggtgtcttctgcggcgattgcaggaaaaaacaggacacccctcactgaggctccactgaccgccggttacacctgctccttcctggacgcctacctggctcgctcactcccttgctcgctagaataaactgctttgcgctctc

SEQ ID NO: 592993 - DNA, 371 bp, Homo sapiens
tcggcccgtctgagctgtgactaaagtctcattctcatgtctctctgggctgataaactttgcatacctcacattcctcatactgctgagctatttttttttctcttcataggaccgagtaggttttttttgttttgttttgttttgttttgagacggagtcatccaggctggagtgcagtggcgtgatctcggctcactgcaacctccacctcctgggttcaagccattcttgtgcctcagtctcctgagtagctgggattataggtgcccactaccacactcggctaatttttgtatttttagtagagatgaggtttcgccgtgttggccaggctggtctcaaactcctgacctctggtaatccgcccg

SEQ ID NO: 592994 - DNA, 1054 bp, Homo sapiens
aattccttgcaggatcgctacggttcctactgatccgagctctgtgactcaggcttacgatgcgtgacggcaaccagaactccacagttcccaggctggcggatgcttcgcctatgtggaagctcggggaggatttgttacttcgtatagtagtaggtagtagtgtgtggggtggcctaccgcacggcgctcacatcctgtgcagcgcgagaataggtcagctaccagcccattgtacctctgagctgtaggcactgcagccctatatatacaccctcatcacaccactcctccgctgtgtcagactcttgatccttactgctcctgcaccccacagctagctagctcactatatacctgccatactcgggcaaacggggcgttcccccaaccgaagcgcctccacccactagggctccccagcactatctccccagacagtcaccggcaacagcccgcgcaacggccaccacagcgctcactactcgcccggcctctacaggcgtaccctacaccaagctcacaggcaggccctccggcgcgcccacaaatccctctatgacaacccaacacggagaaaagagccacagacaaacgcgaagctccacggtcgccgcgaccccacgtacctgatggcgcggacaaaccacgccaccgaccggacagttgccaacctacgagccctacatcggctacgccggaccagcacaaccagggaacctggcgagcgacacacggccacaatgcacctctcgctcacgagcagtctcggccagaagcacacgacaccaagacacaagacgcggaacacacatgcgcaccgcagcccacggctgcgaactagtcacaccccccccttcccatcggggacccaccccggcacccgaacccccgcgccctcaaccccccccggccctgccgcgccccgcgcgccaccggcgcggcacaccagggcccccccctgccacccacagggtcgcgccaggccacgccctacggggagggtatgagagccacgcacgcgacacaggacacagacaccccgaccgcagag

SEQ ID NO: 592995 - DNA, 261 bp, Homo sapiens
  misc_feature (63)..(65): n is a, c, g, or t
tttaaaactgcattttgttttttttctgtgaaactacacaagtttacaagtgaggagagaacnnngcgccatgctcccacccccccacccatcacacttccaacctgtcccagtctgcccggatctttaatgggaggggttccactctgacagtcttgtaaaatctgagatgttgagggatcagatggtagctagtcaggagaggatggacagtgtgatgttactttcccacatctgtttgcactctcttcctacatgatt

SEQ ID NO: 592996 - DNA, 648 bp, Homo sapiens
  misc_feature (141)..(141): n is a, c, g, or t
  misc_feature (146)..(146): n is a, c, g, or t
  misc_feature (162)..(162): n is a, c, g, or t
  misc_feature (213)..(213): n is a, c, g, or t
  misc_feature (216)..(216): n is a, c, g, or t
  misc_feature (226)..(226): n is a, c, g, or t
  misc_feature (258)..(258): n is a, c, g, or t
  misc_feature (280)..(280): n is a, c, g, or t
  misc_feature (317)..(317): n is a, c, g, or t
  misc_feature (352)..(352): n is a, c, g, or t
  misc_feature (377)..(377): n is a, c, g, or t
  misc_feature (393)..(393): n is a, c, g, or t
  misc_feature (398)..(398): n is a, c, g, or t
  misc_feature (471)..(471): n is a, c, g, or t
  misc_feature (491)..(491): n is a, c, g, or t
  misc_feature (540)..(540): n is a, c, g, or t
  misc_feature (545)..(545): n is a, c, g, or t
  misc_feature (562)..(562): n is a, c, g, or t
tgggtcatttcaaaaaaaaatgtaaggaaaggggcagaggcataaatcaaaacggagcaaaccctcaggctcgggcaatgagacggggtgtaggcagaggcctgtggggtgaggggtgagtgcgtctagaggaaatgtacngtttngcagataataagtatngatcagacatgcatttttacctctgctgtgggattttagtctcattacttngtngatctacttngtagttaacctagagaagttaacacagccatngctacagagctttctgccactngagttccagaattccagaatccagtttcctagggatngtggggagtaaaaagaggtatagggtatggtcccngtatgggagcaatacagtctttatngagtagtgtctatatngtctngtttactcaagtatttcatatatacattaaaaaaaccgacaataaaaatgaacatatgaaaacttccttattngtgatacatgagtaaatgtngatgagattagagaaggggtccaaaaaggtttctctgaggatatgagtngagtngcccatcaggatggatngggtagtggatgctgatgtgggcaacactggaatagacctcagatgctgcatgatgtgcctgtgtaacacagttgaaatgtccaca

SEQ ID NO: 592997 - DNA, 304 bp, Homo sapiens
gaattgccaggctcagtgccccggctcaagtcaggggtagggtttctagggtcagggatcctttcattcctggccctcagggcattggtctattcccagtctagcagtaccggtcttaggaggtacagagtttggtcagagcttttgggcaaagctaccctccaggtctgtggacatggttatatgccggaaggggtcagggcccaggatggccccatccacttgtttatttgtactgcacctataaatacctttagcattcatgacaaaattaatttttatgaatattatatttcagtctaat

SEQ ID NO: 592998 - DNA, 429 bp, Homo sapiens
cagagtatctctgagggaggtgactaagaagctgaactccagaggcaagacaaaggaattgagtgagcagtatcattctcttaactctgcgagtagggagtctgtgaaggttaatgtatgctctttttgcgagggagaggatccctttatatttgattgtcgtggggatgtgtggccgagagtagagtcagcagtcccgggtgtataggctttcaggtgcattatggttgtgatctgaagaccttggtcacctctgtggtaggtgtcatgggatgctggctacgtgagtgaaggggctcctgtgggttcgtagaagcgagggtgagagaggatggggtggggtgccggtttgacgggagagagctctcaagggagaattttggtacccaacttggaaggtggaaaattgccaagtacagcttcgtgtta

SEQ ID NO: 592999 - DNA, 701 bp, Homo sapiens
  misc_feature (238)..(238): n is a, c, g, or t
  misc_feature (379)..(379): n is a, c, g, or t
  misc_feature (426)..(426): n is a, c, g, or t
  misc_feature (436)..(436): n is a, c, g, or t
  misc_feature (438)..(439): n is a, c, g, or t
  misc_feature (441)..(441): n is a, c, g, or t
  misc_feature (447)..(447): n is a, c, g, or t
  misc_feature (449)..(451): n is a, c, g, or t
  misc_feature (453)..(453): n is a, c, g, or t
  misc_feature (474)..(474): n is a, c, g, or t
  misc_feature (483)..(484): n is a, c, g, or t
  misc_feature (492)..(492): n is a, c, g, or t
  misc_feature (494)..(494): n is a, c, g, or t
  misc_feature (496)..(496): n is a, c, g, or t
  misc_feature (504)..(504): n is a, c, g, or t
  misc_feature (506)..(506): n is a, c, g, or t
  misc_feature (510)..(510): n is a, c, g, or t
  misc_feature (512)..(512): n is a, c, g, or t
  misc_feature (518)..(518): n is a, c, g, or t
  misc_feature (525)..(525): n is a, c, g, or t
  misc_feature (541)..(541): n is a, c, g, or t
  misc_feature (544)..(545): n is a, c, g, or t
  misc_feature (548)..(548): n is a, c, g, or t
  misc_feature (557)..(557): n is a, c, g, or t
  misc_feature (563)..(563): n is a, c, g, or t
  misc_feature (571)..(571): n is a, c, g, or t
gtgtgactcgcgggctcagctggtccggccgtagcacctccgcgccgtcgccatgtcgcggtttttcaccaccggttcggacagcgagtccgagtcgtccttgtccggggaggagctcgtcaccaaacctgtcggaggcaactatggcaaacagccattgttgctgagcgaggatgaagaagataccaagagagttgtccgcagtgccaaggacaagaggtttgaggagctgaccaancttatccggaccatccgtaatgccatgaacgattcgtgatgtcaccaagtgcctggaagagtttgagctcctgggaaaagcatatgggaaggccaaaagcattgtggacaaacgaaggtgtcccccggttctatatccgcnatcctggctgacctagaggactatcttaatgagctttgggaagatanggaagggaanannangatgancnnnancaatgccaaggctctgagcancttgcgtcnnaagatccnanantacaaccntnattncnagtccnatatcanaagctacaagcagaanccnnagnagtctgcgnatgaanatgctganaaaaatgaggaggattcagaaggctcttcagatgaggatgaggatgaggacggagtcagtgtggaattttcttgaaaagaaatcagaagtccttctggggagagtcgaagttctcaaagattggatgata

SEQ ID NO: 593000 - DNA, 184 bp, Homo sapiens
gggacctgctatctggcaagattttaagaaaccgaagaaagaaaaatgagaaattcaagattaaaaaatggactgggcatggtagcatgcacctgtagtcccagctacttggttagctgaggcagggttgcttgaacccaagagttggaggccgcagtgtgctataactgccctattagaactg

SEQ ID NO: 593001 - DNA, 831 bp, Homo sapiens
cctttatgttttttttttacagacaagttattaactttttataacccgtgggcccattttgggcctgtggaaaggtggggaggtgggccagggggcacagggccacaggattagcaccccacaattaacttagtggggagcatgatcaccatcacgcccaggctctgcgtgggtcccggggccacagggtaaccgcgccggtggcgggtgtgcgacggtcacacggtggagaagacgcaggggcgaaaagacgcctagagagcagccaacgactggggggccaaaacaagaagccgggggagctgacgggaaaacacgggacgcgggaccccagagagcaaaacggggctagtctccgcagggggggcccaaagacaggggccatgaggcccgtgacccaatggggcatcgggggacctccaagagacaggccgggacaagctgtatggccccaaacgcggggccaagcgcagccggggtgccacaacgggggacacagcgggaggggtgacaaagagggggaaacaccccacagctccccacctcgaggagcaaagaagacggggtacatcacaaggcctggcgcgaaccccggaggcgcaccggccacctacccccaattcccgggctgcgcaccacggaggaagggaaagagtgggcccaggcgagacccttccgagggaccgccacagaagcagccgagcaacgcacagtgggaaaggggttccccgaaatgtcatagaggataggccggcatgcagcaagcgcacacacctgcacacgggggctcggagagggcgggacagagggcacactcagagggaccaatcg

SEQ ID NO: 593002 - DNA, 845 bp, Homo sapiens
gagcagtgcggtggtcccgagggtcggtctctgcgttcaacagtgttgggaactggaacagatccagtggtactctcttccagcctccgacgccctccgattgtcctctcggacgttggcgacctccgggacccagtcattctgcggccgaatctcctgctgctgggacctgacagcaacgtgttgtgtgttgggttagcatccgttcttggcaagcaatgcatgagctcccaggattctgtcatgaagttattcgcacggcgaggtgaacggcaggcctgtctagacatgcctgtgtcaaattttgtagccgtgcaggcctcctctgactaacactacacttctgcttcgtgggggctgtgctattttccggacccggcgggatagatgtaggcgcgcacctgagtaaagggcggtgggaggccaattattctgtcccctggcggaaagcgtgggcctgtacggtaagaaaaaacccgacgggtaagggggccttaacgaagcgccgttccgtccccttggaaaaggattgcaaaaaaacccagtgttgttgggggcaggccccggggcatctctctttcccaggacaatcttgccacagaaacaggccaggcttggacaggaattgacggtgggggtaaaaaacccccccaaggaacggcctatgggaacacgctttgcccagtggggcccttgggaaggaaaaaaaatgcctggaaacccaagtgccccttttgtagggactccttcatggcccccttgggagtttacttgcgcactgcacggggacccccccaatcttctggtgaactttcccgtggaggaacttcactcttcctaagaaa

SEQ ID NO: 593003 - DNA, 81 bp, Homo sapiens
  misc_feature (30)..(30): n is a, c, g, or t
  misc_feature (45)..(45): n is a, c, g, or t
actggagtcgaaaaggccatcaaaaactcngattactgaaaatcncaaatgtcaccaacaaaaggaatgttgattagagtc

SEQ ID NO: 593004 - DNA, 855 bp, Homo sapiens
ggttgttgaccatatgtatgtcttcttttgagaagttttttggtcatgaaatctatttcgtcccatgtgtgagccaccatgcccagctcaggatacaaaatcaagtgtgcaaaaaccacaagcattcttatacaccaataacaaacaaacagagagccaaatcatgagtgaactcccattcacaattgcttcaaagagaataaaatacccaggaatacaacttacaagggacgtgaaggacctcttcaaggagaactacaaaccactgctcaaggaaataaaagaggatacaaacaaatggaagaacattccctgctcatgggtaggaagaatcaatatcgtgaaaatggccataccgcccaaggtaatttatagattcaatgccatccccatcaagctaccaatgactttcttcacaggaacttggcgaagaactactttaaagcttcatagtggagaccaaaagaaaagaaaaagaaagaacaacaaaaaaacacgtgggggggggcgcaaggggccccgagagaaaagcttttcaagacacccacgggtgggggcgcggggcgcccacacatacggacaaggcaacacgtggccacaagacgggtgtttacatggagaggaaaccgcggggcacagaaacaaggtggtagcggagaaattaccaacaccagaaaatgaaaaaagagaggcgggggggtggaaaacacacgagcagggtgcttagcgagagacaaacccagggagggaggatcacgaggagggcgaagtaaagggggggacactcataaaacgcaggggagacccacaaggggcaggcgcgggaagcataacaaataggcccggcaccgcgga

SEQ ID NO: 593005 - DNA, 772 bp, Homo sapiens
gactgagttccttcgcactcagcccactcgcacccgggtgaataaacaggctttgtagctcacacttagcctgttcaagttggtctcttcaattagatgcgtcgcataacattaggtgccgagagcccgggataggggaaatcctccgggcagacctctccatctatcctgcccggtagccagcgttctcccagtgcaagagacttcccctcgccctcaggacctcagagcagactccgggagcactccgggctctggtctagtggatagtgaaatccaacgaccggatacagggactcctatcttggggagacagccgtatccttcagtgttggtgcaatgcccgggacgcccgccttggccagtttgaccgaggcacacaatgccaggagactccaagtggggacggcgccacatgaggagtcctagatgggtgctcgtttgctagatctcattacatattccacccacagtctttccttgttctatcatgggcaattattcccgacatatccatccctctttcttctgtctggcttgtgtcctcagaaagctcaaacctcttcacttgcagccaatctaacggctaagcgtctaatagtgttctgtaacacgtcctggccccaggtataaattagacaatggcgctcagtggcagaaaacagacttccaatttctctattttgtgggacttagaaaacttctacggcaatgggcaaatgggtctgagggtaccattaatgcaggctttggacataggattttcctagct

SEQ ID NO: 593006 - DNA, 233 bp, Homo sapiens
taccaatctgtgttaagtgtctgtggggaacgagccacaggaagtagtgagcagcctttatgactcctgtctaatcatcacttccaaacattaggaacacgtgggcaaaggccaaggcggccaggaggccagggctccatatggagaatgacactggcaacgggggcaaatatctgagcagccagcctcgggggatcgcttcctgagcatggagtctgtggtctgtctggttt

SEQ ID NO: 593007 - DNA, 1092 bp, Homo sapiens
gtttgtgcactgatgtgtgctggatgcctgtgatgcctgtttacctggatgcctggggcctggcctgtgtgcttgcttcgatgtgccctgagctgtgcatgtgatgctgcatgctgctggatgctgcttatgccatgtgctgcccaatgtctgctgagaatgcttgcctgcctgcgctcttccctgccctggctgcctgcgagccccgtggctgtgtccagttgtgtgtgctgtgtgcactgtgctgtctgctttgcatgtgctgcctgtgcatgcccctttgatgtgtgcatgcctgcattagttgctgcttgctgctacttgtcccctgcatgtgtctgcatgccaagggctgtgctgtggtgctgctgcccatgcccctgtgcccctgtgatgctgccctgcctgcgtgtccccacctccattgggactgccgttcaatggtgtgtgtgcattgatggcctcgggatgctggctttgccctgtgatgtgttgctccgtgcctgcctgcctgcctgccacccccattgactttatgggtgccccgtgccttccaccttggcccctgtgccctggcctgacccctcgccgagcctgctcggaggaacttcctggccagcggaggtccgtctagacaactggatggcttgcccagagaaggatgcctgcctggctgggggaaaccccgaagggttgtggccctgatgtggaaacatgtttgttttttctggtgtgaatgtggcaactgtgggctttgctggctggcctgctaggaacggacacacaaggccccaaaggcacagaaacgcaagcgaggccttgctgggccagagcggtcactgccactttcgacaaaaggcccatgctatgtttgcagaggaggcttaggatgggcccaagcgtttcccatgagtgacaccgggcttacccccgcactttaagcatagagggggagggcgatccgccggtttttggacacgaaccttcaaccagagccgccgcggtacggggttcttggttcaacggacccggggagccacgttgggcgtagggcgaccctttaaccagcagcttgccttttctagggttgtc

SEQ ID NO: 593008 - DNA, 148 bp, Homo sapiens
tgagcggtgttgattctgaatcacagtagaatcctatcgtagatggtgttgatgtactgaatcacagtagaatcctaccgtagatggtgttgatgtactgaatcacagtagaatcctaccgtagaaggtgttgatgtactgaatcaca

SEQ ID NO: 593009 - DNA, 237 bp, Homo sapiens
tgaggatccgtcagcataccagcacggggttaaaggcagcatagcgagtttcagtcacgttatcgtaggacttcgtaacagcccgggaccatccctaccttatcgagcaaacttaaaatagaatccccactatgcacttttaatttctccgacatactcggattctaccctagcatcacacaccgcacaatcccctatctgggccttcttacgagccataacctgcccttacgtcct

SEQ ID NO: 593010 - DNA, 584 bp, Homo sapiens
  misc_feature (175)..(175): n is a, c, g, or t
  misc_feature (240)..(240): n is a, c, g, or t
  misc_feature (242)..(243): n is a, c, g, or t
  misc_feature (253)..(254): n is a, c, g, or t
ctcgcgcgcggtgtggtggcagcaggcgcaccaagcctcgaaatgcagaacgacgccggcgagttcgtggacctgtacgtgccgcggaaatgctccgctagcaatcgcatcatcggtgccaaggaccacggatccatccagatgaacgtggccgaggttgacaaggtcacaaggnaaggtttaatggccagtttaaaacttatgctatctgcgggggccattcgtaggatgggtagtcananngattccattnnccgattggccgataggccagattgtgcgatcgatcgtcaagaggtaaggttgtggggctcacagtttgagtgccatgacgttgagatggtactaggatctgtctctcagaagcgacgatggatcgttaaagcgcttgtgtccgtttttccgcacgtggactctcttcagcgatacatttttggcactcgggcacgcaggaaaatcaaccggagcatttgctttgggcatagttcatttctggtccgattattatattacattattaaagtgggacaattaagcatgaaagaagatacccaaaacccccttatacccgggggcaacgacca

SEQ ID NO: 593011 - DNA, 550 bp, Homo sapiens
gcgcgctcggtacccgcattggagcaacactcatggcctctcagcatgaaagggggccaatagggttggctgtcgtgtgtaccacaccaagctgagatgcagacacccagtaggcgcgaggcaaatgcgtcccataaggaagaggcttgtatatatgagctctttgctccctccctcccactaacttaaaagaattgctctccatctccttaggcaaagttccttggccctttgtcttatgggagtgcacccctccaaggtcatctccagtccatttgcatccaagtctggcatctggagggagagcggtctcatatgctatggtagtaaaggtggactagtatttatgtgtagagaacagtggctgtttgtcaggaaaggtgtgccaaaacaaagagtacggccggccctagaaaatgcatcagaaaaacccatttccccggtgcactcattctgagcttccttccttcattgctgtcattatggctgagaactggactgtgcccagatgacctttcccttccttgccctcatcttgctgccagggtct

SEQ ID NO: 593012 - DNA, 172 bp, Homo sapiens
agagttacctgaacatcaggtgatcggcgtgttacatattcaatgaggagtatgcgctggtcactgacagccagctgatatccgaagaattggatgccaactgcggtggcagcggaaccatcctggcggtttttcacagcatctacggcaagagtgtcgaaggatcgctcat

SEQ ID NO: 593013 - DNA, 122 bp, Homo sapiens
ctgaaggaggtgaggacaaattggggaagggtggctttcattccaaaatccagggatttggggaaaaagaaggaattttatgttttttggggtgggaggggagggtgtgtttttttccccca

SEQ ID NO: 593014 - DNA, 250 bp, Homo sapiens
aagtccgaacgagctgctgagagagccaaggatcatactgtgacgtcaggagcatacacagtagaggacaggtgacatgccaacacagacatccacatatgaacccaacccccagcgacacggaggtggacaggggatccggcatgggtgcatgtcatactatgcaatgacatgaattatgatgtggcccgaatcaccccctggctgtagcgggtgacgcagaatcggaagcaaatgaatgaacgagaaa

SEQ ID NO: 593015 - DNA, 959 bp, Homo sapiens
ttctggggcgttggtgtcccgcggaccgcgcctgtgtacgccaaggtcggggcctatgagcattgtctgttttgcgtgcctctccagttgtggggccggacacccggtcccaacgatgcggcacccttgttgcgcggttatgtgcccccttgccttgggtggtcccccacttccccgccgattggtacggggtgtcaaactgcgttcggtcctgatcttacaggggacctcccagtctcccacgtcttggggcgtccccctggcagtcgtgacctcccccgaaggcgccacttctatgggagaaggagtctgggcctttgaagcagtgttcatcagcggggctacctattttccttagggtgtgggccgcgccatttcctggctctcctccgccctggtggaccaacgtgtcttgttctgcgccgtgctcaccccacagttgccacagcccacggcggaccgcacgggtcagcaacacccgctggtcgctcgcagtcagtgttctccccgggcaacctcagggttgcttgcccattctcgcccaaattaacttccagtgtctttgtagacgcccctcatggtcattgtcccctcagggtccaacacccgtgccccgcccccactgagtgacacactactccacaataagcaccccttcccttctctgtctacaacacattacctcacgcagaccaattacttgcctattagaaccttcccttcaggccaccttccttcgcctctctgatcttaagcacccactattgaagacccactccataaaatctgcgatcataattctgttgattctggcgccgaacaaaaattactgatcaataaattctccttatgacgccccgcactccacctcctctctcttccttcttttaccctcggcgtcgatacaaggcttttctttgtcccacacccaaaggtccaaaaaatcacaacatacgcaa

SEQ ID NO: 593016 - DNA, 230 bp, Homo sapiens
gcctcacggcatctaagtgaggaaaccacaattagtcaacagatcatgcaaatatgtatacatgtagaggtattacaagtgcttttaagaaaagcaggatacgcaggacaccagagtagccagaagattccattttaaatcatttaagcaaaaattaaaatattcatggttgcaacagttcaatgtgatttttgtcgatattccgacagttgacacatgtcagcaccttc

SEQ ID NO: 593017 - DNA, 365 bp, Homo sapiens
gtattcattccctcatgcccctcctaagtgttgactggtgttgaccccactcttatctccgggggtggacaccaactggggaagccactcactcaatccatcatatttccctggccacagtaactgtttcatatataatgacatgttgtctaagtagaatgaatcagaatggatatgaaatagttttagccacatgggtaaatcctggagcttctgggaggcctgaagatggagatactcatggaagcatagcctgctgatgtcaagctgggtggcatgctgacatttggtgaattcccttttggttttggttttaactggtgagaagtgagttgtctttcacaataaagaccctacgtgctaaa

SEQ ID NO: 593018 - DNA, 438 bp, Homo sapiens
cccatttaactgccctaactggcccttgcctaggatggctgaccagcgctgctctcaatgagccagcctctcttttgggggaatcaagcatttgcttcctgtagactacagtaaggaaagggaggagaaatctgatgactcaactggctcatgatgcccattctcggaactatccagagggcataagcttgcagtttgtacgcttagctactaccactgtactaccttaccggggcactttaagggtacaggggcctctgtctctatgcctatatgggacaatcaattctgactgagctaccacattctccgtaggtgaggatgactgttatatgcgtcgctgataacgtgtaatcccacgggtttatactgccctttactcaacctttcctagatacatctgacaatgaatgtcttgattgtgactggctacacttt

SEQ ID NO: 593019 - DNA, 354 bp, Homo sapiens
ggtgcgtaactctaagcgcctgattgcactcatctctgcaatcggtatgtccatcttcctgcaaaactacgtcagcctgaccgaaggttcgcgcgacgtggcgctgccgagcctgtttaacggtcagtgggtggtggggcatagcgaaaacttctctgcctctattaccaccatgcaggcggtgatctggattgttaccttcctcgccatgctggcgctgacgattttcattcgctattcccgcatgggtcgcgcgtgtcgtgcctgcgcggaagatctgaaaatggcgagtctgcttggcattaacaccgaccgggtgattgcgctgacctttgtgattggcgcggcgatggc

SEQ ID NO: 593020 - DNA, 819 bp, Homo sapiens
  misc_feature (15)..(15): n is a, c, g, or t
  misc_feature (21)..(21): n is a, c, g, or t
  misc_feature (23)..(23): n is a, c, g, or t
  misc_feature (497)..(497): n is a, c, g, or t
  misc_feature (563)..(563): n is a, c, g, or t
accaggattatgagnggagtngnttcagcgtcccggtgtggctgtgccgttggtcctgtgcggtcacttagccaagatgcctgaggaaacccagacccaagaccaaccgatggaggaggaggaggttgagacgttcgcctttcaggcagaaattgcccagttgatgtcattgatcatcaatactttctactcgaacaaagagatctttctgagagagctcatttcaaaattcattcagatgcattggacaaaatccggtatgaaagcttgacaggatcccaggtaaagttagactctgggcaaagagctgcatattgaaccttataccgaacaaacaagatcgaactctcactattgtggatactggaattggaatgaccaaggctgacttgatcaataaccttggtactatcgccaagtctgggaccaaagcgttcatggaagctttgcaggctggtgcagatatctctatgattggccagttcggtgttggtttnattattctgcttatttggttgctgagaaagtaactgtgatcacgcaaacataacgatgatgagcangtacgcttgggagtcctcagcagggggatcattcacagtgaggacagacacaggtgaacctatgggtcgtggacacaaaatgttatcctgagcacctgaaagaagaccaaactgagtacttggaggaaacgaagcattacaggagactgtggaaagatgccattctgcagtttattgggatatgccattaactctttattggtggagaacggaccgtgactaaatgaaggtaagtgattgtagaaaggtggataaa

SEQ ID NO: 593021 - DNA, 448 bp, Homo sapiens
aagactccaccatattggtgggtgcagaaaaataaaacatttctctacctcacatactgaaagcccttgggtcaaaagacctgtgtttccattcccatagatcgcaagaatggggcctggcagttagaacaaatgctggacaactgtaacaaagacacccagagtcttgtcgggtgccgtggttcatgcctgtaatcccagcactttgggaggctgaagcgggaggattgctggagcccaggagttcaagaccagcctggccaacatggtgaaaccccatctctactaaaaatataaaaatcagccgggcatggtggcatgtgcctgtaatcccagctactcaggagtctgaggaggagaatcacttgaacctggaggcagaggttgcagtgagtcgaggttgcgctactgcactccagcctggacaacagagggagactctgtctca

SEQ ID NO: 593022 - DNA, 375 bp, Homo sapiens
gcgggtctctagcgaccctttaaacagggagtggagcggcgagtggaggtttgcagtgagctgagagcacgccacttcactccagcctgggagagagagtgagactctgtaaaacaaacaaacaaaaacaaaacaaaacaaaaacctatctctcaccatatataaaaatcaaatcaaaatagattaaagatgaaagacataaatgtaaaacctgaaagtatgaaactactagaagaaaacattggggatatgcttcaggacactggtctgggcaaagattttttgggtaagatctcaaaagcaaaggcaacaaaagctaacatagataagtgggattatatcactcttataacctgctcagccattgcactccgg

SEQ ID NO: 593023 - DNA, 330 bp, Homo sapiens
agagaacaccagtctccacgtcggccaagaggaacaggaccaataccaccagattttgtagacatccatgggagaggcaggcgcaagggcttgtcagtcggacgagataggtggctaggatgcaggtcctgagcctctaatgcagcgtggtaccactggtcattgccatcctatacgggtagactttccactccctgtgaaccgaaggcatgtatagcactatggctccagagatgtaagtcaccgattgccaaccagcaaattggcacaaactgctactagtgtcggggcttgtagcacaattttcttaattgtaatgtgctgacttcc

SEQ ID NO: 593024 - DNA, 393 bp, Homo sapiens
tttttttaaatacttttctttttttgagatgaagttttgctctttcgcccaggttggagtgaagtggcatgatcttggttcactgcaacttccgcactctgggttcaagcgattctcctgcctcagcctccgaagtagctgggattacaagcatgtgccaccacatctggctaatttttgcatttttagtagagatggggtttcaccatgttggacaggctggtcctgacctcttgacctcaggcaatccacctgcctcagcctcccaaagtgctaggattacaggcctgagccgccacaccaggcctctttttttttagacggaatctcactcagtctgccgccactgcaactccagcctgggctacagagatggattcaatcttaaaaaaa

SEQ ID NO: 593025 - DNA, 1435 bp, Homo sapiens
gagacgtccgagtgcgccttgcttcagtcagtctgagcgcgatccgccggagactgccgggggccgaagaagcggcgctaaccagcagaagagagtgtccagatgtgcacgttaggagagcagcaccaagccggacgagctgacaacgaattgcgacccacaggacagcattacagcatgagaacttgagtacgtaccaggcgtgccaagaggatacacgagtccatgggcgcttgggacagtcgtgcgaactatcgtcgatgccgcggctgcacgagtgtcagtaacttgatagtggcaaagaggagtcgatcccatggtaggatactatgaaactcgatactttacagtaaccgtagctctgcgcgtgtcggtaaccagggaactgcatgagtgctagggaactagccttctttggcttcattcgtctgtgaaccactgtcgagccgcagcagaatggcctaatgagttacctaacctgatagtaactttggcactttgaagcacggagaaagacagcgcgtaggtgccatgtcgtgaagctgcgctgtatggtaaagaataggcacgcatctatctgaaaaatatgaaaagacgttatgcttacaagacatacttgctattaacgtacactttatgggcagtattggggccattaagaaattagttctaccattactaggtctaatactacctggggatgccattccccatccttctatgtcgcgggaggaaagataacgtatactttgccttattgcctattcggctggtcacagggaccctgtgagaacaagttgattgcgtaccgaagactcttaccagtctttattgttatgccttacgaattagtgtacatgagggtaagggtaaggatacacgaggtctattagtggataagaattccttaagggcccccgctaaattggttgcctaatatttgagacgtccctttgcaaaatccagtgcttattttattcccaccgattgggtttgaaatcatcaacgggtcgttttccctgtgaggtcaatttctgatggcctctctaaccaagaaaaaaaaacacaaagcacaagaaaataaaacaaccactccgattggcggcaaagttgccataattgaatacacggagggccgtggcacgtggcagcaacacccaacacggctctcactcttgtaacatcgattggggcggcgcccatgacggtgtgctttcaagacagggctgggcacctctggtcgaggcaacaccacgcctatcttcttctgttgcttgtgctcaacccggctgtggctgtgagccaatacctggcgcggacgggatctaccccccccataaaataggggaggcactctgcccaaatacaaacaatttccgcgaacaaaacccccccgggtttaacaccggtgctttgaaaacagcggcccgacaaa

SEQ ID NO: 593026 - DNA, 153 bp, Homo sapiens
tagtggtaactacatgtcgttagcggcagtgctggtgtaggtgggtacattcttcagagggcactagcggttgaggacattccatcttagcggagagttcatgcggaggtgcaatacacatactcacacatgccgtccttggagttaatacat

SEQ ID NO: 593027 - DNA, 907 bp, Homo sapiens
  misc_feature (348)..(348): n is a, c, g, or t
tggagaggcggtaacggaggcactccccctgctgcaccccgccgtttctacggtggctcatgaaaccagttgttgtttcgtcggggtagtgtcgacctgtctgacgggcgtcgcccgagataggacggagtcaaacccgtggtatcaactgaagacgagatgtcaggtgtggaagagtctcagtgccccctttcagtctggactgtgagtctgctgctggtgtagacagtcttggtttctcttttcagggatgtcattttcaacatattgcgggatggtaccatctgctttattaagccccgtaggaagactgccacacctagactgatgcttattagtcatcagcgnttatgttcgctactaacgtcctggtgtgcagctgagttttttagatgtctaggcatatctgtgaaagatgccttaggaaatactgaatcatggggaagtatgtgagactacgagaagatggagaaggttcatttggaaaagccattcttgttaaatctacagaagatggtgacagtgatgttatcaaggaaattaaatctcatgaatgtccagtaagaaagagaagaatcacgagagaagttggggtattggcagcatgaagcattcaagtatgtccagtgtagagaatcgttgcagaaaatgggtctctctacctagtatggatacggggaggaggggactgctgagcgaataaatggtcaaaaggcgccggcaaggcctcatttgtcgcctgccgatttttggccgacgggtcgtggaaagtttccgggggggaatcccaaattttgcgaagggcgaggcccgggatggtgcactaaacggggggacggccccctttcggggcaccaaacaaagggggttactgaccccaccacaaacctcgtgcgaaccagcagct

SEQ ID NO: 593028 - DNA, 119 bp, Homo sapiens
aatgccaactatcagtgctaacataaaaacattttaaaaatgaaggtcaaaaacaattagactggaaaccaaagccttattttcccatagatgagcaaaactgaaaatgaaaggggtcc

SEQ ID NO: 593029 - DNA, 213 bp, Homo sapiens
tgtacctgagcatggagaccacctgctcacactcttctactggagagggagcgagcccccaaatgttccacactgtgtacccaggacccccctactgacctgcctccctgtcgagttcctcctacaactaccacttcaatgggggtcctggctcacttacccccagaaccaccctacagcttcccaggcctattcccaatctagcaggcccta

SEQ ID NO: 593030 - DNA, 623 bp, Homo sapiens
ccggtccctagatattctggcgagtagctgggatacaggctcccaccaccatatctggctaatttttgtatttttagtagaggcaggtttcaccatgttggccaggctggtctcaaactcctgacctcaagtgatccgcccgcctcagcctcccaaggcgttgagattacaggcgtgagccaccgcacccttcctgcttcttctttcttaatacttatttatttctctttactgattgaatgcacccccaatataatgttacagtagccatccttgccttccactggcagtgcttatagtattttataattaaacgtggttgtaacttaaaaaaaagtcttttttagttcttctgtgaatcagctttgttccctttagagattcagtgagtcttctctgtctgcatccaaatgttggttcaaaccttgagcctcacaccctgcctgaggcacccttctctggtttgatgttgaactattgttcaacagtcaactttttggttgtgcttgtttatctggcaacaggtccttcgatcaggacatacagtttactgttgccattgatttcacaggcctatgagagataccctgtcaagggcccctaaaaacccagaaatatcacgg

SEQ ID NO: 593031 - DNA, 223 bp, Homo sapiens
atgcgcagatagggccgcatcctggctgacaggctgaggccctgcaggtctaagaccagaggaatgcacgcaatgcgccgtgaatatgcgcctccagtgccagagagggaggagatcatcaagactttatccaaggaggaagagaccaagaaataaaacctcccactttgtctgtacatactggcctctgtgattacatagatcagccattaaaataaaacaa

SEQ ID NO: 593032 - DNA, 333 bp, Homo sapiens
  misc_feature (112)..(112): n is a, c, g, or t
  misc_feature (259)..(259): n is a, c, g, or t
ttgctgaaattgaatgtcgtgccagagccatcggaacgatgcacgatgttgattttagtgtcgggaagatgtaaccccggattggcgctgatgattgctgcgtcattccacntactgatcttccctaggaaaatatctgcaagcagtgggcctgtcaggcgtagtttgcctggttcgatgttgtctagattgaccaccggcacgacgccacctatggccgatggaaactgccctagaccgcttgggtcagttcgctgcngtcaagttggcttatcagaaagaaccaagatcgattggttggggggcttttgaatttgggggcaattaccaccc

SEQ ID NO: 593033 - DNA, 390 bp, Homo sapiens
  misc_feature (179)..(179): n is a, c, g, or t
ctgggcccgaaattctaagttacgcacacacacacacacacacacacacacacacgagtatgtcagtaagcccgagggttgtacctcgtgtgtgtctaaccaatgtggtctacagtatgaggaggctccagaggtatctcactccttggtgtgcaatttattttccatagacgcagctncacagacactcaagagaaatattttacttgagtggtattaccaatcatattagtgaaaggtgatgtcatctcaagaaacagcgcagagttggaaacagtatgctatatgggtgagggtgaggagaagagggcacgagaatcttatcagcgtgctcaccagatgatacggcacttttccccgcgtaattgagggttgcgggggcatcctcta

SEQ ID NO: 593034 - DNA, 115 bp, Homo sapiens
gcacatgatgaggcgtcttctcagtgtaatgcaacttctgtcctcgcagatgttgaacagaggagcagagaatgcactcggcagacgtgtcatcatagctggtaaccagcttcca

SEQ ID NO: 593035 - DNA, 367 bp, Homo sapiens
tattcaactagcgaatagtgatctgagggcactactgtgacatgacttatgtcattacatgtatgtcgtgactgggatgatcctagggagaacttatggcatattttcacccccacaaaagtcagttaaatattgggacactaaccatccaggtcaagaaaagtcacatgccatagccatggtattgcacatcattcatcttgcattctttgagaataagaagatcagtaaatagttcagaagtgggaagctttgtccaggcctgtgtgtgaacccaaagtctagtttagaaatagaacaagtaagttcattgctatagcataacacaaaatttgcataagtggtggtcagcaaatccttgaatgct

SEQ ID NO: 593036 - DNA, 397 bp, Homo sapiens
ccattggtgctatctgtggttcctggtgtgaggctgatcttttcagccatgtccacaggtggggagggctctggtgggtggcctggcatcagggtttggtcatttcagtgtatcctgtgtgtacagagcctggcgatgcctgccctgtgaacatgacttactagactaggtcccttccccaccctgccactgtccctctcagagaactcaccttgagagacccacacttgttccggtggcggtgctgctgccccacttcctcttggagatgtatctttgggaattggtggcagctcattcttttgattttcctcagtgggcccaaagctttggcccaaggacacagtgcaaggttgtgaatgagactggatatgaaatcagggactatgcttttcca

SEQ ID NO: 593037 - DNA, 584 bp, Homo sapiens
  misc_feature (170)..(170): n is a, c, g, or t
gcctttgggctctggaagccaccaggataattgagagttgtggatagctacttcagaaggctctggaaggtgaagcatgctcacagccagcttggagcagctgacctctcgcacagagcccctcttccaccagcagagaaaggagaagagttcccgtgcctccggaagcnacagaaatatccaggaaacgagtgtttctgtgccctcagtgtccactggccaaaaagagcaccctgaccactcggtagcagcgcccgtccgtccctgagcctctgtttgagggactcacgtccagctcccggcagactcagcgcgggggtcggatgccttctccgcaccatccctcaccgccacgagctgctgtggctcacattctgccatccgagctctgtccaggaggcagccgagaattggagcagttcccacgccaagtagggccttgtgggtggccggtcccctcctccagcgtggcacggaggcgccggagcatgcaggtctatgcctctgcagagtctggggcatcttgttccatttccttgctgcctctcctctcgtccgtgatcatccccccctccccctctgtt

SEQ ID NO: 593038 - DNA, 692 bp, Homo sapiens
gagatggacgagggcggctgctctgtggggaggggcctgccgcctccctggcagccccaggcccccggccctgtggatgggacagccagtgcagagggcagagagccctccccacagtgtggcggttctctgagcgaggagagttagggccaagaacgtaactctcccaggtgacacggggggagacgagcaatgcagcactctaggaagcctgctaggcgcccttccctggctcacccggggagcccactctgcttctgtgctgtgggccctggggttgccagccctgcagtgtgagtgaacggttatttaggactcacctggcacttgccctgtggcttaagaacaagtagaagcttaaacttctgaaagtgcttcccggggaagattttttgtttttatttttgtggggtaaaggcgggggggtgtatgtgggcttttgccacgtttttgaattgttaaaaaaatacacattttacagcaaagcaactgtgtacggaaattagaagaaagcaggccagatttaggcgtgggtagagtaagggagtcctcgggtcatagggggaaatgggttcagagaataaggttaatagaaatcagggagtttggtaagaaggggagaagagtgtcacttcaggaaagaggcagtagagtggcgggtcctaaaggcacagaacacagcagatatgtgc

SEQ ID NO: 593039 - DNA, 287 bp, Homo sapiens
gctgaccagggctccctgacctatacaggcctctgctattgggggtgatggccagtccctggtgttcttgagtttattcccaagggcccaagcaaagggaccaaggtttcccagaggcctgaaggacagggggtaacatttcacaaatttggggctcactttctgcacatctcctatctatagcgctgtgcagctgtcaagtatcaaaggtctcgtatctcgtcctatctcatcctcgctatcatatctcgctatgtgctcgctctccagagttttcgtgtatctct

SEQ ID NO: 593040 - DNA, 476 bp, Homo sapiens
  misc_feature (170)..(170): n is a, c, g, or t
gcctttgggctctggaagccaccaggataattgagagttgtggatagctacttcagaaggctctggaaggtgaagcatgctcacagccagcttggagcagctgacctctcgcacagagcccctcttccaccagcagagaaaggagaagagttcccgtgcctccggaagcnacagaaatatccaggaaacgagtgtttctgtgccctcagtgtccactggccaaaaagagcaccctgaccactcggtagcagcgcccgtccgtccctgagcctctgtttgagggactcacgtccagccgagaattggagcagttcccacgccaagtagggccttgtgggtggccggtcccctcctccagcgtggcacggaggcgccggagcatgcaggtctatgcctctgcagagtctggggcatcttgttccatttccttgctgcctctcctctcgtccgtgatcatccccccctccccctctgtt

SEQ ID NO: 593041 - DNA, 296 bp, Homo sapiens
ggccatccgctggccgcttcttgacgggtgtggtccttcgtgcattcttgcaggtctcgcagtcggcgcgcaatagctgtttgaggtgtgtcgtgggttgaactacatctcccagaatcgagaggctgacatcctgacccctggtgcctgtgagtaggaccttatgtggaactagggtctctgcagacataggccaatttaggcgaggccacaaggaacggggtggggcctgatccatcgacgggtgtgtttagaagagtagacagagacacacaggggagaagctgtggcggacg

SEQ ID NO: 593042 - DNA, 370 bp, Homo sapiens
  misc_feature (269)..(269): n is a, c, g, or t
gccaggctggtctcgaactcctgacctcaagtgttctgctcaccagcctcccaaaagtgctgggattacagatgtgagccatcgcaccaggcctacaataaaatttaaaaaaaaaatagtcgggtgtgatggtacatgcctgtagttctagccacttgggaggctgagaatggaggatggcttgagcccaggaggttaaagctgcagtgagccattatcgtgatcaccccactgcactccagcctggggacagagcaataagagacccngactcttttatttatttatttttattatttttttttgagactgagtcttgctctgttgcccaggctggagtgcagtggtgcaatctcagctcactgcaatc

SEQ ID NO: 593043 - DNA, 677 bp, Homo sapiens
ggttcttcccccacctgccactgtacagagcccaagttctcgctagtgcttgtatgggtcagctgcgattggcctggggccctgcgcgagcctgcgagcgaggtgctggcggtctgcgaacgggcaacctgatgggggcctgtgaccacctgctccccgcgactgccccgagtccagtgtgactcgctgttcgcccattcatgctggagacctgctgtcagatgtgctgtgctgtgcctgctggccatccagcaatgcctgtctattctctacgacgttgtactctactatgaagcactcctgtgacgtccactcatgaactgtgaccatgtatggactctaacgtgcggaacgctaactccactcaacacgtctcaacctatgagaggacgggcctacttcctgtgcagaccagttgtccccttagtttccatttagactgcagtaagcaagttcgttatcacccgttgttaagtgcgacgttgcccacgctacaaggggtggcctttcggcttggcacatcgccgacagctggcggtggatatgggtacacatgagatggtgaaccacacaagcggtatctatgtgagggttaacgttggacattggacaacagatcaagcagccagcagacacacagggctaaatgcacggcgggtgaaagaagcggacatcta

SEQ ID NO: 593044 - DNA, 356 bp, Homo sapiens
  misc_feature (343)..(343): n is a, c, g, or t
gtatatgaaagagtgacagatgacatcgtctttacttgtctgtaagtatcgtgctatgttgtattacatttacttttaggggtatagagacaattttgatagaagttaggtaaacaaatatttcttaaactaaagacgaagcaaacagatttgctgtcatgacaggaaaggatacacccactccagtttgagcttctcaggaggcagttctgttctgatgtcgtcatagcgcgtttgagccctggtatatcgcaaggggtcaaagccataactcactcatagattagataaccattcactctgtaatacaataataattttaattcataaagtctcataaatntcatgtgaatgtg

SEQ ID NO: 593045 - DNA, 110 bp, Homo sapiens
ggtcttcatatcaaggtgatttttgaagaacgagtctcgggtctgcaacattggtcacagttggagcaatttggtgacgtctctctctatgatctctcttaatttcatta

SEQ ID NO: 593046 - DNA, 473 bp, Homo sapiens
tcttcaaccccaggcaacctagagtctgtctgaaaagatctgcctattttggccatttcaggtagcaaaaggtcaaaaaatttgtgtgattgaagccatgaaaatccagaatagtatgccagctgggaaaactggcccggtgaaatttgtgccctgtcaagctggaaacccagttggaaaaggggatctgctcgtggagctggaataaaggatttataccctttcagtcatcccccaatttaattagccatttgcatgatgctttcccacccaattgattcaagcattatacaggaacccccctgggcaggtacgtttacgtcgtcatttattccccaaagtcaagaccaatattttgccaaaaaatccccaatggaaattttcattgatataaaaacttgcacatatgatttggacttcggctgtgaaattccctagtgtcaaaattaaatcaataaacctgggcctttggt

SEQ ID NO: 593047 - DNA, 633 bp, Homo sapiens
taaaagtcataaaagtttattatatgaaagaaataaagtggttctgtacatctatttacagaacagagacttatttacagtgagatggaggcctgtggtgttggtgagggacagacagagagttgtgaggaggcgtgagcagccgtgcctcccagtggctcgaaaacagggaaccccagcaggaaggggagcagcaaaagcgtgggtgggggaaccggcgtccgtgttcttccctcaagtggagaccgtggtgagcattgtagcagggtgggagtggaacccagagttccacgcaggacccgtggaggtgcaagggagaatgcttgagtttgaacccagaaacattctcgggttgactcacagggtcctgggggtgctctggggaaagttgtgtgcccctcgtgcccctgacgctgtccgcagctgcagaggggaaatgtcccgggggtcacagctcgctggaccggacagcaggttccagtttgtggggacagggcatgtgaggaccttgtcaggacttctcatagccgccgggcctgggctgctcgctgggccccctggattggcccagaaaaggccgcatctgggaactccggggctagaacacctccaggagctccggccggggccttg

SEQ ID NO: 593048 - DNA, 699 bp, Homo sapiens
tgccagagtacttccaggtcaagctgatctttgacaaagcaaacaaaaacataaagtggggaaaggacacccttttcaaaaaatggtgctgggataattggctagccacatgtaggagaatgaaactggatccttatctctcatcttatacaaaaatcaactcaagatggattaagggcttaaacctaaaacctgaaactataaaaattctaaaagaaacattggaaaaacccttctagacaatggcttaggcaaggatttcatgaccaagaacccgaaagcaaatgtaataaaaacaaaggtaaatagctgggacctaattaaactaaagagcttttgcatggcaaaaggaacagtcagcagagtaaacagacaacccacagaatgggagaaaatcttcacaatctatacatctgacagaggactaatatccagaatctacaacaaactcaaacaaatcagtaagaaaaaaacaaataatctaatcaaaaagtgagctaaggacatgaatagacaattctcaaaagaagatatacaaatagccaacaaacttatgaaaaaatgttcaacatcactaatgatcagggaaatgcaaattgaaaccataatgcgataccaccttactcctgcaagaatgggcataatcaaagaatccagaaacagtagatgttggcgtggatttgggcacttcagggggga

SEQ ID NO: 593049 - DNA, 292 bp, Homo sapiens
cacgtataacttaaagcaaattgtgaggatgttgttattattctcccaggtgcaatgatcatatactatcaagttgttgttatatggaagatacactttgttttcaaaaaaccatgaaaatatgaatgaccaattgtcaaagtaatttattagagacattaaatttataccaatcatataatacaaatcacatataacaatgataattatctttttgtacttacaaccaaaccatattttcccagcaaagaaagaacggaaggaaggaaggaaggaaggaaggaaggaagga

SEQ ID NO: 593050 - DNA, 313 bp, Homo sapiens
gaacaaataaaggaaaactaatgtaaaaaaattaaatatggtactgaagcatatgaaccactaatagctgaaaaaaaaatttaatctgacaatggtagttttttaaccgagtttacttcattgacttacattgctagaatggatcagtattattgcgtcctaccatcttactttatgcttcttattatgctaactatggttttttcatttaaatattcaattgctctgtctttttatgtagttacttttccgaagatggcatgatcggtcaacttctcattgtgaaagatgaggattaatctctaggaaacta

SEQ ID NO: 593051 - DNA, 917 bp, Homo sapiens
  misc_feature (72)..(72): n is a, c, g, or t
  misc_feature (76)..(76): n is a, c, g, or t
  misc_feature (78)..(78): n is a, c, g, or t
  misc_feature (80)..(80): n is a, c, g, or t
  misc_feature (82)..(83): n is a, c, g, or t
  misc_feature (88)..(88): n is a, c, g, or t
  misc_feature (93)..(93): n is a, c, g, or t
  misc_feature (95)..(95): n is a, c, g, or t
  misc_feature (98)..(98): n is a, c, g, or t
  misc_feature (100)..(100): n is a, c, g, or t
  misc_feature (106)..(106): n is a, c, g, or t
  misc_feature (114)..(115): n is a, c, g, or t
  misc_feature (118)..(118): n is a, c, g, or t
  misc_feature (120)..(120): n is a, c, g, or t
  misc_feature (133)..(134): n is a, c, g, or t
  misc_feature (141)..(141): n is a, c, g, or t
  misc_feature (149)..(149): n is a, c, g, or t
  misc_feature (158)..(158): n is a, c, g, or t
  misc_feature (160)..(160): n is a, c, g, or t
  misc_feature (166)..(166): n is a, c, g, or t
  misc_feature (224)..(224): n is a, c, g, or t
  misc_feature (336)..(336): n is a, c, g, or t
  misc_feature (359)..(359): n is a, c, g, or t
  misc_feature (377)..(377): n is a, c, g, or t
  misc_feature (469)..(469): n is a, c, g, or t
  misc_feature (482)..(482): n is a, c, g, or t
  misc_feature (499)..(499): n is a, c, g, or t
  misc_feature (514)..(514): n is a, c, g, or t
  misc_feature (517)..(517): n is a, c, g, or t
  misc_feature (520)..(520): n is a, c, g, or t
  misc_feature (524)..(524): n is a, c, g, or t
  misc_feature (557)..(557): n is a, c, g, or t
  misc_feature (564)..(565): n is a, c, g, or t
  misc_feature (572)..(572): n is a, c, g, or t
  misc_feature (576)..(576): n is a, c, g, or t
  misc_feature (588)..(588): n is a, c, g, or t
  misc_feature (608)..(608): n is a, c, g, or t
  misc_feature (613)..(613): n is a, c, g, or t
  misc_feature (677)..(677): n is a, c, g, or t
  misc_feature (690)..(690): n is a, c, g, or t
  misc_feature (734)..(734): n is a, c, g, or t
  misc_feature (908)..(908): n is a, c, g, or t
aggccgcggcgcgttcactgcgagccgagccgagccgcgccgagccgcgccgatcgccatccggcctcggcnctcncncncnntcccngccgncngcncngcccgncgggccgnncgncncccccccaccctnnccctccnccccctcntcccccccncngctccncctcccggcccgggaaggtagcagtggaaatcgcaaagagcaaaaacaagaaatggcngcagatactccagttccctcacatcaaccagtgcgaagagaatgcagctcaaacctacgagcatgactatcacaaacctgtgcgagcggcagcacccttgggcgacctgatnttccgcgagttctatgccccggngccggagctgaaccactncgtcgacttcctggatggggtggccgagtatgaaatgaccccagatgacaagcggaaaaaatgtgggcgacagctacagaaacattttctgngccacacgggtcntaaactcatccctgagntcacccggccgatgntgncgnaatncaccacgcggctggcgcagggtccctgccacgnccttttnncggaaancccncggctgaacccngcgtacctaagcgtggcccnttttnccgactacctcgacagcatctacttcaaccgtttcctgcagtggaagtggctggaaaggcagcnagtgaccaaaaanaccttcaggcaataccgagtcctgggcaaaggtggctttggggnggtgtgcgcctgccaggtgcgggccacaggtaagatgtatgcctgcaagaagctagagaaaaagcggatcaagaagcggaaaggggaggccatggcgctgaacgagaagcagatcctggagagagtgaacagtaggtttgtagtgagcttggcctacgcctatgagaccaaggncgcgctgtg

SEQ ID NO: 593052 - DNA, 282 bp, Homo sapiens
tctagaggatcccgagctagacgtacacagtaaaaactggaatgaactccagagctcagagacagaagcaagacttaaccactttttcttcagcctccgtctcccgggtgcaagcaattctcccacctcagcctcctaagtagctgggactacaagcacatgccaccacgcccggctaatttttgtatttttagtggagactgggtttcaccatgttggccatgctggtcttgaactcctgacctcaagtgatccacccacctaggcctcccaaagtgctgg

SEQ ID NO: 593053 - DNA, 157 bp, Homo sapiens
cattcattcaatcattcactgctgttcagcagcaaatgcaatgcagcctcacagcatgcatcaggcatgtctccatgtaggtgtcatgcgcatcggggtcagtcctgcagtcacacggtcggtggccattccagcacatcaggccgggggatcaccg

SEQ ID NO: 593054 - DNA, 315 bp, Homo sapiens
gtgcataagtaccgcctgcgtagtaagtgcgatagatgctgtccgtgcgctgttgctggagtctgtggtccgcgcccttcgctcggaggcccggactggtctccaacaaatgcttagggttcatctttcatagctgcaaggaagcttccatgtgcctctaacactcatcttcagatagagtgggactgctgagactgtcctctagtgtcttgaagagcgtattctctggacgcatgaatactctctgttgatcttgtaagaaactggtgcgtgtcttgaagtatcggtgatggtatttgtccgcggttacttggg

SEQ ID NO: 593055 - DNA, 1007 bp, Homo sapiens
  misc_feature (10)..(10): n is a, c, g, or t
  misc_feature (575)..(575): n is a, c, g, or t
  misc_feature (704)..(704): n is a, c, g, or t
  misc_feature (710)..(710): n is a, c, g, or t
  misc_feature (941)..(941): n is a, c, g, or t
  misc_feature (943)..(946): n is a, c, g, or t
  misc_feature (967)..(967): n is a, c, g, or t
tcagacacgntgtggagccctacaacgccaccctctctgtccaccagctggtggaaaacacagatgaaacctactccattgataacgaggccctgtatgacattctgttccgcaccctgaagctgaccaccccccactacgggacctcaaccacctggtgtcggccaccatgagcggggtcaccacctgcctgcgcttcccgggccagctgaacgcagacctgcgcaagctggcggtgaacatgtgcccttccctcgcctgcacttcttcatgccccgcttcgcgcccctgaccagccggggcagccagcagtaccgggcgctcacgtgcccgagctcacccagcagatgttcgactccaagaacatgatggccgcctgcgacccgcgccacggccgctactgacggtggctgccatcttccggggccgcatgtccatgaaggaggtggacgagcagatgctcaacgtgcagaacaagaacagcagctacttcgtggagtggatccccaacaacgtgaagacggccgtgtgcaacatcccaccccgcggcctgaagatgtcggccaccttcatcngcaacagcacggccatccaggagctgttcaagcgcatctccgagcagttcacggccatgttccggcgcaaggccctcctgcactggtacacgggcgagggcatggacgagatggagttcaccgaggccnagagcnacatgaacgacctggtgtccgagtaccagcagtaccaggacgccacggccgacgaacaaggggagttcgaggaggaggagggcgaggacgaggcttaaaaacttctcagatcaatcgtgcatccttagtgaacttctgttgtcctcaagcatggtctttctacttgtaaactatggtgctcagttttgcctctgttagaaattcacactgttgatgtaatgatgtggaacncnnnnaaaaattacagtattgtctgngaaggtatctatactaataaaaaagcatgttgtagaaaat

SEQ ID NO: 593056 - DNA, 513 bp, Homo sapiens
aggaacagcactgagaggggccaggagcccaggaaggggagggaagggctttcgtgggccaggggtgagcctgcgggccacgcgcgacccccggagccttctcagccctcttagtgtccccactcccagcccaggtactaggctctggggcagtgaggaactagatccttctctcctcagcctagggtggaggtcactgcactaccacccacctctggaagactggctgttaaaagtcatgtggcataaacttgtggccacatagtagccttatttttttttctgttttttggctctagaaaatcagttcttgtactgttagctgagaagttgcggtcaatacataatactgtccataatttttgaagggttttcagaaagtacttttatggttttttcccctctcattattgctggtaattagctggtgttcttaatactatgatgtgtgcctcaccttattataacctatgtttgcttttccttctttatatatatattatatcatatcta

SEQ ID NO: 593057 - DNA, 481 bp, Homo sapiens
  misc_feature (75)..(75): n is a, c, g, or t
cagctacagttcagaaagaacaaaaggccatcaaactccagtcatgcaactggagaggcggacaatggcccattntgctgggaacccttaaataggcctctgagggactttgactgctgttttgccgaaacagcaccccctgtcagcaggaagcagttaagatcggtctttgtccttatccttatccttattctaatggcagttagatgcatttctttagagggggcaatgagacagccaggtgggaaggggtccccagagaaactccagcctgcacactgggaggagtgtgcactggggtgaagccacagaagtttgcgccatttccagtggggaagagcccagcccctcctcttcctgggtggaacctgaaattcaaactgccaggtgggaagcccacaagcagggagtctggctttgcagaaggaccgtttccctcttttccttttcacccaataaacgctgccctcctcacacttca

SEQ ID NO: 593058 - DNA, 274 bp, Homo sapiens
  misc_feature (186)..(186): n is a, c, g, or t
  misc_feature (221)..(221): n is a, c, g, or t
cgtaggaaacgtcgctcaatggaattctttggtaactcgagctttgcgttttcagagtcgctgcatttagggtcaactctgacatcccatgaggttactcaccacctacaggggagcactgccacatgacaagactcagtgaccatcactgagttcccagctccttactaaagagctcattcctgnaaaaatgaggatagcatcctgccaaccacacatcnagtggagtctcattcttgcttactgcagccctctctgacaccgtccacctgat

SEQ ID NO: 593059 - DNA, 400 bp, Homo sapiens
gggcggtctccttctgagctcctgtgccctgctacacactattataccagctgcctagatataaggaaagtgggacagcttgtacgggaggggcttctttccataaatccctgaggaatgacacacacccattttttcttttggcgaccccaagagatttgggaggtgtgggtaatcatcaagagaatttggggcttccaaggtgtgtcgggccaaggacctgagacctgaagggttgactttacccaattgggtgggagaggtgagcatctgtccccctttagatctctgtagccacacaaaggaagcttgggaagactcctagctgtgcttttttctcttcacacagtgctcgggccgcgtatagtcatatatatcacccacacatataggggacact

SEQ ID NO: 593060 - DNA, 584 bp, Homo sapiens
aagggtctgagtcgtcggcaatagatttgaggatgaaaaagtggggcctgtgaatgagaagactgctgcaaaaaatttccagatggaagtgatatcatctcattccctgctggaataaaccatgaccgtgtggtggggtaccactattctgaacactcatcatacttgtggtggatgaaaaaaggttaacttgaggtggatggtccccactatgttgcattgggaccagggtctgaaagacactgttctgaatctgtttggcttgtgttccagtttcttctccatctcctgaacttgaggtctgaaacatggtagtgccaggtgttgcaacctgctgtgtggtagtagtagaagtttcatttccagaaagggcgggaggagaagaaaacaattcacagtgcatttgcatatcctcattggtagacaatgcactcatcatgtgagaagtctgctggtaaagtggcgattgctgaaggtttccgttggctgaagcagttgaggggaataactctgactgaatctgggcagcggtctggcagatactctgttgcatctccatcagcaagagggagtgacgggcggta

SEQ ID NO: 593061 - DNA, 390 bp, Homo sapiens
ttgggggcaaatcgaagaactctcccaggctacgccccagtctgggggctggccggtccctgcatcatctgggcaaccagcaagagggacaaggacagcgcgaaatggtggcaactgggaagatgaggcaagacagcagagacagagaggcagcaatgggtgagagacaagagacagcagtgggcaagacagcaagagacggtgaagcagtctgtgatcgaggatgtggtgaaactgagtggacagccaagtgtccatagtacagctgcctcgtgtgggacccactgctctaacgagccagcccccgacacagaagctgagcacccccaagctggggaacctagagagacctgcacccgggtcccacgtggaagacgggctggtgccatt

SEQ ID NO: 593062 - DNA, 221 bp, Homo sapiens
  misc_feature (2)..(2): n is a, c, g, or t
anctctctttctttctttctttttgagacaaagtctcacgtctgcctcctaggttgtaatgcagtggtatgatcttggctcactgtagcctctgcctcccaggttaagcaattctctgctcagacccctagtacctgggaccacaggtgcccaccactatgtccagctaatttttgtactgtcagtagagatggggtaacgccgtgttggccaggatgctc

SEQ ID NO: 593063 - DNA, 609 bp, Homo sapiens
taaaaaaggaaaacccggtagggatgtcggggttgaggaataggaggaaaagtgggggatagggtgtatgaacatgagggtgtttccttcgtgtgtaaagtgagggttaagtgtggtaaatgttggggggtgagtgagccccatggggtgtgggggctaaagattttgttaaagggagctaatagggcgtggtgacatagtatagtggtgagagcctccggtgtaagtttaggaaaggtgattatttggacttcagaaaaaacgggtggggttacatagccccaggagagtttcctcctcagatagggttaacatagggggggggggataaaggcagaagcgtatagcaaaggggcttgggggttaaaaaaagtttccatccaaaaagaggcttcaataaaggcggggcggagtttcaaaagtttggggaaagctcctttgtggcagaaagagagggcatatagtgaagtcgcccacactggggtgaagttgggcagatctccgaaaagatgtggggagttgtggggcaatagggcggcagacaaataaggcttaaagtggaggggaattgttaagttccccgggggggccgattttttgcacgaactg

SEQ ID NO: 593064 - DNA, 865 bp, Homo sapiens
  misc_feature (325)..(325): n is a, c, g, or t
tctgaatgtgtctcgtgcgtgtggagggccctccgtgggtgtactccccgcccgcgtgggttgtcccccgtgtggcgccgccgttgacttttggttggccccacggaggagtcgtcttgtgccatatctcgcgggagcgtcgtctaatttcgggccaagtgtcgcccgtgtgggccccgcaaatgtgcccaccttcgggaccataccgggggtttcttaggccaccggggcaccgacttttctctgcccctcacgcagtgaccccgccgttgttggtcaatatggcagccgggatgccccagggtttggcggcacccagctagantacgccctcagcgttcggcccattaggggcacggggtttctgcttgcagccaccccagtcggcgacgttcctcctgtatacgccacgaggtccagtccccaggccctacccctcgcccggcggaccgcacggaggggaagttgctggtctctacaagcagattgaccaccgggggaaagccgaacatggccccgcataaattttcggggggaaaatggttgtcgcccgccggatgccttttttttgttatgcccacgggcaccctcttgagacactgcgagagggtttttgctcccactttccagacatcacgtgttaccacgcccggcacatatatttcaagcggacttcctcagggggtctcctcattttcgtggaaccatcctcctctttggcccgggggtgtgggtgcacccgcgcgccgcaggccccccacatgtggggatgtgcggtgccggtccgttccctagcgtcacggggcatcctcccccctcctgtggcccgagaccccggtccccctaaggggcccccaaacataac

SEQ ID NO: 593065 - DNA, 401 bp, Homo sapiens
gatccccggtcatctttctacactataaaagattagaaaaaaacttagttttttcaagttatggagtatcattcaagtctggttttgattaaggctaccagttttctaggaattgtggtttctgtcaaatgcgtgcggaaggcactgattggggttctggttggagttctggtttcccttcagaaaactgcagaaacactctttgatgttatttgtgcaaatgcattaacatctcagggacagggtcagtaagggtgcacttgtacagtgggtgtccattacagcccattactgctgaacataaaggcacaaaaagttgaactgtttgtgaatgactgtaatacatgtttgttttctaagctgccttctctaaacgctgtggattgcacctaagcctttct

SEQ ID NO: 593066 - DNA, 776 bp, Homo sapiens
aacaacctaatgattagcatcatccctctactattttgtaaccatgtcaataacagtctattaagatgtccgcaaactattactcgcgagccctctaaaaaactcacctcctagctacgtgaagctacctgacgtcgttatcgcctcacatatcattggcaagtgtctaagagcgtcaccttatccgagtcgaatcactcatcgacgtgccaagcaaaactctacggctctctattctaagtctcgctatgaatctccttaattataacattcacggcacagaactaatcatattttatatcttcttcgaaacacacttatccccaccttggtatcatcacccgatgaggcaaccagccagaacgcctgaacgcaggcacatacttcctattctacaccctagtaggctccttcccctactcatcgcactgatttacactcacaaaccctaggctcactaaacattctactactcactctcactgcccaagaactatcaaactcctgagccaacaacttaatatgacctagcttacacaatagctttttatagtaacagatacctctttacggagctccattatgactccctaaagccatgtcgaagccccatcgtggtcaatagtacttgccgagtacattcttaaaattagggggtatggtatataagctcaaactcatttacaaccctgaaaacaattgtaccttcttgtatattctatgaggtaatttaacaaggtccattgctagaaaaggactaaaatgccattgaaatt

SEQ ID NO: 593067 - DNA, 119 bp, Homo sapiens
tgggtatacatcatacttttattagtgaatatccctctggaaatcagcaacaatattaaaaaaaataatgatggccctactgggccaagcagaactagcaactttcattttaaaaacct

SEQ ID NO: 593068 - DNA, 195 bp, Homo sapiens
ccgacctagcaggatcccgtgattacgagtgaaggagaaaattgccttccccatggcagcttgttcataggtatacaccttgtattgcagcaacccaaaagataaaccagaccaggaaaaagcccaatattaacttgccactaacaagatcacctctgacaaaaggcaaatgaaaacaaactttctggccaggat

SEQ ID NO: 593069 - DNA, 1108 bp, Homo sapiens
  misc_feature (1108)..(1108): n is a, c, g, or t
gctcttaaacctagactctggcacgttgtattgcgctgttacgcatgagttattggtgatgaataacagctcattatatcaggacctggtaaatgctaagaacagtggccacaggggatgttcaggctgtgcacccggcgttcttcccctgtgtgaagggaaacttggtggtccaacgcaaccatctgggggctccagaaatgtgagcatgtagtggtaggccgtgattctccaaccctcggcactcacactgcactcttgtgaacccaaggtcgctgagtgcatcgggtgtggctcaggagaaatggagcgcagccagcaaaactcgagctgtggagttcggtgcgaggggctcctcctcagcccagggttcccgttcccctttccctgctgggtagatcgcattctagtctctttaaggagtgtttggccgcgacgagttggacaagcccggatgctgtcctttcgagtttggggccgggaggtgtcatcagatgacagtctgcatgggagggtctcaaaacgggccttggggtaggttcgtgcgatcatgaactctcgtcgatgcgtaacttgtgttcaatggcaggtggcctaggattgtgttgccgaggggggtcagcgagcccagttgttgcggaacatgggaaactgacctggctgttctgtccctccagtggagtcccctctgcatgagacatccgaatcgcactctgggaagctgatgcacctacagcctgtcgctctgtgaccctgtccgagggaccatgtatagtgccgcattgagactcgttggccatcgctgaattggtaattggctacgtggagggaatttccccacggccggagaccatgagcgcagcacaaggggagccccctgagccaagggtagggcggagcacgcacgtgaactgagtaatcggccgaaaaagcaatggacggaaccacacgcctgtgaccgttgtgcacgagactgagaccagtgagcgaaacttcatggtacgacgcgagaagcagacgaatgcgaagcggagtgtcaaacatcgctagagagagcgtgctcgatcgagagatgaatggagctgagtagcgttgactaggactcgan

SEQ ID NO: 593070 - DNA, 460 bp, Homo sapiens
agcgcggttttttctgtcaaccatttttgcccaaagtcatcggggcgtcttaaagggaaatttttcaccccctgaagactatcattaatctcaagcactcttcctcactgcatccttacaacagccgttgcatctaaacgcatcaacaattacctcctcaaccacagtacctaaggccaccagtgtgccactatctaccccgcaaatactcctttaccactgcaagtgccttattctccgcctcatcttccacagccatgcgcacctattcactcactgctgtgacggacccaatgatctcatctactacttaacagtcctcgaactacgaagaccccttactctattgcacctgctgccttgagccccattttattgacttttatccacatctacgtacttgcactaatctcactcgttctcactcctagtgcactttaatccacatccttttctctcc

SEQ ID NO: 593071 - DNA, 125 bp, Homo sapiens
  misc_feature (37)..(37): n is a, c, g, or t
  misc_feature (92)..(92): n is a, c, g, or t
atttcggcacgaagcgttttgttttcggaagatctgntttatacaacagtaaataaataagccctgttacagaacacaggcacttagggttngaacaggacttcgtcctttttgtagggacattc

SEQ ID NO: 593072 - DNA, 769 bp, Homo sapiens
gcgcagatacgatgactggcgtggcgaatcgagtcgaggctccatcctattctctcatccttgagtacacctggcttgtgtgctgtcatctcctcatcggtatcatctgtagccaatgtgcctggaattgtttgcttggccactgtcactggtctgtactgacacttactagccaaacgcatggcaatggaaaaactgcttagtgaagaacttagaagcttgtggagaccttggtgtgtccactgtccaccatctgctctgataaaacttgtgaactctgactcagaacctggatgacatgagtgcccacatgtgtgtttgacaatcaaatccatgaagcttgatactgacatgagaatcagatgtggttgtctctttttgacaatgacttcatgctaccctgtgctttgctacttgtccatgaatttgcatgtgtcttatgtacacatgtggcatgttgtttacatgtgctacaccatgtgaaaatcctacctattcttaatgctgtgtgcatgtttgcagagagatgcctctgagtcatgcacgtcttaacatgttgcatagatgcttgtgctttgttggtatcctgtgaatggagatgatgatgaaatgatacgccataatctgtcgagatacccttcaactccaccaacaatgtaccagtatgtctattcataatgaaccccaacacatcggagccccaacacctgtttggtgatgaagtgctgcccagaaagtgatcctagactgttgcagctctatctccttc

SEQ ID NO: 593073 - DNA, 210 bp, Homo sapiens
  misc_feature (77)..(77): n is a, c, g, or t
  misc_feature (142)..(142): n is a, c, g, or t
  misc_feature (171)..(171): n is a, c, g, or t
  misc_feature (199)..(200): n is a, c, g, or t
tgtcacggtgcgtttatcctctctacactctctgcgtttactttggtgcagcaatgtctaccaagacactaagccangttaggcgtaaactttgtaggaacagcaaacctgaagaatgcctcctcacacagggtaacatctnattccacattttttgacgttgattcactngtttcctggaacatatttgttgtcgtgnntgttgcattt

SEQ ID NO: 593074 - DNA, 405 bp, Homo sapiens
tagttgacggattcatcacttattgacgtcacgtcaatcaattatcacgtgagtctcgtgaaatcccatgactcagacaaatggtaacccgtagataccgtcggaactggtccatggatactcgaagtattataaggctcgtagtagggtatcatagtgacccagtgcaatctgtaataagcagtgcttgtagtcctgggtttcgtgtgtcatctagtagactatggtcagccccgttgagtaatcctcgtgcttcaagtagtccgtatgtgtgcctgagtgcacattctatcagacgtagctgcgtcttatgtgctccatcccagtgcagtcgcagttgatgggtacgctctagcttaaagtgatatagggcacatcctggtcctgggaataaaagaacgtctg

SEQ ID NO: 593075 - DNA, 176 bp, Homo sapiens
  misc_feature (134)..(134): n is a, c, g, or t
ggatggcgtcggcagaggtgctgcccaggtagaaggcctggctcaggtggcctggtccagtgctctgatggagtgtccccatccttgcatggagctgtgtgagcgttcgccatgcactgtgtgcactgttcacnctcacatgtcgatatcttggtcatgttctggtgcagcatggt

SEQ ID NO: 593076 - DNA, 214 bp, Homo sapiens
gacactagagatcccgtgtgtcgagataagcaggtactgtactaggggaatgtaaaacttgcaaacttaaaaacctgcatcttcttgaagcatcagttttgacttaccaaatggtttagagtcataagatcacctatttttatataaaagttatattatagcaataaaatgttcatacgccatagacgtgttaagattaaaaaaatagtgaatc

SEQ ID NO: 593077 - DNA, 733 bp, Homo sapiens
  misc_feature (712)..(712): n is a, c, g, or t
actccaggaattcggcacgaggatcgaccgccgcatgtatcacagactgatcctgaaggctaagggtaatgtgggcaaatacgagctgattatcatggatcacattcactggctgaaggctgactgggaccgtaagaagctgctggctgaccaggctgagggccgcatgtatatgaccaatgaagcacgtaagtgccgtgaatagctgcctgcaggccaagaatgaggagagcatcaagactatattcaaagaggaagacgtcatgaaatgaaacctggcactttgactgtacatactggacctcgtgacttcattgatcaggcgttacaatatgacatggctactgaatacatacagaactctaggggatgtccggtacccaatagcgcctatagtgagtcgttatacagatgagtggacgtcgtctacatacgcttgactggggctagggtcatagctgataggacagtaccgatgtgccttccgacaattgaagagcctgaatgccataggtcacttgtaagcgtaatatattgttagacaccgggttaaatctatgacaatcaagcttattcattgacccaatgtgcccaaatgagaagagagccttatagttaaaggattgaccgagaaagggtgacccgttttcccggttggtaccaatgcctgttttcaagaaagggcgcttcaacatgaagggcgaataccccntttaggccatgggccaatatc

SEQ ID NO: 593078 - DNA, 1654 bp, Homo sapiens
  misc_feature (7)..(7): n is a, c, g, or t
  misc_feature (14)..(14): n is a, c, g, or t
  misc_feature (76)..(76): n is a, c, g, or t
  misc_feature (88)..(88): n is a, c, g, or t
  misc_feature (204)..(204): n is a, c, g, or t
  misc_feature (220)..(220): n is a, c, g, or t
  misc_feature (385)..(385): n is a, c, g, or t
  misc_feature (548)..(548): n is a, c, g, or t
  misc_feature (583)..(583): n is a, c, g, or t
  misc_feature (603)..(603): n is a, c, g, or t
  misc_feature (609)..(609): n is a, c, g, or t
  misc_feature (767)..(767): n is a, c, g, or t
  misc_feature (801)..(801): n is a, c, g, or t
tgattcnttccccnttttcctacaccccccccttccccccgaccggaggagccgctctttccgcgcggggcattcnggggcccgaggncgagcccgccgccgccgccgtcgcccgagggaagcgagaagaggccgcgaccggagagaaaaagcggagtcgccaccggagagaagtcgacacccaagcagcagccgccgccaganaggcccgcccaccagnccgcccgtccccccgccccgtccacaaagcagcccgcctccgcaaaggggtacgaacgaagggacaaagtctccaatgaaaaaagtgtagaagacagaaaggaagtaaaagaaaaaaaagaaaaaaccaaacaaacaatcagttgtcccggaggaagtgaaaaanaaaagcattaaaaagaaaaagaacattaacacagaattgaaccaaaagaatccaagcaaaaaagaacggacagaacaaattaaagggggaaacgaaaaggagaaaccggccaggcaaggccaagggaaacaaaagaaagggcaaagccaaaaaggccaagggncgacatcaaaaaagggaaagacagggaagaagaancagatgaagacatgtctaantttgancgtttctctgagatgatgaacaacatgggtggtgatgaggatgtagatttaccagaagtagatggagcagatgatgattcacaagacagtgatgatgaaaaaatgccagatctggagtaaggaatattgtcatcacctggattttgagaaagaaaaanaacttctctgcaagatttcataattgagagaatncctgagttgatagctctaaaggcagatatgctgtattgcctactttaacccatttttcaacctgtttgtttttaaaaggcttcactaagggttgatatgtaccattgtatggggcaattttaagtcagctaaaggcaataacctttattgcatgaaacatttcccccagactttttcatgaaagcttgttgagggttccctaggggcacaattcaattgcagccaggtttgcggaattaaaatttaaaaaaccatttcttcaaaccttaaaggttccttcccttttccttttccatttaaaccctttaggaattacttggaccttggatttcgggagaaggcatcctctccaggcatcttaagggccgcacaggacacgcacactctcacttttttaggaaatcttcattctggaaccaccttgggtttttccccaacaaggttggctcctgggggaccccaactgttggggtgtgttgacgacacccctttttagctgggcgtgaacaccgtgggggaaaagtctcctcccgcgaggggtgctgatcccctttctccggggtagtgggggtttcccccgcttttgaaacagtcttcctcttgtcttcttcccacaagagaccattcttttccctgtctctgcccactgtgttagtcctcctcttgtgggggtccgcggggggtcggtgagcgtgcgtgctcccggtggggtgttccccgacggggggcgtcttctttacgggctcgtacacctcgctcgagggaaatgtgtgcgcccttaaacgtttctggacggaggggggcttgggaggaaagcctttttctacacacgggggggtctctctgttgggac

SEQ ID NO: 593079 - DNA, 100 bp, Homo sapiens
ggaagcacaagaagcacaacacacacaagaaggacaagcgctgtcgcttcagcttcttcagcttcttgttcaccccctccagccattttcagcttgccac

SEQ ID NO: 593080 - DNA, 501 bp, Homo sapiens
  misc_feature (13)..(13): n is a, c, g, or t
  misc_feature (21)..(21): n is a, c, g, or t
cccaggtgtacgncccggtantatgtgcggtcgtgcccctcggtagccccggtgactatgttaagttctctgttgagcgaggatctgcaggtagacgcacagccaggacatctggaacctgggaaagggctccgcatatttgggtattgtgacatattgctgaactcaacacctaagggatgagagtctcctacctggtgcccttcctacaggggacattgtgacatgtctctgcattcctcacctaggagatgtgactctcatcttctgcttgcaccctgcctacatggaaagctgtggcatattgctgtggtcagcaaccagatgatgtgtttctcctgcctgggtcttaataaagacaggaaagatggttgacatattactgggcccagcatccaggtgatgttttgccttcaggtgacattgtgacatcgctgggccctgcattgacaatttgtgactcttctgcctgtgatttgcacacttgggccattgtgacat

SEQ ID NO: 593081 - DNA, 760 bp, Homo sapiens
tgggttttggtaggtttggtggtttatttttcctttttttttttggggtttttaaaaaaccaggaaacacgtgtgagggccaaaacaaaagacaagggccggggcggggggagatgtggggcgtgcgggcaccaggggaggcgcccaggctcggcacaaccacagactccatcagtgggtgacaaaacgcgggggagcctggtatggggcgccatcctccctggggacacacgggcacacgagcgaagtctctgggacgacaaacaaggggagaaaggggcgctggcggtgggagtcaccacaagccccgtaaggaggaggaggaggagagccaccccctcaagagcgatgagagaccaccccaacagactatgtgggccccaaaagagaaacactctcaccgagcagcaaacagggcacacaaagtgagggggccattgagcgccaaagcagaattggccagagaaagcgcccatcagaaagagagtgcaccactcgaagaaacaacaaaagagacaaccacaccacaccggggagcgaggagcgacaagagagagaaaacaccacatggggaccacataagagcaaaggagaaacacacaggagcaaggaacgacacacgcgggagaacaagccccccagcgtggaacacccaccacataacgtgagcaccaaacacaacggcacacaccacccaacctacaaaccaaatatatctacgaaaccagaaaaatccgaaacaagacccgagagagccaca

SEQ ID NO: 593082 - DNA, 1758 bp, Homo sapiens
  misc_feature (1024)..(1024): n is a, c, g, or t
  misc_feature (1560)..(1560): n is a, c, g, or t
cgtgtggttgtcgtggtgtgtgggtgtcggtgttgtgtgtgtgttctgtggtttgtggttgtgttgttgtggtgtgcgtggcgctgtcgtcggcggttctgtgcgtggtgtttgctgtgtggttgcgcatctcacaccggttgggtgggtccgcttttgtggtgctctcggccgctcctgtttgttgttgtttgcagcccggttgttttgctcgctgctgcagcttgtgttttagtgctcgctgtgtttctctagtggtgtttgcgtgcgctcttggtggtatgttatttatgtgctgtgcgcggtcggtgctgtgtggggtggtgcgcagttttgtcgtcccctagtagtgctcgctgggttatgcctcgcgccggctttgtttttttttgtgttgggcgagggggggggttacctgttatctgttcgttcgctccgcctctgtttttggtggtccgcgagttccaccctggttgattacgttgcccccggtctttgtggttcgatcatgatgcacgcctgtggccggtcttttacgggggcgcacccctcttgttgaggtcactctccggaaagggggatcccccccccagagggtgtgtgccagcgatcgaaatacctcgcgagggcgtgttggtgtgagaaacaggcacggcgtccccatgtgtacctgtaatatgcaccgggggtctccttataaggttttccccgtgaggtccccctcggggttggcccccaaatttttcggggtcactccgcgggggcacccccaggtttctcacccgcaccggcgcccctcctgggggtacccgcccctcgctctcccctcgctcttatcttcacgcgcttgcgcttgttatagacctcgggcccgctcgcgcacaggtgtcccccgcacgcccacgtaggtgccccctatagcccaccacgttacgtaatatgtatatgtccacgtaaggtatattcgtctctcgcgacccccgtgtgtcaccgcaacgcaaatgtatagggtctttgtcattgngggcacaataaagcgcgtcgtatctgtttctctcctctaccggtatatgtaggagaccacacacacttgttgtcacttttctcggaagcacacagggacgctctttacacaccccgcgtgttcgcgcgcgccgtcgtgggtgagacggacacgcctcacgcacacacgctcttcgcacgccattgtgctcgcgcgcgagatttgggcacccccgcaccgcgtcgcgagtttccccccttcgagggactcgcgctctgtcttttgctctgtcggcctgggccccctggtgtttctcgttataatttgggcggggtcccccttaatcttgcacattatatcacaagcggacaatgtgcccaagaccttgggaacaggcttatcgtctcacacacgcgaatgatcccttgcaccccccctgttctcccctgtcacacactacagcgtgggaactctggagatgaccaaggcaactttgcgcctcaacgcctggtggaacgctattcacggagcccaccttacccactgaccacgatatngattgagactcccctccgtcacctcggggtggcccactcgctccctgggttcctatcacgctcctcgtggtcttgtattcccccagcttccccaagccccagggctataagaacattgcccctaaagcgtggggtaaaagtaccctgttgagttttctgtacatataaaataattgaaataataccaattttcccttc

SEQ ID NO: 593083 - DNA, 322 bp, Homo sapiens
ttttgtggggcccccccccccgccccccgccctcctttatagcagccgtagtgggttttccctcctgttttttgccaccttttattccaaactgtgctgtggccctgcggtagggctgggtttggccaaaagaattccaatggaaccccctttttttttttccgtccccccactttgtagagctctttgccccccttcccccttcccccctttggtttttatttttaaggccggggtctgccagggagctgggtgccagatagattctttttttaactgggctgtttttttaaatgttattaagccgttttgcctgagggga

SEQ ID NO: 593084 - DNA, 294 bp, Homo sapiens
ctatccatcacttcaaacatgtatcatttctttgccaatgccttgtcttttgtcgtcttaaagtacagatttgcatcatgctttttaaaatttaacattacactataattattttgtagctgtgtttatgtttttctgttttcaagtatcaatatatagtatggatttttaaaaaattggtactgtaaatgtacatgaagtttttctgtctttacaaaagaagtgcatattgttgtatgaattctagaaaatcaagataaggaagaaaattaaaatccttcataatcctaaaaa

SEQ ID NO: 593085 - DNA, 1070 bp, Homo sapiens
  misc_feature (996)..(996): n is a, c, g, or t
gtgttggaacttcgttgcttgcttgcctgtgcgcgctgtgcgcggtacatggccttcaaaacgacttgatacccaactatcaacccaaagctatggggcctagcccactccagctcgcggtgccgggctacttcccagcatgagtcgacgttcagcgcctagcgtggacagccaggattttacacggtggtctaatagcccaagatccatcggacagcgttccagagagtcagtggcccacggagcaagtcctcatgtcgttccttagtggctccagcacggcccagtacactgacaggcgtattggcacagttcatgctcatattcccacaagggtgatcattggcatcggcacattgagcagtgcgtaatgagccgagagtaggcgctggacaggcctcgccacaatacggatacacttgccgtggggtcccagcgcgagagtcccttccccttgaccccctggggcatcaatgagccaccgagacttgaggcacaaaggcttgcccccaagccgaaggccgacaccttccgctggggccaccagtgttctacccgggggtaatgccccacgctctatgcgttccacaggaatggcctagccgcaatgccccttatttgagggggcaacagatctctcacctatggacggctggagcggccacgacccttagccaaaggctccccagaggacccaacgaaacgtcggataagcatctccattaaccattggtcgtggcttgggcgcccattcgcagaggtacacaaaccgtccttacaaaaacaagcccgcttaaactttgtgtcgcgaccaccccatgaggccctatatgagcaccactcacgaagtaggcggcacgcatactgtgttacaatgtttgcacccccccccgctatatacgtacggcgggggtgccattaaccctgtgggaaatccctatttggtgaccaatgggtaattaccgatggcgaaaggcgtttcaaagccaaataagnctctatgggcgccctcaattggggccacaaagccttggtgggggcattgagcagcatttctggcgcgagacaac

SEQ ID NO: 593086 - DNA, 191 bp, Homo sapiens
agcacagaggttaatacttaaaacagcacgatttaggcctggacctccatcagaataacactgatgcaaaatatttatactaactgaaaatcctggggcggtgaacattgattctgcctcaattcttctgaaatcctggttccaagaccgctcacctaccgccaataaagtgcaaaggagtaattagaaac

SEQ ID NO: 593087 - DNA, 332 bp, Homo sapiens
gagaccagactggacaacatagtgagaccccatcccccaacacacaaaaaatctaatttttaaaaagctcacaaagtaaaataaatatatctttaggaagaattggcatggtcgggcatagtggctaacacctgtaatcccagcactttgggaggatgaagtgaatgcatagattttttcgtgaccagctgagaacacatcgtgcaaactgatatatacacaacatccaaacaagttagatgcgactgcttgactgcagaggctacaacaacccagcatcaaaacacaacaccccaacctggagagacacaacaacaccacgtctaagacac

SEQ ID NO: 593088 - DNA, 189 bp, Homo sapiens
agatattattaatcataacctcttgagacagttttcccaactctgagatactatttcaagtgatgtccaacttctaatgaaaatacacaaaacctgaagatttaataatgctttataatgtcaatatcatatagaagcagcaacaaagtcgatgaccaaatgtgacatttttaaaatgccataagatca

SEQ ID NO: 593089 - DNA, 263 bp, Homo sapiens
tccttttccttctcctcttcctcttcttcttcttcctcctcctcctcctctttttcctcctcctcgttctcctcccatcagcaagaagacaaaccgaggacagtcttgaaatatcgaaatttcctctttgggatttgccagcgccaagactgtcggaataaaggacgctgactattgtattattgttattttattaattagtcagtggaaagattacagatgaggaaaggggacgcctgtcacccttcctgtgctaagattta

SEQ ID NO: 593090 - DNA, 161 bp, Homo sapiens
  misc_feature (143)..(143): n is a, c, g, or t
accacctccctcattccctccaccacccacccaacacccagcgaacagcacaaaccctttatcacatatagtggcccagtgctatttagccggaacgaccgagcgcagcgagctgtgtagcgaggaagcggccgcaatatacntctgcatcatgcattcat

SEQ ID NO: 593091 - DNA, 359 bp, Homo sapiens
  misc_feature (342)..(342): n is a, c, g, or t
ccattactttgtcacagctactagactaggctgagtgcaggagattgcttgaatccgggaggcggaggttgcagtgagccgagatcgtgccactgaactccaacctgccaatagagcgagactccgtctcaaaaaaaaaaaaaaaaaaaaaaaattacctttgaaaaaaataccgcacttcagaggaaaccttttttcctgcttggtgtctttccaaagaataaaatatttgaagcttgttttctagccgatggtgtgtatgagggtgacctggctgaggcatcgctcaagctggggggtggtgtgtaaaaggcacgtggagccacaaaaggcccctcctgntgacaacggtgcttggg

SEQ ID NO: 593092 - DNA, 205 bp, Homo sapiens
gtagcggtcccagctagttttgcatttgtagtaaagatggggttcaccatgttggccaggtggtctggaactcctgacctcaagtgatctgcccgcctcggcctcccaaaatgctaggattacaggcgtgagccgcggcacccggccggtgacttttaacttctctgatgaattcaaaatctcttacagagctctcttacgctct

SEQ ID NO: 593093 - DNA, 1759 bp, Homo sapiens
ttgcgtggttgaatctctaacgtatagtgatgactcggtggtgtattatcatctacaacatatgtgggtgagatagactggtttgtcgcgcccctcattagtaggttgtggttggttatcgacgtgcctctcttcacacaaggtgggggggttccccccctacatttgtgctgacgacgggatattgttagtggcttcgccacgcacatgtgctcatgttccctgcatgaagtgctgtcataagactgccgtcgctccggtgggtggacatacaacaaaagagtggggggggggttgcccacacaccacccacccgaggggggcaaattgcttttgttgcacccgagatgggtggtttacctcccgctggcggaaacctatataattcgtgggtgagttgtggtctccgcccacacagacaccccctccgccccgcgttgggagtgttgggtggacaatgagttgggaaaagatgttataactttctttggtgaatttttttcgtcggttgtagtaattttttccgcggcgaccgcctctaaaatagggtgtttgtaaaaaaacaccgttgggggcgcaaagtatcaatatgtccccacagcaacgaagctgtcccatcttggagtaattgggggaatattttttggggggggggagaaacaacaagcgggccggaacatacccaacaagaagaggttggcgccctcccgtggtggggggacaatagggtcggggtgcgaaaataaaagtgggcgccaacgagacggggtttttttcctcctctcccccccgcgcggcacatatgggaaaatgaccgcccagcgacaagaataggaggggggacaacatcgtgaccccccatggcgattatagtagggggcagaaaaatattgtggtgagaggagatgagagagtgggcaactaaataaagaagaattggcgtcgtgttggtttgttttagaatattagcagcgcccccctcttatattggagaagagctgtctcctcctctactacagtcggtgcttataatagaggggagataattataatcaccccccccacttggggggccgctacaaatagtggggagatattaataaagatcgttggcgcggcgagagattatctgtaatatgtgagaagatcctccccctcggtgtggtaagataaagatctagtatctcacaggagatgtcacactctccgcgtgttcacacacacacagtggggattaaagcgcggagatgattattgggcacacttgagagagatattgagaagtatctttctctctgagagcgcctgtctcactcggggatgtctctctctcacatgtccccgcgcggaggttatacaccacgcgcgcggtatatcacacacccagcacagaggctataaagagagaggaatagaggggtgttgcctcacgcctccacacgagaaaaaggcgcacagagaacaccctcgcggggggaacacacccacgcagagaggagacctctaaaagagacctcgcggagacattaagtggaggctttatgggcgtatgagaaattttaaaaactaccacacagggagttaactcgaggcccttatggttttaataccacatggagcacgggagtcaccacctttgctttgagtttttttcacaaaatgtgaaatttggggtccccgaatccaagacctatggttggttttaagcttctccatttggggttttgtgaccaaataaattaactacttgttgggtgga

SEQ ID NO: 593094 - DNA, 449 bp, Homo sapiens
aactagggataagatgtcttaactggccattgcggtttatctgcgctgagagaactacaggtcttacctgccaacatatccaccataattatttgggaatacctttcatacaataacttgtttaaaaaagacctcagattgaaaaagcaacctagattactttcgctctctaatcagcatggcaatgtatttatattgagaatgttctcaaaaagtaactaaaaaattgtgtcggaccctacttttgagaaatctacgtttcccaagtgttatgggaactggctattccttgtcccggcacaccttctcattccttcctttcagagcctaaaacctcatttgataagcactcctagtctctggcctgtggatccagtgctattctgtcaccaacctaagaatcccaattgcaccttctgtttctgacagtcacaggtgacagctgtgat

SEQ ID NO: 593095 - DNA, 168 bp, Homo sapiens
actgaggatatgaagaaaactgatacttctacccttagggacctcttaatctaaaatataacatagtcatcaaaatctatggttaaggccaggtacggtggctcactcctgtgatcataatactttgggaggcctaggcccacggagcacttaagttctgaattatga

SEQ ID NO: 593096 - DNA, 456 bp, Homo sapiens
tcctggaatatatcataggagaaaatgtaggttaccttaggtacgatgatagcttataaatttttttcactcatttaattgttaatatctgtgggtacataataggtatttatggggcacatgagatgttttgatacagacatgcaatgtctgtatttttagtagagacagggtttctatgcttttttacaaacaatccaattatactcttttagtaatttttaatgtacaatttattgactatagtcaccctgttgtactgtcaaatcaaagggcatatttcatctttctaactgtatttttgtacccattaaccatccttgcctcctccccaaacctccacttacccttcccagcctctggtaacgatccttctactctgtatctccatgaatttgattgttttaattttccacaaagaagtgagaacatgtgaagtttctctttcaaaaaaaa

SEQ ID NO: 593097 - DNA, 288 bp, Homo sapiens
tgtagatgtcagctaggtccctccctttagtgtagattgcagcgtgagccttgcctgcacaatagataaacttcgtactggcagctaccgccagatcttccagccagagcaggtcatcacaagcaaagaacatgctggcgataactattgccgagggcactacaccattggcaaggagatcattgaccttgtgtaggaccgaatgcgcaagctggtaagcaccacatataaatatgcattcaatgtaggtgagatagttccagtgcaatttgagtggcgtgcctgacc

SEQ ID NO: 593098 - DNA, 361 bp, Homo sapiens
  misc_feature (305)..(305): n is a, c, g, or t
aggatcacgtgagcccaggagttcaagatcaggctgggcaatacagcaagacccctgtctctacaaaaacaaaaacaaaaaacaaataggcatggtagtgcatacctgtggtctgagctgcttgggagtctgaggcaggaggatcacttgaacccaggagttcgaggctgcagtgagttattattgggccactgcagtccagcctgggcagcaaagtgagaccctgtctgttaaaaaaacaaaaccaaaaacttgattgctgggggccaccctaggagtttctggattcagtaggtctggcggtnggggatggtggggcctgggtaattttgcctttctaacaagcgtccagggtaattgc

SEQ ID NO: 593099 - DNA, 654 bp, Homo sapiens
  misc_feature (32)..(32): n is a, c, g, or t
  misc_feature (62)..(62): n is a, c, g, or t
  misc_feature (119)..(121): n is a, c, g, or t
  misc_feature (123)..(124): n is a, c, g, or t
  misc_feature (135)..(135): n is a, c, g, or t
  misc_feature (140)..(140): n is a, c, g, or t
  misc_feature (151)..(151): n is a, c, g, or t
  misc_feature (177)..(177): n is a, c, g, or t
  misc_feature (179)..(179): n is a, c, g, or t
  misc_feature (234)..(234): n is a, c, g, or t
  misc_feature (238)..(239): n is a, c, g, or t
  misc_feature (292)..(292): n is a, c, g, or t
  misc_feature (333)..(334): n is a, c, g, or t
  misc_feature (347)..(347): n is a, c, g, or t
  misc_feature (362)..(364): n is a, c, g, or t
  misc_feature (453)..(453): n is a, c, g, or t
  misc_feature (457)..(457): n is a, c, g, or t
  misc_feature (460)..(460): n is a, c, g, or t
  misc_feature (463)..(463): n is a, c, g, or t
  misc_feature (465)..(465): n is a, c, g, or t
  misc_feature (471)..(472): n is a, c, g, or t
  misc_feature (486)..(486): n is a, c, g, or t
  misc_feature (500)..(500): n is a, c, g, or t
  misc_feature (502)..(502): n is a, c, g, or t
  misc_feature (508)..(508): n is a, c, g, or t
  misc_feature (511)..(511): n is a, c, g, or t
  misc_feature (514)..(514): n is a, c, g, or t
  misc_feature (521)..(521): n is a, c, g, or t
  misc_feature (542)..(542): n is a, c, g, or t
  misc_feature (544)..(545): n is a, c, g, or t
  misc_feature (556)..(556): n is a, c, g, or t
  misc_feature (562)..(562): n is a, c, g, or t
  misc_feature (568)..(568): n is a, c, g, or t
  misc_feature (575)..(575): n is a, c, g, or t
  misc_feature (578)..(578): n is a, c, g, or t
  misc_feature (593)..(593): n is a, c, g, or t
  misc_feature (622)..(622): n is a, c, g, or t
cccagaccaaagggaaaacaaatcaaactcantgccctcacacatgagccatctttgaattnggatttacaaatttatatattctttcctatggaaaaagaaaaaaaaaaaaacacaannncnntggggtaaggnaaaanttgtaggtganggcccaatgtctgcctaagctaacananagcagaatcatgattcgtgcttttcctgtattttgagtgggatgcagcctaacancccnnccctccgtggtagaccgaatccttcagcagccagaggcccccgaacactgggngggcaaaccgcaaccttccagattcttcagcgagtgccagnntgcaggctctgcntcagactgccaaagnnncggcagctttccttgcaagttttccactgcctaaaaaggccatttttccctataaaaagatgccaggtcaaaaaaaagtacaggggggnaaangtnttntnttttgnngttagattcttgcngtcgcaggctgatntngggcangtnccncgccgcngggctggtgttggttccccangnngccgggccctncttggnctcctnggtcccnccnttgctggggtctgtnattttgggatattttactttcttctggtncagctcgttctgagcccaaagtagtagtttca

SEQ ID NO: 593100 - DNA, 886 bp, Homo sapiens
catctttaagagcatgatcataaagagctatttttgacaccccccccccacttttttaacatttagagttagtaagggtttatatctcttctgtccatatggttttcaaaggaatgaggtgttaggtggctggaaaagcattgtgtaggaagttagatttgaatatagacaacggtgggttattcacgttgagaatgtcattcgacagaatgcctgtgaagccaggtgtgggttctactcagtgccatagatagactgagtcttctctcgtaggttaccattacatagctaattcggattctgaactttcaccatttaacatcattgcgagtttatacagacctaaatttgtacaaatccgtacatatattatttggactgtattacagatgacatatggctgattctacacatttaatttatgcacatagcttaacggaccagaaatgtctgggaaaagtaatgtgttacacataatgatatgtaacttttgaactttttaacataaagttaacaagattttcaatgtgttgtactccactccagggtggtccaccacgtctacatatatactccccttcaagttattacaatagggggtcacctcatatgtgtccgggaatctccatagccacccaactggccttgtaaacgcaatggctgcaaattaaattgggcttgggaattcacccaaggtggaggctaaaggcccactatacatccgggaacctcacaaattacctggtgcgaattaagatgaaggtgtgcaccctaaacttgccgttggaaacaattccccgacaaggccctgctacccccccaaattttggccccatcatgccatgtcctacaccccaaaacattggttcgcgcaacagctcgcaca

SEQ ID NO: 593101 - DNA, 862 bp, Homo sapiens
ggaggaggaggaggagaaggctctgggctcctctgcaaaaataaaaataaaaaactacaataaacattttaaaaataataaaaattcactatatacacatataaagaaataacacaagaagtctcagttgcagctattgtcaaaattaatatccatttcttctttatatacggtgacactattgcgcaaactatagatctggatttcgaaccacttaatgaagcggccacaccaggtgtccgaggtgtcggcattcttcgctgcaatcggctgtccccaatgtttacattattcccaactccatgcacaaatggttctgtgcacttggatgtgaaatgctgtccagttattatttctctgatgtgttatccttggatgtacaaaaaattccagaaaatgatctctgtagatattctgtgtttatttgggtcatctttagaagttatcaggaatgtgtttaaaacaagaagagaacttctctaaggaatgatacctagaaaaagattttattttaaatgagttgtaaacgctgtgttccttcgtcgtgcaagcctatctggcccaccggttatggcaagatggatcacatctcttatgtccgacgaacaccccacacacacacaccaccaccacccacacacccacacccagctacaaccgtgcgggcgccttctacctcccccccgaccggctggttgtggacaacccctgtgtaccctaaacatcaggagcgacaatctactcacaggcgcggcccacgcactcaccccagcgtgccccaattcttgtcgagccaacgggcaccgccatttatgtggccacatacatacacgaacgcgcgaggacctgcactaacgggcac

SEQ ID NO: 593102 - DNA, 405 bp, Homo sapiens
ccgcgcagtctggggctggttgaaggagctgatgaacacggagcaggccttggtccatctcatccagagctgctctctgagcttcaagcacctcactgaggccacggccaacaagaggctggcctatgtgacttaccaggatatccgtgctgttggctactttataggagcagaccgtgattgccgtcaacggcccctccgcagacgagactggaaatgcccgacaggactgaggaccacctgctgatctatctcacgagcaccctgggtgcccactcgatagtctacctgtgcccagaggatgtgcgctcgagccggacagtccttccgaggagcctctcccctcttcctccagcctctggcccggccctgactcttccacgcctcagctgcgggggtaccgag

SEQ ID NO: 593103 - DNA, 365 bp, Homo sapiens
cataaaaaaaaaattatatggatattgcatagttaagtagcacacccaaaatgcaactttgaggccaggcgcagtggctcatgcctataattccagcactttgggaggccaaggcgagtggatcacctgaggtcaggagttcaagaccagcctggccaatatggagaaaccccatctctcctaaaaatagaaaaattagccaggcgtggtggcagatgcctgtaatcccagctatttgggaggctgaggcacgagaattgcttgagcccaggacacagatgttgcagtgagccaagatcatgccactgcactcctgcctggctgacagagcgagactctgtctaagaaaagaaaagaagtcgacg

SEQ ID NO: 593104 - DNA, 215 bp, Homo sapiens
tgatgctgaggtgcttagaggatccccccggtcagtcgctctggcgtggaagtaagatacaagagaatcaatctaacggttccgaagaaacttttacttcctagtatcaaatgatcgcctggtattactggagtttctcagtgacatctcagcggtgcaggggctcacaccggtaatcccagcacttggggaggccaaggcaggcagatcacgag

SEQ ID NO: 593105 - DNA, 281 bp, Homo sapiens
tagaggttcctctctggatgcaagtgtccagtgagctgggtggtgtgggcctgtgcaacacccagtacgcccgtttggtggagatagtggagctcttttgccttcaggctggtgctcaccattgatggaatccttccttgactggcggtagactactggtgaagtgactgtgccagttgaatttgggggttattcaccagttagacctacagtgattcatgcttcttttttcccaggaaactgcctacctgtgtagaagtgctgtctgagtatccctggtt

SEQ ID NO: 593106 - DNA, 635 bp, Homo sapiens
  misc_feature (116)..(116): n is a, c, g, or t
ttgaaacagaagagctagacacagcataagtttgtaaattagatcctctttagaggattgcatggaaagttgaatgatctattgttttgatatggctgtttcatcttagttaattnaaatgtgtgatatttaaagtaagtaaatatgatagttaaaagaaagaggaatctttagtttattgtagttctaggatgctattgtgcttattttgctgtcccctctttctaaattcctgtgcttttgctccactgtagtgattcgttgcagttatacaacttgtgtgaattcagcaccctatctccatataagtagattagttgagtgacctcttgaagcagaatatctgggttcaagtccttatcgcaccttgactattctatttgccaaattttattagtaagctcttggtgtctgtttccaaacgtgtaaaatggggataatggtgatacctacctatatatgagattgtcgtaaggagttagatgagataatttatgtcaagagcttaatacctcttgtacccaacactgaataaatgtggactataattatgattattatccatgggagatattgattgtcaatcaggataaaaaccaaactgtagagtttctttaaagagcattaaaaaaaaa

SEQ ID NO: 593107 - DNA, 110 bp, Homo sapiens
tatatagctggtacccacgatggctctagtcacggttggctctatgtccacggttgtggagatggtagagctgtggcagccagttttctgcaagccaaccgtggactagt

SEQ ID NO: 593108 - DNA, 290 bp, Homo sapiens
tcgatctctagcaggatcccctccacgtcgaatatcaatccaacatatctattttagatcttatacagtgcgcccccgccccacttaagaaaaaatagtgcggggaactgggcgaaagcatgtaagtttacaggcggcttcaaaacagctaacagcttgaagctcaaattccgcagagaaccgtgtaacttcagcgattgagacgtgaatatcctgtccattaggaagtttatcgctattcacatttatctcgaataggtttgtctggaccctagtattcgcacgtgtga

SEQ ID NO: 593109 - DNA, 115 bp, Homo sapiens
ctgggtctaacggagacacagcgtcatcgtcgtgttcattggggaggctaatcggattgtcgtcgtgttcataggggaggcaacggaatgcgtcgttttcatcgaggagtgcttg

SEQ ID NO: 593110 - DNA, 419 bp, Homo sapiens
  misc_feature (110)..(110): n is a, c, g, or t
cggcgccagtggcgaccggattaggctgagctgagacattccggctgaaggttcgagcggccgctgcggtagtcatcagacattcgcctggttggggcttgtatgtcggntgcatcaccgacaccaggcactcaacacggtgcgttctggatgacctcctcgcggcgatgcatccaggccaaacgccggacggaccagccacttggccagccatacatcggcatccacgttgaagtccttcgtaaccccaagcaatcgctcgtactcgggcgtctgtgcgaagcgctcaagctgatccagctgacgccgctgatcggcggtgaaggcgccaacatacttcgtcatgtggaaactcaccgtttgtgggtaatcgctatagatcccgtgtcagcaggcgcgcctatcctttggagaggcgt

SEQ ID NO: 593111 - DNA, 229 bp, Homo sapiens
ggcatcagattcactgagagacatattacaatgaggacatctggttatacagatagccgctttgcaatcaggtaactcatgtcatctgcccacttttctaaattgaatgtgctttcattagacggttgacgacatactccagatatgagtcctttgtcagatatgtagcttgtccatatttagtccatgtgtctagcttgtcttttcaccattgcaacacggtctctca

SEQ ID NO: 593112 - DNA, 289 bp, Homo sapiens
acggacggccggtctggcctggtggctgctgtgaacggccgttcgcaatccctgggctcgacatagtgctattaggttccatacatcgctccatatcccattcccgcctggcccacgtgctcctgcgtgcgcgcagtctcgcagtttgtcgagtccagctcctactactagtacctccgcccgcccttcgactgctcctaggccatctactttgggaccttctgaccagatcttttatttgtgctcccagtactggaaccgcggccctcattaaggtccgtccacaccg

SEQ ID NO: 593113 - DNA, 324 bp, Homo sapiens
tgctgagattacaggcgtgagccaccgcgcccagcctattttttggtattttttatagaaacagggtttcaccatgttgcctagggtggtctcagactcctgggctcaagcaatcttcctgacttagcttctcaaaacactaggattacagccatgagccaccttggctagctgatttcttttcaaagacaacgtcatagttaaagtgttaagattataggtgtgaaccactatgcccagacttgcactaagttattattatcgttaatactgtgtctgatttagaatttaaactttatagatacatatgtataggaaaaaata

SEQ ID NO: 593114 - DNA, 141 bp, Homo sapiens
tgaaacgggggcacctcttgttgcagacggaccagcccatttacaaccctggccagcgggttcggtcccgggtctttgctctggatcagaaggtgcgcccgagcactgacaccatcacagtcatggtggagaactctcacg

SEQ ID NO: 593115 - DNA, 87 bp, Homo sapiens
tcagaacccagggactcagctgtgtacttctgtgccagcagtccggggacagggggcgtcaagggcaccggggagctgttttttgga

SEQ ID NO: 593116 - DNA, 263 bp, Homo sapiens
cttgtttcactttaatctctgcctcactggattacaagcacattcattctgcactcagctctcctagagatagagtgggacacacaaggcaccacgccaccacactcgcctaatttttttgtaatttttagcagagactgagcattcaccgtgttaaccaggatgaccttgatctcctgacctcgtgaaccacctgccttggcatcccagggggctgagattataggtgagagccactgcaccaggctggcgattgtattttg

SEQ ID NO: 593117 - DNA, 181 bp, Homo sapiens
  misc_feature (24)..(24): n is a, c, g, or t
  misc_feature (115)..(115): n is a, c, g, or t
  misc_feature (132)..(132): n is a, c, g, or t
aaatatagtacaaatcaaacacanatggggtgtgaggatttaataaatgaagtctggaccattggtgtgtggccaagctccagaaagcagtctgatcattcatgtactggcaggngtccatttatttctaantcatcctgagcttaacttcatttaaaggaataaattaatcggtttttaa

SEQ ID NO: 593118 - DNA, 1771 bp, Homo sapiens
tataatagtctggttttaataaaaaacaagttgtgggaatcaatcaatggtccatttcaggaagcttcttgtctgaatctccgaaggcacagcttggtgttctgttacccgtgtctcagccagcctgtgggggccgtgggttgtgtcctcctttgttccatccagcgtggtctccattcgtgctcgtgcatttttttgtgtctcctcttttgtggaggttcccactttgtgggtttgtgggctttgtgaaatttattagcgcgcataccaagtatactgtgtgttcacgcctccttataatttttatacgcttctcaattctctctatttgtgcacttgtgacaactgtggaactccatgtggtctcaaaacctcgtgcgcgtgtgtgtctcgtggcagagatttatagcctgtgtgtgtatattctcatgctcacaactgctccccatgtgtgcgcttctacatatgtgtaggtgacctatatttatctctatacccccttttgtgtgctccatgtgtgttacagacagaagacatctcacagaatgtggatctacatatagcgtggggctccccctccgagtggtgtattgtgttgaaagagagaagccgtgggatcatatatttctctacatatatttagcgtgggctgtgcaaatctctgttgtgtttctcccccctaatagttgttttcccttcttcacaagatgataaatatctgtgcgagggctgcgtgtctctttttcgaggagaatatttcgcgtgtggaaaaacacggtttatctctgtattaagcataggggggttgtggaaccctataagaaatttgttttctcctataaatttctcagcggccccaaaagttttcatattctctagcagccaatattagaaacctttgtgggcgttgtaggggggcggtgagcgcgccctaatctctcgccaagttccgctctcatatatataacaaaagcgcccaaaagttttttcttccaagggaaaactcctttatccccaccaacgctcttttacacaaaacaaggtgaaagacaacatgtcgtgttgcgacagcagaattcctaatttgtttgccaatctttcccagcgcaaataatgtttttgcctcaccagtcattttttgtccgacgccacaacatttaaaaagggctctgtggtccttccctcacacacattcttgcgaatacaacacccggtctttaatttttccctctcgccacagtgtggggggtttgtctcataaagagcagttacatatatatcacccggggatgccacttatctcccccccgagggttataattcccccggcggattaggagaccaacattcttttaagccccttccaattttttccccagctgtgttcccaccgcgtttgtgaggcgcactctcctctcgggggtaatatttgcgccccaaaaataagcggggagattctccgcaagtgggggagagggcccccccaagatactgaggggtcttacacaatattgggcgcacgcttgtgatagggagaagcagaagtgcagaccacgcccccattcatatccagcatagggatactcagcaactatgacaagaaaagagagcaccgaacattagaaagacaccaccggccaaaatatcatgcgagaggaaacgagaagcaagcgagagcgtcaccacaaaagaggtacgcccccgcatcgaagcaaatatcgtatctccaggagcgtagtaaatacatcacatagacgacagcgtcaaacga

SEQ ID NO: 593119 - DNA, 496 bp, Homo sapiens
ggggggcccccccggggggggggcgccttaaaaaaagggggccccccccgggggggggaattggggggggggggggggggcccccccccaaaaaaaaaaagggggcccccttttttttttttttaaaacccagggggggggttttagggttttccccccccccaaaaggggggggggggggggaaaaattttggaaaaaaacccccccctttggggggggggggggggggggtttttttaaaaaatttttttggccccccaattttcccccctttccccccctaaaaggggggggggtttttccccccagggggccttttttttaaaatacccccttttttttccccccgcccctttttttttttttccccggggccccccaaaatttttttttggggggcccccaaaaaaaaaatgggcccccttttggggggggggggggggttaaaaaaaggggggaaaaaaaaaaaaaacccggggggggtttccccccaga

SEQ ID NO: 593120 - DNA, 1032 bp, Homo sapiens
  misc_feature (8)..(8): n is a, c, g, or t
  misc_feature (771)..(771): n is a, c, g, or t
tttatttnttgcttgatctgcggctctcttagcattatactggcgcagtgacgctttgagccgctttttaatatttatcgctcgcatcgtgtcctatcgcgggcctccccagtttaagcagcatggagccgcggccgctgtatgtagcaagctctggtgcacccttgtggaattgtccctcccggccttaattagaacacaccttccggggcccctcaaacggacccaggggagtcacaagcactgcagaatctcccctcctcggtgtacgggggcaccaacactttgttccctgcggggcagtgaaccgtttcttccacgcgcgcctggtgtgctgtctgcccgtcccattacgtctccacctcccgattggtgtcgcataaagccgtctcctggatcttaaggtgtcgttgccacccatccgggtatatagattcccccgcggggtgcccacacatcttttgatgccgcacagtggcccccatcaacgagatgggggcgaccacacggtcccctattatccccggcggggcgacccccatctgatgatccttgcgggcgaggagatcacatcccccaagagttcccgcctgcccgtagtgttgctcccctgttctggtagatgcccccgggcgtggcttgttggacacgcctctctcctcccccccgggagagtgagctatgccccacacgacaattggtttgcttgtggcgactctccaccaaatggaggcagcagacatttctctgccccggactgatgttgtagcngggcagcccacgtggttccccgcagtgaggagagctccacaggcagattttttcctcaggggcggtattttgctgttaccccccagagtagccgggccgttgggtcttcactcacccaaggttatgaccaactaatcggggtgcatctggtgattagtgcaccccagcatgcctgtcccgccacaggctatggaagcccccggagtcctcctggaccctgttttaaacccaaaaaggaaccccgtttcccccaaaaaaaca

SEQ ID NO: 593121 - DNA, 678 bp, Homo sapiens
gtcacatgatcctaaggcttcaggaatcggaggaagtggctgacactgacttaccattttaaccaaacaatcactgcacttaagcttggataagggtcaaataaaactaacagggctcttatgcaagcccttccagtctggtaagttatgagtatttatgttttatttccccccaaaaacaataagaccctcagaggcaaggaactcatcttggtttttgtcccttacacacctatctcagtccagtggtatgatgggcactggaaacaaaccacctggttcaaatcctggcttggtcacttattggccaagtggcctgatatggtttggctgtgtccccacccaaatctcatcttgaattgttagctcccataattcccatgtgttgtgggagggacctggtgggagagaattgaatcatgggggcggttttccccatattgttctcatagtaatgaatatatctcactagatctgacggttttataaagtgtttctcctcttactagactctcattcttattttaccttccaccatataatatttaacttttcttcctcttacctttttcattatttttaagcctccccaaccttgccaaattacacattttaactttattaattaaacctttctatttaattaaaaaaaataataattccctcctttacaacacg

SEQ ID NO: 593122 - DNA, 257 bp, Homo sapiens
  misc_feature (64)..(64): n is a, c, g, or t
  misc_feature (67)..(67): n is a, c, g, or t
  misc_feature (69)..(71): n is a, c, g, or t
  misc_feature (118)..(118): n is a, c, g, or t
  misc_feature (132)..(132): n is a, c, g, or t
  misc_feature (171)..(171): n is a, c, g, or t
  misc_feature (235)..(235): n is a, c, g, or t
  misc_feature (252)..(252): n is a, c, g, or t
cccgacgattgcaacgagacggctgccacctcttcgccacgcagatgaatattgctgggaagancgncnnncagcagtacacgctgcggtcgttgtcgggacggttcagcgaccggancttccgccagtaantttacgcgtataaggatgctgcgggttttcgaagaccgngcgccgtggaccaatttcaacaatttgcccgagatacatcaccgccacacgatgactaatccgntctaccaccgccatatnggggg

SEQ ID NO: 593123 - DNA, 310 bp, Homo sapiens
agcaagacaagtgagacaaaagggcgacttcacagtcttcaagtacatagaatccctgatatcaatggaacttacatatgtaatttctgggggccataaaacacaccaacaaaaacctgtgacaacttagtcctactcctttaaaaatgagcttcgactctgtagtctcttaaggcacaaaacctgatagcacggcatctcactggtggcctgcacctctgatttggcatcctcaaaacacaactattgacatttcaataacaataaaccattttgttagagctggagatcctaggatacagcagggaga

SEQ ID NO: 593124 - DNA, 135 bp, Homo sapiens
  misc_feature (35)..(35): n is a, c, g, or t
  misc_feature (71)..(71): n is a, c, g, or t
gcgagacttctggcactttagagcaactactcctngctgttgtgaaatctattcgaagtatacctgcctancttgcagagacctctattatgctatgaagggagctgggacagatgatcataccggtagcgagct

SEQ ID NO: 593125 - DNA, 902 bp, Homo sapiens
gccatgcccggctaatttgtgtgtggtgtgtgtgtgtgtgtgtgtgtgtgtgtgtgtgtgtgtgtatactagagacggggtcatccactttgttggccagggctgctctcgactcctgaccttgtgatccacctgccttggcttcccaagtactgagatcacgggtgtgacccactgcgcctggccttttttttggggagagaaaggtcgtgttgtgacatctaggcgggagtgcagtggcacagacatagctcatggggcgcccccaacttggggtgtcaaggtatcctttacgcctcgctccctccctagtagctgagactacaggtgtatgtcgccactgcgcccagctaatatttcacattgtgtagagatggacgtcttgctgtctcgcccaggttgggtcacagactcctgggctcaaacagtcctcccacctcagacccccaaagtgctgcaagtacgggcatgagccactgagtccagctatcttcaactttcactattcaggtcacagtgtgtagctaccttaacgcgggggagtggagagaggggttcggtgggagtaacccccaaagattctgggagaacaagggtaagaacttggtccaggaactgaaaaacagtcggttctaaaccccatggttcacaaaagtaggactccgagccccaaaatgaaaacacgggagtaaacaccctcatgggggttataggacaacaacaacgccctactagaaggactgtagaacatgcgccaactaaaaaaacagggcggtgagccccacacaagacgtcgacacgggaaaactcacctagaccaaatcgttacacaaattgaagagtgagcgcggaactagaaagagaggcaatcaagaagaatcaccacgaggacaagaaagtac

SEQ ID NO: 593126 - DNA, 890 bp, Homo sapiens
tggagctgttctgctggtcacgggctgggggctgccgtcagtgaagcctgtgacccgactggcgtgtctgacctatgccagatttactgtgtgctccagtgaaggtacacaatgatcagcacatcccctgcgcagagcccttcaggaactcttgcctggccttcgcgaccagttcatggacgaggtcagtctcagattccacagcaaggagtcatcactccagacctttctgcaagaagagaaggtagcagagtgctgagttactgactcgtcgtgcaagcatccgcgccaaaggtggtcagagacagcgccatgggccgattcgatgtcgtcatcctttggatggcagaagggttgtcatcgcgcgggatgacgtggtaggctatacgttggtatctggagtaatgacagccgaaagaagcggtacgttgagaacggtgcatccacgcgatatggctggtagtgcacggatggctagtgctcacttggtccgccatcaagcttcgtatacgcgtgcgctggaaccgatatgtcgatgactggcgagtacgatggcatacggctacatgactggtctggactgcgggcagcagcgaggcactgagagagcaggaggagagagcgtggacgaagggacgactgtagccgaagaggctcgcggagtgtactgacgccatgactctcttcagcgcctggagctctcaacaagttctctccttctggagatgcccctgtctccttggacgccttcgtacttcagactactttgggccctgtctgctgcaggcaaaagctgcccaggtgggcaagcgtgcaggtccacctgcgtgggcctgcacacacctctgtgctatttgtgcccacagtgctcagtctctagttacccctgg

SEQ ID NO: 593127 - DNA, 837 bp, Homo sapiens
gctgattctaatgtcacctaggcaccacgtagtctctcagaagtacggataatagaatgggctgacgcgaagaaaatcatcccagatcgtggacccttgggagagcgtagtttaagattttgaatgtcgtagcgaagtgagcatgtcgaatcgcgcagagtggagtcaacaggccaggacgacacgcctgatggccgatagtcctccgcgatatcaagtcggagacggcatcgtcgtgccaagatgacgctcggaagcagaggtattgcagtacttgaaaggtcgagccagtggccgaggacgagtcacgtaacaagagagagcccgagagaggttggggggtgggcttatatttcgcgaagcccgaagttgggcctgggagctcccttggcgtctcctaggagggaacactgggccaattttttcggcccaacgcctttaccgtgggtattcgaaagagcccccaatggtaccgggaacatttcttcaccccaaatggggcgccccacgattccgattcccgctctatccgggtactacacagatctcggagagagcactgtggggatctgcgcgcgtttaaccaagttggggcgccaaaccgcccggggcccaaaggaggcgccccaaccgtcaacccaagtaggcttgttaccgcccaaaccccgttcgggagcgagtctaaaatcacccgttggttcaccctctaaattcgggcagaccacagaggaggcgccaacctctcggggttgaacatttccccccggcgaagcacgattggccttcgggtttcaatttgggggggccccggggcacctttgcgctccaccggggaga

SEQ ID NO: 593128 - DNA, 225 bp, Homo sapiens
tgtggtacaagcaatcctgccacctaagtcccccaaatatgctgggatacatggtgtgacgccatttgcctggctgcatatttcataattaaatgtgaccagaatgtctagaaaaaaaaagattagaagacagctagtgcccccatgttcgaaataagaaccacagttcacaatgggggactggtgtggtggacatgggccttggctctctggctctcccttgcc

SEQ ID NO: 593129 - DNA, 713 bp, Homo sapiens
ggtcactacttttcagtaacaagaatctgcatcctggtaaaccagaagaaaatagtatgagacggggaatcatcgtgtgatgtgtgtgctgcctttggcttgactgtgtggagtcctgctcagtgtgttgaggtacatgtgtgttatgatcgtggttggcttgatgggaacccgctgttcagagctgtgactgcggctgcactcagagaaagctgcccttggctgctcgtacgcgccggagccttctctcctcgtcatcatccaagagcatgccatgtgtcctgggaggcagaagatgccccactccatgcctgcatccattccatcccgtgtcccaggggtcacggggcccagaaggcatgccttggttctgtctgagtgcctgcctggtgaccctttgcgtggtgcttaggagagccaccacgtagctactactctccgtgtacctggtcctccacctagcctccctgcatctgggactgctgttaaacggggtctgcagcctggctgaggagctgcgccacatccactccagtgtaccggtggcagctactgtaggactgtgcgggcctgcctgggctgccccctccgccgtggggccctgttgctgctgtccatctatttctactactccctcccaaatgcggtcggccgcccttcacttggatgcttgccctcctgggcctctcgcaggcactgaactatcctcctgg

SEQ ID NO: 593130 - DNA, 484 bp, Homo sapiens
actggcttctccaaaaagtcatacaagagagtgcccaagatgcaatctgccatctttttgtaacctaaaatctgaaatgacatcccgtcagctctgtattttatttgataaaagtgagttaatatgtccagcctacatgcaaggatagataattacattcagacttaaataaaaggagtcaaggatcacttgggtctatgttagaggcagcctatcatagtcgatccaatactagttggatggatgaatgaatggatggatggatggatggatggatggatgtggagggatggtcagtcaggcagacagatgatgggcaaatagattaatgctataccacaatataatttaatttatgttgcatacccaacttaatcctgaaaaacttgagactatttaggaaagattgaccaggatggtgagaggtataactattttccttctatatataaaagttaaaatattctataaccctttgccttta

SEQ ID NO: 593131 - DNA, 849 bp, Homo sapiens
  misc_feature (10)..(10): n is a, c, g, or t
  misc_feature (96)..(96): n is a, c, g, or t
  misc_feature (175)..(175): n is a, c, g, or t
  misc_feature (201)..(201): n is a, c, g, or t
  misc_feature (204)..(204): n is a, c, g, or t
  misc_feature (226)..(226): n is a, c, g, or t
  misc_feature (249)..(249): n is a, c, g, or t
  misc_feature (410)..(410): n is a, c, g, or t
  misc_feature (412)..(412): n is a, c, g, or t
  misc_feature (475)..(475): n is a, c, g, or t
  misc_feature (478)..(478): n is a, c, g, or t
  misc_feature (488)..(488): n is a, c, g, or t
  misc_feature (490)..(491): n is a, c, g, or t
  misc_feature (494)..(495): n is a, c, g, or t
  misc_feature (529)..(529): n is a, c, g, or t
  misc_feature (533)..(533): n is a, c, g, or t
  misc_feature (538)..(538): n is a, c, g, or t
  misc_feature (593)..(593): n is a, c, g, or t
  misc_feature (596)..(596): n is a, c, g, or t
  misc_feature (598)..(598): n is a, c, g, or t
  misc_feature (611)..(612): n is a, c, g, or t
  misc_feature (639)..(639): n is a, c, g, or t
  misc_feature (685)..(685): n is a, c, g, or t
  misc_feature (695)..(695): n is a, c, g, or t
  misc_feature (698)..(698): n is a, c, g, or t
  misc_feature (729)..(729): n is a, c, g, or t
  misc_feature (747)..(747): n is a, c, g, or t
  misc_feature (764)..(764): n is a, c, g, or t
  misc_feature (808)..(808): n is a, c, g, or t
  misc_feature (810)..(810): n is a, c, g, or t
ggtcgggctncgggaatggtgggcggcggtcgccgggtggggcgcgacggtagcccagttctgggcggggtgggaacccagacgggggacccctangcgccgggcctccctctccccgtacttttcccccttcccagtcatttcttctgcggaactccacccctccagtgggtgngggaccctaggcagcaggccaggcancgncgctctgactgggggccccganagcagttaacgggccggacagcnaagtggacaacgttataccagctgggaccatgggtgaggtgggcacccggcatgcgggaggagcggccgggcttggtcatctggccccctaacttgctctcgatcctgccggtctcgtcaccgcatgaagccggtgccatctgtgggggctttgggccagngngtctccggacagcatgagcgtgggcttcatcggcgctggccagctggcttttgccctggccanggngcttcacagnanncanngcgtcttggctgcccacaagataatggctagctncccnagacnatggacctggccacagtttctgctctcaggaagatgggggtgaagttgacaaccncanancaaggagacggtnncagacacagtgatgtgctcttcctggnctgtgaagccacacatcatccccttcatcctggatgaaataggcgncgacattgangancagacacattgtggtgtcctgcgcggccggngtcaccagtcagctccanttgagaagaagctgtcnggcgtttcggccagggccccagggtcatccggtgcatgaccaanantccagatcgtgagtgcggaaggggggcaccgggaaatga

SEQ ID NO: 593132 - DNA, 267 bp, Homo sapiens
  misc_feature (78)..(78): n is a, c, g, or t
  misc_feature (214)..(214): n is a, c, g, or t
gattttttcctattttaagtagagatggggtttcaccgtgttagccaggatggtctcgaggctaatttttgtattttnagtagagaaggggtttcgccagggtgcccacgctgttctcgaactactgggctcaagggatctgcctgcctcagcctcccaaagtgctgggattacaggcatgagccaccagcaacacggccagattcttctacanccttaattgggaggtaaggcttctgctttcaggctgtgcgttcttccagccag

SEQ ID NO: 593133 - DNA, 200 bp, Homo sapiens
taccggaactgatgatgtctgacggagtaactacgtacgatggcatggcccgagcgtggtgtcgactgaactgcctagtcccccaaggcctggttctacctcagcgggccgggagtgggggtgactgtgcgcaacaaggttctcgtcgttcgctggaggagaggccacacatgtgtcggagatagtatagtcgtaaggac

SEQ ID NO: 593134 - DNA, 112 bp, Homo sapiens
ctctgacggatcccgagagctcgcggatagggcgcatgcagtgtggggaagtaatggggtgggtttgtcatgttcaaactgtcattttatttttacgttgttagatatgggg

SEQ ID NO: 593135 - DNA, 124 bp, Homo sapiens
gacgatttcatagcaggatccccgtgtaaacccctttatccaattctctccccactcctttctctcagtcttcttacaaccatatatctgctttctgtctccatggattatagcctgatatgaa

SEQ ID NO: 593136 - DNA, 729 bp, Homo sapiens
  misc_feature (10)..(10): n is a, c, g, or t
  misc_feature (96)..(96): n is a, c, g, or t
  misc_feature (175)..(175): n is a, c, g, or t
  misc_feature (201)..(201): n is a, c, g, or t
  misc_feature (204)..(204): n is a, c, g, or t
  misc_feature (226)..(226): n is a, c, g, or t
  misc_feature (249)..(249): n is a, c, g, or t
  misc_feature (290)..(290): n is a, c, g, or t
  misc_feature (292)..(292): n is a, c, g, or t
  misc_feature (355)..(355): n is a, c, g, or t
  misc_feature (358)..(358): n is a, c, g, or t
  misc_feature (368)..(368): n is a, c, g, or t
  misc_feature (370)..(371): n is a, c, g, or t
  misc_feature (374)..(375): n is a, c, g, or t
  misc_feature (409)..(409): n is a, c, g, or t
  misc_feature (413)..(413): n is a, c, g, or t
  misc_feature (418)..(418): n is a, c, g, or t
  misc_feature (473)..(473): n is a, c, g, or t
  misc_feature (476)..(476): n is a, c, g, or t
  misc_feature (478)..(478): n is a, c, g, or t
  misc_feature (491)..(492): n is a, c, g, or t
  misc_feature (519)..(519): n is a, c, g, or t
  misc_feature (565)..(565): n is a, c, g, or t
  misc_feature (575)..(575): n is a, c, g, or t
  misc_feature (578)..(578): n is a, c, g, or t
  misc_feature (609)..(609): n is a, c, g, or t
  misc_feature (627)..(627): n is a, c, g, or t
  misc_feature (644)..(644): n is a, c, g, or t
  misc_feature (688)..(688): n is a, c, g, or t
  misc_feature (690)..(690): n is a, c, g, or t
ggtcgggctncgggaatggtgggcggcggtcgccgggtggggcgcgacggtagcccagttctgggcggggtgggaacccagacgggggacccctangcgccgggcctccctctccccgtacttttcccccttcccagtcatttcttctgcggaactccacccctccagtgggtgngggaccctaggcagcaggccaggcancgncgctctgactgggggccccganagcagttaacgggccggacagcnaagtggaaagccggtgccatctgtgggggctttgggccagngngtctccggacagcatgagcgtgggcttcatcggcgctggccagctggcttttgccctggccanggngcttcacagnanncanngcgtcttggctgcccacaagataatggctagctncccnagacnatggacctggccacagtttctgctctcaggaagatgggggtgaagttgacaaccncanancaaggagacggtnncagacacagtgatgtgctcttcctggnctgtgaagccacacatcatccccttcatcctggatgaaataggcgncgacattgangancagacacattgtggtgtcctgcgcggccggngtcaccagtcagctccanttgagaagaagctgtcnggcgtttcggccagggccccagggtcatccggtgcatgaccaanantccagatcgtgagtgcggaaggggggcaccgggaaatga

SEQ ID NO: 593137 - DNA, 233 bp, Homo sapiens
tcccacgtgtttctagtaagagcggcatacaatgtgcttgaaagtacaattaaagacagtatttatgtattaaaacgaataaaaaacgctgactgtggattcataggccaccatcccatgctactaatctcatggatcttcctcactttgatagtaaatactgttatgtatcgatatcatatgtggactttacacctaagacatgaattttcctcacacacaacctagcagaa

SEQ ID NO: 593138 - DNA, 985 bp, Homo sapiens
  misc_feature (311)..(311): n is a, c, g, or t
ggccatgccaggaatctgccttaccgtggcgaggttcagtcttgtagaaggtgcctcttcagggtacacagatgtgtcgtcgtctgactgggctgcataaatcaaaagcctgatgttcgtgtccctctcatagggggagcttagggacacaggaccagttagagaaaagggtcgaggtaagggtttccagtctgcacattgtagagggaacactcctgtgaggtgcccgatgggtccctatactagagaggttgagtgaatttgcctgtcagttgagacattgggaccttgctgttgaagcttacctcttngcttcgccatagagatatgttaagcattttctgtcaacatgttataaactcagcctctggtaacagtggcgccagacgctgctttgtgctaaaagcgtgggaaatgtagaggcagtctttctctgggaaatggatgctattctattctgctggccctacctggttccgtgagggctcaatggttatgaaacgaaaatcccctcgagaaggctgtctggcacccagtgtagctagccaggccaagtgatatgagaaaggtaagtccatttagccgcttcaggtcctcagtggattagttaatcactgctgtcgctcggtccctttgtgcctaaacgggtatagtactgtcgttttctccttttttctatatgctggtaaatatttacattcagcaggaagaggaggcagatgtcgggccaggtgccatcttttaacgttgtagggccgccatggagggacctgctcttgggctcgtgagcttttgctatcatgtccattcgggcgtcccctaaaaagcaccttggagggggggggtggttcccccggatgggtatggttggaactggtcagaatctggtggaatggggtgcacactcaaggggcgcaggtgtttggacgtctcaaacaaagggggcggcgaaaacaaaaaaacctgggcggaaagcagcgcccat

SEQ ID NO: 593139 - DNA, 630 bp, Homo sapiens
  misc_feature (2)..(2): n is a, c, g, or t
  misc_feature (106)..(106): n is a, c, g, or t
  misc_feature (114)..(114): n is a, c, g, or t
  misc_feature (122)..(123): n is a, c, g, or t
  misc_feature (126)..(126): n is a, c, g, or t
  misc_feature (132)..(132): n is a, c, g, or t
  misc_feature (148)..(148): n is a, c, g, or t
  misc_feature (151)..(151): n is a, c, g, or t
  misc_feature (168)..(168): n is a, c, g, or t
  misc_feature (170)..(170): n is a, c, g, or t
  misc_feature (186)..(186): n is a, c, g, or t
  misc_feature (200)..(200): n is a, c, g, or t
  misc_feature (216)..(217): n is a, c, g, or t
  misc_feature (225)..(225): n is a, c, g, or t
  misc_feature (231)..(232): n is a, c, g, or t
  misc_feature (315)..(316): n is a, c, g, or t
  misc_feature (320)..(320): n is a, c, g, or t
  misc_feature (431)..(431): n is a, c, g, or t
  misc_feature (558)..(558): n is a, c, g, or t
  misc_feature (587)..(587): n is a, c, g, or t
tntgctgataagcagtcaaaacatttaaactcaaaattgacaaatcaactagcttgctttttgtcatttgggagactaccattattcaaatttattatgtaatacnctcctccngatactgnnacntctgcnccccccagtgtgggcntcncctcctctgtgcctaancnggctattatccatgantgccgacgtttgangttcgcccggcatatnnctcccatngcaaanngtcctaattacagagtttacaaatcagcagttttattttcaaaagtacatagtaagtcccgactgggctattgccaaagaacnnatcnttagtctacttccacatgttacatggtattcctgactctacagactatccgcctctgtggaggttagctcctaaaggtcccaaagaacaggaaacatgccggaatacaggnctcctcatgacgagcaggtgggagcgagtgggcaggcctgtatcttctcagcaaagtaaggattgagtatagagagctgtttgtcttaactgggcttccctgaagaatctgagccaaactggaaganaccagcctcatttccagtgttgagatgtnagctgtacagtggctgtacaactgcagagtttatttatagaat

SEQ ID NO: 593140 - DNA, 995 bp, Homo sapiens
  misc_feature (995)..(995): n is a, c, g, or t
gcgagatcgaggtggagatcatcccggtggataccatcgagaccacagtggtgggcgaggaggaggaggaggacgacgacgacgaggacgtgcgcgcggtggcgtacacacgtgtcggtcggtgggcgtgccatcgggcacgccggctcgacctaacaccacctccatcatcaccagcagctacccgcccatgatcgttcttgcagctcgtctgagtctaccgacggatccctgactcctagggtgcatgcaccagccagtgaggatgatcctggttgcagtacgcgcgagtgaggttggtgcggctggcgtaccgactctgtggactgggctgtcgcgcctgatgcgtaccgtgcttctgaggcatcttgattccttcctcccggtcgcctcgcgcttggcccggctggcgactcatcggagcatactactttgaacgagggactgcttggtcagccgtggctggcggtgcccgccatagacgccggcagtgctggctggacgtcgtcgctcttctgcgcgacgtgcaggaccgcggtcaaagaaaggggccggggagctcatcaagagtcggcccgaacgagttacctcagtcggccgtgggccgtgctgcggcgtgagcggtcgtgccggcgccgacccgcggcacacaagaggggtggtatcgagaatgcaggttgctcgatcaagacccctggagggctgaatgttctcgcgtcctgcagtgtgggtcctcagcatgatccaggatgttgttgacccatgtagactagtggttgaaagaaacccagactcattggggggcggaactcgagcctaccttgattcattcgcgaattgttttgctcgcggaatgaatccttttctgcctggagcgtgaatacctggggatttgccttgtccgtgttcctggagatctgggcagagtgtgctagccttgacgccgcctaatgttggcggacgatgatgctcccctatgcattggttgcctccan

SEQ ID NO: 593141 - DNA, 83 bp, Homo sapiens
  misc_feature (1)..(1): n is a, c, g, or t
ntctcagtccctctcgtggtctcctccgtgaataatgtgacatacgactgttgactaaacgcaataaaacctctgtttgtacg

SEQ ID NO: 593142 - DNA, 852 bp, Homo sapiens
  misc_feature (3)..(3): n is a, c, g, or t
  misc_feature (114)..(117): n is a, c, g, or t
  misc_feature (120)..(120): n is a, c, g, or t
  misc_feature (145)..(145): n is a, c, g, or t
  misc_feature (153)..(153): n is a, c, g, or t
  misc_feature (160)..(160): n is a, c, g, or t
  misc_feature (179)..(180): n is a, c, g, or t
  misc_feature (212)..(212): n is a, c, g, or t
  misc_feature (224)..(224): n is a, c, g, or t
  misc_feature (235)..(235): n is a, c, g, or t
  misc_feature (274)..(274): n is a, c, g, or t
  misc_feature (276)..(276): n is a, c, g, or t
  misc_feature (302)..(302): n is a, c, g, or t
  misc_feature (324)..(324): n is a, c, g, or t
  misc_feature (329)..(329): n is a, c, g, or t
  misc_feature (338)..(338): n is a, c, g, or t
  misc_feature (343)..(344): n is a, c, g, or t
  misc_feature (348)..(348): n is a, c, g, or t
  misc_feature (356)..(356): n is a, c, g, or t
  misc_feature (359)..(359): n is a, c, g, or t
  misc_feature (380)..(381): n is a, c, g, or t
  misc_feature (394)..(396): n is a, c, g, or t
  misc_feature (398)..(399): n is a, c, g, or t
  misc_feature (403)..(403): n is a, c, g, or t
  misc_feature (406)..(406): n is a, c, g, or t
  misc_feature (410)..(410): n is a, c, g, or t
  misc_feature (420)..(420): n is a, c, g, or t
  misc_feature (429)..(429): n is a, c, g, or t
  misc_feature (455)..(455): n is a, c, g, or t
  misc_feature (496)..(496): n is a, c, g, or t
  misc_feature (618)..(618): n is a, c, g, or t
ttntctgttaattagtaccggggtataggattgactgagaaatacgggcttctttctattggtcacattcacagccaacatttcctctgtgccaggtcagaaagacagtgggtnnnnttngtgaataatttccttgagcaaagcngctctcanccttgancaaagaagcctttccaggnnctggtctatacccatgatctctcttctctggnacacagaaagtnaatggtcagantcatctcttgaatgggaagcgacgtgtttattacatttntngttcaccagagccactttattaaaangggaaatgggaatcagaaaggntaagngacttagcnaaggnnacanaacttggnagnggcagatcaggaagagaaatnnaggtctgctaggnnngnnagtnttntgtncaagggtgtnctaggaccnggtcatctcagccatgtggggttgcnagatgtttctgcatgtggataaagatagataggccaagggntatgagggggcagaataagctagaaattcccagaactttggtcctagaagggcccttaagaatcatccaggctggttgtggtgcctcacgtctgtaatcccagcactttgggagcccgaggngggtggatcacctgaggtcaggagttcaagaccagcttggccaacatggcgaaaccccatctctactaaaaacacaaaaaaatatccaggagtagtggtgcacacctgtagtcccagctacttgggaggctgaggcatgagaatcacttgaacctaggtggcgggggttgcagtgagccaagatcgcgccactgcactccagcctgggtgacagtgcaagactccatctcaatt

SEQ ID NO: 593143 - DNA, 177 bp, Homo sapiens
gatctagaggatcctgatgatagctccaccgctaccggacaagatgggattctaaatatacaatcatgtcatctgcaaacagggacaatttgacttcctcttttcctaattgaataccctttatttctttctcctgcctgattgccctggccagaacttccaacactatgttgaata

SEQ ID NO: 593144 - DNA, 438 bp, Homo sapiens
acctacacagtcgctcagtagtagctttgcactacgcccgagcttggtagccactatacgggcttctcttcctccactactgactcggcaactgagacagaatcattatcgcttgatatctactccttcgacttacgcgtctggcgttatttccgcagtcttggacaactgtgccgccgtctccgctctcttggggccagtcttgcgtttgctgggctcttcatcttctacatcactgggctcagtctcttgagcaggtggtgttggcttcgggctcgcctttttgggcgcaacctttgactttttcgctggccgtgggtcatcctcctcctcctcgtcaatttcgacaggtaccattttgacggccgtcttagcagccatcttcttgacagctatgccctatcttctgattcggattcaccatctggtttgtgcgcg

SEQ ID NO: 593145 - DNA, 204 bp, Homo sapiens
cccccccaaaagggttaatattttctcccatggggttcccggtccgtttgaagtccatccaatttttggtttttcggggtctccctggttggttttggtagttattttgtaaattggacctttgccatattagggtttttttccttttgggccattttaaaatgatggttcccccttccttttattaactttttaaaatccgga

SEQ ID NO: 593146 - DNA, 201 bp, Homo sapiens
agcgagtcacgatggcagagcacagtccctcatcgtgtggacagtacgcaacacgacggaatcacttacggcgcgcagaagcccatacaagtagctccatccggaaaccggtactcaatccggttccggtgacacccaccggtaaaagaatatatcacatgtcatggaacttagattaaagaaatacttctctgtggaccc

SEQ ID NO: 593147 - DNA, 284 bp, Homo sapiens
ctagctgatttagagttccccccgcacggccttaccgtcaaatctgatcagaacacgcgcggttacacataaataacatagtatatattcacatagctcactatgtctctagtgctccataatcattatttattctcataataatagcttagagagcctactgaccttcagttggctttttgtgcatctatatgtatagctgtataaactctttatactatacctttgtctcactgatatatacatatatgggccaggcacaggggctcacgtatgtaatccct

SEQ ID NO: 593148 - DNA, 630 bp, Homo sapiens
  misc_feature (125)..(125): n is a, c, g, or t
aggcattcaaggaaccatgggaagctgacttttcagaaggaggacatggacttccaattcaactgagcacgttgtatcccagaaagagaaacatagacagagtgacccatgctgaagcataactntggttagcttctgaacacagtgacaaaggcagaatcctatcaaccaaaaagccaaaggaaaccaaagcacaaattcccccacagcattcagcacccgaggatggtggccacaatctacagtttgggggaaaggaaatgtggatcagcagaccctggcacgtataaagaccacacacagatggctttacacgtgtgggcactcagggcggacagttcctaaaagccgtttttgacagaacactgaggaatcaaactgtagatcttaggaacaaggaactgtgctgaaaacgaatgacagtgaacacagaatccattctattttggaattaagaccccagtaactagtgaaattgtgttataaaacagagagtaactcttataaacatggccggtgtaaatcatgatgtcatcaccaaatcggaaaaggaggtgagggaacgctggcacttccctcatctttcagagcaggaagtaaaacttgaaacatgcagtcaaaaaaaaaaaa

SEQ ID NO: 593149 - DNA, 316 bp, Homo sapiens
gctgggaaggtggagttgggggagggagggaagagattggttaatgggtacaaacgtagatagaaggaataagttcaagtgtttgatagcacagtagggtgactatagttaacaatatgttatatatttcaaaataactaggagattagaaatgttccaaacacaaaaatgataaatgtttgaggtgatagatatcctaaacaccctgatttgatcattacacattgtatgcatatatcaaactaccacaccccataaatatgtacaaatatgtatcaatacaaacataaataaaattgcaatttcctgcaaaaaa

SEQ ID NO: 593150 - DNA, 177 bp, Homo sapiens
aggatccctggaggcaggacactggtagctccactccactttctatgttgcaattctagcaccatatggaactggagtcagtcaatactcgtcttcatatctagcttccttgacttcggatttcaagggtcgtcatattgagtatggatcagaatttcattcctttttttttttggg

SEQ ID NO: 593151 - DNA, 440 bp, Homo sapiens
atttttggttttattcaccgttaacgggagccggttaaaccctgagaagggttttgaatctttccttttttccccccccccccaaatatataaatttgggctctcccatgtaatgtatttaatttttggaaaatttaatgctatatagtaaatcaagtgtgtgatttaaagtaatccgatccctttgattcttttaagttttcagaatttcttttttccccaggtaattttggagaaaataatttcccattaactgataataagccccctgtcctctgctgtaaaaagtttgaataaatactgtgtatgtttttatgtccctgaacctgagctactcgtgggcaattatgtgtatgggaatggagtagtgttcatgatttgtatttccctcctcatatggatgtatatttattaataaagtccttccttttaaaaaaaaa

SEQ ID NO: 593152 - DNA, 269 bp, Homo sapiens
gaagctaagttctatgatacagaaaacgcgtctctcggtccaaagcaggctcctgcatagccatgtgttcttgctctgtgtctgtgattcttctcagcacatgcaagttgcaccaaagaggaggccttgagaggttgagtgggcagattcatgagatgtggttgggtgtcaagggccgcattgccaacatgctctgtaaataatgccaaaagaccaggggacagggcaccccagggctcagaagtttggagcttttccccaaagtcctt

SEQ ID NO: 593153 - DNA, 458 bp, Homo sapiens
ggctggtccgatggtagtgggttatcagaacttattcactaaagtggtatacaaccccccactgctaaatttgactggctaaaaaaaaaaaaaaaaaaaaaaaaaaaaaaatgtgtgggggcgccgccttggggccgaggaaagaaggttttctaagaaccaatcgcgggttggggcgcgccgcgggccccgaggaggtttacaaggaagccacgtggcgcagaagccgtggtcgcacaaggagaaaattccgggcgacaaaggagataggggcgtgggagttctcccccacgaagttagaaaaacggccgggggggcaacgcacgaggcgtgtctttgggaaacacagtccacaggagggcgtccggaggagcggccatcaacgggggcttcttactaacacgggaggcccagagcagaggcccggaataataaaattaaggcccggcggggggatg

SEQ ID NO: 593154 - DNA, 187 bp, Homo sapiens
aacgactgcgtctgtcggcctcgctgatcttgcccttgaagcccctcatgcgctccacggcgctcttcatgttagaaggcgtacgtgactccagggcgtacttggctgacatccctactacgctgctgctacctcgtcctccggctttgtacttctccgcctcttgcgcgcagtgctcgtcccgtgc

SEQ ID NO: 593155 - DNA, 498 bp, Homo sapiens
gcaaggccccgcgcctgcccggagggagctgtaagcagaggaaggtgaagtggcctgaagaaatgtctgtactggagacagtcggggctgtgtgcctctgcctgacgcaacatcatttcagacgtggaggaaggatctgttggcagatcttgggactcaaatgggctggacttctaagaaaaaatatacccaggcctctctattccaccaattttcattctttcatacatacatatttatttatttaaacagactttatattttaggcagttttagttcacagcaaatttgagcagaaaatgcagaggtcccatagacttccttacccaacatacccacggcctcccgctctgtcaacaccctgcagctgattcatctgacagtcgatgaaacgattcacacatcattatcacccaaagtccatcatctacattacagactcttggtgtcgtacattctgtgcgatttgacaaatgtacaatgacgtgtacctgcaaa

SEQ ID NO: 593156 - DNA, 409 bp, Homo sapiens
gtcgacaaagaatccaaaacatcaaaccaggtcggagatgttcacatgcgaacattatgaacaaacaaaaatatccctgcaaaacaacacctttttgttaccaaggtgctctgctttgtgtgagtaccctggaaagctgagagagagagagacatagagagtaggagagagagacagagacagacagagagagagacagagagagacaaagagagacagagacagagagagagagagagagagacagagacagagagagagagactgagggagagtgagagagagagacagagacagagacagacacagagagagacaaagatagacagagagagagagagagagagagagacagagagagagagagagagagacagagagagacagagagggagacagagaggtcgac

SEQ ID NO: 593157 - DNA, 172 bp, Homo sapiens
ggagagtttccattgggcagatttcccttcctgaaggccaaaacggagaacttgcttcttcttttagatttaacaaacctgtttcgattcccataataaaccctggaggacacagggataccgccagatggcgaataacttggctcttggcttttctatacccccactccca

SEQ ID NO: 593158 - DNA, 250 bp, Homo sapiens
cattcacgctcgacggggaattatacgacatccttgagtattaacgccttagcggtcatacagggctcgtagcctgcaggcccttcctcagtcatgaatgagagagacgatatcaccactctcttccgccataatggctacatctaacacttgggacagcttctgaagatgctgaattcccgcccccagaggctctaggtcactgtcagactcgctgggagagcagaggggctctgttggactaaagtgg

SEQ ID NO: 593159 - DNA, 364 bp, Homo sapiens
ttttttttccccttttgaaaaggaaaaacccttttggaaaagcctttgaattccggcccctttttacccccttttccccccccccaaaagaaaaaccttttttcccagtaaggtaacggccttttttggaggatttttttttgcccggccccctttgggccccccccgcaaaaacagttcccccccttccaggagaatttgcaaggggggatttttttttccccccggtgaaattttttaaatgaaattttaaaaacaaaaaaaccccatttggccgattccggaaaacccccaattttgttccccgtttttttaaaaagccaattttgtccaatccaaaaaaaacccatgggtgttggggtta

SEQ ID NO: 593160 - DNA, 183 bp, Homo sapiens
tcggtctggctgagcagctggcaggtccagaagttaaaagtgatgctgtgagcatggagccccgttccaggtgatgtgcgtgagtgcatggtaggggctgagaggggtcccatggtcgtctgctgtctgtgtgttctccgcctgtggagatgagcctaggatccagagacttcctgagcaggg

SEQ ID NO: 593161 - DNA, 180 bp, Homo sapiens
  misc_feature (4)..(4): n is a, c, g, or t
taanggggggcaaaaaaaacttccccccccccggccttccctttttttttgtggggaaaggttttccccttttttttttgggggggggggggggggggggccccccgtttttttttttttggtgaaaatgggccccctgggaataaaaaaaaaaaaaatgttttatttaaggggccccta

SEQ ID NO: 593162 - DNA, 504 bp, Homo sapiens
ccaagaattcggcacgagggtaagagataagtagggaaacagaaacatgagtttggggggtatgttgtctaattttagaaatacagtattattgagggcctcataaggtctacaaggttaaatggttgctacggatgcaaatgtaaaagaaataaaaaagacacctaaaattgcaagttagtgtttttacctggtttattgtcttctaagaaatttgtgtgggccaaagtctcaaaattctataaaagcaaggaataatatgtgtctttgtggagtacaaaatcaaataatttgatctaaggaccatttgaaaagtaaaggtaaactacattgtaacaagagcccaagaaaatagatagtatgtgtgataaatatttctgatagtttaaaaagaataatggtgaaaagcttgaaattttcttttcctcaaaataataactccccagcatccacttgccttgaccagaaaagctgtcattccacaattgtgctaatttgtcccag

SEQ ID NO: 593163 - DNA, 252 bp, Homo sapiens
aggtaaaaaaaagggttgggatagaagaatcttgggaaggagttttttctaagaggaatccgcccgcaagagaaacaggaggaaaaaagaggggttggttggaaggagccattccacgtccagccagaagccacgtgggacacatgtgaagcaccgtggaggagacaggcttgtcttacagccagagcccaccaagaccacggtgactggtctgcagaaggcacgaagccacccacctgttgagacccatgg

SEQ ID NO: 593164 - DNA, 207 bp, Homo sapiens
ccaccatgtggctgggctaactgggcagcaccacgtcatccctacggttgttgaatcgtagtctaatgatgtgactgcccaccaggagattgtggatctggtgatcacggagctggggatgatcccttgcagttctgtacctgttgttctacgagtcaagagcagtgaccagtgacgggggaaacacagggttaataaatgccatac

SEQ ID NO: 593165 - DNA, 388 bp, Homo sapiens
ttacatgacacacgaacactgagactaagtgtcagcaagatgtacccgcgggcctttgaggtcctcgcgcttccaggactgcaggcgttcctgtgaggcggattagggcttcctcttggcagaagatcagccggtgtttggagtggtagaaatctgtcatgctggtctgccgccgttttcgaccctaagagtctccaggtccacctgggaacccttcagtctgctcccctgagcgaggcacatgggtacaagacagtgacaggtccacatggtcttcctctgctgtaccctgcagtagagcaggtgaggtgccaggccgtctgtctcctcccaagtcatcccgggctcgccggggccccgtgggaaggtagagcttgggcaggccaag

SEQ ID NO: 593166 - DNA, 152 bp, Homo sapiens
agttttggattagaatcaccattcttgtaccccctcgtttgttcactaatgtatccagtctctgtatgctcagtaatatatgaaaaattgttcgctaagcctttgtttccagcaaggtccacatacattactttattccagacttgacggga

SEQ ID NO: 593167 - DNA, 818 bp, Homo sapiens
agcgggggcggcggcggcttgcgcgcggaggcggtggtacggaggtgctgggagcagccgggcagccgcttcccgccccagagcaggagccggtgcgagcggagcagagccgaggtcgggcctgcgagcggagtccgtgctgagcgggctgccgtagctcccgctggcccgtgaacacgctgtcctcgcgcttccgccgggtggacatctgacgtaatttgacgagaacaatatttgtggatcgagcaggaggaggcggctggctggcggcggcggtagcccagtgccctggtacccagagtcggaagtgtggatcggggctccatgacggcattggggatccgactgcttgcggggcattccagtagcgaaggccattgcagttgaactctcccgtcaacaatccgaagaatctcacgctgtgaatggatgcgaggacccaggggcgtggttgctgaaaggtgctcatcagaacttcataggagtcagtgaagaatttgagcagggctgtgcacgtcgcgtgggcacacgacaacgggtcagttggatcttggttatagtgaaggtacatttagtaaaatggcttttgagaaggcccacatgaagaagtaggcgaggtgcagttgttaactccaggtgggctctgagatgtggccttagcccgtaggatggactagggctccattataaggagtttctaacagcaaggaaagactgtttcacggcccaattgggagactcttgttaccttgagaagaattctggatgcccaggcctgtgaagaacgggttggcatggaccacttccttagacttcca

SEQ ID NO: 593168 - DNA, 671 bp, Homo sapiens
  misc_feature (412)..(412): n is a, c, g, or t
  misc_feature (440)..(440): n is a, c, g, or t
gccattatggccgggagcagtgtctcacacctctaattccagcactttgggaggccgaggtggacagataacctgaggtcaggagttcaagaccagcatggccaacatggtgaaaccccgtctctactaaaaatataaaaattagctacgcatgggccgggtgcggtggctcatgcctgtaatcccagcactttgggaggctgaggcgggcagatcatgaggtcaggagatcgagaccatcctggttaacatggtgaaaccccatctctactaaaaatataaaaaattagccaggcatggtggtgggcgcctgtagtcccagctactcgggaggctgaggtaggagaatggcatgaacccggtaggtagagcttgcagtgagctgagatagcaccactgcactccagcctgngtgacagagcgaaactccgtctcaaaangaggcaggagactcactagaagcttgcaggcagaggctgcagcgagctgagattgtgccagtgccctcctgggcaacaagagtgaaactctggctcaaaaaaacacgcccagtcaattttcccataaacatgtaattaagacaatcgtggccatatataaattaagtttcctttgttgctgaggataacattgtcaggcaccttattcaggatttagcatgggcttacatc

SEQ ID NO: 593169 - DNA, 215 bp, Homo sapiens
tcgaaccagaaatggccttcatgcatcaagaagagagtcttgaattgcaagaacgctatatttcattcttgatttcaaaagtcttggaacgcaatgaacaagagcttgatattcttggtcgagacaaggcattgttggcgtcttacacggagctaccttacccacgtatcagttatgattattcagaggggttgttgcaagacactggctttgat

SEQ ID NO: 593170 - DNA, 621 bp, Homo sapiens
  misc_feature (145)..(145): n is a, c, g, or t
  misc_feature (158)..(158): n is a, c, g, or t
  misc_feature (219)..(219): n is a, c, g, or t
tttttttttttaaacagaggacccaattgggagcccaaaagtagggctagttggtgcggtgtcttttagtttttccgctcatgtgggcacaggggtagggaaatcctgtttgggggccccgttcttggtggtttgttggaagganggccagtccaggntcccgtggggcccccgcctctttcaaacatttgggcctgtgtccatgggctcagggcccancttaggcctgggccccttccccgttggaaaagcccgtgttaaaagttaaatctggggctccgccttcaaacaaaaaggactgtaggggggggggcagggggctggagatccccctgcaaaccccgcccgtcccgcctggggggccgtttcccggggggggttccccctgggaatttacgaggggggttttgggcaaaacgggctttgggggcccccctcccaggccaggttttccgttaggtcctgtggcccccccccggggccctgggggggaatccggaaaattttcccaaaggggatagttttttggttttgggcaaccttttttttatcccagggggttttccccggcccggagattttccccatggaataaacttttaaataaaggggtccggggga

SEQ ID NO: 593171 - DNA, 232 bp, Homo sapiens
atcgcagggaaatacccgctgttgacatctccagttgacaggggcaccggctgtccacagggaacatattcctttggtggggtgcaccgcctctcctgaggctggaagtgccaaaggatggtgcaaatctctttttcagccacactgaagccaattacacacagcgggagaacgcaataaacagctttcccccaaattaaaaaataaaaaacaacagctcctcttgcggccg

SEQ ID NO: 593172 - DNA, 302 bp, Homo sapiens
ttggggctcatgcaggcggacaacacaagagggggggggatcatgagcggaaggattctttccttcccatgagcggcagggcgggtggccgtccttgcaatggtgtcttatgggccggtgccgttatatctgggtgacccctccaggtgtacagtactgacaaaggggtggagggcgggggagaagtcacggtgccgcccacctagtaaaccttcggtcggtgcgcagggcatctccaggagggggcacggcggtgtgcagaatccagggtcctctttctggtggcaattcctttccgggag

SEQ ID NO: 593173 - DNA, 103 bp, Homo sapiens
ctatcgtgtgctcctaggactcgtgctttgcaagaaaatatagcaggaaagtaaaatgaaacacataagccctttctactgacaatgcacccaaccttttcac

SEQ ID NO: 593174 - DNA, 524 bp, Homo sapiens
  misc_feature (457)..(457): n is a, c, g, or t
agggtctagatggaaacttttaaataagggatgtctaaattttggactttaaaaaagggtaatgacaatgggatttcctggattaatagatcacaggggcttaataaatgaccaagatacatgtacaaacaaaatttcagatgctctgggaaacacatcttaagatacaaagcacaggtgatacatattggagttaactcatccatttatcttacacggaaaaggtagccttggataacgggggctggactagatcacaaaatagaattttccaagtttcctaaagctttcagtccaaataactcaaaagatatgtgtcctagtgggatacattttttcctcattatataattagtatcagggggctttggtatgggcagttggtctgggtcatgacttatcctggcaaaaccatctttacggcaaacaattatgaaagatattttccccaaggcanggaaattattcgggatcattaccaaagtcaaagccataggtgtgtaaggacgtccttgataatggat

SEQ ID NO: 593175 - DNA, 153 bp, Homo sapiens
tcctcaccacagtgacacacacacctcaccacacacaccaccttgcattgcacagtgcaacatctcatcatgcactgcaccacccacacattgcacattgcgcacacaccactcatcccccacatgacatcccattgtgccattgtgtgatca

SEQ ID NO: 593176 - DNA, 1106 bp, Homo sapiens
agtgctcacagtctgttgccgacctttgccgcacaccactgccggccccggtttcatccccgagttcgtgaccctcacgagggggccggtttcgaacaatctgtgttctggaaaccgtgatcctttcgaacctcccgccttaatggccgtctacgagccaggctaatgcccggcccctggtatcagctcccggcttccgccgatttccgaggctgcttcggctgctgccaggcgttccttgctgatcagcctggggtctctccatcaggcagctagctagaccttacctcaggaacgaaggcctcggatgaccctcagatgaaggacccggtggaccttcggggttggtgaatcctagacatgagagcatttcgaggttgcctgaaagctggttgtccttgctccttttcctggagccaatatagcccagtttttactcagtttgattctatattctggtgcaaacggaagctttgcctactttattggcacaatccgttgttctgtcgttatagtgcatatctgctggcgttcagcctctggcagctgagaaattgtcttctatatgtagaagggaaaacctgagcactttgcaggcatactggttaaaagcagggtctgtagtgtacaatgtttaaaaccgggtaatactgtcactgcttcttagttcattcttcacatacacaaagctactgagtaagtcggtattacgcctgcacttaacagactgaggaatgcaagatctaccacgaaagtacacagaacggtcatgtcttgatgacaacacggagacttggttccatgcacgagtatgacgagaaaatgggacgctctgtgctagcttgtccttcaagtctgcactcgacttgcacgtcggctcataaaccgtgagccaatgtatttgtatcggttcataactgattgtgtttgtgaactatgtcttacagtgtctagaggtctgctggatctagggaaaggaggagatatcgaagtactaacgggatcaaaaaaccagcagggactgttgggcactgcctcctgtgggaagttagtggccacagaagagagatgaaacctgtaagaagtctggagtctttcggaactta

SEQ ID NO: 593177 - DNA, 155 bp, Homo sapiens
gattttgatttttatcaaaaaatgaaaaagagtcagcccattagttgcctgaaatcaaatggaatatttaacagagattaaaaaaatttttttttagaaaaatttgaatttataatattggcagactttaaaatggcttggattttagcccaata

SEQ ID NO: 593178 - DNA, 1130 bp, Homo sapiens
  misc_feature (221)..(221): n is a, c, g, or t
  misc_feature (525)..(525): n is a, c, g, or t
cctctaaaagcaacaagcgtaggacttttaaagttttgctgttcgaatggacagcagtttacggtgagagatacatgtataatgagagacaaaatctgcatatagacaatttataatgaccaacattcttgaaatggtggtgtgatcatactgctgtggatagatctgattttcattcttgtcttttagaggtgtaagggctaggtattattcagagtagntaatgtatgagggtgtttgagttttggggagtatgtggagtgttgtgggatgtagtatttatctagctacttaggggagaagcgtttgttgtgatggtgtgcaaaaaaaatcgggtgcggggctgtctattctctggttaacatgttatcgaatgaagaaatggatgagaaatgtgtccttgtgcattaatcagtggtctaccggctctcttgtgcgcaaatctgtaaaatgccctggttgtatacacatttctcgagggaaagagattgcgttgtggcgcaacagtcgattacattacccacnactgatcttcgagctatatttaccctgcccagagggtgggttggtgctgtggtttcccatatgtaggggtcaaccatagagtcatacttttcacttctattcgctttttagcgcatattcctccttccattattttacccttggatccaatggggtattttccccatgtatagacatgccctaatgggtgggtcagtgttaagtacacaatggcgtccaacagtgcgggggccccacttagcgagcgtggtgcccccagtgggaataactcaggcctaccggaaaagagccttctagcaaagaagagtttacccccctcttttgggggcaacactcacagggggggggaacagagacgtgtaaacggcggttctacacatctgtgtaacatttaattccaccgaatgtggtttcccgggagagacgtttctccgaggttgtggcccattaaacactgggacatgggggtaaatttcgccaaaggagtgttttaggcgaagagtcataaatttcgtgtgggtgtcccccgggttttttaaaaaagaaccttctctgtgtgtggagcgctctcaaagggagggaaaacagtgtgaaacttggagaac

SEQ ID NO: 593179 - DNA, 101 bp, Homo sapiens
gtctcgatctgaaccccttccccagttttttttttcatactttaaaccccggctcctctagggcctgtggccgtttctggaagctggcttcctcgttcatc

SEQ ID NO: 593180 - DNA, 482 bp, Homo sapiens
  misc_feature (276)..(276): n is a, c, g, or t
  misc_feature (281)..(281): n is a, c, g, or t
  misc_feature (286)..(286): n is a, c, g, or t
  misc_feature (321)..(321): n is a, c, g, or t
  misc_feature (334)..(335): n is a, c, g, or t
  misc_feature (346)..(346): n is a, c, g, or t
  misc_feature (372)..(372): n is a, c, g, or t
  misc_feature (395)..(395): n is a, c, g, or t
  misc_feature (402)..(402): n is a, c, g, or t
  misc_feature (416)..(416): n is a, c, g, or t
  misc_feature (429)..(429): n is a, c, g, or t
  misc_feature (472)..(472): n is a, c, g, or t
agatgtcctctggacttgggaacctggcatgagcatgaaactggaaattaacaaggaatgatgcagatgaacacctgcagcaagaaccactctacacctgtccacaggtcctaaactctgagtccgcagactgagatgacgccccggattttgtgggcagcgctgcaacttaccctctccgaaagcccgggagtaggggagcggctcctccggcccccagccctcggcgctcccagtcacctctccgaaatgactggaggtccagttgagccggtnactgncggtngctttctgagttgggaacccttggtgacttccttntttaccggccgtnntgtttcttttntttggttagcctttaaaaaaatattnaaaattgtgaggaacttgattanttgattngagaaaacaaattnttttaatgccatnttaaaaacctgaaaattatggaaataaaaacccagaattgccnggccgccacc

SEQ ID NO: 593181 - DNA, 418 bp, Homo sapiens
ccacagtgagctaaattttcttaaaaagcattttttgcctaataacttgtcgggcagagtaacacataccaacaacaagaagagcaaggagaaacaacactgaacaatgtttaattactgtctctccaaaataatgcctcatttattcttctcaatgttctccatatgctcagcacattattggtaagccaaacttccttttattaagataaaataatgaaactatacacagcctttaacaatattctggaatttacttccctatgatcaaattgtcacagaaaggagaagttgactaatttgttcattccttttctctgaggtaaaatatccctcatgccagctttccctaaatgcgttcagatctaggaacaaattccagctcttttttattgaacccatgaacagttgaaacatt

SEQ ID NO: 593182 - DNA, 805 bp, Homo sapiens
cgcggtggctcacgcctgtaatcccagcactttgggaggctgaggtgggtggatcacctgaggtcaggagttcgagaccagcctcaacatggagaaaccccgtctctactaaaaatacaaaattagccgggcgtggtggtgcatgcctgtaatcccagctactcgggaggctgaggcaggagaagtgtttgaacctgggaggcagaggttgcggtgagccgagatcacgccatggcactccagcctaggcaacgagagcaaaactccgtctcaaaaaaagaaaataataaagatatcagctggcatgagttaaactatatataataggaaaagaaacaacaaaaccaaaaaggtgggtctttggaaaaagtttaagaagatgtaatttggtacccgaataaatatatcacaagtttataaaatggtcgagccaggctcggaggcatccactcacgcccgtaatcccagaacttcgggaggccgaagcaggtagatcacttgaggtcaggaggtcagagaccagcctgagcaacatggtgaaacctcgtatctactaaaaatacaaaaataagcgggcatggtggggcatgcctgtaatccaagtacctgggaggttgaagcaggagaatcgttgaaatgggaggcaagaagttggcagtgacgacgaagattcagggcagagggacttccagaccgggaacggaaaggagaggaaaagcacaagctgaggaagaaaccacacagaagaaccgtactaaggtagatgccaacaatgggacaggaagacatataaagacgaacgcaa

SEQ ID NO: 593183 - DNA, 240 bp, Homo sapiens
ttgtctctgcagaacaacaaaaccaactacaggtgggtatgctagacgctgcagatcctgaacatcatgtgcggcagcagaacgacgggccggaggctgctggactcctgcatcaactggcccaacagcagcctcatgatgagctcgtcgaggaccctcattaactcctcccagcccctttgcgagctgaccaagccttgcatggggactcacgagtccaatggcttggacatcatcacg

SEQ ID NO: 593184 - DNA, 780 bp, Homo sapiens
gtcattctgatcccgactgaaacctctgttctcctaaaggaggaaaatcatttttagagcttttagccaatggaaactgatgtctgccctgctttgtggatttgtctttgttttactatacatgactcatgtaatctcttgaatcttaccagccttgatcccgttccacccaagaggtagaattttaaatgcagactttgttatttgccccagaagattcctggaaaatttacggcccaatattttgccaatagttaaatttcaatttggctttttacccagttccctcccttctttttcccgcttccttaaatgtaatttttaaaccctggccaaccattctttagaaacccaacgaggaaagaaagagaccaatatccaaaaagacatagaatttatattgataccatttcaccctctaaaatggatttgagagaaaatgccactttataatccaaaaatgtcatctgagtttcctcttgtttctctttttaaattatgtaatcacgatgattttatgtgttttttttccggggagcggatattggtttcttttaacttgttgttttcacgttttctctgccacttcatgtttcttttttgtgttcacgtgtttccaaaaaccatttgtatttaaggattttaaatacccaactgtaactgagtaccgtggatcgttttctcttaggatgttatattataccatgaatctataaagtgttgtccatttgattattgacacatataacatgtttaccaataaactgtggtattgatcca

SEQ ID NO: 593185 - DNA, 198 bp, Homo sapiens
gggggggttttttttttgggggaaagtttttttttggggggggcccccccttttattgggggggggtttttgggggcccccccccccccccccctttttgggggccgggttttttttttttttttcaaaaagggggggggttggcccccccccggggggttttttgcccccccccggggcccccttttttttttttta

SEQ ID NO: 593186 - DNA, 411 bp, Homo sapiens
cgctaggatcagctcagaaagaataggctcagtagagaggagcatatttctttgtatctagcaacagagtctatcgaaattgtcgaatgatgaccatgctcaccagcgtatctggcacagagttcagaaaggaattactcttggtcccttatatcagaccgggctacatacagcaatgattatactaactaatcccatggacggtatgtgctccattgagctagttctgctccatttctggcttggaaaagtaacagtgtgtataaaatgttctttaaactatgtaataagtaacagtgttaaaaaagagtttaagctggacccggtggtgggagcctgcagtctagctagctactgtaactactcaggaggctgaaataggagcatcccttgagcccaggagtttgaggc

SEQ ID NO: 593187 - DNA, 985 bp, Homo sapiens
gaaatcctgaacggcgccttgcgggctagcgaagaaagatgcagaggatgtaaaaagcacgcatatgtccggctaattgatgggacgagctctgatggactaaaaacacgtaaagccagcattgatatcctaccataagaggacgagaagatgttcatgataatttctgatgatgacatgtaccttcagaagcaccgtagttctgacgtccacctcgcagaaccaaggagtacttatcggaagagcgagcagcgcagatgtccagagattctgactacattgctgattggtgtacaagtggctagacactgcgtaaaccaagtctgactcactaagaagacctcgttaataatagtaacccttcatttgctctctgtgccacgctaatagcttctgagtgtaatgagtatgtagtggtttccattgaaacacgtgaacgattttgtttagaagtcaccattctaatacttcttcaaaagtggctcctcattgtacttcagcgtagaatatgagcgagctggagaacagttgtcatggagtttaggttgagtgaacgatcggccatgaaaatccatcacgaatacttttggatcaatagtctatttttacaaaggaaagaacaaaagcacgtttttcatagtccctaagcttgtgccatatgcccgccttaagctggaatggaaacgttaatcacttaactatgtttaatcaaaaagatacaaacgggcttgggacatgctattaactgttcacacaaaagtatgaattctggtttgaacttaagggcaaaatggctctctattgtttgagaaaacacaccgaccgttggcctgggacagttttctcaacaaacccgtggggacgacctgtggatacccacccgcgggggacttggcattaatttcaacagcacaaccggactgacattgagatgccgacacattctcataccaagaattcagatcattatattcggcgcacaaac

SEQ ID NO: 593188 - DNA, 1010 bp, Homo sapiens
ggggctgcagtgagctgtgattgtaccactgcactaacatgatggagcaagaatactgtctcaaaataaaaatacaaaaaaaaaaaaaaattcggggggcaaacccattctactttaaggtttattataaaccccttatggtgtggagtagatgcggctccgtacaacaactttggattcctggttccacgcttggcctggagggggtcggattccatcctggtttggtcttggggttttggacgacaagatgtcttcacttccggtcaccccagggctggggctgtcgcaggggtctggcacactaatagggttcggtgggaaaacctcagaggcctcgtgtggctaaaagaggatcttccaacttaagaaatggccgggtctcaaaaaggccaattttttggatcacttcggcggccagtggtctggaataagggggtataaatcccaaggtatcttgggggcggaccctaatttccaagcctggaactctcagcgcgttgccaattggcagcgactaccgtttggccagcgaagtggtggcgccagggcaaaggacgcttttttatgggtggggaaacaaaggccgcttcacttggtccatctcagtccagatccaggaacactaaggggtggtaggttacagtggcaggtcctcgggaggggaggaacaggtggttccattctaaattgggcgcgtctctggggcgtggttcaaaataaagcttgtgcgcttggataatgggggaaataggttgaaagtcgttggtccctctaggcgttgggtgataatagaggctcggtggccaggcatgccgggcgttttacacattggccggttaatctaaacaatcgctgagaggctggtccactctaggtgggatgagatatgatcggccacgacacgttggttggtgggggattataccgtttttgtgaccttttattgttgtgagacattggtttggaaaactataagggagtatggaggtctctggtgttggaaagaa

SEQ ID NO: 593189 - DNA, 241 bp, Homo sapiens
gggaggaagcgagcgggagggggatgtggtgctgccggggctccgcactgcagctgctgctgactgctggttgccgcgtcttcccggaggcgactgctggaacctgcagggaacaactgcggcgctctgccatatagtgtcttccccggccggtccctcgcctcccggccgagctgacgaactgtaagagtaaatgggtccagtaattggaatgactccagataagagagctgaaacccca

SEQ ID NO: 593190 - DNA, 186 bp, Homo sapiens
  misc_feature (88)..(88): n is a, c, g, or t
  misc_feature (119)..(119): n is a, c, g, or t
  misc_feature (155)..(155): n is a, c, g, or t
  misc_feature (168)..(168): n is a, c, g, or t
acctttacccgaagcgatgtgaaacctagcgcactagccacctgttgaggagtggcaaaattctgatgtataacaaacttgaatttcncaatgctcaggatgccgaaatccacaaggcngtgtcctaaacctgtttcctgtgttagtcagaaaanaaagtaattcccngactgttgaaaaaaaaaa

SEQ ID NO: 593191 - DNA, 1559 bp, Homo sapiens
ttatatattctttgcgcactttatttttaaaaatcttattcataaatgtatttaaattaagtaggtttcagatatattgtaaaaaaagttacgtgcaaataaaagcgggttcaggggatatttcccattgtggtgctctccctttcccatatttaggaaaatgtacacgtggtcgcgcccaagaagaaacaggatgtggagcggcctttcttctccgagcctctctctacatatataaggccgcagagcaccagctgtggctctcacccgcgggtctccgtggctttaagcatatattattatgagggcatatgtgttttctcatatcagatagccgtgtgaggtgtgacacactcgtgtgtgtaacgtgtcacaccacacgtggtgtctcacatatctcacacactttattctatacacactatatatgtagagatacacacttctctcttatatgtgcaatatatacacacacagcacacgcagcacacatataccacatgtagcagatctctcacaatatagcgtctactaatctaccctttatttcacaggtgtgtgcccacacactacacacacacacacacacacacacacacaacagaaaaaacccacaccgtgtgtgtgcgcgggacgacaacacacaccagcgcgcagtaacctcgtgtattcccacacaccaacaaatcatcattctcttcactcctactatcagtcgtccttctcatactccaacaaccatccaccacccttcttcttacaactctcatacgaccgcggtcgttattaataaacatcctctattactaacaccaatcttcgttggccaaaatatccaccacccccctataacgccgtcttcatcccaccgcctcactctatatcttttctatacccaccgacgttgctaacccataccaccactggccacacccccctcctccttcatcactcaacacccaaccttctctccacctactccccaccacccactcctcctcctcacccccgctcggtccttcactcccaaccaccactcatcactctaaacaccacccacgccaagaccccctctccacacccccgcaacactactcccgctgggcaccactaatactcaaccccctcctcttcacacaccccccccttcctctggccccccccctccgttagcggcctccttgtgcgtcccacccaccgtcctgcctgtgggtcccgcgcgccgcaccaccccctcgccccgtgctcgccccttcatacccaccactctactacctacctctgcggccccctcaccccctactactcacactccgcggccccacctccccgccgttcttcgccccaccccctcgctgctcctcctcctcgcaccgcgcccacctcttcttctctacacccccccagcgcgcgtctctctccggtggccccctccccgctctcaccaccacccctttcctcaccactaccctttccctcgcaccactcttcctcccacacccgcgccccaccagctcctcctcacctccttctccggcctcacctccccttcctgtgcg

SEQ ID NO: 593192 - DNA, 533 bp, Homo sapiens
  misc_feature (170)..(170): n is a, c, g, or t
aaggccagctcaaccttggcaatgggctccttgtgggcccatgccttagggtgccattgttttctccctggaggaaaaacctggaaaccgtggccaactgggccgggcctccggggattatgcccccgtttttttcccccacccttgggcccaaaaggcccgttttaagntgccccccgggtcccaaaaggttttttcccccccccaccaaactgtggttggtgtggtgggtggggggggcccaatttcccaacccctttttaagggtggccggggggtcccccaattttaggccaaaagggacttctggcccccggttcggggggtggcccttaatcctttggggcctcctttttgggggggcccccccccgccccttggggagccctccccccttcccaaagatgccccttttggccccaaagtgggttttttttttgccccccgggctgggggtttccgggggacccagcctttgccggggaaaaagaacttgtgtttggggcccccattaagtttttgttttttcccca

SEQ ID NO: 593193 - DNA, 428 bp, Homo sapiens
agtggtgggagtgcatggtgggggtgtgtgtgccaggggtgtgtgtgaatgtctgtgtacaggcatgtggaaggcaaggtgggcatcaaagcatgtggggaatgtgcaggtgaggcccccatgactgtgagtgtgcaatgcgtgtctgagtgtactctcgtcctggcagtggtgggtgaggaggtgtgtgtgcaattcagagcactgccacaccccagactccttcagtcagccagccccaggacctgcccccactgctgggccagcactgtgctcaggcagctgcaactatgagtctggggcttcttgtctgggcaagatgtccgcaggaagacattccattccaagtcggccccgtttgatatcctggtcgccctgccccacccagcctttctgccctctggtggctccggcaccttcggccttgc

SEQ ID NO: 593194 - DNA, 198 bp, Homo sapiens
tgcgtgattgattgcagttgtggtcactgttaaaagaagttagggccacaaaccatcagagaatacctaggtatcaaggtgctagcctcataaaaacatccatactacctcaaagtataccttcttcctttgaatttcagaatcaattctgcaaaatttcagtgcacgaagacacactggctatatagccattcagag

SEQ ID NO: 593195 - DNA, 131 bp, Homo sapiens
gccccccttcccccgggggggggggaacccccccccttttttggggttttggggggggggccttttttcccccccctttttttgcccaaaaggaaaacctaaaaattttttttttttggggccccccccca

SEQ ID NO: 593196 - DNA, 178 bp, Homo sapiens
gagactggtcttcactctcaatgcagctgccacatagatctcgtgcagtgtctgccacatgagactggcatccccatcacactctgccagtgttcagtggcactcagtgccaggttggtggcagtgaggtgccctgctgtgtgcttccccatggtgttcagctggttgagcttatggt

SEQ ID NO: 593197 - DNA, 96 bp, Homo sapiens
cccgcctcactctcccaaagtgctgggattacaggcatgagccaccacgcctggctgcaaaaccttatttaaagtgaagcaatgatctgttcgtca

SEQ ID NO: 593198 - DNA, 586 bp, Homo sapiens
gatcacaccatggcgtatgagtgttcctctgtgtagactacaagcctgcattactgaatcggcacacactagttatacaggctatgcccaccctaatagaattaatgaaagacccagtgtattgttcgagatacagtgatggactgtaggcgaattgtgagctgttcctgaagctgccatcaatgatgtctacttggtccccatgggtacagtgtctgattgagggtctcagtgctgaacccagagtgggcttcaaatgtgtgctgggctttctccagtctggctgaagctgcttatgaagctgcagacgtatgctgagtgatcaggaagaaccagctacttactgttatcttcttgcatttgaactcactaggttcagaagactcctagagactacagacagacctgatggacaccagaacaacctgaggagttctgcgatatgaatctctgatggaacttgtgaaacacacagtgcccaggattgttaccctgatgtccagaaaacgacttggtcatcaatggacgcgactgcaacaggttctcagatggagtcacatatccagagcaagatccgaatcgaatc

SEQ ID NO: 593199 - DNA, 156 bp, Homo sapiens
agcaatctggctaagcttgcgcacagtcacctatgactctttagcatagcctcctggatctcagctttatctctaagaaaatgatatagattagtcacatggtccattctaattgcctgaaatcccactataaaatttctagcaccggttcacgca

SEQ ID NO: 593200 - DNA, 937 bp, Homo sapiens
gtgaggggacgacaggttgtacacacatttggtagttatgtggcaccagctagtgcctttctcacatgggggtaattggaccctctaagatcttcgttgtcataatagcacagtttgtccaccaccaagtagtatgtcgggctcatttctcccttaaaacacccttctccgtacctttcgcgcatgtactcaggttagctctcaaagaaggggtgaatcataaagccagtgaacaattctcactcctgctgatgcgggagtatccccgaatctgagaggtggaagagggtgacctcaagcggcttattactcgccaataaatcggctgaaggctggttgtggatacctgtgtgtcctctcctgagcacctcatctgtgctgtctggcccgtgctcccacccctgttcccggtgctcgctggggccctgcagctccgtgcttatttcccgtggggccggcagacatcagatgtgggtgctcctcacttggctgcgatgtgtcatagcaataaaatgtgattcttgggtgtcccgcccagggtggtctgcccatggctttaattgtatgaacctggtttgcgggagtcagagggaggacgatgactttgcttctgtgcatcagccccgacttccaggagccagaactcagaagaagagggtgctcagacttttcgtgtatacacccttgtgctttacgtcgtgaataaactgtttaccaaatttgactattgaaacgatggggataagggcgctaggagcttccaaactgtatattgttacttttataggattttaacatatgatcctgatatgtgtgtaggggggggctatgatagttttatgggccaccggtaggaacctgtacggtattggctccaaagttcctaaaggcttaaatcccattttttatggccaaatcctggataacaaaaaatttt

SEQ ID NO: 593201 - DNA, 176 bp, Homo sapiens
tgggagctgactcatcatgcagaaggggacagcaggcacatcttacatggtggcaggagagagaagtgccgagtgaagtgagataaaccccttattaaaccataagatctcctgagaactcattcactatcatgagaacagcatagtggaaaccgcccccatgcgtggattgccag

SEQ ID NO: 593202 - DNA, 406 bp, Homo sapiens
  misc_feature (31)..(31): n is a, c, g, or t
ttactcccattttggtttcattagtatattntaggtcctcaccaatgtaatatggtgcatggctgttagttttagtgaggtctgtaggattaattcgaaaataggcagaattccattccttccaaggtggccaaaattagctatactgatgtaattgtccttttcctggggatgaattccctgacacacattcctgtccacatatgtagccaattttgtggaaacataaccatttgaaggttctggaattttgagccctgctctaaccaccagcataatataaaattaggttggttttgccagtctcacaatgaggtcttgccacaggactcccagcccttttacttttttcccccaaccttagccaaggaggatcttgagcccttaatttttggggttttttaaa

SEQ ID NO: 593203 - DNA, 378 bp, Homo sapiens
  misc_feature (10)..(10): n is a, c, g, or t
  misc_feature (51)..(51): n is a, c, g, or t
  misc_feature (55)..(55): n is a, c, g, or t
  misc_feature (118)..(118): n is a, c, g, or t
atgttgttcnccatcatgtgtccatgtgttctcatcatttagctcacagantatnttcaacatagacaagagtagagagaaaagtataatgaaactccatatattatctcttcattcnacactttcaacttcacagaactaattatacactatctctaaagatgatatgattctattcatacacactagttattattattatttaacatagggaatattcatatatataacaggtacaaagtctacaatatatagagctcttatatgttcccatattaaatgtaaatatttgtttacacgcatggctttccttggttcatcatatcaggtaatatattaaacagacaggttcacattctatcagatagtatctcgtgc

SEQ ID NO: 593204 - DNA, 148 bp, Homo sapiens
acagggcccatattccaaacagtgccatagctcgctatgctgcccggctggctgcagaagcaggaaacgtgactcggggctcctttgacttgagccttaactttgatgccaacaaacaacaaaaacagcttattgttaaactgtaaaa

SEQ ID NO: 593205 - DNA, 340 bp, Homo sapiens
  misc_feature (95)..(95): n is a, c, g, or t
  misc_feature (177)..(179): n is a, c, g, or t
taatccggggagtaggccacccacgcggaaggggtcagcactgttctggaactcaaagaagtacaaggtggcggggcctactagagtcagagagnggtggccagagatgaggctgaggccaactaaaggagatcagacaatagaactctgttgagaattagtgggctttgtccaaannnaactaataggagcccacttggaggcaaggattttaagtagtggtgtgcactcatcatatttcatttaaacaaatcactgccgtctgtgaatctagatggaaaggaggaaaacaaaataacgtggacaggctcctattagggaggccagtaaacttgttcac

SEQ ID NO: 593206 - DNA, 1241 bp, Homo sapiens
gagtacctgggggctgcgcccctgccgcggccggagcgggtgcccccgtgccagcagctcccagagccaaggtcttcaggactggcctagtgctgtgtggcctgcgcctggagctggtgcctgtgcctgaccaaaccacactggtgggctgcttggcccgggcagggtgcatgcctgtgtggcgttgccctgctgcagcggcaaccaagaaggaagccggtccatcaagggccgtgctgcgctgccaatacaagatcttcaggctggtgcgggacttctacttttcagggggttgcataccgcttcaaagttttcggctgcttggtgacctggcaaggatcgtggacccatgtgaaccgggtacctttcaggtggtgtattctccggcacacagacttcagtccaggccttggggcaaaaccttcagggtgtcagccattcggtgcccgggcacttccaaaggcagttgtcgagagttacgggccgggacgttctggctttgcgccctgtgtgccctttgttccccccccaaacccttcttagccagggtccttaacctgccgtctggccctcttgtcgaccgcgtcggagggatcggcgatttcaccatttgtgtcgccgtggagagtggccccacacccagtccttttgcggccggcaacttttgggcccaagtgcccaatggctcaaggtcccggtcggtcctcgctgtgtgtggtaccccctgtgtgcgtgtgccccccttttggcgggcgtcggctgctggcccatttcgcccgccatttccggctgagccggtgttgtctctggactcacccttttggggtggccccggcgggtgcggtgcccccggtgccgctctgggcgcgtgagtgggtcccggcccgactttggaggggacggcaaggcgttcgtcccccccttttgtggcggatcgggtgccactcccgcgatcacaagcgtgacaacggtttatccgcagcctgtgctcccgggcaccccttacttctcgacgacgaaccttgttggggctccccaaaccgtgcttttgggagcgcaacaccggccttacgcttgtgggcaagtgcaacaaatgtgtcaaacccaaatagagactccccgcaggcacgtgtcccatggccgtgggctcacaacagtgatccagaagaccccgtgtgaaaccccccggtcattgcgacccccgttgtggatctacaaccgggaaaccgcacgcaacattc

SEQ ID NO: 593207 - DNA, 1000 bp, Homo sapiens
cgagattgatatccactaattaaagttgaagcaagataccttatggagaaagaataatctctacgctccatgatccatctatctgaaagatcaaacttttgagacaagagcgtgccggccaacgctgatcgttgatgataagagaaggagatcgggatccttattttgatcgtcgaagtaagtgtgcaatcagcatgatcatgcgagatttgaatgagggagtcgtgagacacattagagatcgagaccgggatcggtggtgttattgagtatgagcgggatcgaatttgacatgagttaatgacgaatgccgagatgatagagatcagtcatatctgaagaaaaataaagaacaattgcctcatccagaagaggggggttttgataggacatcacctatgagcacggaagtctgaccgagcagtctatgagaggacgccattcatggtggggaggagaaccgagggacttatcctgaggagcgagtgcctctgccagctccttcactgaggcacccaggcctcctcgcagcaccgcacgagtcgagaagaagcctgaatcatagaatgtggacgatatgttgagacagcgtgcgggagaggagaactgagagaatgttgtcataatgagaggattactggctgaggaagacgtgttgcaaaagtgtcggataggagggcattggaggactgcaccataaaattaaagcggataattggtatcaatggacgagggcagagaagagatccgaatttggaggaagtgtagaggaatggaataaatgagcggaagagaacattgggccaatgttatagtcacaaaaaggaatgggatagcgtatacaggaggacagaggaggtttgtagcggggccacaacacaaatgatgttgcggagcacgaacagcgagagactggacgaaacaatatgaggagacggagagttatgaaacagagtgcatcaaaacagagagtcactagggatatatgaatttatatggg

SEQ ID NO: 593208 - DNA, 1349 bp, Homo sapiens
agcgtgggtggcggcggcggcagcgggttcggttgcgcgtggcgcacggggtgggagcggagcccaggccgggagcaggcgccgccgccacaggcgaccatggggaacgtgttggctgccagctcgccgcccgcagggccgccaccgccgcctgcgccggccctcgtggggctgcctgccacctccgccctcgccgccgggcttcactgctgcctgcctgctgggagtgcagcctgggcgcctggcaccagtacgagtcgaagttcggaactggacccccggggctgcaacctgccagcgcctcagtggtgcctgcctgaggatggggcctgcgggctgcctgcccaaccctgggcacattcgaggagtgccacctggaagtgcaaggagctgtttcccattcagatggagggtgtcaatgctcacagtcaacaaagggttgagtaaccattttcaggtcaaccacacagtagccctcagcacaatcggggagtccaactaccacttcggggtcacatatgtggggacaaagcagctgagtcccacagaggcgttccctgtactggtgggtgacatggacaacagtggcagtctcaacgctcaggtcattcaccagctgggccccggtctcaggtccaagatggccatccagacccagcagtcgaagtttgtgaactggcaggtggacggggagtatcggggctctgacttcacagcagccgtcacctggggaaccagacgtctcgtgggtcaggaatcctcgtagccaataactccagagcatcacgccttgcttggccctgggtggacgagctggtctaccaccggcggccttggatgaacggacgggcacgtgtgcatgtcatctaagctgcgtgaccaactacagcgaattgaactaaacatggcttgggcacacggttaaccgtagggccatggcgtggcctgcaccgcaactatactaccaacaaatgccagtgactcaagcttgcaggtgggctgtggcagtttgaggccagcaacaacgggatgccaggacctacgcagctgtctcctttcgggttacccaaggctggtaacgctgtcaccaatgggccaatcctcctcttcaaaggctctgtggatagcaactggatcagtgggtgccatcgctggagagagaagctcgccaacccttgccccgttgaacactggcccatatgggggtcctttccttgagatcaaccgacaaggaaacaaagttttcaagtggtgggctacatgggacttcatccatcgggcttgagtcccttccttggccgaaccgggcttctaacgtcaccttctggaattccatgatccatagtgga

SEQ ID NO: 593209 - DNA, 1352 bp, Homo sapiens
ggagaacctggggccggagccgggtgcggatttgctggggctgagtcggggtgcgcgcgggccctgacctctgccctctgacctctcccctagcaggcgaccatggggaacgtgttggctgccagctcgccgcccgcagggccgccaccgccgcctgcgccggccctcgtggggctgcctgccacctccgccctcgccgccgggcttcactgctgcctgcctgctgggagtgcagcctgggcgcctggcaccagtacgagtcgaagttcggaactggacccccggggctgcaacctgccagcgcctcagtggtgcctgcctgaggatggggcctgcgggctgcctgcccaaccctgggcacattcgaggagtgccacctggaagtgcaaggagctgtttcccattcagatggagggtgtcaatgctcacagtcaacaaagggttgagtaaccattttcaggtcaaccacacagtagccctcagcacaatcggggagtccaactaccacttcggggtcacatatgtggggacaaagcagctgagtcccacagaggcgttccctgtactggtgggtgacatggacaacagtggcagtctcaacgctcaggtcattcaccagctgggccccggtctcaggtccaagatggccatccagacccagcagtcgaagtttgtgaactggcaggtggacggggagtatcggggctctgacttcacagcagccgtcacctggggaaccagacgtctcgtgggtcaggaatcctcgtagccaataactccagagcatcacgccttgcttggccctgggtggacgagctggtctaccaccggcggccttggatgaacggacgggcacgtgtgcatgtcatctaagctgcgtgaccaactacagcgaattgaactaaacatggcttgggcacacggttaaccgtagggccatggcgtggcctgcaccgcaactatactaccaacaaatgccagtgactcaagcttgcaggtgggctgtggcagtttgaggccagcaacaacgggatgccaggacctacgcagctgtctcctttcgggttacccaaggctggtaacgctgtcaccaatgggccaatcctcctcttcaaaggctctgtggatagcaactggatcagtgggtgccatcgctggagagagaagctcgccaacccttgccccgttgaacactggcccatatgggggtcctttccttgagatcaaccgacaaggaaacaaagttttcaagtggtgggctacatgggacttcatccatcgggcttgagtcccttccttggccgaaccgggcttctaacgtcaccttctggaattccatgatccatagtgga

SEQ ID NO: 593210 - DNA, 1201 bp, Homo sapiens
  misc_feature (1201)..(1201): n is a, c, g, or t
tgggattcaatcatctttattaaccctatcatcagggttacatttttatacattaattatcttggttattctcaaagggcctctacttatagttacattcagtgtttaatagttaaacaagccaagtaagaagtggctaaacctcaccctagcatttataatatcctcgcggacagagggaagctagaaagagttcaagttcaactcacttttattacatgtgttaagaagttaggtgtctccaagagttaactaagaaagccgtgcatacatttttataagccgaggggaggcacaaaaacttctcattgtgggctctggtggtgttccccagcaacatttattacctttctcaattataacaccagacaagtgatttctcattacaaaagagtgcctcgtggcttttataaatgttctcgtgaacctctcttctcacattacagacatttacacagattagtctacgtggaggctcttgtggggagaggccaattagcttagcaagcttacaatttaagtggggtgttagaaggaagccctcctttactcgaataaccgaggctccaggttgtgggtctattagcccgtgaaccaagaggggaggacgggtaacgcgccttagggtattaggcccactgtggacggaggggtcagtggtacttccaggacagtgaacgtaaaaccgtggtctgtggttgataggcccccaggtgtggtcttggagccattccaggttgagaggcaggagccacagttataatcagaaggcggaaagttgggccaggtaagttgtggcccggaacatggctgcgctggtactgcgggggcaggtgaacaagacatttgttgaggctgaccacgaaaagggcgggagccggtgcctggaacatcggtggcgggcaatctcgggaatcgcgaagttggggggcacatccaggacaaaacgggcgaaaatgggaaacacacgggtgaaggcgcaggagagggacacacaaaggtgtgtgtgacaaacacggcagagcacgaaagaagagaacaaagccagaataaaaaccgtatagatgaggggaataaacaacagaacactcgaatgaaaaacacggtgagctaaaaacaatagaaatgaaacacaacaaacaacaacataatgtgtagaactgataaaaagctcaacacaatctgctctaaatatactgcn

SEQ ID NO: 593211 - DNA, 193 bp, Homo sapiens
atcaggcgtagtcctactccagtgtacttcaggcagattccaggtgcagctcgccggtgcccgtgatgatgtgctctcccgactcctcgatgatgcacttgcaccatggggtcggacttggccagcctgcttcagcccctccaccagcttgggcaggtcagcctgggttcttggcctccacggccactctgac

SEQ ID NO: 593212 - DNA, 410 bp, Homo sapiens
acgtctgtccacccttctgtctgtccgtccatccgtccatccatccgtccatctcactctgtggcccaggctgtcacacagtggcacgatcacagctcactgcagccttgacatcctgagctcaggcgatcctcctcagcctcccgaatggctgggaccacagctgtgtgccaccatgcccagctaattttttgtagaaatgaggtctcatcatattgctgaggctggtctcgaattcctgagctcaagcgatcctcccaccttggcctcccaaagtgctaggattacatacgtgagccactgcgcctagcccggatatagcattttaaattaactgtcattttctggaagggcagtatgttaaaaaaaaaatttcaaataaaatgaaaggggtgtgtgtgtgtgtgtgt

SEQ ID NO: 593213 - DNA, 904 bp, Homo sapiens
  misc_feature (1)..(1): n is a, c, g, or t
nttagcagagctctgacttattctggagaggagtaggaagggatatgagcaggaaactcttgggaggccagagacaaccaacctgctgtatggattggaaaaagaaacataaagacgcataaaggaaaatgaaaccaaaatagtaaatgacaggtggttttgatgctgaatgagaacaaggctcacctaaggaaactgaaccagaaaacaatgttagctgaaaaagaagaaattttaaaatgaaggatttgtagaaatctggctgacggaatatcattctggttgctatctttatctgcggaactcctctgcatttgttcctaagtaattacttcagaaatataaattcaactacatatcaaggaagaacaacatcactccttgaaatactttatgtatataatctcttgccctctatcctgagaactaatggacatcttctcatgcaaggcatacatgaagccttttttaattaatgagccaaagcctttcgtatttcgcaaactaagctgtgcgcgaattataagctctttggaaatcttattcctgattatgccacaccaacccttcattatgatcattcatgctacactgacacatcacacgcacgcatccgcaaaaatataaacaccttgcgcactccgccctacacgtggggatctcagcccaccgcctaactagacagtaggtccatactagagaaattcatccagatatctcatccccacccgcacacgtccgacaagacatgactacttcaactcaatcgagctcatcgtcacatgcatatctagtcatcgctccccccgcacgcggactcatcaccccatgctcgactactctacgccagcacgctctttctaccacctccggatactcacgtctcaccctatcttcttacata

SEQ ID NO: 593214 - DNA, 210 bp, Homo sapiens
ctgaccaagagactctttcagtagctcaaaacatgcttagcttacattggggatcaagaaatgcttattaggctggaagtggtgagccacacctcatcatcccagcactttgggaggccgagatggatcacttaagtccttgagtttgagactagcctaggaaacacagtgagacccaatatctttaaaaaaaaacaaaggaataactgg

SEQ ID NO: 593215 - DNA, 309 bp, Homo sapiens
ggcagaccttgaagttgctgtccagacctgagatgtggagagccagtgggcccagtgcccgttgcatgcctcgttgtccctgagttactcattaaacatgctcaggcactccacagagctcaatatccattgcctgtatcaccgctggattgtcgccacaacattctgaacttactgtctctgcctttgattgtcctgcgtttcgtttccccctttcgtggcttcctctctcccgtttctttgtccctctcttccgtttcttcgagctttagtcccgtgctccctgacgggtgcctgagctctgatttc

SEQ ID NO: 593216 - DNA, 935 bp, Homo sapiens
  misc_feature (8)..(8): n is a, c, g, or t
  misc_feature (74)..(74): n is a, c, g, or t
  misc_feature (98)..(98): n is a, c, g, or t
  misc_feature (124)..(124): n is a, c, g, or t
  misc_feature (127)..(127): n is a, c, g, or t
  misc_feature (148)..(149): n is a, c, g, or t
  misc_feature (153)..(153): n is a, c, g, or t
  misc_feature (160)..(160): n is a, c, g, or t
  misc_feature (191)..(191): n is a, c, g, or t
  misc_feature (197)..(197): n is a, c, g, or t
  misc_feature (216)..(216): n is a, c, g, or t
  misc_feature (268)..(268): n is a, c, g, or t
  misc_feature (271)..(271): n is a, c, g, or t
  misc_feature (278)..(278): n is a, c, g, or t
  misc_feature (280)..(281): n is a, c, g, or t
  misc_feature (289)..(291): n is a, c, g, or t
  misc_feature (294)..(295): n is a, c, g, or t
  misc_feature (302)..(302): n is a, c, g, or t
  misc_feature (321)..(321): n is a, c, g, or t
  misc_feature (323)..(325): n is a, c, g, or t
  misc_feature (327)..(327): n is a, c, g, or t
  misc_feature (332)..(332): n is a, c, g, or t
  misc_feature (337)..(337): n is a, c, g, or t
  misc_feature (339)..(342): n is a, c, g, or t
  misc_feature (347)..(347): n is a, c, g, or t
  misc_feature (358)..(358): n is a, c, g, or t
  misc_feature (377)..(377): n is a, c, g, or t
  misc_feature (380)..(380): n is a, c, g, or t
  misc_feature (386)..(386): n is a, c, g, or t
  misc_feature (395)..(395): n is a, c, g, or t
  misc_feature (433)..(434): n is a, c, g, or t
  misc_feature (527)..(527): n is a, c, g, or t
  misc_feature (529)..(529): n is a, c, g, or t
  misc_feature (540)..(540): n is a, c, g, or t
  misc_feature (709)..(709): n is a, c, g, or t
  misc_feature (934)..(934): n is a, c, g, or t
aacagcanacagagaagaacagaacaaaacattgtttggatcaaataaaaaacagcaggcaacaactcaattcntaaaaataccacgaattcccccgnaatgtggctccatttgatagaaaatnttncattttctggataatgtctgnngttncattaancaaaatggaaaacggcctttagataaacacnctatanagcagcttacacagatgtnttgccctcttcgccttggatgtagggaaaataaagttgtgaggttgcctgcnctngcctaangnntgggttgnnnttnnaattganagtgaccgcttatgagagngnnngnattangtaancnnnngtgtnttgagattgcncaagtgagagcatccaaanggngcgagngtcaatttnttcctatggggaaaagcatatagatatactatgttaanncttccattcctcattcgattatttgccctattcaaaacataaaaatacaaataaatatttccttacaaagttcacagtatgttgttttaaaananagagataaagnaacttaatttgctttgtcattaaataaaaatgctaatatatagacatgttcaatatttatacaaattgtaggggccagtgtatcctttcttggtcataattgaagtttaatagtgctagtccatacacgacaaggctcagatcccaaatgtaagctcaattctactaanagttgctcaagataattttttctctttttctgtttaattaaaaaagacatttttggaattttagaattacatttgagttgtctgaaaaaatacaatttcaatgaaaaatcatatcacgcattcaagagtatattgctggtgctataatctttttgcatgtctttgttttcatagaaaaaaatcagtaaaataacatgtctaagacctttaaatggttaaatgtanc

SEQ ID NO: 593217 - DNA, 477 bp, Homo sapiens
  misc_feature (33)..(33): n is a, c, g, or t
  misc_feature (266)..(266): n is a, c, g, or t
gcaacctcaaggggtgggtctcctaaaaaaggncccatctggggaatgtctgtccttatgcaagttgtaagaacaggggatgaaaatatgcccctggcctccctgcaagcacccccccaggcttgctaggattagggaaaattcccagccctggcgaaattcctagtcaagactggttgtcctggatcacgaacccctgtttccctgttaaagatgtttatcaatgacaatgtggccccagcacgacatggaccttcatcagtaantcctagtttcacccctggccttgtgatctcactctgccctctttgctgttgtgatattttactgcctttgaagcatgtgacccactccctattcgtacacccctccccttttgaaacccctaataaaaacttgctggttttgtggctcaaggggcatcaaggaacctgccaacatgtgatgtcacccccagagacccagctgtaaaatttc

SEQ ID NO: 593218 - DNA, 239 bp, Homo sapiens
tcaacggaacttctgctccgtgaaaggacagtctgatgttttactttctaccaccagcatagaaatgatttcatctgaagatgttagctacttcgcatggatggcactggaaagaccaggaaatttaaataaagtagtggagcagagaccggatgttggaacaatagagagtttctctccaggagattttagaactaatatgaatgttgttcatcaaaacaagcagttagagagctgca

SEQ ID NO: 593219 - DNA, 470 bp, Homo sapiens
ttttttctgagacagagtctggctctgtcgcccaggctggagtacagtggcggatctcggctcactgcaaactctgcctcccgggttcaagtgattctcttgcctcggcctcctaagtagctgggattacaggcatgcgccaccacgcccagctaatttttgtatttttagtagagacggggtttcactgtgttggacaggctggtctcgaactcctgaccttgtgatctgcccgcctcggcctcccaaagtgctgggattacaagcatgagccaccgcacctggcctaaaactctactttcaagtcacataggtatctaggattttggttcttgcaaccttttcgatgacatatgaaaaaaattcctaagagtaaagttaatgatataaaatgtattttattttattttttgagacagagtttcaactctgtcacccaggctggagtgcagtggtgcgatctccgctca

SEQ ID NO: 593220 - DNA, 811 bp, Homo sapiens
agcggaggccccgaacacgggggcgagcgctatcgggtatgtagtcgtgctgcctgagagtctgcacaggatcttgcttgtggcatactcctgtcaattgttggaagatagtagtgccagcttatgtaatgaaccgtctgccaggccccgggacaacagtctaagagaaatggaacgtgagcagcggaagaaccggagcacgtctttatgtgcgcagcgtcatgtagcgtagcatcaagcacgattgcatggagatggaagtcatgctcgcaatgtaatcagtctgacagaggacatattcggatagtggacagcaggagtggagatatggtgatggcctggacactgctgtactccactcccttaatgcatcacaaacgcaacaagaggatgaacatggtagcaagatgcgtgtttggagaatgtgtcagaccaatgacctcattgcaccgagataattcctggagagccaagtactctatctgtagtacaggacctttcgcctgaagaaagatggagactggtagtcaatatttagtatgatggcaacttgcaccatccaagatgggtggaccgatagctcctctagtttgtggaatcacatcatgttgcaagaaacgagcaacagagagcgtgtcctagagacgatgcagagaggaaactagtggcgtgccatgggggttcatcacgagcgagagtccgagtatgcacccactgaaagagcaattctgaccgcaaagtgtaggtgacggcttcggcatgacttctacaacgttgctcgtgatcttcaaagccatgttcgaacatgggg

SEQ ID NO: 593221 - DNA, 252 bp, Homo sapiens
caataccctaatttagtcctctccatctccaacaagagaattgtacgctgcactctgatgaagcaggatcaagtaccatcttcgtctggttttggctgcactaaggctaggcccagcgatgccccccttttttaatttttttccccaaaatgccccagcagctggcacactgagcacctgcactaaattactcaaaatgtgctgtaaagtttcttctttccagtaaagactagccattgcattggcccttat

SEQ ID NO: 593222 - DNA, 329 bp, Homo sapiens
gagcgttgggcttcttcaggccggtcgttgatcacgctccgtgttgccctgacacctcctccagctcctcctccagtctgggcgatgcgggcctccagacaccgcttctcctctaacgccagggctcctttgccgctactgttggggatctcgtcaggcagctcatcccgctcctgcggggcctggcgcttggcaacgctccgcgggtgccagtgcctcctgcaactggatcatcaatatgtaaaaagtctaattaattaagatcattgatagcgatcagcctaagcctggaatagcccagttggctccgacaggggaaaaaggtggaa

SEQ ID NO: 593223 - DNA, 886 bp, Homo sapiens
ccgggaccaaacttacggctaggtacgaggctgggtttgaatcggccgaggcttctgccgtggtccctaacgcttcggggcaggggtgcggtcttgcattatggaagccgagcgtcttgcgtgcttcccgtcgggcaccatctactccggccccgcaccctacctggtgcatcccctagacacctccggggtccctacctggagatccccggagcccccctttcctgcgccagtccatgcctttaaaacctgcactttgtccatgtcctcactgccagtgactggcatgactgagagacgtgaatgaattcgacctggagcaacgcgatgtgctcttcagaagctggcgcctgggagtgtggcgtaactaatgcctggcgatggacatctagcaccggtagctgctaggacgtagagtgctgaagcgtgacagcggcgacgagatgaggtgccgactaagtacttcctggctggtgctccgtcaccactgtagcaagggcagtagagcgacccaggtggcacctgctgcgagtgcccccaccccggccctgaacaggtacgagcttggaattcccattgacacagccaaggggcgtgcacattgatgtattaccggagccgctcgatgactcgaggtggtgagccctctgtggtgctgctcgctggaccgtgggtggcctgcagtttggtgccctggagcggctggaatcgggacagcccttgggagtaccttgcagaattcggagtgccggagtaccagcgcgagggcaacgccagctttccctctttggggcttctggacacctggtccctgggggcgtccctggcccctgtggggaatcccctgggtggccgctctcaaaggttgccacatggaatccgcgaa

SEQ ID NO: 593224 - DNA, 332 bp, Homo sapiens
cgtgtatctaaggagtagacctggcaggaaagtactcctccagatgctgtaactcttcagcgagcaggaccgcagggaggacgccgagctggacccgagtccaagctctgtactccagccttggaaataaatccccctacattgtctgtgccacacaaattcccgttccagcagggctctcctgtggggttattctggtaacaaactgcttgagatcagccatacttttctaatcttaaccgctctcagagaggaagccactgggctcttccttaagctccactttctgtgtctgacatgtggttgaaaactaatatttcagatgtttactc

SEQ ID NO: 593225 - DNA, 1507 bp, Homo sapiens
  misc_feature (200)..(200): n is a, c, g, or t
atgcttctgtgctcctggctctcttacgccgtctacggccaagtatgatgactatgaccgccactgttcactagcggggattttggggccaagatgcaattggttcctcaaacaagggtcacactaattcctgtttcggatgaacatccaggcagaatgctggtgaggtagcagtaacttacatgctttgcgtgaccggnaccagcgatccgcaggcctgagccgagggtattgaatcgtggatacatgggatatatctgaaagcatagtctcagtgtagccgtggcatgaattgttgacgcgagttgaagctacttttggcagaatcctggatactaagaaaggcgggcacgagcagactgtcgtgcgtctggagggtgtgatgctcctgtgtggactttccagcatttaatgaatcgcccctgaaggatacgatgaacttggaggctcgtcacagcactactctctttgcccgttggaagattgcacaaatccgaaaaacggtgctcggttgcaggaagtagcaaagggagattgtactaagttagaagccatctgtggattgacgagacaatagtttggaggcgttccattccagaagttataaccttcccttcaaatacgcgtgtcgggggtttaaattaaaggtctagaatttccgtcccaagacttaattgttaatgccgggggaaaatcgcccatggcactccgtaatgttgatgcacggcatgaaaccgggagagatgccctgaataacgctctttggggtaaaggttctgcaacgccaagtcactttgaaaaccgccttcacatggggcccgaggcgggaaagggaacgaacaccgggccttaacgatgacagctcttagaattcgggaagccggcgcataagttcgcccgtttcgcttgctgcatgtaggacaggccaagattgcaccggggaagggggatgcggcgttgaccacggtgcggcccgcaaggggcgcaattgcacgtgtcgttggacagaacgaggaatggggcttgcatgtacaccaattgacacatggacacgcaaggggccaaccaaccctggggggccacaacaggaaaagaccaaggtgtacttgcacgcggccattggtaagggaaaggcacacagacgggtgcaccccatgggtattgtgtgtacctgtcgcgaacatgtgggccgcagaaatcaaccgggcaggggtaggtggacggcatagacacctttttatgggcccccgaaaataggagcctttcaacacgattggatgtagacgccacgcgaaaaacatgtcgcatggagacactccactaaaggtgcccccacaggagacacacaatctactaactagacatacgtcattcagctacacaaacgacccagcactatcatttgggtgcgacaactccaacgaagtgcatttgtgtatactaaacgagcacgaattctatttcgtcacgatgagataacaatacccttctgatctagttagtgcac

SEQ ID NO: 593226 - DNA, 163 bp, Homo sapiens
ttgtttgtgtgtgtgtgtgtgtgtgtgtgtcgcgaatttgctcttattgctcaggctggagtgcattggcgcgagaggtatgtgacacacgcctggataattttgtatttttaatagagagggggtttcaacatgtgggtcaggctggtctcaaactcgcgag

SEQ ID NO: 593227 - DNA, 859 bp, Homo sapiens
  misc_feature (100)..(100): n is a, c, g, or t
  misc_feature (472)..(472): n is a, c, g, or t
  misc_feature (710)..(710): n is a, c, g, or t
  misc_feature (712)..(712): n is a, c, g, or t
  misc_feature (715)..(715): n is a, c, g, or t
  misc_feature (717)..(717): n is a, c, g, or t
  misc_feature (719)..(719): n is a, c, g, or t
  misc_feature (722)..(722): n is a, c, g, or t
  misc_feature (741)..(741): n is a, c, g, or t
  misc_feature (745)..(745): n is a, c, g, or t
  misc_feature (753)..(753): n is a, c, g, or t
  misc_feature (771)..(771): n is a, c, g, or t
  misc_feature (775)..(776): n is a, c, g, or t
  misc_feature (778)..(778): n is a, c, g, or t
  misc_feature (782)..(782): n is a, c, g, or t
  misc_feature (787)..(787): n is a, c, g, or t
  misc_feature (793)..(793): n is a, c, g, or t
  misc_feature (800)..(800): n is a, c, g, or t
  misc_feature (802)..(802): n is a, c, g, or t
  misc_feature (804)..(804): n is a, c, g, or t
  misc_feature (808)..(808): n is a, c, g, or t
  misc_feature (811)..(811): n is a, c, g, or t
  misc_feature (823)..(823): n is a, c, g, or t
  misc_feature (827)..(827): n is a, c, g, or t
  misc_feature (830)..(830): n is a, c, g, or t
  misc_feature (836)..(836): n is a, c, g, or t
  misc_feature (838)..(838): n is a, c, g, or t
  misc_feature (859)..(859): n is a, c, g, or t
aggcgttcctgcaacggatgcgatggacgtccgccgaccatatagcgcacgtgtagcttcgccatttcgtcgtcggagagatcaaccacgctgtagccgncgtcgttgagcatctgcaaaatttctttgcgctcttcgaggccgcggtcaggcgcacaccgacaaagatgcaggcgtttttggcatcggcaaacggtagttgaactcggtgaccgaacgcccgccaagcagttggcagaatttgaggaagctgcctttttcttccggaatggtcaccgacaacaacgcttcacgctgttcgccagttcgcagcgttctgagacgtagcgcaggccgtggaagttcacgttggcaccggaaagaatatgcgccagccgttcgccgcgaatgttgtgcagggcgatatattttttcattcccgccagcgccaggcgccagagggttccgccaccggcgcacatcttcgaataantccttcatcgccgcacagatcgcatcgtatcgacggtgatgatgtcgtcgagatactcctggcataaacggaaggtttcgtcaccgaatgcgtattaccgtaacgccttcagaaatagccctacgcgcggagatcacccggatgaaaacgcatacagcgctgactttcaggcaggcggagtcttccgattctaaggagatcactttgatttgacggcatcaagatagttgatcagacngncangncnagnagccagaccgcgcggcgantggnacaatacncggccagatggcgtctgntggnnantcanggccnggtgcntgccggnancncatncgntgtcgaaggggncccngtnaccctntngttgacatcaacgcaatggtn

SEQ ID NO: 593228 - DNA, 843 bp, Homo sapiens
  misc_feature (26)..(26): n is a, c, g, or t
  misc_feature (28)..(28): n is a, c, g, or t
  misc_feature (94)..(94): n is a, c, g, or t
  misc_feature (101)..(101): n is a, c, g, or t
  misc_feature (115)..(115): n is a, c, g, or t
  misc_feature (182)..(182): n is a, c, g, or t
  misc_feature (190)..(190): n is a, c, g, or t
  misc_feature (208)..(208): n is a, c, g, or t
  misc_feature (221)..(221): n is a, c, g, or t
  misc_feature (238)..(238): n is a, c, g, or t
  misc_feature (247)..(247): n is a, c, g, or t
  misc_feature (267)..(267): n is a, c, g, or t
  misc_feature (269)..(269): n is a, c, g, or t
  misc_feature (281)..(281): n is a, c, g, or t
  misc_feature (301)..(301): n is a, c, g, or t
  misc_feature (322)..(322): n is a, c, g, or t
  misc_feature (334)..(334): n is a, c, g, or t
  misc_feature (344)..(344): n is a, c, g, or t
  misc_feature (346)..(346): n is a, c, g, or t
  misc_feature (367)..(368): n is a, c, g, or t
  misc_feature (467)..(467): n is a, c, g, or t
  misc_feature (505)..(505): n is a, c, g, or t
  misc_feature (508)..(508): n is a, c, g, or t
  misc_feature (515)..(515): n is a, c, g, or t
  misc_feature (519)..(519): n is a, c, g, or t
  misc_feature (523)..(523): n is a, c, g, or t
  misc_feature (535)..(535): n is a, c, g, or t
  misc_feature (543)..(543): n is a, c, g, or t
  misc_feature (559)..(559): n is a, c, g, or t
  misc_feature (561)..(562): n is a, c, g, or t
  misc_feature (565)..(565): n is a, c, g, or t
  misc_feature (611)..(612): n is a, c, g, or t
  misc_feature (616)..(616): n is a, c, g, or t
  misc_feature (627)..(627): n is a, c, g, or t
  misc_feature (633)..(633): n is a, c, g, or t
  misc_feature (635)..(635): n is a, c, g, or t
  misc_feature (648)..(649): n is a, c, g, or t
  misc_feature (656)..(656): n is a, c, g, or t
  misc_feature (658)..(658): n is a, c, g, or t
  misc_feature (662)..(664): n is a, c, g, or t
  misc_feature (668)..(669): n is a, c, g, or t
  misc_feature (707)..(708): n is a, c, g, or t
  misc_feature (843)..(843): n is a, c, g, or t
aaatggcgccagaactagtggcgggntnaggacgccgtacccttctggataggtagcccttgctggttctccttttgccgcccgttcccttccngacattnaggtcgtggaggtncgcttcgtccttctttcttgtagcccatccgcgaccttttccaagaatttgggagggggatgtggtngcccagcngggctagttaactggatnagcgggatcaganctgcatttcttttgacnaaggcaagnttcatcaatgaacttcattnangcagcgttgttnttccagtggttctgcctgcntctacagtaagaatgggggantacctctactcnttcgtttacnangcccttgatttcatctctggnnattggggggctaagcagctctcttcggtgtaggaggatagggttaatggggttgttagctctggggtcccttaggaggcttagaatgagttccttgtcntggattattcctctgactcccggataaagtggatcttnagnatgattngacncctngtgaggtcttcntcatcccnctcctgtccatggctntnntgnctcctgttgaaatggagtagaacaacaatcccctgtacagccgtcnnggtnaggtcctgtcnattcgntntgttttcaggatnnacacgtntntttnnntttnntttttgtttttcatgttggagccagagggcatgtcccnnatggaaccagcgggcgtttcccccatgccagggacccagaaggacaccgggaggactgaggagcagccaatggaagtttccgtgtgcaggagccctgtcccagcactcggcttctcccaggagccaggccctctn

SEQ ID NO: 593229 - DNA, 121 bp, Homo sapiens
cgacccacgcgttcgactagttctagatcgcgagcggccgccctttttttttttggtccaaatgatttaattatgggaatgcacaatttttttaatatgcaattaaaaagtttaaaaagtt

SEQ ID NO: 593230 - DNA, 313 bp, Homo sapiens
ctgccgagctctggaatgctatggcgtcgtctcagctcactgcaactgtcacctcctgggttcaagcaattctcctcccgcagccttccaaatagctgggattcccgcagtacaccaccaagcccagctaatttgtgtatttttagtagagtccaggtttcaccatgttggccaggctggtttcaaactcctgacctcaagtgatctgcccacctgggcctcccaaagcgctgggattacaggcgtgagccaccgcatcagctttttttttttttttttttttttaagaaaggctaaaaggggggaatttttt

SEQ ID NO: 593231 - DNA, 204 bp, Homo sapiens
gcctgcgcttacgctcccgggtcgagcactctcgtgtaagcctcctgagtagctgggattacagtgcgcctgcagcaatgcctagctgatattttgtattttatgtagagactgggtttcacctgtgttagccagtgatggtctcgatctccgtgacacttgtgatcctgcccgcctctggcctcccaaaagtgctgtggatta

SEQ ID NO: 593232 - DNA, 346 bp, Homo sapiens
tcatttcagttccactggatgagttactttgttccccattccaaaagctgactgttcctattcccatttaaacggcactttataaaattctcatgtgtctttacattttatgcttgccacaaagaaggaaattcattgcttgattaaacttaaaataggattttttaaactaagggaacctaaaagccactcttgactccaacatatcaatttaagccactgcagctgcggtttctgtcccgtcctctgctgttttacacagaactggcttctagtggagctccttacattccaatctatattttttttgtttgtttaaatttcgttatctatgttatttaaaagg

SEQ ID NO: 593233 - DNA, 283 bp, Homo sapiens
  misc_feature (90)..(90): n is a, c, g, or t
cttatgctgctccctcttcaagtgattctcctgtctcagcctcccatgtagctgggacacaggcccccccaccacgcccaggtaattttngtatgtttagtagagatggagttcaccatgtggccagggtggtttcaaactcctgatctcagttgattcgcccacctttgcctcccaaagtgctgagattacaggtgtgagccacacgcccggcactaactaacaatttaactcctagtgctcttgtgttggtctggacccttctagtaacagaacggccata

SEQ ID NO: 593234 - DNA, 616 bp, Homo sapiens
attatactagcatgtaccatctcacttctaggaatactagtatatcgctcagacctcatatcctccctactatgcctagaaggaataatagtatcgctgttcattatagctactctcgataaccctcaacacccactccctcttagccgaatatgtgcctatgccatactagtcttgccgcctgcgaagcagcggtgggcctagccctactagtctcaatcgtccaacacatatgggctagactacgtacataacctaaaccatactccaatgctaaaactaatcgtcccgacaattatattactagcgacggacatgactttccaaagaagacacataattgggaatcaacgagaagcacccgggaggcctaattattagcgtcatccctctactatttttgtaaccaaatcaacaacaagctattgaggtggttccccagactttgtcctccgtagccgctgaacagacgcgctcctaatactaggctacgtgagtcgtagccctcgacgagtcatggcaatgccagacgccacttgatgccagtgaaccactatcgagaaaaaaagtctacctctctatactgaatctccctagaaatctccttattgataac

SEQ ID NO: 593235 - DNA, 953 bp, Homo sapiens
ctgaaacccaccttgattcgtcccctctcccccctccccaccttccctcgcgctaatcccccaacgaggaaggaaggagcagaggtgcaatctctggtaatctatgccagcaattatgacaatgtcagcagaccatgcagcttcgtcagctgcttgattcagccaagacaactggactactcaactttattacgataatgtggtgaaaatcgcttataccatggagaaggagcccagcaaagaatggctcaagacgtactgacacatctaaaggagcatcctgtatgcttggacaagagtcgacacaaattttggacattttctcagcaatatgaatacgcacctactatggactacaactttggaaacctgtgactcaaatacaacggcggcaagattcttccacaggaaccagtgcgaacggcactacgcaccactacgtgctggcctcattatcaacgacgtcatcatgacccaacttgtgtagacgaacgaccacggcgtatatcggcaacattcaaatatgatcccttgctcagatagtgataagcacgaagtggcccacaacacttgtcccacctctgctcagctgcatcactcgttggccgtcccgtagcgatccgccgacacgccttcctgtccgccctctacagttctgcgttgcctcgcgttccaccccctttggacggcgacgactgctcctcgggctcacccccacacgtgtgaccgcctaccccccgttgcgattccggccgctctcgcggccccgctcgtgccattggactcccgccagcgtgtcttttcctctggtcggcagtctcgcctcctgttccattctgccttgctcgcctagccactgctctcttcgtccgcccgcctcccccttgcccggctgccccggtggcctcggcccgttcgcggtattctttccgctctgcttccgtttcaccgcc

SEQ ID NO: 593236 - DNA, 632 bp, Homo sapiens
  misc_feature (281)..(281): n is a, c, g, or t
  misc_feature (478)..(478): n is a, c, g, or t
cagtagacctggagctgtgaggagattcggtccggaacactgactccactgcgggccgacaccgtgcggttgtgaactcggacccattccaacaatcatgctacacatggagcattactatgaggatctaggcgtgcatggacatgccttaaccgaggatattaggcatatacagaacgtgaactgaagtgatgtccagatacatatgaagtgctgtcggatgctaagaaacgggacatgtatgacacatatggcgaacgagggatcacatggtggaggangaggcttgagctactaaagcagtgcaattgtaggcgtgtgccaattgagtaagccataaggtgaactatgggaacagtgtgaactgagggacccattggcatttgagtacactgatgactctacagaggcactttttgagactcagatgcgtacgcgcgtcatcgagaatctacgcactgtgtctgagctctgtgcngacagctgagtgcctgctttaggacaccggtgccagtgcatcgcgtccgcgtatgcttcataggctacactacggtgacgtaggcctaggttcaaacaccttcaagacttgagttagtagtggcatgtgccattagtatagtaggccagacttc

SEQ ID NO: 593237 - DNA, 752 bp, Homo sapiens
ggcccaccagcgctgccgcggcccttttccgttagcgcagctgctgttgttcctgctaggtcccacattggtgctaggcatcttcttccatctgcccattaactctagcaagcgcctgcgtgaggagattcacaaggacctgctactagactgacgcgtacgagatctccaaccagcctgggggctgctggcggtcggcgcagacacctcaagatcacagattctgatcgccatattctctactccacagaggatgcatacactgggagatctgcctctacaactgatgactatgacatatgcgaagtgtgtgtcgagagcaccggaacagggcggagaccctaccaacgctagatgctagacatgaagcatgtcgtgtaggcgagtaatcacgtataagaccagtgacaatatatacgcgacgatgtcgcctacatgatgaacagagaagaggagatgcactggaccaacgagtcacagacactcggctgctatactgaggatctattaatagtgctgtctcattggaatagcatcctgggaggagtgctacctgcgatgcttctgaacgccacaaacatgttgggcactgaatgaaagctaatgttctgcgagcttgtacgcgagacagagtacataggtggcacttgactagaacaaagaagactctcacaagacatctttgtacgccggcgttttattggtcctatctcttttgtgtgggaggacagggggggggcctcactcaccag

SEQ ID NO: 593238 - DNA, 560 bp, Homo sapiens
  misc_feature (2)..(2): n is a, c, g, or t
  misc_feature (5)..(5): n is a, c, g, or t
  misc_feature (15)..(15): n is a, c, g, or t
  misc_feature (22)..(22): n is a, c, g, or t
  misc_feature (31)..(31): n is a, c, g, or t
  misc_feature (35)..(35): n is a, c, g, or t
  misc_feature (63)..(63): n is a, c, g, or t
  misc_feature (65)..(65): n is a, c, g, or t
  misc_feature (70)..(70): n is a, c, g, or t
  misc_feature (75)..(75): n is a, c, g, or t
  misc_feature (77)..(77): n is a, c, g, or t
  misc_feature (81)..(81): n is a, c, g, or t
  misc_feature (84)..(84): n is a, c, g, or t
  misc_feature (88)..(88): n is a, c, g, or t
  misc_feature (105)..(105): n is a, c, g, or t
  misc_feature (117)..(117): n is a, c, g, or t
  misc_feature (120)..(120): n is a, c, g, or t
  misc_feature (137)..(137): n is a, c, g, or t
  misc_feature (140)..(140): n is a, c, g, or t
  misc_feature (148)..(148): n is a, c, g, or t
  misc_feature (169)..(169): n is a, c, g, or t
  misc_feature (182)..(182): n is a, c, g, or t
  misc_feature (186)..(186): n is a, c, g, or t
  misc_feature (190)..(190): n is a, c, g, or t
  misc_feature (195)..(195): n is a, c, g, or t
  misc_feature (207)..(208): n is a, c, g, or t
  misc_feature (212)..(212): n is a, c, g, or t
  misc_feature (237)..(237): n is a, c, g, or t
  misc_feature (241)..(241): n is a, c, g, or t
  misc_feature (258)..(258): n is a, c, g, or t
  misc_feature (262)..(262): n is a, c, g, or t
  misc_feature (266)..(266): n is a, c, g, or t
  misc_feature (292)..(292): n is a, c, g, or t
  misc_feature (296)..(296): n is a, c, g, or t
  misc_feature (301)..(301): n is a, c, g, or t
  misc_feature (311)..(311): n is a, c, g, or t
  misc_feature (316)..(316): n is a, c, g, or t
  misc_feature (319)..(319): n is a, c, g, or t
  misc_feature (325)..(325): n is a, c, g, or t
  misc_feature (327)..(327): n is a, c, g, or t
  misc_feature (330)..(331): n is a, c, g, or t
  misc_feature (336)..(336): n is a, c, g, or t
  misc_feature (340)..(340): n is a, c, g, or t
  misc_feature (359)..(359): n is a, c, g, or t
  misc_feature (368)..(368): n is a, c, g, or t
  misc_feature (370)..(370): n is a, c, g, or t
  misc_feature (380)..(380): n is a, c, g, or t
  misc_feature (397)..(397): n is a, c, g, or t
  misc_feature (402)..(402): n is a, c, g, or t
  misc_feature (414)..(414): n is a, c, g, or t
  misc_feature (422)..(422): n is a, c, g, or t
  misc_feature (424)..(425): n is a, c, g, or t
  misc_feature (428)..(428): n is a, c, g, or t
  misc_feature (433)..(433): n is a, c, g, or t
  misc_feature (442)..(442): n is a, c, g, or t
  misc_feature (460)..(460): n is a, c, g, or t
  misc_feature (462)..(462): n is a, c, g, or t
  misc_feature (470)..(470): n is a, c, g, or t
  misc_feature (477)..(477): n is a, c, g, or t
  misc_feature (484)..(485): n is a, c, g, or t
  misc_feature (495)..(496): n is a, c, g, or t
  misc_feature (500)..(500): n is a, c, g, or t
  misc_feature (553)..(553): n is a, c, g, or t
tnggnccatttgggnattttgntttcaattngggngaaagttggaattaggattaggattgtngngaagnatagnangggngcnactnggccaaggatgggaaanggggagcttacnggnggccccccgattcaggntanaaagaggnggtctgcggctaggagtcaanaaagtgattggcntagngggngaaanattatgctttgnngttngggaaaagggggggggggggggagngcgngggggggggggggtagnaatngggnaagggcgccccccagtttgttagggncggntcggngaattggggnggggnagngggaanancanncgggngggngggggggggggggggttangggggaggngnggggaaaatnggcgggggcccccaggnggtcnggggagaatagngttaaggncnntanggggngaatgaagngaagtaagccgggggcgncnttgattgngtagganggggggnnggggattttnncggnagggggggggatccccaggggggtgtttgaccccggcccgggcaaaaaaaggngggggag

SEQ ID NO: 593239 - DNA, 773 bp, Homo sapiens
gagacaggaccattgtgcgttcaacaggcctttcgtgatgatcattgtccgtacagacacctagaacatcttcttcatgagcagagtcaccaatcccaagcaagcctagagcttgccatcaagcagtggggctctcagtaaggaacttggcatgcaagctggatgcctgggtctctgggcacagcctggcccctgtgcaccgagtggccatggcatgtgtggccctgtctgcttatccttggaaggtgacagcgattccctgtgtagctctcacatgcacaggggcccatggactcttcagtctggagaggtcctggtgcctcctgacagcacataaataatttccgttggaaaaaagaaaaaaacaaaaaggatttgccggcctgctgcgcattgcagttcgcggcgtgcggaggaaagagacgacgcgctccaggcaagcaggaacccgcccatgagtgctgcgacggagtgacacaacacgcgcccgtggcagcgtgtgcattgcgagagagcctggatctgtcgagcgcacagtctgagcaactgcacagagcgacagcggtatgctcgcgggcgttctcgcgagtgacgacgaactgaagactggcaccgtgagacaccgagaggcgcaatgccgaagtctgagaacgcccaggaagtgagagccgagactgcgaaagctcggtagcgcggtgccagcgcgcggcctccccctaaaacgcctgcgcccttacatcaccacgcgcgaacaccgtccggctccggcgcga

SEQ ID NO: 593240 - DNA, 124 bp, Homo sapiens
ggcaccacgcacattctgtaagggggccactgctaggcattgaagatacagtggtgaacaatatatgcagggaaaataatcaagacaatacaaggtcattcgctgattgccgtgttttgatagt

SEQ ID NO: 593241 - DNA, 403 bp, Homo sapiens
  misc_feature (314)..(314): n is a, c, g, or t
cacgagggcgcccggtcacgtcatgccggcccgcagtcccagcgtcgcaattagcgatgattgaccaggttatgacctagctttgttttgtctacctaatcactatgccgtggatttgggaaatgagtttattcctcatggactgattatggacaggactgaaagacttgcgcgagatgtcatgaaggacatgggaggacaccacattgtggccctcagtgtgctcaaggggggatatgaggtctttgctgacctgctgaattacattgatgcactgaatagaaatagtgatagatccattcctatgactgtanattttatcagactgaagagctactgctcatgatcagtcaacgggggacataaaagttattggtggtgatgatctctcacctttaactgg

SEQ ID NO: 593242 - DNA, 156 bp, Homo sapiens
aatcgcggtcattatgagggctgagagcggccccgtaggggtcatggtgttgggttttactatatgataggcatgatgattgagtgggtcattatgtgttgtcgtgcaggtatgaggcttactagaatgtgtgaaaacgtaggcttggattaaggc

SEQ ID NO: 593243 - DNA, 162 bp, Homo sapiens
agtaatgtatgagctgctggggctagcctcgagactgttcaacttctgttccgcaaatgcagcctcaagacggtgctgctcttggccgagcagatgatcagccgcatcgagtatatccactccaagaacttcatccacctgggacgtcaagccctgacaact

SEQ ID NO: 593244 - DNA, 1778 bp, Homo sapiens
ggcccgggcggcggcagcaacagcggcgtgcgtgcatctggcccgagccgccggcctgccctcccagacctcaccagacccgacagtgcatgacacatatgactcccatcacacatatggatcccactgtgtcccagaatcagacatctgagacagagagatgactagcatcatagatgcatataacatcgatcgtagaataactacacaagacagaacgatgagacacacagagacgaccaggtgacacaatgagacaacacgaacaacccatgcgaggcaccaggagtatgtactgagacggatgcaatcaaggataatagacgacactgacgagactgaacaacacacaaacaagagaagaacaaacaacacagagacaaaaaaagagagcagcaaacaagcagaaccagcggaaccaaatggacaaagcaaacacagaaacacaaccaagcacagaacaaccaaacaacgaagaaatagagaccgaatacacacaattacgaccacacaagcacacgacaaccaacacacaagcgacaaccaaataactacagaacaccaaagcagcagaaagaaaaggacaccaagaggaagaacatagacaacggaagacagaagacaaaccaggaaaagacaacagcaaattgaaagaaacatcacacatagaagcacaggcacagaacaggacagtaggagaccacaaccagcagccaaggccaaccatacagaagaaacccaacacaccaaacacaccgagcgaaaacacaacaccatagagcacaaaacatcgtggacgcctacacgaacagcgcaacaaacgaaggaagccagagcaacgcacaaacagcaccaccacaaaccacacgcaagagaagcagcgcgacagaccgaccacaaacagacaaacgagacaaagacacaacaatgagaagcagacagacatacaccacgacggcgacagaccagcaaaaagaagaaccacacaacacaagcgaagcgaacacctacgaaggagacaacaccacacgcagcacaggaaacacaacaagaacgaagcagaaaacaaacacaccaagaacaacacagcaaacgacgaacaaacagcaacagcgaccaaagcaaagacaaacgagacaagaagacaaaatccaacgcacacacaacacacgaccgggaagagaaaggacaagaggacagaggagacaagaaagaaccagaacgaacagacagaaccacagcacgacaaccgagaccaaaacaaacaacaccacgagcgagagggagacaccatgaacagagcaccagtaagcaacgcaacagaacaacatgaaagaagccgcaaccaccagaacgcagaacgaccagagacacagacatcactacaagctgaaggcaacaacagaaccagacgacgagaaccaacacgcactagacacgcgacaagagaccgactagcgcgctcaagaagaacacagagaacacgacagagaggcgagcgaaacacacacagaagaaacgcgagcggaggagagcaaaacaagccaaagcgaacgacaaaacagagaacaagacgacgagagaaggacgacgaagagcggacagacgagcaaagagaggagtgacaacgacaccggaaggcagacacacagcagacgacgaggcgagaaaacgaccagcagcaccggacgagccaacgaagagaggcgacgaaggagacgcaccgcgaagcacccgatcgacacacccgtacaacgacacagcgacagcgaaagaca

SEQ ID NO: 593245 - DNA, 175 bp, Homo sapiens
acagacccatgagcacatgtggggagtatactcaccctactcctacaggcctgcattccgtagctgctcagtacattaacccattcaatgtctttaagatttaatacaagttagttaatcctgtaagttacatacatcataaactctattaatatcgtgagataaagatcacaga

SEQ ID NO: 593246 - DNA, 1152 bp, Homo sapiens
  misc_feature (565)..(565): n is a, c, g, or t
gtcggggtaggaccacacagaggaaaccagtcggggaagaatgtgatggtggagccgcatctggctatgaggtgtcgtcttcatattgtccgcaggaacacggcagagatgcaacgtgggtcaccgaagtaaccttggtcccatggggaatcaggtatggatggagacgaagagagtctcgcattctcgtgatagggagatgacacaacatttggagtaaccggacgcctgagtaaccgccgtatcctgctccgaaggctgatgcgaagcatgcgaaatgcctggtgttggtggttgagacgcaggatccaacatcaagaacctgggggggctgaagggttcgtcgtgtcgcgtcgtggggcgttgcgcctcggggctacacacggtgtcttccgccatttgtcgtcctgatcaatcgctttggtcccccggattgggtcctaagttcgtagttgcccggtctgaagcttcgtcacgcctcacgctcgtggaccgcgtgaccctccattgaacttttgtggcccaagaacgagggaccaaacatgcattccctgtgcattcgagngatgctgcgaacacccaacaacaaattagccgcatggctcattcgcaatggtgggcatgtgatctattgctgcatgtggcccgagccagaccgagagcccggatttgtggccctgaatgccctacaacgttcctgcgtaaatggcaggacactttcgtggatttccatttaagggcaacgtggcgattgactccacaggcctcaggcgaaggccggtggtaggctccgaaagtgcaccaagatgcaactaggagcaacatgaaagccgcaggaagccaggttggaccctttgaagcccatattgcaaaagagaaccatggccaggggtcgctagggcagtggtacaaagggggccaaaccccccccaaatgggcggtagcaagaaaccgtgggcaacgatcacacagaggcatggaccacacggagattcgcggaaagagcaacgcctggcgcgttggaggaaccttggcattgcaccgcgcggagcgtagtgccgacaatttataacgaagaaggcctaccaccccggggcaggagagacacacacaacacaacacggcagacggcggccacaataaaaatctccc

SEQ ID NO: 593247 - DNA, 132 bp, Homo sapiens
tttgtatgggaactgttggattttgtgtttttaccaaaattgctgatgctactgaaaaaagagaataacttggacaatgaaatgatgtcaaatgtggtaataaaacctttactgagctttttgaaaaactca

SEQ ID NO: 593248 - DNA, 109 bp, Homo sapiens
cgtactcccttacacgcaagcctagactgccagcagtcacaccacacagtacacaccctcaccccatcatctcaagtttctccaccgaaccaaaatctacccgtgggcg

SEQ ID NO: 593249 - DNA, 227 bp, Homo sapiens
aaaaatattcttaccctttcccttttagctctgctctatcgctcaccttctttttacagctagatttctaaagcaacaacaaaaatctgcatgtacgatctccacttcctgattttctggttgcttctagtcaactgcggattgacttcttcatattcactgaatttgttcttgccaaatcatcaatacccttctcactgtttcacccagtgggcatatcattgccc

SEQ ID NO: 593250 - DNA, 181 bp, Homo sapiens
  misc_feature (22)..(22): n is a, c, g, or t
  misc_feature (167)..(167): n is a, c, g, or t
agccgtaacccgggtagactancaggtgactaactgtgcattggtgtaccctggcatgcacaggtgtgcactgatgtgccctggcatccattggtgtaccctggtgtgcctgccataggaccctgggcgggagctcccatctcatctacatcaatccctgacgttangtctacctgggggt

SEQ ID NO: 593251 - DNA, 1186 bp, Homo sapiens
gatgggttacagggtaactcaaccctggctgccatccttgggcactgtgtgtgtccaggcaccttggaggaccgtgcagcccccagaagcttccagctcccgcaccactcagtgaagcccagcctggcgcctgccctgcccccgtcacgggatgggcccccattggggttcaacattccatcgcagccaaaggcagtcggcacttgggacatctgcttccacggacaggtcacctccgctttgcacggaagaatctggatgcttacattaaactggtgttctgagagttcctacggacaggtcacctccgctttgcacggaagaatctggatgcttacattaaactggtgttctgagagttcctacggacaggtcacctccgctttgcacggaagaatctggatgcttacattaaactggtgttctgagagttcctacggacaggtcacctccgctttgcatggaagaatctggatgcttacattaaactggtgttctgagagttcctacggacaggtcacctctgctttccatagaagaatctggacgcttacattaaactgatgttctgagaattcctacaggcaggactgaaagcctggtgtgtgccagtatgatgttccacccacagaaacctggtcacaatcgtcccttccagcaccccatccagcagtgactgcacacactgagccccctaccagcccctttcaccctgctgactgtcactgggccctgggatgtgcaagactccacagcagcagaggtggggggacatatcacagcctctgcccccggctgtgatgccaccgaggggctcgcctgctgatggcttcaacagggtctcacctcatcttttcctgctctttggccctggatcgagaaaatttccatcagtgccccattaatatgctgccctgtggcatctgcccaggaggccctgccaggcgtgcacaggtgtgcattggtgtaccctggcatgcacaggtgtgcactgatgtgccctggcatccattggtgtaccctggtgtgcctgccataggaccctgggcgggagctcccatctcatctacatctcctgattcatgcgttgtttcataggtttcaatgtctctgtaaatgtggtagaaatgcaggctttatgggcataaagtgtacatttctaaataaatcccttctatttagtatg

SEQ ID NO: 593252 - DNA, 312 bp, Homo sapiens
  misc_feature (45)..(46): n is a, c, g, or t
ccccccccccccccttggggaaatggggggggggggtggcggttnnagggtcttatttaatcaaggctggttttgtgtacccggcggttcgccccggcgccccctttccccctttttttcctcccctaggaggccccgggcccgttccaccctcccggctttagcttgggccgggggccggtttcccattttcccccgggacccccttttcccctttggcctctttttgtggccctttttttccagtttgttcgcaggagccggctgggtccggtccgggatttccgggccttcgtggccccccgcgtccga

SEQ ID NO: 593253 - DNA, 211 bp, Homo sapiens
aagtgatagctggcatccaagtgattcagacaaaagtgaaagtcaggaagtcaatagtacattcaattctccaaatgcatgcagcagagtgtggcaggaagggtacacaagtcagcagagtctgggttgtgctggttctcctattgactcgtgtgtgtgatgctaggtgggtgaatcttgggtttgaatctccatatgtaaaagtaactct

SEQ ID NO: 593254 - DNA, 1394 bp, Homo sapiens
  misc_feature (1238)..(1238): n is a, c, g, or t
  misc_feature (1370)..(1370): n is a, c, g, or t
gatgggttacagggtaactcaaccctggctgccatccttgggcactgtgtgtgtccaggcaccttggaggaccgtgcagcccccagaagcttccagctcccgcaccactcagtgaagcccagcctggcgcctgccctgcccccgtcacgggatgggcccccattggggttcaacattccatcgcagccaaaggcagtcggcacttgggacatctgcttccacggacaggtcacctccgctttgcacggaagaatctggatgcttacattaaactggtgttctgagagttcctacggacaggtcacctccgctttgcacggaagaatctggatgcttacattaaactggtgttctgagagttcctacggacaggtcacctccgctttgcacggaagaatctggatgcttacattaaactggtgttctgagagttcctacggacaggtcacctccgctttgcatggaagaatctggatgcttacattaaactggtgttctgagagttcctacggacaggtcacctctgctttccatagaagaatctggacgcttacattaaactgatgttctgagaattcctacaggcaggactgaaagcctggtgtgtgccagtatgatgttccacccacagaaacctggtcacaatcgtcccttccagcaccccatccagcagtgactgcacacactgagccccctaccagcccctttcaccctgctgactgtcactgggccctgggatgtgcaagactccacagcagcagaggtggggggacatatcacagcctctgcccccggctgtgatgccaccgaggggctcgcctgctgatggcttcaacagggtctcacctcatcttttcctgctctttggccctggatcgagaaaatttccatcagtgccccattaatatgctgccctgtggcatctgcccaggaggccctgccaggcgtgcacaggtgtgcattggtgtaccctggcatgcacaggtgtgcactgatgtgccctggcatccattggtgtaccctggtgtgcctgccataggaccctgggcgggagctcccatctcatctacatctcctgattcatgcgttgtttcataggtttcaatgtctctgtaaatgtggtagaaatgcaggctttatgggcataaagtgtacatttctaaataaatcccttctatttagtatgctcaccctagaagttactgttgtccagacgtagagggatgagtgagccagtnacctcagacgggatggtggggacggcaggtccagctcctgcctcctcctggggggtctggctttgggggcttgctccgaagaggccatggcccaggcctgtggctcacaatggggaccaaccagctcttctnatcttcttccctcacacttcctct

SEQ ID NO: 593255 - DNA, 702 bp, Homo sapiens
tagagactatagaaaacaaccaaatagaaattctagaattgggccaggcacagtggctcacacctgtaatcccggcactttcagaggctgaggcgggtggatcacatgaggtcaggagtttgtgaccggcctgatcgacatgatgaaaccccgtctctactaaaaatacaaaactagctgggtgtggtggcacatgcctgtaatctcagctacttgggaggccaaggcaggagaatcgcttgaactcaggaggcagtcgttgcagtgagctgagatcatgccactgcactccagcctgggcaacaagagcgagactccacctcggaaaaaaaaaaaaaaagaaaagaaagaatttctaaaatttgaaaaaacccaattttctaaattttaaaatttccctggattaaggttaataccccaaaggaggtgacgaggagtcaataaaagaacctatcttatctacctgtgagagagggaccaaacggatgggaaaaggccctatgagacaacttccagaaggagacgagagagagaggatgggccgaccaatttttgacagaaataactgaacatgccccaatttggtgaagacttcagttaccgactcacgggttaacacctgtaagctggccaattgtgaagaaaaccagtgcttaggccattattgtcaaattgctgaaggcaaaatttacacaaaacaaa

SEQ ID NO: 593256 - DNA, 144 bp, Homo sapiens
  misc_feature (28)..(28): n is a, c, g, or t
  misc_feature (67)..(67): n is a, c, g, or t
cagccacctttccctcccccctcaaagncccgacctccgcaggccaccttttccctcccccctcaanccccagtgttgtgggtggcagcacttgtttactggctgctttctggctcgaaataaaggaatcgtgcttgtgtaaaa

SEQ ID NO: 593257 - DNA, 325 bp, Homo sapiens
ggtcgacactgcattccagcctgggcaatagagtgagactccatctcaaaaagaaaaacaagaaaacccaaaaaaaccactaacaacaaaacccagcctttttgctgatatggagaaagctttagtgatctggagagaagatcaaagaagccgcagcacttccttaagccaaagcctaatccagagcaaggcccctcttcagttctctgaagcccaagagaggtgaggaagctgaagaagaaaagtttgaagctagcagaggttgacttacaaggtttgaggaaagaagccatctctctaacatcaaagtgcaaggggagtcgac

SEQ ID NO: 593258 - DNA, 349 bp, Homo sapiens
gattatgtttaatctttcattggaagccaaagtaattccacctagaaatgatgctatcagtcctggcatggtggctcaccctaataatcccagcactttgggaggctaaggcaggagaattgcttgagcccagcagtttgagaccagcctgggcaacatagagagctcctgtctttaaaaaaaatttttttaattagttggtcttgatagtgcatgcctgtagtcccaactacttgaaaggctgaggtggagagatcatttgagctcaggaggttgaggctgcagtgagctatgattgcgccactgcactcctgcctgagcgactgagcaagatcttgtctctgaagaa

SEQ ID NO: 593259 - DNA, 932 bp, Homo sapiens
  misc_feature (300)..(300): n is a, c, g, or t
ctgggactacaagcgtgcgccacacccccggctaatttttttgtattttcaatagagacaggttttcaccatgttgaccaggttggtcttgaactctcgacctcaggtgatctgcccacttcagcctcccaaagtgctgggattacaggcatgagccaccatgcctggcctgaagacatttgttttatttatttaccgtggttttagtggtcaagcgttaaccaccatgttcttcagaagagaattctgctgtaacatgtttttataagttactctgtactattcttcatgcaatggctntcttgatattggtcactattaaatcaccggtatattggacttgtgactgggtaacttttaaattcagctgtgtgactataataataccgtaaagatgaagaagtgcttgaggggaggtctgagtgaggcagttacaaaatatttaacgaacgttgggacatttggaggaaagttcccacgcagttcagtattatcattcaagaaaaaggttacctggtgcaaaaattagcctaatacattggtggactaagtgttcccggggatgctttcttaacgtggtgtgccccatttattacgggttcgtgcccactttaacatttatcccttaaggaatttaattctttaaacgtatcggtgtttaaccgcggaccagcaacttgcgggacaaattattggcccatttaactgtggccaaggcggtttgttgtccaaaaggaacccggcacccacaacatgctgcgcttgcaccagcaagaaaggaccaagaaaccccctcaagggggtggggacaattcttttgacaagttccttactcccgaaaaacccctttttttcacacatttctttgggcccctttagagtataccccggttggggcacacttatcttgaaatctgggggggtattatacc

SEQ ID NO: 593260 - DNA, 127 bp, Homo sapiens
gagggctccccctagaaagaaagaaagaagcagaggctgggtattaaatttaaattccacatgggatccaagaccatttcctttcagcaccagcacgaattcccttagcaccagcacgaattccctt

SEQ ID NO: 593261 - DNA, 649 bp, Homo sapiens
  misc_feature (395)..(395): n is a, c, g, or t
  misc_feature (445)..(446): n is a, c, g, or t
  misc_feature (464)..(464): n is a, c, g, or t
  misc_feature (575)..(576): n is a, c, g, or t
gcggggcaggaactcctgttcagatttctaaagactccgggagagatggtccaggacaagcacagccacctggagccgctggagagccaggagcaggacagaatagagttcaaggacaagaggccagaaatctctccgtgaggggcaggtggactccaggcacccggtaccgatggggcagggaccgagtctcccatgaaggcagactcctcctcccagcagagcagcaggatccccagccagactctgtacccacaggattacagccattgcttgggaaggctgggaggcctcccatccaggacactgggggcaggagtgtcatcttttgggcagggcaatcctggggctaaatgagggtacaggggaaatggactcttcccctaactgcaccncctgggaagaggaaagccaggcaccgataaagagcgacccagccccaccnncctggtaaaatggaattntaccaagatgaaagggaatgaagggtcccctcactagaagcctcaagattttccttcacactgttgaaatagggctagagagcaggaaatgtgagaaaaagtgtatagtgnncttctcagagcgagcactcgacagccctcaggtaacacataaaatcaataggatatgctgaaataaaaaaaaa

SEQ ID NO: 593262 - DNA, 168 bp, Homo sapiens
aggggagggtgaggccgaaaagggaagcccaaagcagattttaatgtttcaaaggagtgcagcccttcccagccatcaaatatgagggcactgttttgtttggtgttgtagccatttcaagaacaaatcaacagcaacaaaaaagaaagaataaatttttaaatttta

SEQ ID NO: 593263 - DNA, 157 bp, Homo sapiens
taatttatgatggtggtggttaatttcttactggtgcctaatttataaattaaaattcatcgtaggtatgtatgtacagggtggaacatctctaatccaaaaatccaaaattggaaccgttccaaaatccaaaacttatcgaagccgcggtgcctgg

SEQ ID NO: 593264 - DNA, 468 bp, Homo sapiens
agtgacagcaccagggatgccacacagccaggagcctgctgggctggggtcagccaggccacctgccatgcttgtggccactccagcctgtatccccacagacgctgaccgctgctctgtgcaggaccggcacagtgagagcacagcccggcctgcgcggggcaggcaccctccagagcctgggtgaaagtccggcacctccccatcagatcctcacttaggagacggccactgagagcccgtgattgcacaagccttgtaaaaaagagggaacgcattctaaagccacacgatccaggtgatccttccccacttagggtttttgttccagaggtatgaccagaaatgtgtgtgcatgtgtggccaactctcattcatgtcattttctagttctggaaaaaaattcactgtttaggaaaatatagaatattcaaaaacacattgaaaataaaatcaaatgccataaga

SEQ ID NO: 593265 - DNA, 1957 bp, Homo sapiens
  misc_feature (951)..(954): n is a, c, g, or t
  misc_feature (1534)..(1534): n is a, c, g, or t
cccgtatgcgatgttttgtggatggcaaagacttattcctgagggaatcgatataggggaacctcttactgattgtttaaaggatgttgatttgatcccgccttttaatcggatgctgctggaagtcacctttggcaagctgtacgcttgggctgttcagaacattcgaatgtttggtggatgccagtgccaaatttaaagagcttggtatccaagccggttccctgcaaaccatcaccaatgagaaccatcggaccgagcttgggaccatccgcaagcccacttcctcctggtgatgctcagcatgctcaccctgcagcacagcgcaaacaaccttgacctcctgctcaattccggcacgctggccctcgctcagacggcactgcgcctgattggccccagttgtgacagcgttgaggaagatatgaatgcttctgctcaaggtgcttctgccacagttttggaagaaacaaggaaggaaacggctcctgtgcagctccctgtttcagggccagaactggctgccatgatgaagattggaacaagggtcatgagaggtgtggactggaaatggggcgatcaggataggcctcctccaggcctaggccgagtgattggtgagctgggagaggacgggtggataagagtccagtgggacacaggcagcaccaactcctacaggatggggaaagaaggaaattacgacctcaagctggcagagctgccagcccctgcacagccctcagcagaggattcggacacagaggacgactctgaagccgaacaaactgaaaggaacattcaccccactgcaatgatgtttaccagcactattaacttactgcagactctttgtctgtctgctggagttcatgctcacatcatgcagagtgaagccaccaagactttatgcggactgctgcaaatgctggtgtacagggagcaacaccnnnnctggtgcacgctggggtttgtgcagagactcgctctcacgctctaggtgtgcggcaccctcagctccctgcagtggatcacgctgctcatggaggtcgtggatgggcacgcacccttcactgccacctcgctgcagaggcagatcttagctgtgcatttgttgcaagcagtccttccgtcatgggacaagaccgaaagggcgagggacatgaaatgcctcatggagaagctgtttgacttcttggggagcttgctcactatgtgctcctctgacgtgccgttactcagaggtgggtggccgtctcccttccctgtaccctggtgaagagcggtgcagtgccatcactcagaggtgggtggccatctcccttccctgtgtcctggtgaagagccgtgtagtgccatcactcagaggtgggtggccgtctcccttctctgtaccctggtgaagagcggtgcagtgccgtcactcagaggtgggtggtcgcctcccttccctgtgtactggcgaagagccgcagagtgccccactcagaggtgggtggtcttttcccttccctgtgtcctggtgaagagcggngcagtgtcgtcactcagagatgagtgaccatctcccttccctgtgaccctggtgaagagtggtgcagcagcttctcccctggtttcctcctcagagtcaaaaaatgaggcggcgtagggtgtgcccgcaggcctcgctgactgccacccacagcagcacactggcggaggaggtggtggcactgctgcacacgctgcactaccctgactcagtggaatgggctcatcaacaagtacatcaactccccatgccgctccatcacccacagctttgcggaaggccttccaaagggcccagttagagactacttccctgattccgagaaccctgaagtggggggcctcatggcggtcctggctgtggttggaggcatcgatggtcgcctgtgcctgggcggccaagttgtgcacgatgaccccgccc

SEQ ID NO: 593266 - DNA, 577 bp, Homo sapiens
catgcagctagtgatggacacttagagttgattccatgccttagctatcgtgaatagtgtagcaataaacattcaagagcatgtgtcttggtttgtctaatgatttcttctaagtagatcaacagtagtgggattgctgaattaaataattccatttttagttctttgagacatctccacactgttttgcacagaggtagtactaatttacattcccaccaacagtgtttgtgttcccttttctctgcatacttgccaacacctgttttttttattttttaatagtagccattctaaatggtgtgagatgatgtcttatggtggttttagtttgtatttctttgatgattactaatgttgagcattttttcatgtttcttggctgcttgtatgtcctttatccactttgcaatggggttgtttttcttgttgagttccttgtagattctggatgttagtcctttgttggtggcataattggctaataatttctcacattctgtaaattgtcttttacctctgttggttatctcgttagtcgtgcagaagcattttcagttggatgacatctatttgt

SEQ ID NO: 593267 - DNA, 603 bp, Homo sapiens
cgatctagaggatcccgtctgagcaagttgggagtcagtggacgttgttctgaaatacgccccgggcaattttctgcaagtgaaccggagcagaggtcattttcttataaggctcagcctcagagatagaacacgggaggcaagaaattaataatttagtaacagtgaagctccaggggtgattacatcatgatgtaaaatcagaggttgatctgatggtgagcacggggtgctcagactggtatagagacgacgagacgacagaagtgcgggcactacagctttcctccccagctctaccggggaccagcaggggagacgggacggccaggacgaggaccaggcaacctgaggagagggctctgcagccagagaggggcctgaaggaccggtgggaccgaaagctagcagacgcactttagttgcttatagctcttccggctggaggaggcggtggtggttgtacttgattgtgtggaccctggcgcctccaccagagctgaggccacccccaatgggctctgccactgctggaactgaagccacctccaacgccacagaccattgccattaggagtaggtgctacctccaacccggcctaa

SEQ ID NO: 593268 - DNA, 544 bp, Homo sapiens
  misc_feature (50)..(50): n is a, c, g, or t
  misc_feature (150)..(150): n is a, c, g, or t
  misc_feature (164)..(164): n is a, c, g, or t
  misc_feature (218)..(218): n is a, c, g, or t
  misc_feature (285)..(285): n is a, c, g, or t
  misc_feature (351)..(351): n is a, c, g, or t
  misc_feature (363)..(363): n is a, c, g, or t
  misc_feature (384)..(384): n is a, c, g, or t
  misc_feature (441)..(441): n is a, c, g, or t
  misc_feature (459)..(459): n is a, c, g, or t
  misc_feature (473)..(473): n is a, c, g, or t
  misc_feature (478)..(478): n is a, c, g, or t
  misc_feature (484)..(484): n is a, c, g, or t
  misc_feature (491)..(491): n is a, c, g, or t
  misc_feature (510)..(510): n is a, c, g, or t
  misc_feature (513)..(513): n is a, c, g, or t
tcgtcattaaggcttactatcagtaagcggtatgactgttccaggtaggncagtggaacgggggtggggtggagtggggtagggtggggtcagggggaacgccatagagccgaaatcgcaaggtgggttgcgcgttggggcagccggatnttatccagttatancatacggtaaaatgggattaaagcagaaagtgtttcatatttgttgtttaatantaaatggtatcgggggccccggtattaaacggcgtcagggatgggcgagcgggccattcaaagcacngtttgaggcggggcagacaacccaggggcaaagtaaccggataaatgcggagcagggatttagggnagtcactttggncacggttaggtggattaatancgctgaagttttgggtatgaaaataaaagtccgtagtgccgaaacccatgaaaaagntggtaaaagtggaaattncatcagtgcgaagntttgnggttgngatcggnttggcccaaggtcggtttnggncggaccaaagtattttcaagtccaggaagag

SEQ ID NO: 593269 - DNA, 321 bp, Homo sapiens
ttccttgagtatcccccccttccaccagctggttaaaccagaatcacctcagaaatctacttctccttcatattattcataactgccagtgttacaattctaattgctggccatgcacggtggctcatgccagtaatcctagaactttgggaggctgcggcaggtggatcacgaggtcaggagatcgagaccatcctggctaacacggtgaaaccctgtctctactaaaaatacaaaaaaaattagccaggcgtggtggtgggtgcctgtagtcccagctactagggaggctggtggaagggagtggaagggaggctggtg

SEQ ID NO: 593270 - DNA, 1324 bp, Homo sapiens
cagagtttccagaattaggaaaataatcactgggggcagtttgaggttggtaccagatatgtgggaggaggcaaggtaagggaaagagtacttgaacgttggaactggtccttgcagggaaatgcacatttatgaaaccccgaaaactgatgtcaaagcacctcctgccttgggcagagtcctctcaaagtctacaggtgctgcctccagaaccctcttcctggagcgcatccctatgtatctagaaattctgctgggaaatatgatggtcagacccttggccacctgaaaggttcagggtggtagaagaacaaaggaaagccacaagggcagacaggggcaggtgccagcaatggaacggcaggcactgccaggtcaagacacccatggtgacgaagtgcaagatggaccgaggcgcaaggatatgctctaattcaccatggtttgctccctgctagggagccaagcagggactcattgtgcccaagggcccaaacggagccccactgcacacacgacatcttcctacattgggtgcattaatacttgcgagcataccaagcaaaccaagcgaacgaggacccagcggaagaccaaacacaatgggcaaactcaacaaggacacacaggagacatagggaccagggcacacacacacaagccgcacacataggagacaccataccaagccactacttgaataaccactatccatccccacataacgagaaacaaccatataatacacagaaaccacatgagctccacacaccctcttgaggacgcacagacacgcggaactcagtagcagcagagccaaccgaaaagagacactaaggcgcacaccacattgcaacagaacatacacgaacattagggcggaacagacaagacgacaacagaacaaaacacgaaaacggatctcactattgaacaactggctcaaaaaatggctcacacagcgccacagtcaactcaccccaccgcgacacgacacaactcaagcaacggtcacacactgtaaactggccacactcgcatgacgtaccagtcaggcgcttcctaacatttgcactcactaactactaaaaacacgcagacacaaaagaagacacctaagcacactcctatcaaataacgatacaccatgagaatcacctgcaacacacagattacaattacaatcattcatctttgctaaccataacccaacatactaccacatacaacacacatatggtcatacacaaaactcaccaacaaaactaaagcacaaaccgccatgtcatctatagtttttgtctctttagaaaacaaccaaaga

SEQ ID NO: 593271 - DNA, 296 bp, Homo sapiens
  misc_feature (72)..(72): n is a, c, g, or t
tgctgctccctcttcagactgggctagcagtatctacagagactaggtaaaattaactggtactactcaganctccccttctccctcccctcagacaacaaaaggctttgttctcttccaggtgagctttccatggaggagctattgcagcagtatgcaggagcctatgccccaggctctgggagcagtgaagatgaggatgaagatgaggttgatgctaatagctctggctgtgaaccagaggggcccgtggaagcggaagagcctcctcaggaggatagtagcagtcagtcagg

SEQ ID NO: 593272 - DNA, 507 bp, Homo sapiens
aggtccgctgaggcagtctgtccttgggactaacaaagtcatctgctgtttggggaaatctctggtgttgggaacaggcccccaaatctggccataaactggccccaaaactggccataaacaaaatctctgcagcactgtgacatgtttgtgatggccatgacccccaccctgaaggttgtgggtttactggaacgagggcgaggaacacctggcccacccagggcggaaaaccgcttaaaggggttcctgaaccacaaaccatagcataagtgatctgtgccttaacgacatgttcctgctgcagataactagccagacccatccctttatttcagcccatccctttatttcctgtaagaaatgtttttagttaatctataatctatagaaataatgcttatcactggcttgctgtcaataaatatgtgggtaaatctctgttcaaggctctcagctctgaaggccgtgagacccctgatttcccactccacaccctaaaaaaaa

SEQ ID NO: 593273 - DNA, 422 bp, Homo sapiens
tttgggtttgaattccagttctacttgggagctgtggggccctgagcaagtcattactctgttggtgcctctatttactcatttgcatagtgggaactaaaaacatctactttataggttattaggattaaattaagtatgttatcctaagaaatttttagcccagagcaagtactcaacaaataaaaggtattactattgttatgtgagttttgtttgtttttgagatagggtctcaccctgtcacctaagctggagtgcagtggcacgatcatggctcactgcagccttgatctcccaggctgaggtgatccccctacctcagcctccttagcagctaggactacaggcgtgcaccaccacacccggctaatttttgtattttttgtagacacaggtttcactgtaattcccaggctggt

SEQ ID NO: 593274 - DNA, 350 bp, Homo sapiens
gaataactctgtctgggagtctctgtcctgggtcatccctctctgaaggttaatccatagacagatgaatcaggtattgatccctgtatcttggaataatctagaggatctttgcgatatcattaggattcatagaaccaaagatccccttccaggatggtccttctcctgaaggttaatccataggcagatgaatcggatatagattacctgttcatggaataaatctagaggatctttagaatccatatgggattcataatacacagctatgccgatgccatcatcaccggactagccctttctgaaaacacagtcatacatctacacccattagaaatacgcgatgc

SEQ ID NO: 593275 - DNA, 780 bp, Homo sapiens
ggcctacagaggacgcggtccgctgcctaagcttcggggccgtccgtgggtgagcggggtcctggagtgctgcagcggggctgaagtgcgggctcagatgtggcgaactgcctgaacgatgccggcctaagcctggagtccaggcatggacttcccctacaactttcccgatccccttcggggcctccaggccatggacttgtgagcgggcccagggacacttcctctgatgcccttcggagagaccgtcagccccatgacagccagatgggacccgtagtgccaggaggccccggcagcctcagtcggatggaacttgatgagtcaagccttcaggagctggtgcagcagtttgaagctctgccaggcgatctggtgggcccatccccaggtggagccccctgtaccctacacattgccacaggccatggcctggcctcccaggagattgctgatgcccacgggctcctgtctgcccgaagctggccgggcatgacctggtgggccctctggccatggagagcacatgtgccgggtttcccaacagtggcccgtgaagagcctctacgagcctgccccgcgactgcggccgccccctgaggacccagactgaggatactgactccccagactgggctggacggcggccgccgcccgaggcacgacgagccagcaggacgcgccagcagacccacggacccccggggctggagaccgcccctctagccagcccgcgccaagccacccgcgccgcccccacccaccaacccggcaaccacg

SEQ ID NO: 593276 - DNA, 447 bp, Homo sapiens
  misc_feature (16)..(16): n is a, c, g, or t
ccaacccgatgcgtantaattttgtatttcagtagagatggggttcaccatgttggccatgctagtctctaactcctaacctcaagtgatctgccacatcggctccaaaagttctgggattatagtgtgagccactgcgcccgggcatgggatccttaaatctggatccaaaattattgttacatccagaattgtgatgaatcaaaatctcgagatggggggtcagcaatctgaaatttcagtatgccaggcctttttctgtatgtcacagtggggttgacatagttaatttttcttctagtctgaaatgtatcgggacaatttggaaatcctgacggctggaaattgaaataagttttactaggatttgggtctcttgctattaggaaaactggtggtgaccaattcatgtttacccattaagatccctcatgggttaccgagctc

SEQ ID NO: 593277 - DNA, 237 bp, Homo sapiens
  misc_feature (7)..(7): n is a, c, g, or t
gcgtggncagtacagttgcatgagctgagatcatgccactgtattccagcccgggagacagagcgacagactttctcctcccgggccaccgggaggggctgccatgaaggtctctgatgtggcctggagacattttccccatggtcttggagattaacattaggctccttgctacttatgcaaatttctacagccggtttgattttctccccagaaaatgggtttttcttttctttt

SEQ ID NO: 593278 - DNA, 824 bp, Homo sapiens
tctggccttggcccctggtctaaggttgcacaatggaaaagggttcgccaatcgcaaaattgttcgcccggacgaacattagggcctctgggtggatatctctagggagaattttttacgcatcctgttcctggataatcgctctgtcttccatcctcctaaggggtttcgacgcagtacattagctctcgggtaggcgcctcctttgtgtgcccccagccccctgtgtgtgtgccccggtcgacatagtttctttattgattcccccccggggtactagctccccgtgatgagtcttcctccacgctacgacctctggattggctgtgtcgttcgcctccacatgtactgtgttataatccgcgcttctcgtcaagggcaattctggaataggttaatactcccccggaatggtgcgtgttgtaggtgagtagtctctctgcgagccacgcttttaagccttcagtcgtactactcccctcctccgggtcttttactcctcctctgcgaggagaccgactacctagtagtgctaccccccgttctctggagtcgcaaatcgtctttcctgctactatgcgcagatccagcacaatatttgctcaacccgcttaatccctcttagcactatttatccccacaccaccctactgagtggtccaccctcactccctcccccctgcagcttctaccgacaataacctccgcggatgcaaaccgaggtatcaccccgtcacttgcttagtacctcctatgcccccgattattgcttccactgttcccccaaccccaattaaccccgggtctttccctccaacaaaaca

SEQ ID NO: 593279 - DNA, 219 bp, Homo sapiens
tcacttaacatgatgtattgagagatccatatgcagcatgtatcactccattcgttttgtgatctaataatattccattatatggatttactgcatttagtttatccattcaccagccgagaggcttttccattgtttccacttttgggctgtgataaataaagctgctatgaacatctgtgtacaagccttggactggacatatatttctctttctct

SEQ ID NO: 593280 - DNA, 1269 bp, Homo sapiens
  misc_feature (752)..(752): n is a, c, g, or t
  misc_feature (1032)..(1032): n is a, c, g, or t
cccacgctgtcgcgcgacgcgtgggtctgatccagcgcgtccgtttctatactccatgaaccacgcagagcagattatcttgaagcagcaatcttcaagagacagttatccagattcatatgtgttgaagaggaagagaggacgatcttcttctttctctcttaactggtcaagacggccaatactattgatgcaagcctgtaagagaactagagcgtgacacgtcgatgattcgggcccctgcagagttggtgacattcacacaatctttccattgtattctacacgttccactctcacgcagtcatgtaactgacttcttgtgacgcctccaagccttctccgatagagaaaagcaggagatggaggcaactttgggacaggaacaggtcatgatcgcgttgctccaatctaaccagtaagccatgaagtaccgctctctctgtaagcaatatgactgggtgatgcgtagatccagtcgttctgactccatggcacttattgcaggagtactacgtacacgtgcttcttacatatatcccgtcgaaaattcaaggaggtctagacgatcccctatatttgggtcgaactaagtcataatatacgtcactaggcctattcaaggcctcaagtcacacagggagcttcgcgcttcatcacgtcctgggcatcggattacccgagaccctctggtcaacaaaggtggctttccccagtaacgttttcatcccaccaagtcatgtcatacacgnccatgttaattcgtaagaaccagcacattgagtggccgatcgccgttacatacacgctcgttatattcgccgtggaagaaagtttcaagcccgtctatacgctaacccctatccacgtgtacactcccggaatcgccctgcgttccaccggaacaggggaagaggaagaaaacacgcctggagtttcacttgatgtagttcaacagtgtgggcgataactacaccctttgcacacgactttttcaagtggggcgacttcccaatggccaaaagcgtgttnaccttgtataaactcttacttcgcatttacacgaaagggctctggggagaaacttatattcgtacctctaagcccttggggcaagcctcttagactaattgcactggactcggggacgaaatccaagaccgtgagaagtcgattgagaaataccaagtggaatggggacacgaaggtttaccagacgttaacaattcacagcagattcctgcacacaagaaatagggctaatttcgg

SEQ ID NO: 593281 - DNA, 1079 bp, Homo sapiens
ctacttaaaaaaaaaaaaaataaataaaaaagggccgggtgtggcggtgggcacctgttgtcccaagatactcaggaaggctagaggaaggagaatgggttgagaatcatggggaggctagatgatttgctagtggaagccgagattgggcgccagtggaatttccgtggctgggtgcgacatgagtgagactggtggtctgcactagaaaaaacaaaagagaagaagaaataagcggggttacttaatcctcacaatagtgaaggaggcattattaattgtgggttgagccaataacagataaatatgaggcgtgagacacaaacatactacaatttgcctacaggtcctaattttatgacgagggaatatatattcataattagggggggatattggggggggtgaagaattatcacaaatattataaagggtttttttagaactattaacaccatatacagaaccgtgttgggggcatgatgatttaatagaggtttttcaagtaaacactctaacgtagatttaaagtaaaggccatatatataaattccacagaggggggcaacttaaagacaattgttaacaccataaaggggggtgtttatacatgtgagataatattgcgtgtgtacaccacacacaacaaagagggcaccatcctttatcatacatatatgtgggcagacatataaaccggtggggtctatatctcattatgggggagaaagaattatcaattatcacaaagggttgggagggaatatatgtagagaaggtacacagactatctaatctcttgttcgggggggcagaccataatagaaaggttgagattatcgctgacgatctataaattaaacaacaaaaggcgctcctataatgtgtgttaaacaagctggtgtcgacagacggggagggatttcaacttaccaagcgagcgtggtggcaccacacggttggtgtgtgcggccacaaatttataagacggacgcgtggtttcatattaaatacaccaccgggggggggacgtacataaagtcccgtaggtgcgaaaacgaaacacacaacaactatgg

SEQ ID NO: 593282 - DNA, 434 bp, Homo sapiens
ggaaatgtcaaggaaaaacaaaacaaaacaaaacaagttcctcagctcaacaattagaaagcaaacaatctaattcgaaaatgaacaaaagacatgacgagacatttcacttcagaggatatacagatgacaaattcatgaaaagatgttaaactagccatcaaggaagtgcgaattaagacctcaatgagatgttttcactacacatctattaaaacagctaaacagtaaaacatagtgacaactccaaattttggtgagaatgtggagaaacgagatctctcatacattgatgttgagattgtaaagtgatatcactactctggaagataatttggcagtttcttttaaaactaaacatacacttaaaccatatgactcagcagttttatgcctgaccacttatcccagagagatgacgacttacttccaca

SEQ ID NO: 593283 - DNA, 656 bp, Homo sapiens
tcctgtctgtgcatttggaagcagatttgagcctgacctctgtgtgcgtgtgtgtctgtgtgtgtgtgagtgcatgcctgtgtgtgtgtctgtgtgtatatatatatatatatatatatatacacacacacacacacacacacacaaatatactatggacaagaagagaagcatcatagagcagttacagtacgcccgtcgctatagaaccacctaacccacggcgcggatgatgtaatgaccccaatatgtccactgcttgtagtataatgtggaaataataatcacggtggtatactggtactactcatattatactgaatatatgacacagacataaaccaacaaaagaaaatgaagacacatgtctgaagaagaataacccgtagaaaaacatgctaaggagagcaacaagacagacgctgaacgggaaacaataggagtatgaccacataaaaataatgcgagtcacctagagtatacccaacaacggggaacaaaaagaacagagagcacgaggggcaccaaaggcggtgagcgtgagagcgcatgtgcagcgaaaactaccagcacctgagaacagagcccgcggaagagtcgacaaatcgagcgagacgagagagacgagaccgagtcacaacacaaggaaaccaata

SEQ ID NO: 593284 - DNA, 903 bp, Homo sapiens
ggtgctgcgctggtgtgtggctcccgtcgtctggccaagtctcagcgcagctgcacctggccggtgtctcgttggcctggagcccacacccaccgggtccctgacccctgtgccccccgccgccctggttccctggcatgcctcgctgccctgtaatgggcaacacgctccgtgaagggtgtgtcatgctgccgtgtgaggaaggtgcccggagcagtgcccaagctgactctgggttccagtgacgatgaggcagcagtgaggccccgagcaccgcaagtgaatgccccagcttctcagcaccactgcagagtgacagcttgggggggatgtcgtggatgagcagtggccaagcaggaagaccttgaggaaaagctgaagtgagtattgtgcgacttgtctcacagacaagagtgccaagacccggcagggtgctcttgagagcctgcgcctggccctagctgtcccgctactccccgattcttgctggagctgccgctcacgctagccgatgccctggaaaagtgcctcatgaaacgggaatggcgaggaacaagccctggtgatgctgtgctaggcctgctctgcgtgcagctgggccctggacctaagcggtgaggacgcttgttatcaccagccttgcagcctctgcttggtcttctgtgctcagttgacaagcacatgtagccctgaatgcccggttcacttgtgcttctggcctttggccctgtggtgtacgtggctgccgttgacatcaggaacctggtctcttgcttgctgcttagaagtgttcacgccgggctatgtagttgcggggccgccccagtcctggggtcttcgacgctcgccggctgtctccagccctgacgccggcttttgtccctgcccaccaatagccactta

SEQ ID NO: 593285 - DNA, 298 bp, Homo sapiens
aagggtcccaggtcgggagagcccaagttgagaacaataatgaacaattatgtatgaacaatgttagagacagctaatcacaaagaagcctgcgggcacaatgacctcattccacacgtagcacccttcagcaggaccctataaaactttcctccagcccttgcctctttgcaggtagccccttctctgctgagctgcccactgcaacatattttcacaatttctctaataaatctgcccttctttacctacaactatcttggtaaatggctttaccacctgcaaaactgaccctagg

SEQ ID NO: 593286 - DNA, 359 bp, Homo sapiens
ctagagcatccccccccttcccggttactgacacccactaatcaactttttttgactatggatttgcctgtttgggacattccatggaaaagggagccatgcattatgttgcctttaatgactggcttctttcagccagcaaaaggttttcaaagttcatccgggatacagtattggttaatactgtattccttagacaaataatattccataatatggtaataccatagtttattggtttactgagggacattggaggggtttctgcttttaagcttttggaacagttatctacaagttttttggaagacatacattttcattcctttgggatttatacctaggagttggaatggtgg

SEQ ID NO: 593287 - DNA, 190 bp, Homo sapiens
ctctacaggatcccctgccatttactccatggcgaggctgaagcagaaggacagctctggctggaggtccgtagctggtccttgcaggtgccaactcgaggtcgtgcgaactgggtataaggggcgaagatgattaatcgaaccatctatgtagctggttccctccggaagtttctctcgaggatagctg

SEQ ID NO: 593288 - DNA, 278 bp, Homo sapiens
atgagcccaaagctgcccacgagtaccatcctggcagcaaacctcccctacccacttcagggccctgcccaggtcccacccctacagcagctcccaaccaagctccagcctcagccccagccactagcctaaattacagtcccagtccctgtcccagggatcagaacctacacaacagatcctggagtagtcaggtcttaatgagtccaatcatactggccgcatcagtctgaattccatctgcttccatcctatagaattgatcttctgacgacacc

SEQ ID NO: 593289 - DNA, 278 bp, Homo sapiens
  misc_feature (135)..(135): n is a, c, g, or t
aacagcaagcatgggctgttacccaaaagctccagatccatgaccctctgacttaaatggtggtagcactggctgctccctaggtctccagttccatgaccctcaaactacacagcaccggctcttccccaggtntactgcttcaccaccctcacactagacaccaacactacctcctccccgctctccagctacacgaccctcagacttgaacagcagcagtggctcctccctagatttccagctccatgaccctctacctgcacgacaacacataa

SEQ ID NO: 593290 - DNA, 321 bp, Homo sapiens
  misc_feature (302)..(302): n is a, c, g, or t
acgaccactatcagatgaaccactatcacggaaaaagactcataccctcgtctagtactaatctccctacaaatctccttaattataacgttcacggacacagaactaactcatattttatatcttcttcgaaaccacacttatccccaccttgggatatcatcgacccgatgaggcaaacagacgatgaacgcctgtaacgcacgctcattcttcctagttctactccctaataggctcccttcccctatgtcatcgtactaatttacagtcacaacaccctatgctcactaaacattctngtacgtcactcccactgcc

SEQ ID NO: 593291 - DNA, 1106 bp, Homo sapiens
ggagagaactagtttcgagttttctttttttatctttggtgagtaaaatcttcataacctaaatgctgggagggacccaaaaaagccaaattgtgagcccttggtttgcgtcaattgtgaaagttggctcagggttctctagcacagaatacccatagcaaaggtttgagaacagactctgtagccgttcgcacttagtatatgtgttcttaaactgattctaaaagtcgtattctttgcctcctgacgatggtctacagaacccgtggtctgggcctccgggacataaatctcgtaggcttgtctgcgctctcggtgggctgagtactagccgccaccagaatgctgcccgtttggccgccaggagtctcttgcgggccctcctggtcgcggcttgtcgctgggggtcttagaggccttgtcgcgggctccactgccgcggttgagtatttggcgctaaggctacacttaggggacctcggagcgcggtgtgtgtttcttactacttgccttacctctatctccgggggtctaccaccagtttgccaggctgtggaggccttgaggtgggaaagagttccatgcgaacttcatgctagatatccgtcagataggaccagcttgttagcgaggtccccagtaacccttgccagggtccttggagcatgtagaggggcagtggagttgggcaatccagggttatcaaagttagtgctcaacaagaagcgccccgggaaaagtgcgtggaatatcttgtggacaaatcgaggtaagcagtgtgggcaactgggagcccagacagacagttggagggaacttttgcgcctaaaaacctcttgattcaaagaaaagaagggattaggattaccatccataggtgggtcctcccgatatggtacccaattctgtgggcagacacccacaaggctatccaccagccgcgcgataccgggagacagcatggccactgacaaagaaaggcattgtaagggacaaccaaaataaacgcgcgaactcgaggagggagagaggcccatgatagtaatgtaaccccgcgactcttgcagagggaggaaccttataaggaagaggtaatacgcagcccg

SEQ ID NO: 593292 - DNA, 439 bp, Homo sapiens
tagtgacctagagttaccggggagcttggtactataccgttgcttagcgacacgcgagctatatctgcgcgtggagctgagtgacgtacagaaccctgcatcagcatacactgaaaacgtgctgcatttcaaagctcaaggacatggtgccaaagaagacaatgtctattaatttcacctggagttcttagaccttgtgacaccagagcctgtttacaccctgacccagaggccaggtacaacattacagtacagacgaacgtgagtcagtggtgggagagcactcacaaagcaggaaaagcgaccactgttttaggctcctgcactttgatcgttggctggatgaatctgatgcggcaatggagctcagagctaaggacgacgagcgcctaaatcaaatccgacaggaaagcgaaggctctcctgaaactcttacaaa

SEQ ID NO: 593293 - DNA, 662 bp, Homo sapiens
tgaggtggctcacgcctgtaatcctagcactttaggaggccgaggcgggtggatcacaaggtcaggagtccgagacaagcctggtaatacggtgaaaccttctctactaaaaatacagaaattagccgggcgtggtggcgggcgcctatagttccagctactcgggaggctaaggcaggagaatcgcctgaacccaggaggtggaggctgcagtcagttgagatggagccaccgactccagcctgggcgacagagcgagactcgatctcaaaaacaaaaaaaaaaaaaaaaggattaacggtggaacccggtcccccttattttagagacagggtctggctacgtggcccaggctggcctgtgaactcgaggcctcaagtgatcctccgtgtctcagcctcggaaatgctgggatcacagtgtgtgaggccgagggggggtgatcacctgaggtcaagagttggagacaggctgggcaatatggtgaaacccggtctctattaaaaatacatacattagccaggcatggagcggggacctggtaatcccagtactgtgagaggctgaggcaggagaatcgttgaaccggggagggtggaggttgaagtgaagcgagatcgagccatgattctcaggctggttgaaagagcagattgttccag

SEQ ID NO: 593294 - DNA, 793 bp, Homo sapiens
gcagggagcagagacagagccgctgctctgtgtcgtgtatgctgtggctgcagggagaggagcagtgacactgcacctttccagagtgcctctgtgtcccgcactgtgtgtgagtggacctgcagcgcgcagccacatgccctggctgccatgggccagaccgcctccacctcccccgcccgcctggcctgtcctgagtgcatttccctgcactgtgtctgtcacttgcacagccagtcaccgccgtgtctcagtcatctggctgctggatggctatgcttgggtgtcccagggtggccgcagcagtcagggtcactgtggggagccctggggtggatggtgacaaaccgcattgtcctgtgccccgccatggcagaagctgcagcctttgtatggaggcccaacctgcgctcccgtctggagaagccggcttcccggggtgtggctgccgggtcggctctggtccacagcacggtgcctggggctgcaggtttgttgagggctgtgactccgtgggggctcagtcaggctccagcagggtcagacgtgctgttaagagcaaaggccacaggacgatgacttgtccattctcacgtggatgctccagtgctgtgcctacacagcagtgctggttgacattgtccaagtgttcccagggcccggtggactgggagctgctatctccccacatggatggggctgatctggcccttgggtgaggcttgctatgaggggcttgtgacctcttcccccaggacctcccagcgaacaaaagcacgagaggaatcggaca

SEQ ID NO: 593295 - DNA, 924 bp, Homo sapiens
agcggggtggcgcggaggggagggggcgggggcctacggggacccaagcgactgaggggaaatggcctggccgagatcgggccggagcccaggcctggcgcggtggagcccggcatgaacgagtccgagtcatggatataaacaatgaagctggttcatgaaggcgaaactggccgagcaggcaatgatgcgatatgatgacatgtgcatgccattgcgatgaaggtctgtaagcatgaacaaggagctagacattgatccgatggaggaggaggaagtcttctctcagtgttgacttactacaaatactgtgttgataaggatgtcaccggtaggatcaatcatgtggatgggtacgtctcaatgtaattgaacagagagacgaccggaagtgtggcttgatgataagacacacagcgaagagtgggctcgaagaagtagccgaggacgaagaatttgacgacggagtcgtaaatgatgactagtctgacaagtgactgatagcgtgtcatcatgttctggaacaagcttctttgatggccaaattgcgttcacaatgcagagaagcaataggtcttctattttgaccatggtgaacagggaggattatctaccgtatacttaggggtgaaggttgcacaggtgggtggatgacaggagaaaggagactggtgcggactcgagtcacaaggaagcaatgaccatatgaaaggcgttgggaaaagtcgacgcaagagaagggaaattgcagcacaaggaggattcctatctagactgtggtctggcgcccttaagccttgctctgtgttctattcatgacgaattctgaactgcccaggacaaaggccttgctctctttgcacaagagcacgttttgagtgcaagccatttggctgcaccttgcaatacattaacgttgaatga

SEQ ID NO: 593296 - DNA, 752 bp, Homo sapiens
ggcacatacagtataaaacctcatcacctaccataatcataccaaattcctctaatcaactgcatactaagtgctcccaatacaattttcaccgtataaaaatactgggaaaaaattgataaataacaggtaagagaaagatatatctaggcaattactaggatcatttggaacaagtgagtactgtggatatttaaaatatcacagtaacaagatcatgcttgtacctacagtatatgcgggccagacacttaagtgaaagcagaagtgtcagggtgactttcctacttaaaatcacaggtcatatcatttcaaaacatttgcatcttggttggctgcatatagctttcctatggatcccaaaccaaatcttagaatcacttcatttaaaatactgagcggtattgaatacttcgaagcagaacaggcaatgtgcagccctcatttatgggaaaaccctcaggaaactcccagggtgatgcttggagaagctgtgagttgagctgaagctggagaacttcctccagagccaagggcttaagacagaacgacgaactctaagctgggtctgctaacatcactccagtcaagatggatcttggcagagagactgcttgtccttaacaatggaccgggggtctctaaagcgaccgcagcctgcagctggactggcgtcgttaacacatcgtgctgaacctccgcaccacacacacaccaaccccccacgccccgcacaccccccacaacccaca

SEQ ID NO: 593297 - DNA, 124 bp, Homo sapiens
ctctcctacttacagtgactcaacatactagttctacagccctatactcccgtctacattttaccacgaagcacaaggaggctcactcacccaccacattgacaacataaaaccctcattcaca

SEQ ID NO: 593298 - DNA, 254 bp, Homo sapiens
  misc_feature (16)..(16): n is a, c, g, or t
  misc_feature (56)..(56): n is a, c, g, or t
  misc_feature (73)..(73): n is a, c, g, or t
  misc_feature (84)..(84): n is a, c, g, or t
  misc_feature (87)..(87): n is a, c, g, or t
  misc_feature (101)..(101): n is a, c, g, or t
  misc_feature (130)..(130): n is a, c, g, or t
acaggcccctgggaancacccggttttggggggtgggaaaaaaaggggaggggttngggcaaagggaattgtncagtccccagnccnccccggttccgggntaaaggcaataaataaacccgttcctgcngggcccacccgggcccggccctcgggccccgtccccgggctgacgggggagggaggggaaaagcgggcgcagtttttgggtataaatcagttttggagcaaacccagcccggttgtgaaaagca

SEQ ID NO: 593299 - DNA, 451 bp, Homo sapiens
catacccacactgagttttctgtttgggggtcatgactagtactgttttattgttttgatgccatatggccatggaacctgtgggacatgccatgactccttatttgataagtcacttttgtaggtgtccaagtgtttcacagactatttcaaaagtcactgacataacggctgggtgtggtggctcacacctgtaatctcagcactttgggagtccaaggcaggtggatcactggaggtcaggagtttgagaccagcctggccaacatggtgaaaccccatgcactaaaaatacaaaaattaaacagatgtggtggcgcacacctgtagtcctagctactagggaggccaaggcaggagaatcacttgaacctgggaggcagaggttgcagtgagccaagattgtgccactgcactccagcctgggtgacagagctagactccttctcaa

SEQ ID NO: 593300 - DNA, 973 bp, Homo sapiens
gccggagcctggtgcgcgggggccgggggtggtgaccctcctggcgaggaggggcggggtcagacgcccgctcgggggccgcttcccccccacgcctgccccgggcacgcgccctgccggtccctcgccccggccattccagtccgagagagatgccctccagtttctgctttctctgcagctctagattgccagatgcgactgtgcgcctcgctgggctgatcagctgaccgaagaacagatcgctgaattcaaggaagccttctccctatttgatcaagatggcgatggcaccatcaccaacaaaggaacttggaactgtcatgaggtcactgagtcagaacccaacagaagctgacattgcaggatcatgatcactgacgtggatgctgatggtcatggcaccattgacttccgcgaatttctgactatgatggctagaagaatgacaagatacaggatagtgaagaagaacatccgtgaggcattccgagtctatgagcaagggatgtgaagggttatatcagcgcaagagaaatcagtcagtacatgacaaatcaggagaaacagctcacagatgaagacgtagataaaatgataagagacgcagatattgatagacacagaaaaaataaaaatgagaaatcgtaccaggcttaatgaacggcaaaaacgcacgcacataacatcgacagtctctgtcccccgctctacgacagccgctcaatcgactctccgtaacttcaccatgggcaggacacaacacaggcacaaggaccacttatacacagtgacaatctcacagcgctacgtcaaatcacttcagtcaacacacccctgaagctggtgggggcagccctaagacagcacgatcgcacagagacagacaccagtaagccctaggccgagcgtcaacgtgggccattcgccgcaggcagcggttaaacgcatccaaaacgctgtgacaagcacc

SEQ ID NO: 593301 - DNA, 158 bp, Homo sapiens
aacgtatttggtagggagtcacaatatagtcggctgtctaatgtagtttgcacctgttctgtcttttttatcttctgcactggacttataaatagccttagttataacaccttcaagttcttttaccagcttcgtaaactcatgatcaaatatcatgt

SEQ ID NO: 593302 - DNA, 718 bp, Homo sapiens
aattacttgaacccaggagatggagggtgcagtgcactgagatgtgccactacactccagcctgggagacagagtgggattctatctcaaaaaaaaaaaaaaaaaaaaattaaaaaaaatcaaccctaaggttcattgggaatctccccttaataccaaaacaatcctggaaaaaaggttcaaaaactcacgcttccggatttcaaactgggggctataaaattaccatcatgcgaaaccaccatgggtatctggtgtaggggacagacatacagaacacagatcctagaaagaagatggctggcttatgtgggtcaaatagatttatggaaaccagtgcaatgatcattaacaagggacgaacagggatgggtcttaaaaagatattgtaggtgggggaaaaatggggtatctacgtttcctaagaataattgttgtgacccttcaccttatataccaaaaatataatttgggaggtcaaaggatctaaattaaaaggccaaaaacaaataagaaagacttaacgacagaacaatatgggaagaaattttaatggactgtggagattacacaacacattggtgggaatatgaaactctaaaggcaagaggcaccacaaaaatataacggacttactggaaattgaaaacattttgtggcaccaaaagaagataaggaggaaagattggcatcaagttttgaagagtataccaaatat

SEQ ID NO: 593303 - DNA, 131 bp, Homo sapiens
gcatggtccgcgagcaaattaggatagttgagaaagctgcctatcggctggcgggagaggcttaggcagaatgccctattactttgcaaggggccctgtcagacatgtcgcatggggctcagagaggctct

SEQ ID NO: 593304 - DNA, 106 bp, Homo sapiens
ctggtaccaatttagagccatggtagaaaaacaagaaagtgaaacagtgataaagaggaggaacctgttttcactttcttgtttttctaccatgggctctaaatta

SEQ ID NO: 593305 - DNA, 202 bp, Homo sapiens
cagactatctaagaaggcaaccgagtatggacaaaagatcatcgctgacttgaacaagttgaccctggatttggtggctaatggtaatttaaacagcaaagcattttcaaagtttagcgctcattcgtccgatcaagccaaactacttcgtgttttaacggcattggattacatgtttgagcataaagacaaagaccagtcg

SEQ ID NO: 593306 - DNA, 330 bp, Homo sapiens
cgaatgcacaggaagatacgatggaaacacacctagagactgagctggacctgagcacaatcacaacagctggccgaatcagtgaccataaacagcagctagcttaactgagatcattggtagccagggtttgctaccaaactttgtaacctcaaggacaaaatgaggaagatgtgttttgttttgtttagagtccacaatgaacacatcttcctcatttttggactctaaaaaaaaacaaaacacaaaatcccctgttcaaataaacaaaaaatccaagattgattcatgaaataaagaagacatgaattgttacaaacaaaaaaataa

SEQ ID NO: 593307 - DNA, 433 bp, Homo sapiens
  misc_feature (151)..(151): n is a, c, g, or t
agcagtgagaggtgagcatacgtgtctgcacgagctctctggacccatggtgaggtcatgctcgcatcatgggtacatctatgatggtggctggaaccagaagggaaaaaaaggaaggtcgagaagtggtatgccctttttctctttctgncacaccaaaaagagagaggggactgaggaaagccttgtctcccctttttctagataggtaacaaaccgtctacagtttgcattcccctctagtgcattctgaaacactggaacctctttaaccctgaaactctaaagaaaaaatggcttatattctgtcgcacaaacccatggacatcttagagacaggaggcctggctttctaagggaagtattaattccatcactacccaacaaatagatctttctttgccctgtgagacaacccagatctttgtaagca

SEQ ID NO: 593308 - DNA, 143 bp, Homo sapiens
gagctggacaaaacttcatccccgaccagcacatactagggagttaacttgcaagcttagctgggggtcatagattctgtacagactaatcttatgtcgttccatgacaattgtaccgatggaaatcgcacgcttgacagtgt

SEQ ID NO: 593309 - DNA, 800 bp, Homo sapiens
atgggcggctctgaagagttgggctgtcgcccagcgtgacttcattcttcaggttcctgcttggctctagtgtgagttaacatgtgcctgacaatggtaagttcctaatgagtcctgatatatcaggattttggacggctcgtgcctatattgaaagtactgatctctcgtatctatccagtgaatcggagcctcatacccttagctagatgaatgcctgagaatgaggaagagactgctgtctttggataaccataagagacaccatcctaaacctatacctgcttcatcagatgcacaatactgcggttagatgagacagctattgagctgaagtaatacttaagggctcgttgtcatacgcctttaaactgtctctttaccccgatcccattagtacacagatgtgcttggggggcatagcatcgtagattcaggagggagcgtaatgcactgcaaagtggtcggcgacgggtgaatcattacgcgatgctcagcatgttctcgttaccacttgactattcaatagactagcaagcaggtacttgaagactggggataatccactttggaatggatcctgcagtttcgcgctctgttgcaggatgatgggacgcatgtacaggctgccttattcagacgtggtctgcgggattcaggcctcttataagcgactagggggatcgactttttcagggtgggtgacagctcgcggtggcaaggggtgcaaccaggttcccggatagcgaaaaccagtgtggagccgcaccctcgaagaggtcgtttggaccgggcccccg

SEQ ID NO: 593310 - DNA, 207 bp, Homo sapiens
gcggacatcagtagttaggacagaccgagtcatagtcatgctctgcggacctccgatgaatctggagggggctgtgggaacgctgctttgatctcctcgtcggcggacgtccttgctgagggtggtcatgtcgtctcttctcggggatgatgttgtcgacgggctggtcctccccgctagtgatgaacagggtgaggggtaccggtg

SEQ ID NO: 593311 - DNA, 589 bp, Homo sapiens
  misc_feature (414)..(414): n is a, c, g, or t
  misc_feature (457)..(457): n is a, c, g, or t
gttcacgcccacaggactgctgtgggtgtcgccatatctgctggcttcctggccctgaagatctgcatgatcaggaggcacttatttgacgacgactcttccgacctgaaaagcacgcctgggggcctcagtggtgagggatgtggtgctcgggcctggctctgccccacccagcgaggcaccgagggccactctgtgatgctggctacagcaagaatgaacccacaagcgcagagcccaacaggctgtaaaggaaggcagtgacctctgcatgtttctgtctctctcactaaccctttgcctctgtttctctttcttctgtctctatctctctctgtctctctatttgtgttcctttttctgtctccctttccatgtctctgtctttctgtgtctctttccctctgtactttncctttcagttgctcttggcagtcctgagaatcacatttcctgnagaaaaggtgggagaggaactaaaattggcttcacacagaaatttctgttctctcatccaaatgatgagatcaaataaacccagtcccagtaggcagcgaggttagtcctgtgggcgtgacggtaccggcca

SEQ ID NO: 593312 - DNA, 95 bp, Homo sapiens
accgagggtcctcaaagtaggagggaacgaagtcaccgaactctccacgggcagctcggggcacgactccagcctcttcgaagacaaaaacgatc

SEQ ID NO: 593313 - DNA, 292 bp, Homo sapiens
atgataatcacaggtgctctccctgtgatcgtgtccaattaatctcccaaaactcaatcccttacaaaacaacaactcctttccttcctaggcatggtgagtgcggtcagaattcttacacaagagccaggaccacaccctgtagcctttctgtccaaataacttaaccttactgttttagcctagccctcatgtctgcgtgcagtggctgctgctgctttaatacttttagaggccctaaaaatcacaaactatgctcatggataggaagaatcaatatcgtgaaaatggc

SEQ ID NO: 593314 - DNA, 217 bp, Homo sapiens
  misc_feature (135)..(135): n is a, c, g, or t
taggtgcctgctctaaggcgtggaccctcgccacagccctggccgtcttgacgcaagggtgtactgtacttgtcccaaccatacagatgagaaagctgagactcagggccagcaacccgggtcccagcggagctncggcacacgccgacacttcagcaccagtggcggtggcacaactgtgcgcggagatggctgcgacgcgtgcgcaggtaaagtc

SEQ ID NO: 593315 - DNA, 626 bp, Homo sapiens
cagagactctcgcagtccacggcaggtgtcggagtgggcctcattccagagttgtggtggccgctccacctggcgagcttcgaggggactccggcaggcgctcgctgtggggtcctcccaccagtcttctcagcacaggaacggtgccttcacattggtcttccggggcttaaaagcatatcattcctgattctgcagctggttctctctccaagcactagcaaaaccctccctaggagcccccagactctgagagcccatgaccaaaaagaaaaggaaagccaagttggggaagaacaggggcccccaactccacagccctccactctgcccagagggcccaccctgggctgcctggaaccccctaaagttgccacccccgcaacacagtagtggggcagttcctggcagcgcctgcagcccatgggctggctctgtacccgcagccccgccaagcgtctgttatcttatttactggaatctgcacagccaggctctagctcaccggtgactaaggagctgcagccattattaccaggcagatggcagactccctaaaagcagacattaaacaataaaatgccaccacataccttgcccacaaaataaaatcaaaacaaacacct

SEQ ID NO: 593316 - DNA, 552 bp, Homo sapiens
aaagcaagaacgtcttcatctaaggttgaaaacatcagttgtttgggttgtgagaaaagaaaagcccacaaggtttccgaggcttggtgctgtttctcactgtcctcagctcctgattctgcagctggttctctctccaagcactagcaaaaccctccctaggagcccccagactctgagagcccatgaccaaaaagaaaaggaaagccaagttggggaagaacaggggcccccaactccacagccctccactctgcccagagggcccaccctgggctgcctggaaccccctaaagttgccacccccgcaacacagtagtggggcagttcctggcagcgcctgcagcccatgggctggctctgtacccgcagccccgccaagcgtctgttatcttatttactggaatctgcacagccaggctctagctcaccggtgactaaggagctgcagccattattaccaggcagatggcagactccctaaaagcagacattaaacaataaaatgccaccacataccttgcccacaaaataaaatcaaaacaaacacct

SEQ ID NO: 593317 - DNA, 135 bp, Homo sapiens
agcagcacgctgaagagttgggacccacctcagtccccagcttcatggtcttctaatgtttccacactgggggcactctctgcagtcttggaggccttctttttttttctttttctgggtttttcgacttgcaga

SEQ ID NO: 593318 - DNA, 432 bp, Homo sapiens
cgggaacaatcacttgagcaggtgttctagaaatgcttgtggaatggattaacaggagtaggaaatagtgcttgagacatgacagggctatacatgtaggacgagctagtcctggtaggtcggtacggtgatacggtctagtagagcccagctggtgcagactgctctgggcaagctatggcagccgtaggggatgggacccaccttcaggagctgctgttcatccgtacagggaagccctccatagcttggcgtaagatagggaagaccaacccatgtaaccttgcatggtgagaatgttgagagctttcagaatttgagcacaaaggaaatacccagaacgctagtcttaggcaagtgcttactagaaaggagcagtgacttgaacaggctatgaagatcagtcagtcataaggtagacccaaggtgtca

SEQ ID NO: 593319 - DNA, 920 bp, Homo sapiens
ccgcgtttgtggcccttttgtcacgttagtatgtttgtaattatccgcgccctatgtccgaagtaacgttgttcgtatggctctctgtctatcgtgtgccccccagttgggtgttgctgtgggaagtcctccgcccaacaactggcccgctagtgccgggtcaatccccccttcagtggagggctgtctgaccaagctgggcaccgctggacaacagttgtcccgacacattacatgtcagggggtccaccaccatactaccaccatgaagtgagtaccctttgcgaaaaaatcaagccattatggccctcgccagccccgagacggataatagaaatgggcggggtgaatataaccaccggtgtgggggcaaaaaaaaacagaggggccatgggcggggtgacaaaagataaaatacatattggatgttctgtcagtaagtgatcgcgagagtggggtacaggaggaccaattgggtcgaccttcggacgcactgagtacgtattgtttggtcgcggcaccccagacccacggttagattgtgcatcaccacgttagatagcgccgacggagttcttgttgataataataatgtagcccccccccactgccaattgggggaaagacttcatgggcgagaactttgggaaataccacgtattactatgcaggccgctttttatagcaccaacttttttagattagagcatatgggggccacgaatatcgcgtggagaaaggtagggtacacgcaacagaaagattgtggcctttctctagttaaagtaaaaatccacacgaggctggccagtaatgtttggagctgccttttgtgagtgaaaaaggtattgtagcacatactgtcggcccttaaaatctaaaaaacttcccctaatcccgaaaaaacaaacaacaaaaca

SEQ ID NO: 593320 - DNA, 601 bp, Homo sapiens
cgaagagaggtaacggatcagagtgatcagatacaaagcaaaagcaaattatcttaattactatattagttactatatgtagcaagaattgatataatctttaaaacaaaattaggaacgcctcagtgctcaagatatggggatatcaggacacgcccaagtcggggttggtttagtaaatgtattaatttgtgcccttaaccgtgaacatctagaggctagaaataccgaacttgctggaaatgcagtcgagaaagtcccagcctcatgttcctagacctcactcaagatggagtggcgctgatgcaaatgcctctgacacttccatttccccgcatctaacaccatagtctacccagtggtctgaaatggccttcgctcctttacccagcaacctctcaggcattcttcagcactcagtcctagcatctttccctcaagaatgcatcgctgggctgagcatgggggctaacacctgtaagcccagcgcttggggagcgcaaggtgggtggactcgctgaagtcaggagttcgagaccagactggccaacctggtgaaaccccatctgtactaaaaaatggaaagtaagccgggcgtggg

SEQ ID NO: 593321 - DNA, 313 bp, Homo sapiens
  misc_feature (27)..(27): n is a, c, g, or t
  misc_feature (57)..(57): n is a, c, g, or t
  misc_feature (112)..(112): n is a, c, g, or t
  misc_feature (136)..(136): n is a, c, g, or t
  misc_feature (194)..(196): n is a, c, g, or t
  misc_feature (219)..(219): n is a, c, g, or t
  misc_feature (237)..(237): n is a, c, g, or t
  misc_feature (243)..(243): n is a, c, g, or t
  misc_feature (246)..(246): n is a, c, g, or t
  misc_feature (254)..(254): n is a, c, g, or t
  misc_feature (296)..(296): n is a, c, g, or t
ggcaagccattcctaaacagcccaacnggcatttaattacccaatactgtatatacngcaaatatggacagttactttcctctcgcctgttcatatccttcagtgacattgnggaagcagtgtttctctttttaanggagaatagttgtcaaccttcattcatctcttacatctctcaccctctcctttttttnnncttcgattttcccccttatcgangggactgatattcattcngttttngangaacattnggaaaccgccgggcttttattaaagctctgtagaattaaaangttctggaattataagc

SEQ ID NO: 593322 - DNA, 578 bp, Homo sapiens
tgatctagaggatcccgcatgtgggcatcactggtgaagagtggagttggtgacatgtcaagagcttagcgtggtgccgggtacatggtaactccggtaaaggtattagtggctggtatattatcatccttttcatctttatcatggtcattatcctcatgatcacgggcgtcattatcacgcgtatatagaagacaggttgagctagagatacaagtggggcagtcaaaagatcgtattggaaacaagggaaatacggcagcatgattcacaaggcaacggtggcacaagaaggcccaaggggagccctagttaaacgtggagccagaaaagaagagcaaggtatggctagagaagtaggcagggaaattaggcagtgacaccaacaagaacaggaaagagcacagtgttaacagaaggacggaggggtggacggtcgaatatgttaaaaatcttagacaaattaaatttaacagagtttagttgagcaaaaaaaaacaattcccaaattgggcaggacccaaagcagaagaggttcagagaaactccagtgcaggaatccaggtagtgagggatga

SEQ ID NO: 593323 - DNA, 527 bp, Homo sapiens
agcatcacagggacacggtcaggcctctggatgactgcgtctgggcttgactgatgtcaggacctccacaagaggtggtggagcagagtcttctctacctcctccggagaaagggagattccctttcctggtctgctaagtaaccggtgccttttataagcactgacgctaccgctagaccatggtccgcttggcaacgggcgtcttcccaggcgctggcttcaccgctagacccaggagccctctggcggccctgtccgggcataacaggaggctcgcacgtgttttctggtcactcctcactgtgtcccctcggctcctatctctgtatggcctggtttttcagcttcgatgaaaaatggaaaagcagccggacgcagtgactcatgcctgtaattccagcattttgggaggctggggcaggaggatcatttgaacccaggagtcggagaccagcctgaggctgcaatgagcgttcatggccccgctgcactccccactgggtgacagagcgagaccctgcctcc

SEQ ID NO: 593324 - DNA, 234 bp, Homo sapiens
tcgggtcgctcacgtgcggacagcgcgttgtgtgcatgtcgtccacgtgcgccacggcgttggtcagcgcgtcggcaccttcttgctgtggcccttaacctgggcagcgccgtggctcaggtcgaagtgcgggaagtcggtcttggtggtggggccggccaggaacatcctctccagggcctccgcaccatactcgccagtgtgcggcgccgaacttaccccagtccggcccgg

SEQ ID NO: 593325 - DNA, 349 bp, Homo sapiens
tgcataatctgcctaagagtgtgtttgaaatagcagacgaagaagtgtttaaaaagactcgaggacgtggatgtttggactggagggagtgtttgaaaaattgcctagttatgttttttgtgttagccagaaggccaagaagtgataagtgcctatgtattttcagaagttgagtagtgatacattgccattgtataccagtaaattgttgtcccatttagtgtgatattttaataagaattgcttgttccacatgagaatttcataccccttgaaaagtgtgttttagttacacttgatattttctaagttattttatatctgaaggattattatgtagtaacaagac

SEQ ID NO: 593326 - DNA, 117 bp, Homo sapiens
tggggttttataatagagttgcaagtcatagggtgttagctgggagatggttaaaggtggtaaggggagggactgtggtgtagtggtgttgcagtaacaaaatgtttccaacatacc

SEQ ID NO: 593327 - DNA, 204 bp, Homo sapiens
gggggggggtttcactggggggacgtgagcacgcggaggggcggtcgccagcaggggtggtcaacgcagaagcgagcggaggtgatactgagagaaacagcatggcggcccgtagaacagaacagtccagcccaagcagccccgcgcatgcccgtacagacaccctgcgagccccatggagcacggacaggagccacccgactc

SEQ ID NO: 593328 - DNA, 654 bp, Homo sapiens
gtgagaggagcagtcatgcagtgcccgatggaggcaggacttcctggtgtggggtgttgtcaacagcccagaaatgagaaagacggagatggcagagacccagtggtgagccgaggagctggagacactggacccagcagtggtcacgcgtggagtgagactcgtgtgacacccactctgctgtgcttgccacctgtgtgatgcatgagtggggtgctcgtgccgccccctcccacatcagtctccagacccttgtggtgcttcagatggcctgctcctagtgctcctcgtgaggagtgcgcgggttccttcttttcctggagatgcaaagctttttcctcgtgatgattgccttggcatgtgaatgatgcctgctgtgccccctgtgagagtgactgtggacatgcctcatgatctgcctgcctgctgtgccccgccactgcccatggccagtgatgtgccccagtggaactgtgacagcccgacctcttaggcgccgggaccctcaggctcagatcagtggccgaggccccagagtttgcaaactcagctctggagttcagcagcaacagcagcaggaaaaacctgccctggctgccgcagaggagagcgaggaggagatacaaagcgagggtaacagagagaggacgacac

SEQ ID NO: 593329 - DNA, 361 bp, Homo sapiens
acggggtactggactggactgcaatggactggacaggctgatggactggactaggactggctgatggactaggactggctgatagactggactggctgatggacaggactgtggatgatactcaggcttccggcttgagtggatcatgaacaaagagggaaatctatgtgcttggggtgggggtggggagctatagatataaggacacatagcacatatataggatcctatagggatacccccacgtttagtagtcaactagagcagcaggacacagtctagagtctagtaaactggaggtaagaataaagggaggaggagacatgggagaggggctgataaagctgaactgcccgtcttg

SEQ ID NO: 593330 - DNA, 157 bp, Homo sapiens
actaaaaatataaaaattagccgtgcacgttggcgggcacctgtagtcctaactaccagggaggctggggcaagagcatcacttgaacatgggggatggaggttgcagtgagattgcacttcagcctgggcaacagagctagactctgtctcaaaaa

SEQ ID NO: 593331 - DNA, 452 bp, Homo sapiens
  misc_feature (59)..(59): n is a, c, g, or t
tagaaatacctggtcttgggtttgaagctcctgaagcagtgggagaggtggtttacccncaggaaatgttttcctagccttggatcacagcaggttgttttatcctcccagggctgcaagtcattttgtacataaacgaagaggaatacaacccattcctcgtgtcctccactggagctaaggtgatcatccatcggcaggatgagtatcccttcgtcgaagatgtgggaacagagattgagacagcaatggtcacctctataggaatgcacctggtaagagaatattctcatttccataggcttggagagaacagatctttttttttcaaaggataaccaaaggggggcagctttaaggaaaagggggtttgtttccaaaggggacaaggctccacattttcccaagggtatcccattcaattccggaggtacaataaaaaatgggtttgg

SEQ ID NO: 593332 - DNA, 327 bp, Homo sapiens
  misc_feature (52)..(52): n is a, c, g, or t
agttgcagagttgtgtgtaatttaaagcacagcattttgtggcatctgggcncatttactgcatttgtagttctgggccaagttccttaacattctccatactttagtttactcaactgtgagagatgtgggtaatgccttccgtagagtgttgttaaatgagcatattgaaaccttagcccagtgcctaaccaggattagattgtaaatatttctataaacgatgttaaaggaactttctttgaagtatatattagtgttcattcttctagatcaaagtttggaaagtgttaactgcagtcctgcttctgagacctccacagtgtt

SEQ ID NO: 593333 - DNA, 135 bp, Homo sapiens
gttataaagggcaagccagtacgcatcatgtggtctcatgcgtgatccatcacttcgcaaaagtggagtaggcatacatattcattaaaaatctggacaaatccattgataagtaaagcactgtactgatacatt

SEQ ID NO: 593334 - DNA, 787 bp, Homo sapiens
  misc_feature (13)..(13): n is a, c, g, or t
  misc_feature (61)..(61): n is a, c, g, or t
  misc_feature (67)..(67): n is a, c, g, or t
  misc_feature (85)..(85): n is a, c, g, or t
  misc_feature (95)..(95): n is a, c, g, or t
  misc_feature (97)..(97): n is a, c, g, or t
  misc_feature (106)..(106): n is a, c, g, or t
  misc_feature (125)..(125): n is a, c, g, or t
  misc_feature (130)..(130): n is a, c, g, or t
  misc_feature (132)..(132): n is a, c, g, or t
  misc_feature (135)..(135): n is a, c, g, or t
  misc_feature (166)..(166): n is a, c, g, or t
  misc_feature (243)..(243): n is a, c, g, or t
  misc_feature (300)..(300): n is a, c, g, or t
  misc_feature (325)..(325): n is a, c, g, or t
  misc_feature (346)..(346): n is a, c, g, or t
  misc_feature (358)..(358): n is a, c, g, or t
  misc_feature (384)..(384): n is a, c, g, or t
  misc_feature (517)..(517): n is a, c, g, or t
  misc_feature (580)..(580): n is a, c, g, or t
  misc_feature (594)..(594): n is a, c, g, or t
  misc_feature (638)..(638): n is a, c, g, or t
  misc_feature (642)..(643): n is a, c, g, or t
  misc_feature (646)..(646): n is a, c, g, or t
  misc_feature (658)..(658): n is a, c, g, or t
  misc_feature (671)..(672): n is a, c, g, or t
  misc_feature (681)..(681): n is a, c, g, or t
  misc_feature (693)..(693): n is a, c, g, or t
  misc_feature (697)..(697): n is a, c, g, or t
  misc_feature (699)..(699): n is a, c, g, or t
  misc_feature (702)..(702): n is a, c, g, or t
  misc_feature (724)..(724): n is a, c, g, or t
  misc_feature (779)..(779): n is a, c, g, or t
atagatctttaanttactattaatctgtaaattacagcgagaagaagaagtttcacctgtntgcatntctgttgttgattctccntctgactttnanggactctgngggactaaccttatcctgntaagngntangattccccttctaagtgatcactactgggantttacggacctttttttccatggtgcagattgcagaggtgaacaaacagacgcatatattagctctttgagtttgcnattgggaagtgaaaatcaactgtctttaataaatgtaaggactcaggtagacatcancttttgattaaactatcagcaaatnatatgtaaataaaggccatgnagttatcggatngcatctactaaggaatacttagatgnggatttgactttggtagcaattgttcttttgtctttctcaccttccttcttgtcctgtctgggatgctgaagttatggctggtatacatatgccctgttgtgatgttgagataatacatgagattaaaagttngcgattacagatggcagataagagagagaaagataggatgtaggtggatattgatggaactangtttctattgcacnagttctaccactaacctctggacttcatgatatgtgagggaganatannctnctattttataanatatctatgttanntgcaactgnacggaatgcttnattngnacntcctatgtgctccaaaccttcnttaatttctgtgtgtaaggcatacttagtctttacccattattctgttcacattnattcactc

SEQ ID NO: 593335 - DNA, 148 bp, Homo sapiens
gccccccctatcccctgcctccccctttcagaagagggtggaagatgaaatgaaagctatgggacttttggaggatacccagtgtttattttgggttagagaagtgcttactaaggggttttttaataaaaaccaatgcccccttgga

SEQ ID NO: 593336 - DNA, 324 bp, Homo sapiens
  misc_feature (34)..(34): n is a, c, g, or t
cggtcttcctgggctgcctgaactggtgtaaatngaaagttcagctgaatcttgattttaattaacttattacaccattaatataaagttggaattctatattaattatgttgttctggctgcctgcagtatcagtttgccctcttgttagggagcagtgtaacaatctgccatttaattgtgcagggttttttacactgcagaattagcaggagtgtatgtacacagaattttcttggtttgtctctcacatttgagcattacaaagttttttttaattgcattttgtctcttgtgaattaattaagactgtagagaaaaata

SEQ ID NO: 593337 - DNA, 1074 bp, Homo sapiens
  misc_feature (238)..(238): n is a, c, g, or t
  misc_feature (273)..(273): n is a, c, g, or t
  misc_feature (302)..(302): n is a, c, g, or t
  misc_feature (449)..(449): n is a, c, g, or t
  misc_feature (581)..(581): n is a, c, g, or t
  misc_feature (1025)..(1025): n is a, c, g, or t
agcggagaagtaccgcctgcggagtaactagcaaatatacataccaagcgctagactaataatcagataccacacccgatcctacaacaaagccatgctattgcacctgggaaacatcataaaaatcgaacaatcaatacaatatgataaatcaaaccagagcgctcgtagactagcgacattcgaatctagaaagaacgaatataccaactgagaaaatataccgtcagataactanttgatattagtctgaataagcaagtgattctatgnaatccgactaatataaacacatttatagnaaaccaaatgcatataacaaggattatattaagaaaggagagatgtagcccatcataacatatgatgcaagaaaaagaataacatatcagatgtaaataaaatgaagataaacgaacaattcaagaataatgagaaatctcataaanctggaaaggccatatcaactaaaatggaaaggagatctatgatggaaaaagattataaacacgaataaaagtataattatacacaacactgaaacgatatagcaaaaggccaaattggggagctagacatantaaaaatcttaatcgaaatgaatgcatatagaagaaatgactctcgatagggaataatcgatgataatagatggggagtagccaaaaaaaaacctgtacttctgaattacttaattgaaagtactgaaatatcgcctccagggaaacgagggctgacattatgaacatagaaccattaacccagagaatctatgacgagaatggaggaggatcagcgagagagaattggactcatatatatccgccacatttgagattccaaatttgacatgcccaattagatccaaggcaggagaaaatttaaattcccaaagcattaactggtaataaaaggcccattcaaggaattcaaaaggtgacccggcgagatctatagagagcccacaaagagttcaaggacacaaaaaattgggactaaaaggaaagcacgaaactgagagctanatgcaagatgaaattaggaggccaacatggggacatcgggaggaaaccg

SEQ ID NO: 593338 - DNA, 237 bp, Homo sapiens
tctagcttctgcccctctcatgtctcctcaccataactgacttaattaagacctaatttttaattgtcagtttgctagcttacattctaagaggttctaaatagagcactataggtggcaaaaatagttgaaaataatgtagcctgcttacagtgagacagaaatacagagttattagtgatatccatgttctggtccatcagactgctatctacgtaagatggcagaagcaggaag

SEQ ID NO: 593339 - DNA, 1240 bp, Homo sapiens
  misc_feature (340)..(340): n is a, c, g, or t
  misc_feature (384)..(384): n is a, c, g, or t
  misc_feature (434)..(437): n is a, c, g, or t
  misc_feature (439)..(439): n is a, c, g, or t
  misc_feature (497)..(497): n is a, c, g, or t
  misc_feature (500)..(500): n is a, c, g, or t
  misc_feature (933)..(933): n is a, c, g, or t
  misc_feature (1006)..(1006): n is a, c, g, or t
  misc_feature (1159)..(1159): n is a, c, g, or t
ggggatgtctatgtcaatgatgctttgtggactgctcacagagcccacagctccatggtaggagtcaatctgccacagaaggctggtgggtttgatgaagaaggagctgaactactttgcaaaggcttggagagcccagagcgacccttcctggccatcctgggcggagctaagttgcggacaagatccagctcatcaagtaatatgctgggacaaagtcaatgagatgattatgtgtggtggaatggcttttaccttccttaaggtgctcgaacaatcatggagattggcgactactcgtgttgatgaagagggagccgaagattgtcaatagacctantgtccaaagctgagaagaatggtgtgaagattaccttgcctgtngactttgtcactgctgacaagtttgatgagaatgccaagactggcaagcnnnngnggcttctggcatacctgctggctggatgggcttggactgtggtcctgaaagcagcaanaantatgctgaggctgtcactcgggctaagcagattgtgtggaatggtcctgtgggggtatttgaatgggaagcttttgcccggggaaccacaagctctcatggatgaggtggtgaaagccacttctaggggctgcatcaccatcataggtggtggagacactgccacttgctgtgcccaaatgggacccggaggataaagtcagccatgtgagcactgggggtggtgcccatttggagctcctggaaggtaaagtccttcctggggtggatgctctcagccatatttagtactttcctgccttttagttcctgtgcaccagcccctaagtcaacttagcattttctgcatctcccacttggccattagctaaaaccttccatgtcaagattccagctagtggcccagagatgcagtgcccagggacccctataancagttgcacagcatctcagctcatcttcactgcacccctggatttgcatacattcttcaagatccccatttgnattttttagtgactaaacccttgtgccattctagagtgcatatatttatattttgcctgttaaaaagaaagtgagcagtgttagcttagttctcttttgatgtaggttattatgattagctttgtcactgtttcactactcagcatggaaacnagatgaaattccctttgtaggtagtgagaccaaattgatgatcccttaagtaaaccataaaagtgtcccttgaaaccctga

SEQ ID NO: 593340 - DNA, 413 bp, Homo sapiens
ctgggaaacagaaggggggaaaagagaacaaatccaaccaaatatccatagaaacccagaatgtgggaaaggtgtgtacagcgctgttcagaggagccaagggaaggggcggggcgggacccaggccaccactagcatgacgaaatgatgacttcgggcctctgtccctcaggctgaatgcgtctgcgctgggtgcccatgcagctcaccccagtttcgtttttgtgtctgtcaataagttcagcacagtattgtttgtaaaaggcgtggctttacactgtagtgggctcagacccaagtgactgcctcggaactcagtagaaaggggggaagcagcgatttgaaattttcaggtctgatgatggtaatatgtaacaaggagtcatcttgtaggaaaatacagaataaatagg

SEQ ID NO: 593341 - DNA, 190 bp, Homo sapiens
ccctgcatgtatcgtttacagtgggaatgatttatattcatttgggtatatagacaataatggcattgctgggttgaatggcaattctgtcttaacttctttcagaaaacaccagacaaatgttggtggctttccacagaggctgaatgaatttacattcccaccagcagtgttatttaaatgtgttcat

SEQ ID NO: 593342 - DNA, 239 bp, Homo sapiens
taaacagcgctattggctccgtgaccagagtgtcgtacaggacagatcaatcgtggcccactgccccgggtttgtaagtcactgttgtctcatcgtactgggtgcgactgaagataccttcatcgctgacctggttgtggggctgtgcactgggccagatcaagaaaggtgccccttgcaggatctgagcgcttgacgaagtacaaccagctcctcagaattgaaagaggagctgggga

SEQ ID NO: 593343 - DNA, 1750 bp, Homo sapiens
tagttctagatcgcgagcggcgccctttttttttatttttggttttttaccctagaaaataagaaaatgtaggtgtcccagcaaagtttaccacacactcaccgcttggcaccacgactgataaaaccttagccttactagatacagacgaccacatatgtgcgtcaccacgtctattcgtctgcactgcctggtgttctctgttcgtctctcggcgctctctcgatcggtttaagacggagccgccgatgctgacccaccgtcgccctcatccacatcatcgcaagaccaccctccctgcctcactagcactacacatccccacacacaacgacaccaacagcacacaccgtcaaaccatacatttgtgctactctgccgctggtgcgctgtctaccgtcttccgactctcaacactcgcctccatatccgtgagcctatcctccgccacacaagcggtctcacttaaccgctccgcgcggccgagcctgtcgccctgcgccgtgcgtgtcgcgtggcttgtcgtctgctgctagtcgcctggtgctgtgtcagtcgctcgcgcgcgggcgagccgaggtcgtctgctactcgcgcgctccgctgccttgtttgcggctccccgcgcaagtactagccctaaaccctaaccctccaacaatattactctataccctatcatccacccaaccaccactactgactctactcatggcacttcagaatccaaccaaaaccactcaccactcctaaatgtaaccaaacagacaatattcacaactaccactaccaaacacaccatcactcactctcacacactcctgcacactattcatcctccgccctccaattaagtaacacatacacatacgagaatacaaccaacaaagcaacgcgcccgccgatcagcccaccgcccgcgcacgcgttcagtcgaactataccgcacgtagccggctcgcgcaccatccaccgcgcccagcgccccaccacgccgacaagacggacacggcaagaccaggagcgccaccctacacagccgggcccaatccaggtgtcctctgctagacacgagcgaccgcacccagcagccgaggagacacgaaacagcccacgcaggcaccctgcgccagacagtccaagatgggcaccaccgacccgcgagcgccgcgaccgccacgcgacaggcgccgcgccacccgcggccacgacgccagcacgccacggcacgaccatagctgagggcgggcacgccatcagcgccgccgcgtgcgctcaccccggcgcgcgcctcgtacacacgacgctcgaagctcagcaccccacgagcgcaacgacacgcagcagaggctggcgcaccagcccccacctcgtctgttgcagcggttctcgtcgcgcttgtcaccgtgcggcgactggcgcgtccctctctcacccttgcactctcaccctaatccatcactctactctctcttactccgtactcatactcactccttctctcccctactccctccatccacacctactaccaaatcatacagctcctttaactaccccgccctagcatccctcttgccactgtcctattcacatcattccagtctcatactctatctccctcctccatcacctactgtatactctattcgtactctacctctaatatctcccactccatctcacacttactcagaccacctcatactaactacccatacatctctactaagtattagtagctcactat

SEQ ID NO: 593344 - DNA, 110 bp, Homo sapiens
accattgcccgagaggaaggggtactgctgtgtccgtcaagcaccagtgatgcccaccaccggcgcccggtgcatacagctggatcgccatatgggtagtagctgggtac

SEQ ID NO: 593345 - DNA, 291 bp, Homo sapiens
ctatgccctgcctaagatcgtataggaatgtatatatgaaatgacctgtactaggtgacctgacatagttctacctttccttgttgtctctagccctagcatctctactactgacttacatcacttcccatatatggtgtattgcagtcctgatcatgatcaatgataggcttaagtggtatggggaccttataggagatatagtattctttgatgactgcgcttatgcttataagatcctgtgtcagagcactgtgtctagacaactgtcacagcatgtatactgatgag

SEQ ID NO: 593346 - DNA, 104 bp, Homo sapiens
tcttttggtttacatatcccatatttctcagaggagtacattctttattctctttatttttgtctagagttattgttggagagctggtcttagagctctgggca

SEQ ID NO: 593347 - DNA, 161 bp, Homo sapiens
ccgatttattaaccggtggttccgagtccaaaatttcgtatgtcccagtgacgctattccgggggggtatcggacagtaaaacctgttatcccggttgttccctaggtgttgcttcccctagctgcggcttctgatccgagctgccggttatagaagaagc

SEQ ID NO: 593348 - DNA, 122 bp, Homo sapiens
gcggatctttgtacgaatactggtgacaaaaactgctactgcatcttgcaccaaagcccattaagccagagtcaaaaggagtccagaaatatagagcatcaacagtgatgccacagaacatg

SEQ ID NO: 593349 - DNA, 838 bp, Homo sapiens
cttggccctgtgacacgtagcaacggggctggttcaggctctgaaacagagttcgggggtagtggggagattagatgacagctacgtgcgctttgccgccagcgcagacgtctagagttgagttatattgcaatgtcaggctttgagaaacttaacacacggatttctaccagaacaagttacagcattcgatgatcagtacacagcagctacctatgattatggaggaagtggaggaccctgatagcaaacagtatgcgggctatgagctattcgcacgcaaggcaagagtcttgtacctcatccgagactagtgatagctagccacaaacagccatacaccgggcagatttaccagccaactcaggcatatactccagcttcatctcagcctttctatggaaacaacttggaggatgagcgagctttattagaagagttaggtatcaattatgaccacagtctggcgagaataaaggactaactagtgattagcatccgttaaaagtagcagatggcagcatcatgaatgaagagctgatttggccaggtccaagtggttgtcaggccttggctgtcgcggagccatcgattgctactggtctggcaacaatccagattggctatgtatactgggatcagtgcaactgggatgtctaaggaatgtctggtgttattgaaacttaatgagtatgacaggtgttgcatatggtcgagtggcaagtgtccgtggatacttgtgctgcagcccatgatcctactgtcccagacttgcagctcatatctgcttcgccaggaatggtaggaagcaattctcactggctgggatcatcggacg

SEQ ID NO: 593350 - DNA, 969 bp, Homo sapiens
  misc_feature (58)..(58): n is a, c, g, or t
  misc_feature (154)..(154): n is a, c, g, or t
  misc_feature (185)..(185): n is a, c, g, or t
  misc_feature (206)..(206): n is a, c, g, or t
  misc_feature (216)..(217): n is a, c, g, or t
  misc_feature (226)..(226): n is a, c, g, or t
  misc_feature (255)..(255): n is a, c, g, or t
  misc_feature (258)..(258): n is a, c, g, or t
  misc_feature (262)..(262): n is a, c, g, or t
  misc_feature (264)..(264): n is a, c, g, or t
  misc_feature (282)..(282): n is a, c, g, or t
  misc_feature (296)..(296): n is a, c, g, or t
  misc_feature (300)..(300): n is a, c, g, or t
  misc_feature (715)..(715): n is a, c, g, or t
  misc_feature (740)..(740): n is a, c, g, or t
  misc_feature (784)..(784): n is a, c, g, or t
  misc_feature (833)..(833): n is a, c, g, or t
  misc_feature (841)..(841): n is a, c, g, or t
  misc_feature (850)..(850): n is a, c, g, or t
  misc_feature (883)..(883): n is a, c, g, or t
  misc_feature (892)..(892): n is a, c, g, or t
  misc_feature (960)..(960): n is a, c, g, or t
tcccgggattccgtatctgcttcgggcttccacctcatttttttcgctttgcccattntgtttcagccagtcgccaagaatcatgaaagtcgccagtggcagcaccgccaccgccgccgcgggctcccagtgcgcgctgaaggccggcaagacngcgagcggttcgggcgaggtggtgcgctgtntgtctgagcagagcgtggccntttcgcgctnnccgggggcntcggggcgtgcctgcctgccctgctggangancaanangtaaaagtgctgttttangaaatgaacggctnttantcacgcctcaaggagctggtgcccaccctgccccaaaaccgcaaggtgagcaaggtggagattttccagcacgtcatcgaatacatcagggaccttcagttggagctgaactcggaatccgaagttggaacccccgggggccgagggctgccggtccgggctccggtcagcaccctcaacggcgagatcagcgccctgacggccgaggcggcatgcgttcctgcggacgatcgcatcttgtgtcgctgaagcgcctcccccagggaccggcggaccccagccatccagggggcaagaggaattacgtgctctgtgggtctcccccaacgcgcctcgccggatctgagggagaacaagaccgatcggcggccactgcgcccttaactgcatccagcctggggctgaggctgaggcnctggcgaggagagggcgctcctctntgcacacctactagtcaccagaaactttagggggtgggattccnctcgtgtgtttctattttttgaaaaaccagacattttaaaaaatggtcncgtttggngcttctcanatttttgaggaaattgctttgtattgtatattncaatgatcnccgcctgaaaatattgttttccaatagttctgtggggctgtttttttgttattaaacaaataatttanatggtggta

SEQ ID NO: 593351 - DNA, 444 bp, Homo sapiens
gtgaggccgcacccggggtcgcgactcgcctcgccggagtcggggcagcgctcgcccctctttaccatgtatcccgtccagggatcccatgacagattctgtgtcacgtctccttacagagttgagcggtgctgaactgtcaagcaccgatcatggtccccggggtcccacaaggcatgcctgctgagaccccccagggagaggggggccacaggctgccccacgctcaggcacactcggcgaaggggagctggagaaggggtcccagaggataggaagccaagagccctgtggatccggcccgatgctccgagcaggtggactggcagctgggcggctgctccgagtcccaatcacacacgcccggaaaactccaaaaatctgccagatatctgaagaaacgggacaccctatggtcagaatcaaagatgcacgagtcggcga

SEQ ID NO: 593352 - DNA, 776 bp, Homo sapiens
  misc_feature (54)..(54): n is a, c, g, or t
  misc_feature (67)..(67): n is a, c, g, or t
  misc_feature (99)..(99): n is a, c, g, or t
  misc_feature (122)..(123): n is a, c, g, or t
  misc_feature (131)..(132): n is a, c, g, or t
  misc_feature (141)..(141): n is a, c, g, or t
  misc_feature (149)..(149): n is a, c, g, or t
  misc_feature (153)..(155): n is a, c, g, or t
  misc_feature (157)..(157): n is a, c, g, or t
  misc_feature (162)..(162): n is a, c, g, or t
  misc_feature (165)..(167): n is a, c, g, or t
  misc_feature (170)..(171): n is a, c, g, or t
  misc_feature (175)..(175): n is a, c, g, or t
  misc_feature (180)..(182): n is a, c, g, or t
  misc_feature (186)..(186): n is a, c, g, or t
  misc_feature (191)..(191): n is a, c, g, or t
  misc_feature (215)..(215): n is a, c, g, or t
  misc_feature (253)..(253): n is a, c, g, or t
  misc_feature (255)..(255): n is a, c, g, or t
  misc_feature (522)..(522): n is a, c, g, or t
  misc_feature (547)..(547): n is a, c, g, or t
  misc_feature (591)..(591): n is a, c, g, or t
  misc_feature (640)..(640): n is a, c, g, or t
  misc_feature (648)..(648): n is a, c, g, or t
  misc_feature (657)..(657): n is a, c, g, or t
  misc_feature (690)..(690): n is a, c, g, or t
  misc_feature (699)..(699): n is a, c, g, or t
  misc_feature (767)..(767): n is a, c, g, or t
aaaagggggaagggggatgaaggtaaggggtaagatatgaaaaatataaggagngttaggagaaatnaaggaaggggtgtgttaatgttaagaaaaatngttattaattttaaagaaggggnntagggggnnagagggggngtgggagnttgnnnanattangtnnnatnnttgngggtnnntggntatgngggggtgcctaaggagcctggaanaagcgctcccccgtcgtgcttcctggggaagggggcgntnctgcgctcggagcggcgtcccttccaacccgccggtctcatttcttctcgttttcacaggcggcatgcgttcctgcggacgatcgcatcttgtgtcgctgaagcgcctcccccagggaccggcggaccccagccatccagggggcaagaggaattacgtgctctgtgggtctcccccaacgcgcctcgccggatctgagggagaacaagaccgatcggcggccactgcgcccttaactgcatccagcctggggctgaggctgaggcnctggcgaggagagggcgctcctctntgcacacctactagtcaccagaaactttagggggtgggattccnctcgtgtgtttctattttttgaaaaaccagacattttaaaaaatggtcncgtttggngcttctcanatttttgaggaaattgctttgtattgtatattncaatgatcnccgcctgaaaatattgttttccaatagttctgtggggctgtttttttgttattaaacaaataatttanatggtggta

SEQ ID NO: 593353 - DNA, 116 bp, Homo sapiens
cgatattattagaccaagcgagtcctccctcccaatatgaaatatgaatcatctacagcctctgcctggtcgcataatttgtctgtgtctctatgcaataaaatgattgtttaact

SEQ ID NO: 593354 - DNA, 789 bp, Homo sapiens
  misc_feature (54)..(54): n is a, c, g, or t
  misc_feature (67)..(67): n is a, c, g, or t
  misc_feature (99)..(99): n is a, c, g, or t
  misc_feature (122)..(123): n is a, c, g, or t
  misc_feature (131)..(132): n is a, c, g, or t
  misc_feature (141)..(141): n is a, c, g, or t
  misc_feature (149)..(149): n is a, c, g, or t
  misc_feature (153)..(155): n is a, c, g, or t
  misc_feature (157)..(157): n is a, c, g, or t
  misc_feature (162)..(162): n is a, c, g, or t
  misc_feature (165)..(167): n is a, c, g, or t
  misc_feature (170)..(171): n is a, c, g, or t
  misc_feature (175)..(175): n is a, c, g, or t
  misc_feature (180)..(182): n is a, c, g, or t
  misc_feature (186)..(186): n is a, c, g, or t
  misc_feature (191)..(191): n is a, c, g, or t
  misc_feature (215)..(215): n is a, c, g, or t
  misc_feature (253)..(253): n is a, c, g, or t
  misc_feature (255)..(255): n is a, c, g, or t
  misc_feature (522)..(522): n is a, c, g, or t
  misc_feature (547)..(547): n is a, c, g, or t
  misc_feature (591)..(591): n is a, c, g, or t
  misc_feature (640)..(640): n is a, c, g, or t
  misc_feature (648)..(648): n is a, c, g, or t
  misc_feature (657)..(657): n is a, c, g, or t
aaaagggggaagggggatgaaggtaaggggtaagatatgaaaaatataaggagngttaggagaaatnaaggaaggggtgtgttaatgttaagaaaaatngttattaattttaaagaaggggnntagggggnnagagggggngtgggagnttgnnnanattangtnnnatnnttgngggtnnntggntatgngggggtgcctaaggagcctggaanaagcgctcccccgtcgtgcttcctggggaagggggcgntnctgcgctcggagcggcgtcccttccaacccgccggtctcatttcttctcgttttcacaggcggcatgcgttcctgcggacgatcgcatcttgtgtcgctgaagcgcctcccccagggaccggcggaccccagccatccagggggcaagaggaattacgtgctctgtgggtctcccccaacgcgcctcgccggatctgagggagaacaagaccgatcggcggccactgcgcccttaactgcatccagcctggggctgaggctgaggcnctggcgaggagagggcgctcctctntgcacacctactagtcaccagaaactttagggggtgggattccnctcgtgtgtttctattttttgaaaaaccagacattttaaaaaatggtcncgtttggngcttctcanatttttgaggaaattgccttcagttgtatctccccatagtccgcccgtcagaacattctcttcccatagttctgtctggccgcctctttgttcttggcccaatgatttaaatagtgcgaccaaacttcgact

SEQ ID NO: 593355 - DNA, 352 bp, Homo sapiens
tgagatgagttgttgctctgttgcctagtgttgcaccattggtgagcaggggtgcagtcatagcacaacctccaactcagctcaatgatcctccagtctcagcttcctgagtagccgtgactacaggtgcatgccaccatgcccagctaatttttttttttttttgaaacaaagtctcgctctgtcgcccaggctagagtgcaatggcgcgatctcagctaactccaacctttgcctcctgggttcaaacaattctcctgcctcagcctcctgagtagctgggattacggcacccaccaccatgtccagttaatttttgtatttttagtaaaggcgagtttcacgatgctgg

SEQ ID NO: 593356 - DNA, 337 bp, Homo sapiens
gtctatcagattcaagagatcaggttgtgacggtccaccaagtacaagacttcaacttgttctctgatatccttatgacagaaaacttagcgtagagatagtcaatcagagtctgtgatacactcaggacaaaagaatgtccttaacacatcaacaatgctcaagtgtaagtctgggcaatgtgccggtgcgtgtcttaatttctccacattgaacaggtgaagtgtccaagagatggcccaccaaatctgtatctcacatcattcctttgcaattgttagaactaattacttatacagaacctaattctgtgctaagtgctctacatgcatcagga

SEQ ID NO: 593357 - DNA, 242 bp, Homo sapiens
  misc_feature (8)..(8): n is a, c, g, or t
  misc_feature (198)..(198): n is a, c, g, or t
tgtagtantgagcctggggacacacagctgggagggggctggtccacgtacgtgccgctgcgccccggcatctgcagatgcgttcacaaactcagggaccacttgcttgatctggtggcttcacgtatccatcaacagctttagcagtagcagactcgcagggaactggtgtgtagtatttgggagtatacttcatcntttgggcgcgatcaggaaaccaggtagataagggtaaattcaag

SEQ ID NO: 593358 - DNA, 445 bp, Homo sapiens
tttaggagttttccttttgaaaagactccccctttttttttttaaaaaaatttccctttgtggggggggggctccccctttacgaatattttttaaaaaaaatttttttttttttttggggctttaaaaaattccggttttttttttaaactttttttagggtttcaattttttttgggggtttgccaaattttttttcaaccccttttaaatttttttgtggaaaattttaaaaaaacccccctcttaaggtttttttttcctttttttaacaattttcgggttgcccccatttcccctttttggccctgggaggggtgtttttttaaaaaattttttttttttttacctctttggtgaatttttttaccgtggccttaccgccttacacttttagggggcaacgaggcagcaggcgccacccaagttgtgcgccgcacattgt

SEQ ID NO: 593359 - DNA, 339 bp, Homo sapiens
  misc_feature (18)..(19): n is a, c, g, or t
  misc_feature (53)..(53): n is a, c, g, or t
  misc_feature (73)..(73): n is a, c, g, or t
gcggtgatctagaggacnnatccccggtctgggtagacactgaacaccctggnaagggagagttagccgcagnagatgacccagtccactgctgtaccagaccgggtcctgcaaagagaggcgtccatcaagcctcatccctgcacaccacgttgggcctggcccgattctacctcagagacccacttgaggagaggcacagggatgctgcctgagcagcagatccttctggcacggagcaggctgtccccaggcctgtccgacaggtccttgtttctaggtgctcttggcttcccagacttcagcaggcctaggaaggccccggtctcccttagctga

SEQ ID NO: 593360 - DNA, 245 bp, Homo sapiens
cacgagtggagctggtgcagctcgtcatcgatggggtgaactatttgattgactgtgaacggcgtctggagagaggacaggatattcgaatccctccacctcttgtccacagcaaacattaactccccatccccagcggatgagtcaagacccccaggacttctgcatatttaacagtggcctagtctacttgccctggacctgcctctctccctgtcctagtaaagactccacattatgttgca

SEQ ID NO: 593361 - DNA, 121 bp, Homo sapiens
acaaagcatgtgaatactggcattagctctcataggagacccatatgcttccttgctcagtgcagaactgagtgattctacttgcgtgtaggatgaactggttaacacgagctagttaaac

SEQ ID NO: 593362 - DNA, 358 bp, Homo sapiens
ccttctacgtctcatcactgaacctccacaggcacctgctgtgaactaatgtgccagcttaagggacagcctgccctggttgggcttcttgggtggaacaagaagattcaaggaggaggctggaccaagagagaattagccggatcttgctaggatttctttttttttgtctttttgccatttctgggtctgctcccgtggcatatggaggttcccaggctaggggtcgaatcggagctgtagcagccagcctacgccagagccatggcaacgcaggatcagagccacgctctgacctacaccacagctcacggcaacgccagacccataacccaccgcagtgatgagacgtagaagg

SEQ ID NO: 593363 - DNA, 380 bp, Homo sapiens
gcccccctttggggattttgcccccgggccaaagatttcggcccggggaaaattctccaatttccgaaacccctatatttttaccccttggttgggaaggaatttgttttttgctggaaccccccgggttgaaaaagacccgtccaatggagtttctgaaaccccttttttttgcgagggttttttccgaggggtcacttcctttggccttgaaaaaaaatgcggagaccctcgtgggcctggtttttattttcttctctcaaagaaaccccccaactggataattttgactatcaagggggcagtttaaataaccgtttcctttcatttactgtggcttcttaatcttttcacaaataaaatcaatttgcatgaccgta

SEQ ID NO: 593364 - DNA, 133 bp, Homo sapiens
cccgcagttatttgggtgaatggatcattccatattaaccctcttagtcatcctaaatggcaatatggtgtagtgatcaaaagcccagtgctccagtataagacatgatgtagtggctagaagcaccagcacc

SEQ ID NO: 593365 - DNA, 125 bp, Homo sapiens
gagtcacatcatgacatgacactaaggactaatggcttgaggggaagtctttagcattataccaaggatcaactgtaaacaaagagacagttccctgtgtcagttaggcatctccaccgcgtcat

SEQ ID NO: 593366 - DNA, 340 bp, Homo sapiens
tctgcttctgaaatcctactacaagggcgtgcacgttacaccgttgcagggtctgttttaggccctcacatgtctaaaacagaactgttgatgcccacccacctttctgttctcggtgcgtagcttcagcattccctcacacctcatgtccagtcactcatccctgttgcctctttgtccacagtagcccctcaatctcaccacttctcaccgcttctcctgtccaccagcaaacctcaggtcaggccatgcctccctctgcagtaaacagtgagacacagggcatgtggaccagaagctgtccagaacagcatacttcctttcaagaagcaggaactgg

SEQ ID NO: 593367 - DNA, 310 bp, Homo sapiens
agctgagctcatccatttgcataattttcagtgccatttctcagctgatgagtcctgaacttttgtcttgaggctagacttctccttcaaacagcagtcttaaacactcaacttctttcttgttttttccacttgtgaactcatgaacacctccatcttgttacatccaaagccaaactcatggcttggagtggtaggtgatggctgtaaccccagtgctatgggaggctgaggcaggaggattacttgaggccgggggtttgaagccagcctggaaaacacggtgagactccctatctaccaaaaaaaa

SEQ ID NO: 593368 - DNA, 290 bp, Homo sapiens
cattcggccagggatttgtctggagtctcaaatgccaccaaaggtgcttggggcactaccctcaacatcgcaactgtgttgacctctattcagctgctcatgtcgaacccaccctgatgacacgctctaggctgacataatcctcagaatttaaatataatagaccggacttcctcgggaaatgccggccagtggcggagaggcatgcaggcggaaccaaaaggctgttggggagagatgctttatactataccagagctgtgctcagagtcaacattacaggaaaagga

SEQ ID NO: 593369 - DNA, 281 bp, Homo sapiens
actctaagtcactggggctatgcccatgctaaccttgtgactgagaagagttacacctccccaccaaccattcccaccaacatacacaacagttggtcctggtggcagaggaatgggaagaggcccctctgcagtaagtcagcgtaaggacaagagtgggtggtgggtgtctgtgtcacttttgacaaggacaggatagagcgtacctcagaggtactcgtaaccctatgtgcctggggagaaataacttgcttaagtctaataacttcaattataaacca

SEQ ID NO: 593370 - DNA, 179 bp, Homo sapiens
cagtcgcgtgtgctcagtcgcgtgtgcttatcattgtttaggaagcaatccttgtaccccccaggtcatgcatgtcgctggaatctctgtccacaccagcaggccagccttacgtccctgcccctttgctggaaaggcctcaatccaggaaagagtggctatgtgacctacagcacacg

SEQ ID NO: 593371 - DNA, 1025 bp, Homo sapiens
  misc_feature (1)..(1): n is a, c, g, or t
ncggatgatcagtgacacagcataaaaaaataactcaggtccacatgctgctggtgtctccacaggtggactccccttcggcgagttaagtgctgcgccttgcacggttcatgtgctgcgacggtgtgttggcagtgtcgtgtatgtgcttttgtcgcgctgccccgtggggatatctgcgcaagtagaggctggagagtgcaccgtgctgtattgcgcgataaaacctggggtgatgtatgggtgaaaaactcgcctgagggtgtgtctcaattccgagccggcgcccggtgtgtatggtgtttcatccctccccgcttcttggtgtgggttggaagttttctggcccccttgtgacaccgcgggtggcacattgcgctctgtggtgaacaaatgggggccgtgtggcacagccgggataatacacgttggctcgttgggggtttcgcggaattattagcacgaccgtcgattgactggctgtgttaagggttgtatagatgggctacttgcgaaaatcctcgctgcttttcctaggggtacagcagaccaccactcgtgggataggtgccacaaaatgatagagagagaaggaacccggcgtgttttaatatggggttatcccacccccccaatacatttggagcccacccccttttttgggcgcgcgcacaccaccgggctagtacgtgacccctcccccatctgtggggggggaacatatgccccttctctgatgaatagtgccacagctctccccatagagggataatatcatgtatgtgatagtgcagtgtttttggtaaaaacgagattctttgtctagcgatcaaacttctgctcaaccatcttactcagtccccctagatgcagattctttttaaaagataaagagtgttattttagatgatagtagggaggatgtataatttttcttggatttaaaagaggggctcgaaacacctgttgagagagaaaagcactctaaagggaaacccaaaaaattttcagcccccaacatgaaa

SEQ ID NO: 593372 - DNA, 795 bp, Homo sapiens
cccagacccctggggtcctccaaggtcccgcgacccaggactcggagccatatcccgatgacctcagggctggctggcatacgccactgcaagcgagccgtcagatcatcgtgggggaaagcagcacagaagcccatgcacccctttgaagagccagagagcatcgagtgcagtggtggtgaaagagcaagagtggtccggcggcactccgcccagagtcactcgcagcacaggaagaaatcgcttcggaaggacatcgagagcttgggcaacgaggacgcggaccgaaactggcccagagtccggcagcagcagcacaagcattctgccttcagagctggtacgagattgagcaactaaagaagcctcatgtctattgaatgcagacccggaccacagagaactgtagtcgtgccactaccaaagccttcctgggctcatgcggggcgccaaccgtgcgccaaccccagcacatccccacaagagtgaccttgccaaaccaacaagggcctggccccgtccccagtcccgcagtacatcccctgtcccctccccaacgccaagtgccttcatgccctagggccgcccaagtgcctgcccctcactcagagtattaacgtctccaagagtattattaatcgctgcttgtacctcgatctgaatctgccggggccgcagcccactccaccaatgtcagcagacttccagtcagtcccaaacagcctcatcagctctcttgcaccgtgttttgatactatcttcccccagcccccagtaacccataggggcgtcaga

SEQ ID NO: 593373 - DNA, 756 bp, Homo sapiens
atcgcaatggcattcctaatgcttacctgaacgaaaaattctagtgctatatacaactacgcaaagcgccccaacgttgtagtgcccctacgtggctactacaacccattcgactgacgccatacacactcttcaccacaagagcccctaaaacccgccacatcataccatcaccctactacatcacacgacccgcaccttacgctctcacacatcgacatcatatctactatgaaccccaccatccaccaatacacccaaccccactggtcacaccctcacacctacggaccatacctactctacttacatagaccaccacatcatagaaccatacaccgatacacacatcgaactacactcctgaactccacgtaggcctgaaggccatcacacaactacaaaactaacgacaccatgaactcgatgcccgcaaccctgcgacacccagcctaagccccacaacacatcctcactatagacgatcacccataccacatcattctagctatcaaacatctactaatcaacgtggacatccctattcaaacccatcgtccgacccctctatcagcaacacaagaacacctactgactcactccatgccactcaatgaccccctggaccaacaaacatgactccatacgccacactagcaaagaacaaaccgaacccccaccagacactgccgaggagcgagccgaacaaggcaccaggctacaacatcgaataagccgaaggcaccacgcccatca

SEQ ID NO: 593374 - DNA, 364 bp, Homo sapiens
agtcggtccggtacgtgctgagtctttcccgccgcttcgtgattgacgatgctacatgtctgcaggttgctgttcatccaggagtcctgcgccttgcatattgtacacagtcttatccagggcggtgcgtgaagctctgggcagcccacatccatgatctttgggttacgcttcgttaggtcatatctctttcctgtttggtataataccaggtagttgtccccgtgcttggacttgagcatgcgcgtgacctccgtgtaggttgtgcaggtaggactcctcagagcagccggcagggaaggacacagcgatgatgcgctccgtgatgtaagtgaggtccagcccatggccctcctccatggtg

SEQ ID NO: 593375 - DNA, 422 bp, Homo sapiens
  misc_feature (43)..(43): n is a, c, g, or t
  misc_feature (62)..(62): n is a, c, g, or t
  misc_feature (65)..(65): n is a, c, g, or t
  misc_feature (75)..(75): n is a, c, g, or t
  misc_feature (78)..(79): n is a, c, g, or t
  misc_feature (90)..(90): n is a, c, g, or t
  misc_feature (122)..(122): n is a, c, g, or t
  misc_feature (204)..(204): n is a, c, g, or t
  misc_feature (211)..(211): n is a, c, g, or t
  misc_feature (214)..(215): n is a, c, g, or t
  misc_feature (229)..(229): n is a, c, g, or t
  misc_feature (322)..(322): n is a, c, g, or t
  misc_feature (329)..(329): n is a, c, g, or t
  misc_feature (332)..(332): n is a, c, g, or t
  misc_feature (339)..(339): n is a, c, g, or t
  misc_feature (369)..(369): n is a, c, g, or t
  misc_feature (378)..(378): n is a, c, g, or t
ggggggctactgggacctcacgttaaacggttttttttgaggngggggggggggggcaggtngtntctctgtgtnggnntcccttaggtnttccattatttgggggggggggtggggggggngaattcatttttgcatgcacaagatgtactgcttaacgaaacactatcagcttgttttaaatgggtcttttaaatatcaacngtggccnggnnggcgaattctttcnaatcttccccattactttcgcctagatttcccataggtcaacgggcatggtaaaatgcctcatcggaacacccttctccacacaattcaaaangggggcnccngggggcncaaggcgaccatcggtccagcaatgcccangatttatcngaaacggcttcccaaggggcaggggtgcggatctgggtggctgt

SEQ ID NO: 593376 - DNA, 293 bp, Homo sapiens
cctctcatttcaccacagctattgtggcccaaggtcctacggtagtgttctatgaagccaaattcccacatataatccatgttaagcacatgtagttaaagaccctgtataccatatacagatctatcaggcttggtgctacacgagatgaggacgaccgtccaggcctcccgggggcttagagcctgggggtgcgcgtgggggtgggcgacgtttacaaaatatcccatgcgatgtgatcagctttggcactgcgctgctgtcaccaaggttgatggcctcggattcccctc

SEQ ID NO: 593377 - DNA, 310 bp, Homo sapiens
tttttttccccaggggtgggccatggggagggaaggactttttcccaggggaagcccccacccctgtgggttatggtttgtgaaagggggcaggaatggggcccctccccccccaagcagcctgggccctttggccgccctgtaaaatggctgtggggtttggggggggcctggggctccctttgcaggggcctttttcggcacccccagccaaggggggggggttcgggtttccagtttttttgtttttcagcggccatttccggggccccagaaggggccagggataataaaatgtttttcagaaaga

SEQ ID NO: 593378 - DNA, 654 bp, Homo sapiens
  misc_feature (350)..(350): n is a, c, g, or t
ggggagttggggcagtttccccctgagacctgcctcttccttaggcctggcagtggcccgcgatgagagagggtccttccccttcaggctaggtgtccctggtcaggcgacccttggggcacccagcaatttagtggcttcagcttccttttccttcgatacccaggagcccacgtccccagctcacttctcccccaggacctagtgctggtgggccccctgcccctgactccagtgagcccaggagttttgaagcccaggcgcgttttgcctcagtcctggtggtccaggctccctcctccctcagaccaggggttccaggccagaatgtccctcctgtctcacttcancttcccccagtgattggaccctccagtccatcttgcgtctctccattttgttggcttgcgtttcttgtccagttgcccctgagtgccctcggctgcttggggtcctgcaggaagcctgtgccatgaatgacctggagcagtcggagtgcggacaatgaagtgactgattgagaccttcgagatctccattccctttcgatgaggcaccccaactagaccacagatcttttacagtctgagcccctctcggagaaactttcgaggagcctccggaggcttgcgtctccgccctgtgtctgatgaa

SEQ ID NO: 593379 - DNA, 265 bp, Homo sapiens
accaggctccatttaacgatataatggaggtcagcacggtgctcacgtgtcgacggaacttgtacagggaggcatgcaccgaattggtaaatacacgtacgaccaggctccatgttaacgatatttggtggtcagacacggagctcactgtatcgcacggaactatgtccagggaggtatgcaccgcagtggtgaatacacgtcgagctggaggacatgcatagcagtagcatcgggtactgaaagataccactacagagtcgac

SEQ ID NO: 593380 - DNA, 1881 bp, Homo sapiens
  misc_feature (1279)..(1279): n is a, c, g, or t
tgtggtgtcgatttctccccctctccggttgtgtgtgtgtcgagaacagtcttgttactctgagctggggggtggtccccctacccacagtgtaggtggtgtaggttcgtcactctgtcttctccctagcatgttatggtgaccaatcctgggtagcttgtgcatgctgcctgctgtcccgaacctgtgctttgcttgcggtgcgtcctttgtgtgttatggaattaaattattctattgcgggcggtcacgtacctgctttgctgtcctaccttatgtgggtgtgggatcgccaccaacgtggggagggagcctccccatcctagggaaggaaccggaacctgccctcccatagctgatgttgggcgcccccccccaccgaggaggttgggtacgtaacctaacgtaacatagctaggtcccgtccagtcaggcaggtaaggaacgcatgctaggtagttcgcttggcgatggcagcacagccacctcagccgggtggggcgccagccacccagcagagagaaagtaaggtaggcaggatgagggcagccagatctagtgagtccaatcaggcggccgccccaccaacaaaaatgtaggcgagggcggccggacaccccataagatgggttgactccccccccatcacccctcctggatgtatggatgtacgggcgggcgcccccctccccccccctctggcggtctgacccacccaatctatgatgaagggaatgaccccacactagggggcgccatcggtgggagggacgtgctctcgccccccccccgttggacggactccacccaccaaccacctcggtctgccggccgtcggtcgggcggaaggaggaataactacccacctaacgatggaggaaggaagaagtacgttcgtacctactaccttgctggctggtggatggatgtagtgcgctcgaaggatggatgggaccaccaccccacccaccatccgagcgacgaccccctggcaggctggagttggcctccccctccttgcttggctgccgcctgccactccctgctggcacttgctgctgcttggctcgctggttggtttgttggttggtcccccctcgtcggcgccccccccccgcccggggggttgaatcactgctgctcgacaaacaacacggcggcggcggcgcgcgggcccccgccggctgtaagaacaggagcacacacgctggtagctgccgtcgcagcaggggggacaccacagccgccccacacagcaccgctgctgcgcagtacaacncctgctgctgctagtagctgcgccacacagcagcaggcagagaataagacaaccaccgcggccactctcacaccgcgtcgcggcaggacccaggtgtgcacccccagcagcagcagccgtggtggagatgactagtacagagagatagactacacacagtaagagactgccctgctgttgcgtggtgtggagatgagtgtgtgagtaggagcgaagacgaccccgtgatgttgcacgagcgccgccccccacgagggacgacacacagtagaacacacagcagctgcgccgcacagtgagagatctccacaccagagtccacccgcgcgcgcgcggggacacacagagagtccccctgtggcagctcacagcagaagtgtgcgcgcgtggcgctcacacagcagacacacacacaagagcagtccgcacactatagctcccacagtggcgcgtgataaaaaacggggttcccacggtgataaccgtgatgcgagcgctctaagagagcaacaccgcggggtgcacacgcgtgtgtctgtggggaccagtgataaaagatcacgtgtgtaaagtaggacacaccccccagagggtcccgccaa

SEQ ID NO: 593381 - DNA, 102 bp, Homo sapiens
actgttgctgtttgagcggagtcttgcatacacgaggagttcagcatgcggacaaggacacttccatgacagaaggacacagcatgtccatcaggcatggtg

SEQ ID NO: 593382 - DNA, 109 bp, Homo sapiens
ggctaggggtgaatcagagctgttgccaccagtctatgccagagccacagcaacgcgagatccgagccgcgtctgcaacctacaccacagctcacagcaacgatggatc

SEQ ID NO: 593383 - DNA, 447 bp, Homo sapiens
tgcctgcctctttccttccctgccacacccaattctgtggcctgtcgctttcctcttcctgcccctgcatcaccccctttcctgccccgcccataccctgcccctgtatgccccttccggcttgctcctccctgtcccctcttcttgctcacccgtctttctgccgctcctaacctgctgtgccggcatccagctgggaccgagagcggcactccaagagacactgagccagctttgccccccaccccctctcttgaggggccgagcaccactcggggaggagccaggcggggcctgacacccacaaagctttagttcccccggggagaggctggggacaagctacccattctggggtatgacacctatcagcacgtgtgagcccgtcctgtgcacggaaccacttactgcttcctcttagcgcaagaggggtcccgcactggagag

SEQ ID NO: 593384 - DNA, 318 bp, Homo sapiens
cgatctagaggtccccgtggttctgtctggaaagtataaaagaaggctggagacaccacttctgtagtctacttttggctttcattgaacacggtggagaattcagaatttttcattttctaccaagaaagctgacagaggaagatgtttcacaattatgagactaatcacaacatgaaggcacacagccgtcaggactctagactctactgatgatgatgaaattgatcatataagtgaaatctcagagcgtgagtctttatataacaaaatcctggctgggcacagtggctcatgccgactaggcccagcacaaga

SEQ ID NO: 593385 - DNA, 143 bp, Homo sapiens
cctgctaccacggcaagctggaacatgagtacaaaataaattatggtagtattttattatactcaaaaataaatagcagagtcaatattgataaaaataaatggttgtataaataaataaatgtgggaggagggctgagtctg

SEQ ID NO: 593386 - DNA, 231 bp, Homo sapiens
aacaagcgaagccgcacatctaacacaaaaaagaagaagggcagagtacgacaatatagagggtgtcatactgctattctatgacataacaaatcaatagtataatgatagtctaattgccctttctactgatagagactccttctactgcatcttaacggcttctaaccccagtgcattctcaaacttgactgcaatgaaatcatgtagaaagcttataagtaattgcca

SEQ ID NO: 593387 - DNA, 352 bp, Homo sapiens
aagctcactacacggtacatcaggttaaacttcacagcgtgatcggtgtctgtgaaggtgtgcaacaagttggtgctctagcaccagtgaatcaagtaacgttggtagccaagaatgatgacgctcataggggggtttcgacaggctgatctccaccatgatattgtcaacagatagaggccctttgtcctagttagtacatggcgtacagctctcagacaagttacgccagccttctgcatagcataatcaacagcacgagcggtgaccacctatacgtctcggcagtcaatgtgccccacaaagtgtcaaccgcgtgcaagtctagcctagtagtcagtgcgcgcgtgtt

SEQ ID NO: 593388 - DNA, 304 bp, Homo sapiens
  misc_feature (68)..(68): n is a, c, g, or t
  misc_feature (71)..(72): n is a, c, g, or t
  misc_feature (243)..(243): n is a, c, g, or t
  misc_feature (272)..(272): n is a, c, g, or t
aggaaggacaacacgacggtgacaaggcttctcaacatcaaccccaacaagacctcggccagcgggantcnngcgcccacctggtgactctggagctgcacaggagggcaccaccgtcctgctcttccagttcgggatgaatgcaagttctaagccgggtttttccctacaaaggaaatccagtttgaatacaaatttctttccttgacggccagagaccccttgccttttaaaaagcttgcnaacgggttcccccttgcgaagcggcttgnagggccacaagttcgggaaatttccttacaaa

SEQ ID NO: 593389 - DNA, 162 bp, Homo sapiens
acctccagaagatacctcgggtaggagtcaagacagcctggcgacatggtgaaccccgtctctactaaaaatacaaaaattagccaggcattgtggcgtacgcctgtagtcctggctactcaggaggctgaggcagaagaatcgaggtgatcttctggagga

SEQ ID NO: 593390 - DNA, 246 bp, Homo sapiens
gtggtagctacatgttgaggtggtttattgttgtagtttttgttattataattggtcaaatctggaaagttagcttgtactaataggggctatgctctgcacttcccttttttttatatccctcccattacttcaactccttatcaaatcatgggggtatccaaaggagtgccgtatttaaccccggtggggatccaatataaggggtcggaggaaaaccagctcactttgaacacctatggatgc

SEQ ID NO: 593391 - DNA, 410 bp, Homo sapiens
  misc_feature (44)..(44): n is a, c, g, or t
  misc_feature (52)..(52): n is a, c, g, or t
  misc_feature (86)..(86): n is a, c, g, or t
  misc_feature (95)..(95): n is a, c, g, or t
ttaaggtgaaccttggaaaacccctggctggacctctctgaacntcccccgnggaccccatgctagccttcccagctggttccccnagacaggcnagaccagcgccctccccagggtctctgtcagctgttccctctggctggcatgtcttcctttccttcagatatcaactccagtgagaccaacccggccacacaactgaacaccacaactttccctctttcatctcctttcaggcttcttctctagcaccaatcactgtatagcacatgtgtcttaattgttttctgtcttccccatcagaatgtctgtccaaggagccaggggtttttgtctgttttgtccactgctgtttcctcagtgcctgaaacagcacctggtgcaaagcatggtctccataaattctttct

SEQ ID NO: 593392 - DNA, 262 bp, Homo sapiens
ctcatacacggatcccctgttagtatcgccgcgactgtttctcaggccaaggaaacacttgtaggtactgatatttgattgatttattataacgcaggaagcaattgtggatctaacaggatcttttggtagctcaacacttgagatgccacatttgtagccaaataactctctaatattagttattctaggtttccggtttacaaggaatattatgctttgcaatccagctgatatacatgcgtcatgtgtggctcagcgg

SEQ ID NO: 593393 - DNA, 406 bp, Homo sapiens
aaggtcatagagtttgtaaataacagtgctgggatacaatgattgtgcctgatatgaagttcgtgctctttccaccagatcaagcccaaatatgaagaaaaccaaaaaaaaaagaaaacaaaccaaaacaaaaaaaaaaccttaattttaaattacatatccattctaaccccctttagtagcctcaaatttgtttatttattaatgtttattggtaaattgtaggtatgttttaatagacttcattattttttttttgaggcaggatattattctgttgcccaggctggagtgcagtggcatgatcatagctcactgcagcctccagctcctgggttgaagcaatcctcctgcctcagcctctcaaagtagcacacaccaccacattcagctaattaaatgaaaa

SEQ ID NO: 593394 - DNA, 987 bp, Homo sapiens
agctgacgaccagcaacgatacgcgacacagaacttcgctccattcatccttgggaccctcgagtttgtcgccccccaaggggctcccccaaaggttcccccgaagtgtcccccgtaatcgggcattggggaagactgagaacacagggtgcgacaaaaacacgcggttctgacgagggatgcccttcggccccgggaaagtgcctcgcgcgcacggagacacaacctctgggggaccgggaactctttccaattaaaaggccaagcgggacaacacactggcggcgagcgcggaccctctatcctagccccgcacacccaaaagagactaatacctgggggggcaacacaaaatgggccggcagaatggggcaaaaggaggactggcgttcttccacttttaagagaaaccccagcctttttactctaaaccccgaggcgaaatatgtcttccagcaaggcaaacatgtcctggacctccccccccccccgcggacggttcctcgccgctgctcttgcgtcgccgtgcgacacacccgccccacgtcttaggtacgttgggtattcccgtacccctactcccagaaagttagttgtagaggtcaagttcgccttgttctctcaaacacagttctgagtcgtgggtgacgccctgttggttagaggaatagaaaacatgttatagcaatttatcctgtagacgaggacaaaggaagcataatggtggtgcgtgaaggatgaggagagacggcttcaccacacaaccgaagaggggcgataagaaacttcctcacagccgcaaccccacgcgcggagcacgccaccaagagggggagacgcacgccacccgcgcgaggccgtcccatgcatgatgagacgtccagagaggggtatagtgcaccagatgaccccccgagagaagcgagcatgtagacaagggaaaaggatttctatttctttttacaaaaaggccacccccacaaaaca

SEQ ID NO: 593395 - DNA, 982 bp, Homo sapiens
atagtatcccacaaaggtattattgtgtctaactcatcgtgacctgcttaaaatctgtagaaccggatgatactgtcgatgtacactcgtgtatgtgcttataaagttctaacatattcagtggttgacatcattcaaagtgtatgctattgcaaaatcatataagtactatgtcccgacacgtgccaattttctaatgtgtcgcctcacgttgggcttcttaactgaggacatggctaattactggagccatcactactgagatttgatgcatttattatattattggagtctatggaccgaatctaacctgatatggataaattcatccaattcgatcgtctcatttcatatggtgatttgctttggtttgaatctgcataaaattatagtgatatatgtatagtaatagatctatgtgcagtttaatttgttagaatggtaatttctgttaaatgtttatactctgtatacatatgatagttgttaaggtgcctgtgactcatggtgtccgtgcctcgtattagtgattctgtaaattgacatgtattttatctaatttcttagaggtgttgggaagtagggagctggtgcccggtggggggttatttgtaccactgaatttttcactaaattggattcctcactaggtcttgagccgggagaaatgaacgtgcacatgcgtgggctataatcgaatttaaagcatcattgtaagacaagctgtgttgcctgccttggtaatattccccaggtggtatgaagcagaaaagcctggtatatgtaacagtgtatctaaaactggggcccaaaagaggatgccgtccacaaaatatcgtccgatggttacccacagaagccttagggtgtaactctgtcgacgcaacatggccagaacatcagaccggcgcggagccatataggcgcacacatcggcacaacacctagtgtgcatagcgtatcatatagacacgggagatct

SEQ ID NO: 593396 - DNA, 215 bp, Homo sapiens
ctgcctcagcctcacaaagggctgggattacaggcatgagtcactgcatccaacagatggatttctaatatgtcaccaaaaggagcacctttagctatgatgggtgggaaaaatatgactaaaataggtatccaaaaagacaagggaaatgctggatagaagagccattccatgaagaacccatggcagtgattttctcattccccagtgcttca

SEQ ID NO: 593397 - DNA, 185 bp, Homo sapiens
cttacctaccttttccccgcaaattctaagacagagtatgtcaattggaagttcacttatgcacgcttccctctcttaacaagcttagagtgcaagagatagaaaagttcaaatctgaccaagatgttaatgttggataagagaattctctgcaccccacctctaagtcgccagccctcctagag

SEQ ID NO: 593398 - DNA, 3110 bp, Homo sapiens
  misc_feature (2789)..(2790): n is a, c, g, or t
  misc_feature (2793)..(2793): n is a, c, g, or t
aaggtctgagcttgttacagcttatcagatgcttcagagagagaagaaaaagctacaaggtatattaagtcagagtcaggataaatcacttcggagaatagcagaattaagagaggagctccaaatggaccagcaggcaaagaaacatctgcaagaggagtttgatgcatctttagaggagaaagatcagtatatcagtgttctccaaactcaggtttctctactgaaacaacgattacgaaatggcccgatgaatgttgatgtactgaaaccacttcctcagctggaaccacaggctgaagtcttcactaaagaagagaatccagaaagtgatggagagccagtagtggaagatggaacttctgtaaaaacactggaaacactccagcaaagagtgaagcgtcaagagaacctacttaagcgttgtaaggaaacaattcagtcacataaggaacaatgtacactattaactagtgaaaaagaagctctgcaagaacaactggatgaaagacttcaagaactagaaaagataaaggaccttcatatggccgagaagactaaacttatcactcagttgcgtgatgcaaagaacttaattgaacagcttgaacaagataagggaatggtaatcgcagagacaaaacgtcagatgcatgaaaccctggaaatgaaagaagaagaaattgctcaactccgtagtcgcatcaaacagatgactacccagggagaggaattacgggaacagaaagaaaagtccgaaagagctgcttttgaggaacttgaaaaagctttgagtacagcccaaaaaacagaggaagcacggagaaaactgaaggcagaaatggatgaacaaataaaaactatcgaaaaaacaagtgaggaggaacgcatcagtcttcaacaggaattaagtcgggtgaaacaggaggttgttgatgtaatgaaaaaatcctcagaagaacaaattgctaagctacagaagcttcatgaaaaggagctggccagaaaagagcaggaactgaccaagaagcttcagacccgagaaagggaatttcaggaacaaatgaaagtagctcttgaaaagagtcaatcagaatatttgaagatcagccaagaaaaagaacagcaagaatctttggccctagaagagttagagttgcagaaaaaagcaatcctcacagaaagtgaaaataaacttcgggaccttcagcaagaagcagagacttacagaactagaattcttgaattggaaagttctttggaaaaaagcttacaagaaaacaaaaatcagtcaaaagatttggctgttcatctggaagctgaaaaaaataagcacaataaggagattacagtcatggttgaaaaacacaagacagaattggaaagccttaagcatcagcaggatgccctttggactgaaaaactccaagtcttaaagcaacaatatcagactgaaatggaaaaacttagggaaaagtgtgaacaagaaaaagaaacattgttgaaagacaaagagattatcttccaggcccacatagaagaaatgaatgaaaagactttagaaaagcttgatgtgaagcaaacagaactagaatcattatcttctgaactgtcagaagtattaaaagcccgtcacaaactagaagaggaactttctgttctgaaagatcaaacagataaaatgaagcaggaattagaggccaagatggatgaacagaaaaatcatcaccagcagcaagttgacagtatcattaaagaacacgaggtatctatccagaggactgagaaggcattaaaagatcaaattaatcaacttgagcttctcttgaaggaaagggacaagcatttgaaagagcatcaggctcatgtagaaaatttagaggcagatattaaaaggtctgaaggggaactccagcaggcatctgctaagctggacgtttttcagtcttaccagagtgccacacatgagcagacaaaagcatatgaggaacagttggcccaattgcagcagaagttgttggatttggaaacagaaagaattcttcttaccaaacaggttgctgaagttgaagcacaaaagaaagatgtttgtactgagttagatgctcacaaaatccaggtgcaggacttaatgcagcaacttgaaaaacaaaatagtgaaatggagcaaaaagtaaaatctttaacccaagtctatgagtccaaacttgaagatggtaacaaagaacaggaacagacaaagcaaatcttggtggaaaaggaaaatatgattttacaaatgagagaaggacagaagaaagaaattgagatactcacacagaaattgtcagccaaggaggacagtattcatattttgaatgaggaatatgaaaccaaatttaaaaaccaagaaaaaaagatggaaaaagttaagcagaaagcaaaggagatgcaagaaacgttaaagaaaaaattactggatcaggaagccaaacttaagaaagagcttgaaaatactgctctagagcttagtcagaaagaaaaacagtttaatgccaaaatgctggaaatggcacaggctaactcagctggaatcagtgatgcagtgtcaagactggaaacaaaacaaaaagaacaaatagaaagtcttactgaggttcatcgacgagaactcaatgatgtcatatcaatctgggaaaagaaacttaatcagcaagctgaagaacttcaggaaatacatgaaatccaattacaggaaaaagaacaagaggtagcagaactgaaacaaaagatcctcctatttgggtgtnnaanagaagagatgaacaaggaaataacatggcttgaaggaaagaacgtgttaagcaggataccaccattaacttgactttcccggaacacgttaaagcagaagtctgcccatgttgaattctcttgccacaagattgaaacttaactgaaaggtcaatcttgaaaaagattagagggttgacttgcaattagtcctctggaaggcaaatacttttccttcaaagaagcagataagttgactggaagattgctggcgaaagaagattagaggaaagggttactgaatgtgataggcagtttgaaaacaccagatttgagga

SEQ ID NO: 593399 - DNA, 412 bp, Homo sapiens
ggacgttactacgccaattccgccccccaccaacccccttctacggcctacttaacaaaaataaatagtttcctagggaacggctctaagataagaaaaataaattttcttaaattccattatgacctttttatttacatgactctaagcatataaaaaaatcggagggcggtgccaaggtgctagcatttatggtcatctaataaagcactggcgcatatgtgcaccttaggagtgtatcagtggtggcatgtaatttgggccttggttaaagccgggacctggtacgcacatgaaatttcaattttttttccaacggcggcgctatagaaaagctatggacagtatctagtaacccagggcgggggtgggaaccctggctggtgtatgtgatgtgctccggggctttgga

SEQ ID NO: 593400 - DNA, 2174 bp, Homo sapiens
  misc_feature (1853)..(1854): n is a, c, g, or t
  misc_feature (1857)..(1857): n is a, c, g, or t
catgggaggagagagatgttgacgttacttatccaacagggttgggtgcagatcaaaagaaatgaatgattcctggggaagtactttgcgaatgctgaagatttatgtgcgtttaaggtggtattaattatttttggcacaggaaaagagtcaatcagaatatttgaagatcagccaagaaaaagaacagcaagaatctttggccctagaagagttagagttgcagaaaaaagcaatcctcacagaaagtgaaaataaacttcgggaccttcagcaagaagcagagacttacagaactagaattcttgaattggaaagttctttggaaaaaagcttacaagaaaacaaaaatcagtcaaaagatttggctgttcatctggaagctgaaaaaaataagcacaataaggagattacagtcatggttgaaaaacacaagacagaattggaaagccttaagcatcagcaggatgccctttggactgaaaaactccaagtcttaaagcaacaatatcagactgaaatggaaaaacttagggaaaagtgtgaacaagaaaaagaaacattgttgaaagacaaagagattatcttccaggcccacatagaagaaatgaatgaaaagactttagaaaagcttgatgtgaagcaaacagaactagaatcattatcttctgaactgtcagaagtattaaaagcccgtcacaaactagaagaggaactttctgttctgaaagatcaaacagataaaatgaagcaggaattagaggccaagatggatgaacagaaaaatcatcaccagcagcaagttgacagtatcattaaagaacacgaggtatctatccagaggactgagaaggcattaaaagatcaaattaatcaacttgagcttctcttgaaggaaagggacaagcatttgaaagagcatcaggctcatgtagaaaatttagaggcagatattaaaaggtctgaaggggaactccagcaggcatctgctaagctggacgtttttcagtcttaccagagtgccacacatgagcagacaaaagcatatgaggaacagttggcccaattgcagcagaagttgttggatttggaaacagaaagaattcttcttaccaaacaggttgctgaagttgaagcacaaaagaaagatgtttgtactgagttagatgctcacaaaatccaggtgcaggacttaatgcagcaacttgaaaaacaaaatagtgaaatggagcaaaaagtaaaatctttaacccaagtctatgagtccaaacttgaagatggtaacaaagaacaggaacagacaaagcaaatcttggtggaaaaggaaaatatgattttacaaatgagagaaggacagaagaaagaaattgagatactcacacagaaattgtcagccaaggaggacagtattcatattttgaatgaggaatatgaaaccaaatttaaaaaccaagaaaaaaagatggaaaaagttaagcagaaagcaaaggagatgcaagaaacgttaaagaaaaaattactggatcaggaagccaaacttaagaaagagcttgaaaatactgctctagagcttagtcagaaagaaaaacagtttaatgccaaaatgctggaaatggcacaggctaactcagctggaatcagtgatgcagtgtcaagactggaaacaaaacaaaaagaacaaatagaaagtcttactgaggttcatcgacgagaactcaatgatgtcatatcaatctgggaaaagaaacttaatcagcaagctgaagaacttcaggaaatacatgaaatccaattacaggaaaaagaacaagaggtagcagaactgaaacaaaagatcctcctatttgggtgtnnaanagaagagatgaacaaggaaataacatggcttgaaggaaagaacgtgttaagcaggataccaccattaacttgactttcccggaacacgttaaagcagaagtctgcccatgttgaattctcttgccacaagattgaaacttaactgaaaggtcaatcttgaaaaagattagagggttgacttgcaattagtcctctggaaggcaaatacttttccttcaaagaagcagataagttgactggaagattgctggcgaaagaagattagaggaaagggttactgaatgtgataggcagtttgaaaacaccagatttgagga

SEQ ID NO: 593401 - DNA, 274 bp, Homo sapiens
gatagaccaagagctcctcctggtcagatatggcgcccaggtcctcatagaagaatcggccgcccacaggtttggacatcgtcatggtctgcccgtaatccttcccacggcactgaaaattggtgtccaagtcagacattggccgagagctgatccacagccctggacagctatagaagggctgtataggtgcctggggtacttccatctccaggggcccagtttttgggccacactgcctccggactgcagttgggcacactgcaattgccca

SEQ ID NO: 593402 - DNA, 310 bp, Homo sapiens
gcaggtaatggctagatcctgtacagccagtgtgggcgatgtgatgagcggccctgggtcagaaccctaccagcgccgaggtgctcaaggtcctgaataagaacaaccttgatgagatgaatgtgaaggtgctggactttgagcactttctgcccatgctgcagacagtggccaagaacaaggaccagggcacctatgaggattatgtcgaaggacttcgggtgtttgacaaggaaggaaatggcaccgtcatgggtgctgaaatccggcatgttcttgtcacactgggtgagaagatgacagaggaaga

SEQ ID NO: 593403 - DNA, 110 bp, Homo sapiens
tgcgtgtcaggatgtgtggtgatgctgctgtactcgctttgcagcgggtgctggaagagcccggcacggctgcccagctgcgggaagggtcctccatcctggacccagtg

SEQ ID NO: 593404 - DNA, 248 bp, Homo sapiens
  misc_feature (4)..(4): n is a, c, g, or t
  misc_feature (163)..(163): n is a, c, g, or t
  misc_feature (174)..(174): n is a, c, g, or t
  misc_feature (233)..(233): n is a, c, g, or t
agtnggttgccataaagatcattgatctggaagaaggctgaaggatgagatagaggacattcaacaagaaatcacagtgctgaggtcagtgtgacagtccatatggtaaccaaatattatgggatcctatctggaagggatacaaaattatgggataataatnggaatatcttnggtgggaggctccccactaggatctattaggaacctgggcccattaggatggaaacccngatcggttacttatt

SEQ ID NO: 593405 - DNA, 452 bp, Homo sapiens
cctgacgacactacctgcgcttctactcaggagattttaaccactgttaacatgtcattagaaatacactggttcctttgttcactgctatacttcctggtacctagaacagtggtgcatgtatggtagacaataaatattcattgaattttaaaatgtctgaatactttcccgatagggttattcacaactgtacttcaggaattctataacacttctgactacattagccatgctggctgtctttgagagtttctgcagtgacttacagttttcattggattaccacaggtgtctgtgatctaaaaaggtgcaaaaatactcagttattcccaggactaaacctacaaggtctttacatttctgtctctttatgactgagctccatagagaatcagacttttttttttacccagggctgtcatccatgactaatccaagtcatctatctg

SEQ ID NO: 593406 - DNA, 175 bp, Homo sapiens
gagttctgagcttgctgactgcgccacaccacagctgtgtaaccacaggtcgaaattccaccttaaatattacaatctagcagtacctcgccggccgaactgggccgcgccctgccgcatgtgggcacttcttcattaagtctattctttggcagctgacacgcgtgctgacaga

SEQ ID NO: 593407 - DNA, 1049 bp, Homo sapiens
gaatagtggccgaggcggcagatgagacggcgtaaaccgggtctgtcatagcggctgcagcgtctggagagcccgagggcaacactggccctgggccagcatcgtgtgtgcgcccccgacagagagccggggccccaagtgcccgccggaacaccatgaaaccagcatgacacgttgcttggcacaaaaagcggcatctactgaccaaattggttggacagaaggtaccacccagagaattgaagcatctaccattatcccagacaaaagggggtgaacaatcaatggaacaggagaagcctaggggacagccaggggaaaaacgacacaggggcctcgttgaaacagaggccttgagtgggacataacatgcactaagcacatcgacaatagagaaacagaccaaaggggacaattacgaggtgcccccactggcaaacaaaccgcgggaacttacgagggaacgtcccatatagcgactgcggcgcaaatggcaaacatggaacatacagacggaaacaggccacagccgaatgaggagccccaagggagaaataaccacgagggaccacaaaacaccgggaacaaacacgacagaggaacaccgaagggagacatagaacgcgacacgatgagagacccaaccaaaattaggtcccagcacagagctgggaccaaaaccacgagagaacaatagaccacccaaaggaaaacacatcagagaccggcagaaaatggacgctacggccagcaggaacagccgagagacataaacaccagagaagccaccacaaacgagcaacaaaggaaaaagacggaaagagcaaacactaaccccatgagggcataggcaccaccagagcaggtcacacaccagaagacaaacaaggagggacaataccaactaaccaaaaaagggtgcacaccgtataaccaacacaccacgaagaaagatacaacgcgcagggaaagggacagcacactgagacggacgaccacgattacaaacgcggcttactaacacgcaagaggagtaaacagctcagcca

SEQ ID NO: 593408 - DNA, 296 bp, Homo sapiens
gctttacacgggacatgctgtttacttttccagagtcgtaatctcctccgtcctttgtgcctaagaacaactatgtcagcgttatctattgtcatacgctttctcctgtctagtcttaaaagacgcagattctttcacttacgtgcaggaagaacaggaacccagccattccatgacaaacagacaggatgtgaggactactaagggttgaattgagtccacctgtgttacattgaagtcctaaccgccagtacctgtgatcatgaccctattacaaatagggctgctacagatgg

SEQ ID NO: 593409 - DNA, 332 bp, Homo sapiens
caaacttctggtaggactcaaactgacttgtcccacttggaggcccaggattgggcctgaggtaccgagcactgcacactgggggcctgggaccaagctgggtgtccagcaaggatgacgcgaatagccagtcagcatgttgctgctggcagcctgtgcctttgtcagctcttcttatacaaaggaccccagcgaaagatcgcatttcacccccaacattcggcactagagggacatcgggggcaagtatgcagtggggccgtaacaatatggtggccaccctaccatgagagtcagccgaaggggaccccagatctccttgatgcctctga

SEQ ID NO: 593410 - DNA, 997 bp, Homo sapiens
ggtgggccgattcgcgcgcccgtccgtcgccgccggcgccgagcgctagaccccatcgggtcttgctatgtcgagcttcacccgtgaatagcgtcagaggatgtgagtccgcgtcttggaccagtctcaatatgcagtttcacgcgatcgatggatggcctgacaatcgggacgtacttccactgccatcgtacgagtacaagtccgccaggatgctatcagcaacccgtccctgatcctggccgcagtcactatgattgcccggcatatagccatggcagcttgcagtggcagtgaggcagacttgcgcgtatgggccagggatatgcttgggctggtgtcatcgcagaggaccaaggaattaaaaaagtgctattagattaacactttttggtgttgttcggcagcatggaaactagtacagaagattccgggccgagtatccacagaagtagacgcaaggggtctccttgtgatcaaggatgcgatggttggcctcgagccaggcggcgttcagtcgagctctacgaaggaagctggtgatcagctaggaccggaattcttcatgaagctgtcatcaagcgtgggaaggaagttcaggctggaaccggagctcgaggagcagcactggaatccacttgggacgatgacgttacctcttcttccttcgcccaggcttgtggcctgttgccgaggcgggtgttgaccctcattcttccccataaggtcgggcgcaatccttgactggggcatgctggcaaacaatgcgacggagacgtcgtatggagcccttggaagacccttggggtacaacaggtgtcactaaggatcgacaagtagtacaaggaagttcagttacacagacagtggtcattgtgggcctctttcggaaacaggggcgagataaatgcatgggccggtggggattcctaaacattaagccaggctcggggaagcttgtgtatgaaggccacgtggtgcatgttttagcaaggga

SEQ ID NO: 593411 - DNA, 159 bp, Homo sapiens
ttcttctgacccaccccacaacaggcctggcgtgtgatgttccccattccatgtgtccatgtgttctcattgttcaggtcccacctaccgttttgccacataggtgatgaaaggggaggacaagggcacaggatgaccctagcctctagattggctcca

SEQ ID NO: 593412 - DNA, 113 bp, Homo sapiens
aaaaactctacctctctatactaatctgcacttatgactccctaaagccatgtcgaagccccgatcgctcggggaatagtactttccgcagtactcttgaaactaggcgctat

SEQ ID NO: 593413 - DNA, 1268 bp, Homo sapiens
  misc_feature (625)..(625): n is a, c, g, or t
  misc_feature (658)..(658): n is a, c, g, or t
ctgaactataggcatcacatttactgcgtcatctggatatagcactactatgagagcacaaatgtgctactaaatgatctgtgctaattatcacattgcatgggagctcgtaacatgcagcctaatctacttgattgataaccagtcatatccttgcagcagctgagtgtctgtataatgtccaccattggccagcatattatactcacagtacggtactattacaaagatgactctacagtttacactgaatatgaacatgcagaagtatatgcatgtataatatatgttgtatacagcttttgctagaaatgatagttatggcattagcttttattcatctagaggtgacattagccagcttatactaaacattagctatcgcatatctaagcataaacggagccatgaaatttattcgagactgcaaaccttgttgcataaggtaagtaaacatgtggacctatataccttaatgcattctttatttgaaaggcattgaaatagagagctctctcagtgaaagcaaagaatctctgtattttagaacactctacttctcgcaaacagggttgagataattgccatgtgaaagaggcattctatgtagaatggcctgtagtangtaatggtaactagctgctaataccataggatnataaactttatttttaacactttctggcagagcttttctggatctctttgaactaaagcattaatgcattcagttcttaacttgaagatggacttttaatagaagaatggtaactgtggaacacttgcagaagagtggagtcacagttctaaaccatccttttagagtacctatgccttatggaggtgtaaggcttgcctaaagttcataaagtcccaaacttaattttaaagattccccgggattcccatttacattttctgaaccggtaaatcttcccttaatccagtctcgcggaatttaacgtggcctccgtttgctcacttggcaactgctcggcctattttcacgcctactctcgccgctcttctcctctcctaacctcccccttccccctctattcttccacgcgtccctactcccctctctccacttgtctcataccctcctgccacttctcaccgtgccccgccactggcatcctaactctgccgaacacatctaacatctttcctcttcccatcctcctctcccgcctgttcctctccactccacttctcgtcaccgtcgtcctcctcctcgcgctctctcgatcacccttcatccttcc

SEQ ID NO: 593414 - DNA, 419 bp, Homo sapiens
  misc_feature (166)..(166): n is a, c, g, or t
  misc_feature (259)..(259): n is a, c, g, or t
catggtgtccaggaatgtgatggacaagcatattgtgagtgagctgaaaagttaggatattgtgaactcaaaccatggacggatcacatcccaagagagcgacagctcagggagagggagagggtgcctggtaggctgaggggtggaacacacttttccatcagcncaaggtaacgcaggcacaggcagcctgtttactgtgtgtgtgtgtttggaaactgtgacctggctgcctggaatgctctttgctgcttacagntcccccaaatcccgtctcccgctggggccaatgcttaactcacccgagggctgcactccagacttcgcagagcagcttcttgggcattagcttatcgtttaatccccagcacaacccagggagtatttcctctttatttttttgatacggagtctcgctc

SEQ ID NO: 593415 - DNA, 173 bp, Homo sapiens
gtctagaggaccgtgcatcctcgacaggagattgagtagatagaacgactggattactcggtctgaactcagatagtagactttatcgttgacaaacgaactttataaggtgtgccatgggatgtccggatccaacatcgagtcgtaaccctattgttgatatggactctaga

SEQ ID NO: 593416 - DNA, 120 bp, Homo sapiens
atttatagtagcaaaaaacctaaattctataagattgcattaaaggaaagatatattctattttgctcacttgggcttcctgggacttcaactgccctccaggggttactttagggccgg

SEQ ID NO: 593417 - DNA, 254 bp, Homo sapiens
ccctgcccccctttcctaaggattgctgcaaaagttacctgttgagcaggattgactggggatgtttcattttgaccttgtcccaagctctccatctttagatttggggactgactgttgagctgatggggaaaaaaaagctttcccccaaaccggaagccaaatgtcccctatttcttgaatgatcaagtcccttttggcaacatccaggtgaatataaaaacttaataaagctgtggaaagggaaaaaaaaa

SEQ ID NO: 593418 - DNA, 448 bp, Homo sapiens
aggagttcgagaccagcctgggcaacacagggagactctgtctctacaaaaaataaaaataaaaaattaccctggtgtggtggcacacgcctattttcccagctacttgggaggccaaggtgggaggatcgcttgagcctgggagatcaaggctgcagtgagccataatgacttactccagcctaggcaacaaagcaagactctgtatattaaaaaaattgtacacacacacacacaaatggccagaaaaacaccgtgaaaaggtgctcaacatcattagtcggtgttaagtacaaatcaaaacctcaatgaaatagcacttcacacccactgggattgttgtaattaaaacaaaaaaagtcttggtgaggatgtgggaagattgcaacctatgcattgccagtaggaatgtaaatggtgcacttctttggaaaacagtttgggaatt

SEQ ID NO: 593419 - DNA, 1260 bp, Homo sapiens
ggtccagctgagacggccttggccgtactctagcagctcaggtcctgctgtacatcactgaatatagcaagagcaccatccagagaaaggatctagttccatcgggattgtgcccactcatcacgagcatcatgatgaacgagggcattcaggagacatagcagcctgaaagcggaaagaggggacatgtgcagtattcacggaaggtgcatgtgtgctacatggcgtgaataccgcaaccatgtgtggctattgccaatgcgatcagagctcagccatgcgcgacccgttcgcctgatcaccaacggtcacaggtacgtcttccgaaatctagacgaatggggagccaggtgattgtacagggtgactccagcgtgttctgacggtggtcagcttggattgtgccaacacttgagggacacgtgagcggacgcattcacgtgtgcatacaccctggcacttcgaagtccgatggaccactacgaggcggtgaatccaagaggtgactttcaaccgaggtagatgattgcatgttgttataacgcgagggagtacaagcgtggctgagtacagcaccttagtaccttagcgttccgccaagcaacaggcaagatgggggacggatcgggcgcagtggggatacgcacgatcgggggaagataccgaatgcttagcgtcgtctcgtttaagttacacacaatgtgggcttcacggagagcacatagcttgaggaggtcaagagcagaacccacgttccatcgtgcaacgtgggtcgaagtgtcgtcttagtgagtggattgttccaccacaacaggacagtacttgcaggggcagcgaatagcgcaggcgactgtcactttgctccactaagagaacttcaaccctttaatttgcctcgaaaggtccagaaaagcttcaccccggaaacgaactccgggccattgaagaaacgccaggggttcaactattaatggcagttggaacgtcgaacgtgcatgtaaaagatcaacaacacatgggaatcataggcaggttctccccaacataagatccccagactggcatccaacgggagaaagaaaccaaggctatggcaccaggcgataaggcgtgagagactttcacaaagcatcgaaggatctaatatcacagagaagattagaaatagaatacaccccctgatctagtaacatgtggggcctattaaccacctcggttggaaagagttgattgaagcactggtagaattatctaaacaaa

SEQ ID NO: 593420 - DNA, 127 bp, Homo sapiens
cctcgtgttggcggccggctgaggagttcctgacccagagctcagcccttctacttctttatgaatggtgaccgcatcgactccctgctggggaacgaccggcagcagacgcacatgctgtacggca

SEQ ID NO: 593421 - DNA, 1733 bp, Homo sapiens
  misc_feature (1)..(1): n is a, c, g, or t
nagtatgtgcctctcccgctgttgtgccgtcctggttttctttcttttgttgttatgttagctttcacgccacgtgcggccctttttgtgtgatgtaaaatatagataggatgggatctggcatctgttctgcctggctttttgtgtgtctcatggagatacgtgtgtgtttgtgaaccaccacacccagagggtggttgcttcattgagacgcccgcccctagagagggtccgcccaacttcttttggggtggtgtgcgtccctcctgccgcccgcactatgtagatgcgacgcaggtgcttggtttttattctgttttgatgtaataagctgccagctgtgtggcgtcttgtctgtgtaagtaatgacagcgttgtagggggaggatgctaccgcaccctccctaatcactaacgaagacagggaagtggtcgatctcgtcagagaggagcaggctctctcctgcattggcgttgatggttcgatgcacagcactacattatatgccgccactcccattaatagtgaggccatggatggatgtaatggtgatagtgaaagtcttcctctccttggtgatggagggtgtgcaccttctctggttgttggtttgtgggtgagccaccccccgcgagaggttcctccggcaagtatgctaatatgtaggaagtagtagggggatctttttgtctcgagttcgtgaagcaacaacagaaaatgatgggggtgttggatacataccagagttggtgcgatcctccatccaatccatcctggcagtaattagatgtatggtagcacccaccatacccctcacttctgtgtgtgagctaccttccttttgtccagtagtgctctccatcagcatgtagtatagttgtgtatgacaacaaccacgccgggttgtcgacaaccaacaacaaccacctgttgtggggttgtggcgaggagaagacaacaacacaagagtgagagagtctgctccacagctactgcttgtggtggtggggtggagatgttgtggagacacaacacaacacaacaaccgttgtgggatgtgtcgcacttctgttcggagcagacttgctggggtgtggtgttgtcttgatgtagtctggtcccctctgcgcccctcgtgtgtgatgtcgcgtgattatatagtttggtgagagatgtccaccctcgtgatgtctgcgcgactgtgagttgcaacacaggggagataaagggcaacacagagactgctgggaagactctgtgtgagagtggcacacacactagagatatagagctcatcgagcaacgccaacacatcggtttgcgcgctcgtggcacaacacacacgcggtggagaactctcgcggataagacacacacagggcgcgctctgtggcgctatagactcttgtggttggtaagacctctatctcacgcgaagaccacacttgtgatacacactggtgcaccagaaatatcgcagtgtagaaatctcgccacgcgtcacacatgtgggagtgtgacacagaggtccatgggggtctcttatagagtcttgttgggcgtctggtattctcccacagagcgtctgaataagagcacacaaggaggcggtataagagaaacactgtgcaccacgttaacgtgtgggttctaaatgtgaccactgtgtgtagatttgtcttggtacacatataaaagttagttgaaagtaataccaaaggttccggccagc

SEQ ID NO: 593422 - DNA, 230 bp, Homo sapiens
tgtaaatacagctggtgataacagctttgaaggaagtaagctgttgtgatggaaagagggaaaggcccactttaggttggttggactggaaaggcatctctgaagaggtggaatttgaacagagatttaaaggatgaaaaaggaacagtcatacgaggattttgagaaagagcatccggatagtggcataattgctgtgagccaccgcacctggctttatcgttctttaa

SEQ ID NO: 593423 - DNA, 514 bp, Homo sapiens
ggacctgcatactgggcgtatgggggcaggatggaagacagtgtgtggcacagaaattcctgtccatccaccatcagtgctgctcgctgatgtggtgctttaggtgtgagtggtcccgaaccttggcccagtgctttgtcccaggccagagtcttggtaatgccacatgctggcaggtttctcactgagaaggtcctagcttatccttgtgtgctggccttggattcaggccccgtgagaggggagagaccgattcctcctgtggagtgggttccttatcaccagaccggccactctcagaactggcgtccactgtaaatccaggtgccttacgtgtggctctgtcccttatgctgcaggggaaagctgcattgccattgttcccacctcctcactggcagaaagatgccagggctgttagcactgtctcctcaccttctgtttctcattgtggctcctcaaatgggatttgcatgttcctgtcaagcgtaacaacaatcccttctctctttga

SEQ ID NO: 593424 - DNA, 133 bp, Homo sapiens
tatgagttgtgggactgacccattccatgtgcagtgagggctggagcctctgttctgctgtggctgagctcccagagtctgaggaggagcgcagttgcctcgctacagacacacaccagccctcctgggccag

SEQ ID NO: 593425 - DNA, 1043 bp, Homo sapiens
tttttaataaggggacccaatgcaacctttttaattcaaaggagagtccccctcccccagattagggtcccaaacacgggggaaagggatggcagggtggggggaggagcaaaacccaaaatcggggcaaaaaatatggatacttacttatattacaccgggtgtcgcgtgaacagcaagctcaagcggggcgggagtaaggatagggcctaggaggcgaggttgaggaaagccagcggggggggccccaataaattaacctttcttgagaaaacgcataggggtggtgggggggtgcgtggtgatgataggtagaaagctggctagccaggggccacctccccaaaatggtgccaggccgttggctcttgtgacccccattaccagagggagggggggaagggccacagatattcggaccgcggggtgaccgggccatatagggcgcgtgggaatccccacaattcatcggagggccgctggaggcacaggtggtgagggagactccggagatcgcggagtgttaggcgggggagattcttccaacgcacataacgaacccacaggtacttttctggggagaacaccgcaaggggctgtggaaaccacaaaacgggtctgagagcaaagcccctccgggggttatgagcagaacgcggacgaggtttcaggggcaacgacgatgcaagtgtgtgaggggtggaacccaacccccgggcgagagagctccgaaccacggggagccgtgtgttcccccaatataaaaaggtcacgaagcgaaacccggagagtctgcaacgatgcaccgagacaaacgcttgtcacacaggaataggacacattggcgacaagcgccgttggggtgtgggcagaaccaacacacagatcgtgtgaaaagactctgtggccatacatcatattagaagaaagcacccgaggatcattggtaacccaaaaaagggggggcaccactcaacacagcctcactatagagaaccccaggagcccagcacagtgggtaaatgaacaggttccacaatcga

SEQ ID NO: 593426 - DNA, 779 bp, Homo sapiens
  misc_feature (193)..(193): n is a, c, g, or t
  misc_feature (450)..(450): n is a, c, g, or t
  misc_feature (457)..(457): n is a, c, g, or t
  misc_feature (460)..(460): n is a, c, g, or t
  misc_feature (464)..(464): n is a, c, g, or t
  misc_feature (470)..(470): n is a, c, g, or t
  misc_feature (472)..(472): n is a, c, g, or t
  misc_feature (480)..(480): n is a, c, g, or t
  misc_feature (486)..(486): n is a, c, g, or t
  misc_feature (498)..(498): n is a, c, g, or t
  misc_feature (500)..(500): n is a, c, g, or t
  misc_feature (545)..(546): n is a, c, g, or t
  misc_feature (549)..(549): n is a, c, g, or t
  misc_feature (560)..(560): n is a, c, g, or t
  misc_feature (564)..(564): n is a, c, g, or t
  misc_feature (567)..(567): n is a, c, g, or t
  misc_feature (597)..(597): n is a, c, g, or t
ggcgcggcccaggactcacttggcgctgagaacgcgggtccacgcgtgtgatcgtccgtgcgtctagcctttgcccacgcagctttcagtcatggcctccggtaacgcgcgcatcggaaagccagcccctgacttcaaggccacagcgagtggttgatggcgccttcaaagaggtgaagactgtcggactacnaagggaagtacgtggtcctctttttctaccctctggacttcacttttgtgtgccccaccgagatcatcgcgtcaacgaaccgtggcaagaggactttcgcaaggctgggctgtgaagtgctgggcgtctcggtggactctcagttcacccacctggcttggatcaacaccccccggaaagagggaggcttgggccccctgaacatccccctgcttgctgatctgaccagacgcttgtctgaggattacggcgtgctngaaaacnagntganggcatngnctacgggngcctcnatatcatcgatngncaaggtgtccttcgcgagatcactgttatgatttgcctgtggganngcnccgtggatgangccntgnggttggccaggccttcagtacacagacgancatagtggaaagtttggcgccgcgtgagctggagagccttggcagatgacacgattaaggcccagttgtggtctgacccggctagggcattatttctcgcagacagcagtcagggtgggtaaccggatagtgcggcttgtgcccttgcctatgttcctgtggctgggtgtccccctggtccc

SEQ ID NO: 593427 - DNA, 1001 bp, Homo sapiens
  misc_feature (265)..(265): n is a, c, g, or t
  misc_feature (486)..(486): n is a, c, g, or t
ggacctagaatgcgctcgacggtctgtggccacacagcccctgtgctaaacatcgtctggtgcccgcacattggacaacgtcatttggcctattggctccttaggacatgcgatcagttcgatggatgtgggagatcccgcgtatgggtggcctgattgctgcttcctgcggtaagctcccgtccggtcaccgctgagagggccgacacctagccgctgtgtcgtggctatttgtcgtcctttaggcgtcttcccactatgcccnagaagcgttgcttgctcctagtcgcagagtcgcttggctgagtcagtgcaagaggggcttctgggcgggtgcgcctcggtcgttcgtggtcgttgtgttccgggctgcgcggctcttggcgttcttgactctgtgggcggttgagtagtggaggttgctgggcaactgttgatcactggtgtgtggactgttgtggtctctggtggccggtcatgtcatgnacttgctgggcccagaagtgatgggacactgatgaaatgcctgtattctaccagtgatggaagctgtgcacgcccgacgtactgtgaggtgctcactttgttcccctgctgtccgctgacgggctgccgctgctgccatgagtccggacgcccctgggaagggggcactggtacggtcgtcgtagtacgagggggatccggtacccccatcccatggggggaacccggccactgctggtggttgcaggttgtttcgctggctcaggaatgtggcgaacccacttcgtagcatcctgttcgcgctttctcggctcccgccattgaacgcttgatccgtgcgaagtgattgtgcgcgtagtcgagggactcccaccgtgacgtttcgctagggggccattcgtagagtcctacggggccccctctgtgctggtcctccttccagttgtctcgttcctgtcccttgcctctttcgcttcacgttggcccatgattggcgtcctgctccagtttgcccg

SEQ ID NO: 593428 - DNA, 140 bp, Homo sapiens
tgctgcgtgactctaaggatcccccaatgataatcgctgtctgacatttaccctgcgcgataacgcccgctggtccgacggaacgccggtaacggcggaggatttcgtctatagctggcggcggctggttgatcctaaaa

SEQ ID NO: 593429 - DNA, 646 bp, Homo sapiens
agcggcgcgggcggtgagagtgcccggcggtccatgcatccgctcgccgcccggcgccgcgatggatttcagtcagaacagcctgttcggttacatggaggacctgctggagctcaccatcatcgagaggccggtccgccagtgagtcctcatatgactaccggcaagaaatatgaaacgatttgacagtccgatgaacgacctcagtgactattgaaacgggcttgtttatctgtctcagtgctgtgtcaagatgtccaaaggaacaagtagtcattgcaatatctccgcattttgtgatgcgacgagaatcccactggagacgcttcggagagtgttgccaaaaggtcacgaacatcatgccatgtttcaaatggaattaggcccacgatagtaccaggttatatgttaaacgtttccaaatttcctgtgatactatagctgacctactagcttgtcatgcatgacacctgtgacagtgccatgttaaacaatatgcagacaatggaatcaggcaggcactgttcgaagcactgggaacaatagaagtgaacaaaagatgggggacttgccctcaaggcatgaggctacagtccagatggagaaagcagacattacacaagtaatccctcctcacccaagtaag

SEQ ID NO: 593430 - DNA, 260 bp, Homo sapiens
gagcggaccccgcagtgaggctggatctggtgacatctgtcacattcattcccatgcggtggcgaactttctgtcgcagctggtgtgatctggcatggacgccgtggtctgtgtttcttgccttcttgcagacgatatttcctagctgcaggaccgatgataccaccttcgctatggatcgctgctcctcctcgctgaaaaccattattgccatggcctccacagtttcctggaacatctcatcatcctgggccagctgg

SEQ ID NO: 593431 - DNA, 461 bp, Homo sapiens
gctgcatgtctgatctcttgaggatcccccatgctgcaccgagggtcaaacacccagcctgagtcgacgcaagctttctcgcggtagcggcaagctttgcgttggcgggcgtgtcggctgatcgactgttcatgacctggccccgaccagagcccggttcgggctgcgtcctcggtcgctgaatacatggggctctacacgccccagaccctggaaaatctcagcactgacgccgactcccatatcgcccaactcagttcggtcgggagccaagtcgggctgccgttgagcccggatgcagtgcacctgcccggtgccgaatttcgccgggcacaaatccttgattatgacggggtaatgatcggccaactgacttatctcgacgcgcggaacggccccgtggcgctgtgcattacggcggcgaaaaaaggtgcggtgcgcatggccaccagaacagggcc

SEQ ID NO: 593432 - DNA, 409 bp, Homo sapiens
  misc_feature (188)..(188): n is a, c, g, or t
  misc_feature (203)..(203): n is a, c, g, or t
  misc_feature (209)..(209): n is a, c, g, or t
  misc_feature (212)..(212): n is a, c, g, or t
  misc_feature (224)..(224): n is a, c, g, or t
  misc_feature (231)..(231): n is a, c, g, or t
ttaacccctcattgttattatgattgatttcttccaccagactttgaactccatgagggcgctaatgtctttctatgcccccagaaccaagcatggtacctgacagattaggccactgagaaaaaatggacactttctttcgatttatctatttcgtcttttgagagcatctttccataacgaaatantctgacatctctgcnaacagntgncaatctgacatncaccggntatttatattctttgtaaaaaagagactgggtgtgggtgtcacgcctgtaatcccagcgctattggagccgagggcggaggatcgcttgaacccaggagtttgagatcactatattattttaatacagtgggacctcgtcgctacaataataataataataagaataagaataagaat

SEQ ID NO: 593433 - DNA, 244 bp, Homo sapiens
  misc_feature (184)..(184): n is a, c, g, or t
ggcacgagccgagtagctgagactacaggcacctgccaccatacccagctaagttatgtatttttagtagagatggagtttcaccatgttggccaggctggtctcaaactcctgacctcaggtgatccacctgcctcagcctcccaaagtgctgggattacaggcatgagtcattgctcccagncattagaaagattgttaatcctatggaactccctttttgtaggagagaaagggccaatct

SEQ ID NO: 593434 - DNA, 813 bp, Homo sapiens
  misc_feature (303)..(303): n is a, c, g, or t
ggactctcttcacccttcggcgtggttgcggacccccaccccctggctattccgccgcaccgccgcttcgcgcacggtacccaggccgctgaggacgactctccctgcggtgcaccccacggggtgtctgaaggaccccccacccgttggtggggcacccccacgctaggacgtcacttttttgccttctatttgtttagccttatatacggacaaacagtgcgcagagtactattgtgtcgcagactctttttcttcgctataaatacattgggcttgtgcgttgaagtaggattcaaacangtcaatacagcgagtcctattttttccctccctacctgtcgcacataaaacaatgtgggtctctatacccacaaacacccttcaaactgcaccccgctcccataataccccccactctattcgccagatacccccttcacttaggatcggaacatctgtgtagagagttgcggccagccctttctcccaccactccccatatgaaacagtctgttttatacaggcatttctcctctctcctttcggctcatgatgtttcccacccctcctctcacccttctgacgaagcatgcccgctccacgacccttgtcttatggctccctccacttcttcatcccatcaacacggtgccacacatctcttgatgtttatatgtcattattgtctttgagaaccacacttcagagcaggggtctcctctttaaaagcccacatgatatttagtccgctttttcccctagagcccgccactaaaatcaacaattacttccccccactaatcaaaacgc

SEQ ID NO: 593435 - DNA, 166 bp, Homo sapiens
tgctaggattacaggtgtgagccaccacatctagccaggaatatttatgttctacctgctgtaagaaaagcctacccaaaagtcaattctgtatgtcaattaatttttttgttgatggagagggagtagtttcaaggaaaagtgaattcagcagattctttactga

SEQ ID NO: 593436 - DNA, 375 bp, Homo sapiens
taaaagaagggcttctcttccgcttgcttggtgggattgcatgctggctttcctggaagtcacttgataacaaccgttaatgataacttaaaaaagaaatggactcagtaaatttgccataggaatgattccacagaaatcacaagccgggcgtggtggctcatgcctgtaatcccagcattttgggaggcccgaggcgggtggatcacctgaggtcgggagttcggagaccagcctgaccaacatggagaaactccatctctactaaaaatacaaaattagctgggtgtggtggcgcatgctgtaatcccagctacttgggaaggctgaggcaggagaatcacttgaacccgggaggcggaggttgctgtgagc

SEQ ID NO: 593437 - DNA, 184 bp, Homo sapiens
ttgctattcgtgcaagttgactcctatgaggaatcaccgccaagggtggcgtggatcatgaggtcaggagttcgagatgaggctggccaatatggtaaaaccctgtctctactaaaaatacaaaaaattggccgggcatgccggcacgtgcctgtagtcccaggctgcgtcgggagggcttggg

SEQ ID NO: 593438 - DNA, 354 bp, Homo sapiens
aggcaaggatgaatagatgaaacatagaagatttttaaaggagtgtaactattctatatgatactgtcatggtggctatatgtacataaatacattagacatttgtcaaaactcatagaatgtataataccaagagcaaactctaatgtaaactacggactttggataataatgatacatcagtgtaggttcattgattgtagcaaatgcaccactctggtatgggatgttgatagtggggaggccatatgtgtaggggtagggggtgtgtgggaactgtctgtactttcatctcaatttagctgtgaatctaaaaaagctctaaaaaaataaaatccattttttaaaaaccta

SEQ ID NO: 593439 - DNA, 235 bp, Homo sapiens
gtggggctcagcagattgacgccattcaaactgcctgctgctaccggggaactgctgagaataaaattagccatctcgtgctgggcgcagtggctcatgtaaattagcatgtactacgatctaataaaaattttccaaagctaactgaatgtcagaatattacccagtgtattgattctccaggggtggggctcagcagattctgacgccaattcaaactgcctggagtgtcgag

SEQ ID NO: 593440 - DNA, 322 bp, Homo sapiens
cgtcgactgaatgtggctgcccttgcatttggaatcacataagagttttgccagtggtggtggcccacgcctataatcccagcatgtagacagccccacctgccacaacaagatcaaagatcttctccatcaacgatatagttctgggaaagtccctaaatgtgctaaccttgcctattggctgctctagttttgctctggcttgagtgttcttgctatcctgtcaatctaggatgtggattttgtgattaaaagctcaccctgatggaattgcaaataggtcccaaacagcctggccaggtaatgaagactttgtcgacgc

SEQ ID NO: 593441 - DNA, 504 bp, Homo sapiens
aagtaggtaggtcagcccgagggtatgccctggttcacaccatatggaatttcctagtcccttacagcatgaaagatgtggcgtatatctcagaattaaaacacaaaaaggataacaaattaggcttgagttctccaccagccagtgtgtgcaaggatttccgggacacgattctcacggacaactactgagaattatcacaaagaggacaggtcactcgtgtgacgaatgcgtctacttcaaaggagccaggaagaattaagaggtgaggtgaaagatgggtcccccaggctcgtacaccaggcacagaatgcttgcctgctgactctggagtctgctccaccaagtatcgggcaaaggcctgctccatcttcactgtgataagatcactgtggagtatggctggagccatggctcctcttcccagcaaattccagtttaacctggaacttcggtaccaactcagtataaggggcaccgaggctcgaattcggaactccatgg

SEQ ID NO: 593442 - DNA, 307 bp, Homo sapiens
aggatcctctagctcccaacaagatgagctgcagcccccctagagagagctctgcactgtcaccaatgtaaccaggcccagcctccaggccccaactccgccagcctctccccgctctggatcctgcactccaacactcgaactctgctgctcatggggaagaacagaatttgctcctgcatgcacctaatttcaataaaactgtcttgttggggagcttgctcccaacaaggatcaaccaaacaacttcccatataatctctctatgcctgtttcctacatagtaataaaattgggatgtaaccag

SEQ ID NO: 593443 - DNA, 261 bp, Homo sapiens
cggactaacctcaccctaggcccctgtgccaagtttgtctgccgcaccagccacatcctcaatgggcaggtctttgcctcctctggccggctccttgctgctcctgtcatagtgagcttgtgccgtccccctaggatggggggcatggccctggctgccaaatgcccacagcaccctggcatgacctgccacctctgcttccacaccggagccagctacctttcctgtgcctgccactcaataaacagtgtttgcgcccca

SEQ ID NO: 593444 - DNA, 111 bp, Homo sapiens
  misc_feature (104)..(104): n is a, c, g, or t
agagacacagtatcagactcaggacttcaggagcccttacttggttttgatcaggtgtagcaaattagggatgaagagttcaaacctttgggccctttctttcnttttcat

SEQ ID NO: 593445 - DNA, 294 bp, Homo sapiens
gcggggcttggacgggattgtggcggtcctcctcccaattcggaagctacgctacctccggacgctctcaagatggcgacctcctgggttccaacacctacacaggcagaactgggaggatgcggacttcccattctgtgccagacatgtcttggagaaaacccatattcgaatgaccaaagaaaagtatggaaggaatgcaaatctgtgccaggccattcacagtgtttcgctggtgcctggagtccgcatgggtttcaagaagactgaagtgtgccaaacctgcagtaaatt

SEQ ID NO: 593446 - DNA, 196 bp, Homo sapiens
gcggtggaataagcactgattactacgtgaaaactgatgggtaccatagctgacaagtagaatactttgagatgggtgtgtcgatggctgatgtgatacttcagttcttatcttctttttcctttttttttgagacagagtctcatgaccagactggagtgcagtgatgcaatcttggctaggctcactagcagcc

SEQ ID NO: 593447 - DNA, 957 bp, Homo sapiens
  misc_feature (1)..(1): n is a, c, g, or t
  misc_feature (372)..(372): n is a, c, g, or t
  misc_feature (742)..(742): n is a, c, g, or t
ntatgtggtggtccccccccctggtggtgctgactgtgagtacacactggttgccgcctttttgaggagtagtgatatggtgtgggggttgttcccccccccctccgtgttgtggggcgagggtgttccgcctctctgtgttgttgttgggggcgccgctcatagaccacccacaccacagggcgcgtcttgtgttgtgtttttgctgcacaccacaccccctcttctcccgcctcccgtcaacgttttgccctcgtgggtgttcgccacactgtgtgtcgctctatgaggcccgctctcgcgcccgcctgcggcgacgtctctctgtgtgaggagacgacagacgcttctgctcttagatgagagagacgncacacagtggggcgcccccaccacctgtgtgtgtctctcacacaccccctctgagagagatatatttgtgtgggagagacacacacgtgttctcacacacgcgccacgcagagagatctctctctgtgagacacatgtgtgtctctctctctcttgagatatctctctgtgtctcacacactctctcacgtgtctctatttgtctgtatgttctctctctctctgtctgtgtgcccctgctggggcgtctctctgtggaaagatatctctgtgtgtgtgtgtttatcacacccccgcagcgccctcagagagagagtgtgcacaccccgctgtttgtatacacacagctgtgtgagagagaatgtatgtnttctttttttggcccctcggcgcactctcttcgcggagaactctgagtggcgcatctcctcggagaaggggttaatattccctcttttgtggaggttttggtgggggagaagggagagaggggatataagaggtggtttttaaaaaaaaaagggaaaaaagcaaaaatttaaaaaaaaaatgacccccaaattaatttatggggaatttttttta

SEQ ID NO: 593448 - DNA, 810 bp, Homo sapiens
gctgcggcggtggcgggcgggcggcggcgcgtgagacgcgcgatccccggtgtcttgggagcagtgccccgtgccccgccgctcccgccgccgccatgtcgggccggtcggtccgggcggagacccgtatccgggccaaggacgacatcaagaaggtgatggcggccatcgggaaagtgcggaaatgggagaagaagtgggtgacctgtgggtgacacgtccctgaggactatctaagtgggttcctgtgacagacagcaaggagaaagaaaggtcaaaatcgaacagttcagcagcccgagaacctaatggttttccttctgatgcctcagccaattcctctctccttcgttgaattccagggacgaaaacaagcaaccagagttccgtgtctgacggtctatcagcttagaggtggacgggggaggcaccagactcaatgccccagcccccagcagatgtgagtccctgagcccagtacacacctccgacttccggcacggattgactcccagcccccaatgctgggccaggagatcctggaggagccctccctggcctcctcggaaggttgctgatgaaccttccttaccctcacccagggaaagaaccatgttccatctagaagacaccaggtccgttgagtgacgaggaacgactcaggtgccccggccctgaaggcgcttctgtgttggaccaaccaaaagtggccgaaaacggggtcagaaaagttgcaccatccgggcctccgccttctggcctggcgccataatggatctggttctggcggcccagtctgggtaggcagcc

SEQ ID NO: 593449 - DNA, 174 bp, Homo sapiens
agtgaagatcacggtgtcagtggggttggcttccttagaaggcaactctccttggttggtcagtggcatcttctccatgtgtcttcacatggtcttccctatgtgtctgcatcctcatctcctcttcttataagaccactggtcttactggattaggagaccgcgtcaacctcg

SEQ ID NO: 593450 - DNA, 693 bp, Homo sapiens
caggaacacttgagcttctcatgttcaatgtgaataaaccgtcaaatcattctctgtgcagttatttcatgagaattcagcgaaattatgctgtagtgagggtctcatccttattaaacagttaagggaagtagctgacaatctcaccaaagctctatacaattgcagatgagttaattctctaaaagttgactgaggtgctaccgctataaaaaaagaaatggaggcaagacagatatgatcaagagatggtcatattgatgaaacagtatgtcttaaattttgctatgctccgaaatagggaaagttaagagctaccttaaattagaaataactaagtgaacaggtgcctcaggtacatttagtggagcgatgtgtagcagtcgctttcgtcaagtttcgttcccacattattgttcattcccaaatttctcaactctaaaagaatcaactttaaagatagctataattgatcacatccatatcaaatactaataattactttggtccatgtcccctcactcccagattttaacctatataccaggtgcacctatgtgtctcctcattttgagttcaggctcattgaattttaaagaacacttcagaactcagataggcagtaagtttataaaaggccaccttgtctggctcaatatatagaaattttcttctcgctggatactggggatc

SEQ ID NO: 593451 - DNA, 197 bp, Homo sapiens
atccccctccatagtgtgtgcccagactcaagagcagagacttgaccatagctcactgcagccttgaccgcctgggctcaagtgatggtcttgcctcagccttctgaggagctgggatgactggtttgtgccaccattcctggctaatttttaactttttttaaaatttttatttttgtaaaaacagggtcttgctc

SEQ ID NO: 593452 - DNA, 131 bp, Homo sapiens
  misc_feature (91)..(91): n is a, c, g, or t
gacagacggcggcgacggcggcgggaggcgggacactccccccctccggcgactggaggcgggacacctccccggcggcctcgtgtcgcgnccgctctctccccgcgctgaggctgcggaccgtttttttt

SEQ ID NO: 593453 - DNA, 159 bp, Homo sapiens
gacccagcagttatacagactcagcagatcgcgtagtgtctggctgcatggttaattagagactagaaatttgcccctggatagtgcacacacctctatgctagcctcacgaaagtggtaatacgccttcgaaaagaaattgtcctttgaggcttgtat

SEQ ID NO: 593454 - DNA, 367 bp, Homo sapiens
  misc_feature (71)..(75): n is a, c, g, or t
  misc_feature (80)..(81): n is a, c, g, or t
cttatctattcatttcactcaatttcactgccatatttcaagtcatcagtagtctatgtaactgtcttgtnnnnncatannctgtaaaactgaatttattttcacctgaagacttacactctccttatatctgtccattaaaatatcaactcttccagtccatctgaaatagaatgaagtcatctttgacctttgctggttcctttgcacccacatagcttgcattctccccacatctagaataaacttcctccccaccactcaccaactgtgaattactgtcacattggttttcttgaggtttcctgaatatatcacatttctacccaagccagtgcctttgcatacactgtttgctctgcaacga

SEQ ID NO: 593455 - DNA, 461 bp, Homo sapiens
gggtgatctagaggatctcctagtctgatcgttaaaggtgctggttttagttaatctcttcagggatgggagggcctggaagaaaaagatctagctatgttagtagagattcttcacagacgcagattttcccacacaaaggatggcttgcagtgccatttcaagatatggcagaaaaacgtgtttgggggtaaaatatgtggattttcttccttgtgtggtagtgttatgccagagtcagatgggaaagtaagtcacgatatatagaattaaataaaacccatctgatgagaatgtatagttggtagggcacaactctccagaccccttagacaggaattggggcaagattaaaaaatagagcttagtcctctcctcaaaaggacagacacaagagttttgggccttaaagaggagctagagagagagagatcagagtagaaagtctcccacagaaataa

SEQ ID NO: 593456 - DNA, 176 bp, Homo sapiens
gtcactgtcagcgacagacccctcggggtgtccatcacaaaagccgaggtagcccctgaagaagatgaaaggaaaagaggcgacgagaaagaaataagagttgcagctgcaaagtgccgaaacaagaagaaggagaagacggagttcccttcagaaagagtctgagaagcttgaaa

SEQ ID NO: 593457 - DNA, 712 bp, Homo sapiens
tcacccaggctggagctcggctcactgcaacctttgcctccggggttcaagcgattctcctgcctcagcctcctaagtatctgagattacaggcatctgccaacatgcccggctagttttttgtatttttagtagagatggggttttgccatgttggccaggctggtctcgaactccctgacctcaagtgatccacctgtgtcagcctaccaaagtgttgggattacaggtgtgagccactgtgcccggccacttagcaaaaaaaaaaaaaaaaaaaattcctaccatgattcacgaggctgaggggaattgaaaaaaaggttgggtctgggctatgggctgaatttcgtgccaaaggggcagaggcaggagacccagggggatgtggtctgcgccagggaggctcaagggagagagcagaggcagcacctggagctcctgtcccatttgaagttcctctgggggccgcccaattgcccaaacccttggagggctcacacgctgtgttccattcagggatgggtcccctcagagtcacttctcggggccagcaggccattctgtcggggagccccgaggggccgtgcttgtacagtagattgtcccgcatctgtcatttgccctggaaacggctgggtgccttgtgggtacccgagggggacccgccgctcctggcacagtagtccgcatcattttccccaagaacctttac

SEQ ID NO: 593458 - DNA, 352 bp, Homo sapiens
ttggctgaggcagcatctgcaccaacaattccagaagctgctcccactgatacaacaaacacggatgcagttctggtggatgcatttgcattgccacagatccctgcttcatagatttgcaccactcaagcatatcttgtaacaccaacacctattatgggactaggaaatacttatctttccacatttgccacaacagatttaggtttctttcctttctttgaaggaaagtttacttacattgctcttctattttcttccattaagagactcattgcttgggaaatgccttcttcgtactaaaatttgactcctttttctcttatgaaaaacgaactcagtttaaaagtat

SEQ ID NO: 593459 - DNA, 454 bp, Homo sapiens
  misc_feature (65)..(65): n is a, c, g, or t
  misc_feature (142)..(142): n is a, c, g, or t
  misc_feature (186)..(186): n is a, c, g, or t
  misc_feature (198)..(198): n is a, c, g, or t
  misc_feature (230)..(230): n is a, c, g, or t
  misc_feature (258)..(258): n is a, c, g, or t
  misc_feature (293)..(293): n is a, c, g, or t
  misc_feature (300)..(300): n is a, c, g, or t
  misc_feature (398)..(398): n is a, c, g, or t
  misc_feature (401)..(401): n is a, c, g, or t
  misc_feature (422)..(422): n is a, c, g, or t
ttagggggtgtcagcagaggagaaacacaattcagagtgtaagggtatggaccatgtgggttttncatctggtaatggttcaggaagcccagagtctccagggaatcgttcttggattcccactccagaagtccagaggagntgcgctcactttggcctgagaatactttcacagaagatggccgnttcactcccagntcatcgaagatctcaaagaagttctcctcggncacctccagcggggcgtggaagaagtgnagaacgttgttggggtgctggatgcggttcttggntgcctgntctggggtggagaaccgattgttccgggattcactgaagtcttggtaactgaaagaccgtcttccaacccgtttgactgaccaggaatgatggttggntgnttggagacacagacattcagnttctgcccaaacatgaagttgttgttgaggtg

SEQ ID NO: 593460 - DNA, 87 bp, Homo sapiens
  misc_feature (7)..(7): n is a, c, g, or t
  misc_feature (17)..(17): n is a, c, g, or t
gatcatnctgccccatntccacgcacccaaaaccagccctctcgcttctaacacagggcacctgctggggctcagggatgttaggga

SEQ ID NO: 593461 - DNA, 646 bp, Homo sapiens
  misc_feature (36)..(36): n is a, c, g, or t
  misc_feature (101)..(101): n is a, c, g, or t
  misc_feature (105)..(105): n is a, c, g, or t
  misc_feature (153)..(153): n is a, c, g, or t
  misc_feature (175)..(175): n is a, c, g, or t
  misc_feature (242)..(242): n is a, c, g, or t
  misc_feature (286)..(286): n is a, c, g, or t
  misc_feature (319)..(320): n is a, c, g, or t
  misc_feature (337)..(337): n is a, c, g, or t
  misc_feature (373)..(373): n is a, c, g, or t
  misc_feature (408)..(408): n is a, c, g, or t
  misc_feature (435)..(436): n is a, c, g, or t
  misc_feature (439)..(441): n is a, c, g, or t
  misc_feature (469)..(469): n is a, c, g, or t
  misc_feature (493)..(493): n is a, c, g, or t
  misc_feature (507)..(507): n is a, c, g, or t
  misc_feature (520)..(520): n is a, c, g, or t
  misc_feature (533)..(533): n is a, c, g, or t
  misc_feature (541)..(541): n is a, c, g, or t
  misc_feature (567)..(567): n is a, c, g, or t
  misc_feature (614)..(615): n is a, c, g, or t
  misc_feature (630)..(630): n is a, c, g, or t
  misc_feature (634)..(634): n is a, c, g, or t
  misc_feature (646)..(646): n is a, c, g, or t
tgcgcatggggctcttagcctgaatgctctgagggntggccccttagagcaggctcaggggaggtcctgcgccacaagggctttgggcccctccctcaggnagangccaccggctgcgagtggggtccgtggcccttgctgttacatctggcnttggttgaagctcagggagggngagctctcttagggagaactgtggggtggcgtgatgtcgccttgggagggcccttcaggaagttggngtcgggggttggggagtttggtagacccagagacgttctggggncgtcagtgatagtgactaatatttggaggcagnnggtggagctggccccanggttgaggtatcagttagagcagaacaattggaccnagagctggtttttcctttgggtttaggtgtcagtnaactattatcattgttgtggagagctnnttnnngagggttgtgactgtgcagcacgtacanagctgcggggacacagatggtacncattcccagagagngacagaggtaganatgtggctgttcncccatgcncacacacacaatcacgcctgcctgtnggcatgtgtgtcaacacccacatgctcccacagcccacatgcgtggnngtacacagaactgtntgcntccatttgtgcn

SEQ ID NO: 593462 - DNA, 204 bp, Homo sapiens
gccaccggctgccttgcaggtagatgtgggggtcagcgtcagaccctcgtagacagcagagaggatctcctcggctcggatactgtcggcgcttgaagacatggtctccatcagggtggatctcgggctccacgaggggcacaatgcccttgtgctggcggatactggcctttcgggccagatcgttggcatttggcatgatgg

SEQ ID NO: 593463 - DNA, 373 bp, Homo sapiens
  misc_feature (6)..(7): n is a, c, g, or t
  misc_feature (12)..(12): n is a, c, g, or t
  misc_feature (29)..(29): n is a, c, g, or t
  misc_feature (39)..(39): n is a, c, g, or t
  misc_feature (138)..(138): n is a, c, g, or t
  misc_feature (141)..(141): n is a, c, g, or t
  misc_feature (186)..(186): n is a, c, g, or t
  misc_feature (333)..(334): n is a, c, g, or t
gggggnnctcgncattagagtgcacatgncactgagcantgcacacggcacccagtgtgtagtcttttatccctcacccacctctcaatctcccctcctacatccccaaagtccattaaatcactctgtatgtctttnggncctcatagcttagcttccacttataagtgagaacatatggtattnggttttccattgcttcacttagaataatggcctccagcttcatctaggttgctgcaaaagacattatttggttcctttttatggctgagtagtattccatggtgtatagatatcacatttttcattatccactagtgcttctctttnnaacctcaaccctgagccaccctctgtctgagcttcatgc

SEQ ID NO: 593464 - DNA, 909 bp, Homo sapiens
atgcaacacacgatggggacgaaaacggggagaagatccttgcgggaaaaagcgcccgtcgccttctctggtggagaacggcctccccccagccagagctctttgtgcccgagagaccaccccagggggggtttggagccccccgccccaccgagagggtgggaagcgggcccccccccccctgggtcaaaacacaaggcggtcttcccccgccgaatgtaacccccgggggccacggggtccgcccaacgaaagggccccaaatgcgcgcccattccgccccgcgctccgaatagactccgccgtcgccccacgccccccgtttggtgggatttgggggccccacccccggcggcctccaacgggtgggccgtttacacgttgcgaccggcccgcccccccatgggttcgcacggccgggaccctttgcccacagcgattacaccagagaagctctgttcgttcccggacctgttggcaatatccccctgcggcttcttcaccagggcgccgggtgcatcttctcccgtggcccccagagctggtgctcccggtgagatgttatcgccacgcgggcgcgctttgtaatcatcctggaacttgtggtaaggggcacggtggcaatccgtgggccctttctcgacggcgaccctagtgacgcacaggcccccccctgaagaacgagtctaatcaaggaggctttgggcgcacaatcaagcctggcccgcggcagtgtatgggacgatacgacgccacaaccactcacgtggcgtaggaaacgtatacaacccgcactggctggacagggaccattgtcacccttggtttgctgctttacaaattcttttccccctaattttaaaaaatagtttcccccccccacaaacaaaaaaaacagacacatagaaa

SEQ ID NO: 593465 - DNA, 171 bp, Homo sapiens
gtttgggctgtcgttgcactgagagccgtgccagctcgcacggtctcgagtgagagcgcagagtagccctgagacagtccctactggtagcacctcctgggtgatgcagccacgatgtcatccccgtcccagggtcgagctgcctgggtgatctccttcaacctggacctc

SEQ ID NO: 593466 - DNA, 312 bp, Homo sapiens
tgattgtgtgctacctctgatatggtgtggatgggtcgccatcgagatcatatgggggatggtagtctcctataatcgccatgtgtcgttggagggacccggtaggaggtcatcgaatcatgggggcagtgtttttcccatactgttctcgtgatagtgaatgcatctcactaaatctgatggttttataaatgggcagtttccctgcacgtgctctcttgcctgctgccatggaagacataccttttagctccttcttagccttccaacatgattctgaggcctctccagccttgtggacaatgggcgtga

SEQ ID NO: 593467 - DNA, 1285 bp, Homo sapiens
cattggaaacagttttgcaccgccttcacattcaaggaacacgcacaataattgacaatacagaccttggctatgaagtgcttccaattaatacacaatatgagggaatgcgagactgtatcaataccataaggcaggcaggccaggagtgtctggtcttttcatcaagggtttggtgctgttataatacagtacacactgcatgcagctgttttacagattaccaaaattatttactctacacttcttcaaaataacatttgagattaggttccttcactgagtagtctggaagatcataatctggataatctgctatgaagttctgagggatacacagtgacctactggggcaagacacatggcttggacacgtccaccattggtcactacaagcccatactgattatcttgacttccgtcttttaaggcataggtatatatctcggatcacaaatccttccaaatttgaacaactcaataaaccctaacacttacttaacattctagttagtcgtcagcactcatgctgaagtcacacatgatcgtcaggcagcaagccacaccctttcatctcatccacattctaaaaccaaaactttcatcagagctcgcacatctaattccactctgagcttccaactatctcgccaaaaccgttatatttcttacgcctccctacgacttgcatcgtttggcgtataacggtattccctttcatcaccacgtggtcagtcactacttcacagcgccccttccaataccaacctccacggcaggatattcacacatttctccagccaacacatcaacaagcactctcccatattagcacaacacacacgattccaaggggaattcactcacaaccttcggcaactccttgtaccccggggcgctaaacaacatcgtttatctacatactatgccaattctgtccaccactcatgttcacacacccctttcactggccccacaatcacactgtctatctcaaacacacatgccctctccaccgtctatcactccctgtctcaaactgcatgctcactctcttccaccaccccctctcaatctcttctcaccactgacaatcctcatctctacctcccaccataaccaacaatgatctcgcactcccttgacaattatcacactcaccattcacatacaacctcacggtcacaccctcatcactcactacacacacataatctcgatgacactctcccacacccacatcatacccttctcaaccaatatccacacaaacatcaaacacaaa

SEQ ID NO: 593468 - DNA, 243 bp, Homo sapiens
gtttttcccccccccccttttttttaatgggggggcggaaaagggttttttttgggaaaaacccggttgggtttgggttccccccctgtgtttgaatttttttttttaaaggggggggggttttttttaaaggggggaaaaaaccccctttttttttttttggaaaagggcggggggggggttttttaatttttttgggggggggggggtttaaaaccccttttttttttggggccgggggga

SEQ ID NO: 593469 - DNA, 573 bp, Homo sapiens
acctggtccgtggttgatcgtatttgctgggatctttttctttctttcttttctctctttcttttcagattgccataatggcagtctggcgaggctatttgggactttattttggaagggccctcaaagtaggggccttattcttttattattgctgctgttttgtgtcagttttcaagcaggtctggctggcgagcagcagaagggagccggctgttaaaggggcagctctgagggccagggcggatgtccaaagatgctcttgacattgtacaattaaacaattaagacgctatggccatggctcccacttaagccagggaccttggtgcaccaagttttcagaggctatgggatagcagcaactgtcatttcatcaaagatttttttaatacatatgtttaacattttttgcctccaactaagtgcaatcttcagttatgcctgggtgctgccaagaagctaactgatagtcacccagataactgaaaaatgaagtgctgcagcctctaagccaaggcaaaaggaatccacttaacagggatttacagtgcaatgtactcggctaaacaa

SEQ ID NO: 593470 - DNA, 284 bp, Homo sapiens
cctcaggggtacgctttcagtctcacgggcagacgtcacaggtgtcagccaggttgtggcttcacctgcaggtctttgctagcacgggcaggcagttggctgcgacagcagttcctgtgatagtgggactgagggccctgcttactgtcccgtgttgcttggtgtcactctcagctccacatgcacaggtccttgcctctcctctcaaagcaagcactcttatctgcttctagaccagcaaggagcactctgcctgtatgacctgctgagatagggcctctatg

SEQ ID NO: 593471 - DNA, 809 bp, Homo sapiens
attaagagctagtgatgggcaagattacagtctgagggccaaacgtgcctgcttcctgtttttgtaaataaagttttgttggaacacaaaaaaaaaaaaaaaaaaaaaaaaaaaaaaaaaagccggcgcgcgctctctcagaacgcgaatagagttatcctccctctgtttataagccacgagagttatccactccccatggggagcggaggagtaggacacttcttaggattcccccggcccatctataggaccgtgatctacaagacccacagatgtttcccagtagagttgtggagaaaatatttttgtgaaccacggggggactgttctatcttctcaataaggtttaataaagacctctccgtgtggtacacaattattgaggcacacaagcgtgtcttttacaacagaacattttggagaatattacgaacgttttcacacgcgctatgagccccaccaggtgtttggctcatagaaaaagcgctcccaaaaaacaacccacaaattgtctctcctgttttttaaaaaccccacacaaaaaaaaaaaacaactctgtttttgtttcttctctacacaaaaaacacaaatcttgttgagaagagctctctactggtgtgtgcctctttctgtgttgtacaaaaacaacccacagatgtatacaaagaggatgttgtgagaaacaaagttgtttgtggggctctcacagaagagaggggagtcttcttttttttctccgacaaaccctgtgaggaggagatgttctttctccaatagaaagagaaagaaaagaatctttctgggg

SEQ ID NO: 593472 - DNA, 692 bp, Homo sapiens
attttgaggtaattctagccttttaaaatattctacagacctacggggcttaaaagaaccccagtaccgactaagcaaataggcaaaagacatgttggaaatgtagtatagtacttgaaacagtcactatcatagggataatgtggtgcatcctgtgtaaatggaagctgagcttgaacctggtgctttaaagtaggggataaaagtcatccttctcaatgcaaagcacaagatacctgttacctcccaaaagttgaccgttttagggtgaaacaggccgttttttcaaaccaacttgtgtgccctgtgggggtgttcattgtgaaagtttgtgtggaaaattaacgtgattgttttcctcaagttctccttaaaagtttaaggtccaatggctttaaaaatgtctgtgtaggagaagaaggtgggggtttaataaattgtgtttcctctaaagataatctttttgggtggtttttaccaagacttttgggaaaacttattaaaaggcttcttaaaagtggcctctttaacggggagaatactttcgtgggagaaaactttcaagtggtgcccaaaaaagtgtgcattgggccataacaaggttccactaaggagtttcttggaaccaaaagctggaaaaagagattgggatttaatttttaaatttcctttcccaggatattaatctaggg

SEQ ID NO: 593473 - DNA, 449 bp, Homo sapiens
ttcgacggtgttctgggcctggagaggctgccgggaggtaggagcataatgtagaatcagtgggcgtcttaagcttgttttcctgcaactggatggtcccacgtttcactgtcacccctctggaatccacgtatacgaaaattccaaatattagttgggcatagtggcaagcacctgtagtctcagccacgtgggaggttgagatgggaggatcgcttcagcctggaacgcagaggttgcagtgagctgagattgcaccacggcactccagcctggacgacagagcaagactctgtctcaaaaaaaaaaaaaaaaaaaaaaaaaaaagggggcccaccaatttaagttccaaatttctcccctaaggtgtataaagctttctagggcaagcttactatccatctcctaacttgataaaacataatttcccaaaagggggaccctctgtc

SEQ ID NO: 593474 - DNA, 160 bp, Homo sapiens
gccaccgtcgaggattcagcagcctcccccttgagccccctcacttcccgacgttccgtttccccctgcccgcctttttccgccaccaccgccgccgccttctgcaggccgtttccaccgaggaaaaggaatcgtattgtatacccgctacccagaacct

SEQ ID NO: 593475 - DNA, 1002 bp, Homo sapiens
agcgggagcggcggtggcagatgcgcaagagcgagacgctggagcgcggcgtaggtggctgccgagtcttttggctgtcgtagggtcttatcctgggccttagagtggcggccggagctggcgctttctgggtcgatcttggcactgggggtgggcggttttactagggatccgcacatgagcgcagcggtatcatcaccacggcaggtgggcttgggtggcacggatggatcagacgacattattgcaggaacagcatcctcgagtcaacgtaaggtaaaggtggtgtgaatagcaggatcccccgagataggttggaaacgacctatcgtcccgagattggaccacgcagcgatgcaactgggacctcgttctcatctgccttctccaaaagtctccctattgcgaaaagcagctttttggacaagaacgtacaagggctggaactcccacgtaaagaatgtgtgcgtatgatcccaccttttgcgtaactacatgttattagagcacagaagatcgcgcacggaaccagataactgacagggcaaactttgggacctgagttaattgaatttctaaatcactactacttcaaggcggctattgtactcaagagcgcaaggacggggatttttgcgcgaggaaaaaacattggtgtgcccgtgtaacgtttaggaacaagtgtgtttatacaacgtttggggaccaattcaaaaggtgggcgctgggagtgaattggacgaactgaatttgggataaaaatgtccaaaaagcgagcggcttggttgaagtaggcggttttttgtgagaacggatacatatctaaagaagaattatactcgaatataaacgtataatattggggtgggtcccaaactggtgtacaccgaatgggttcttttaacagaccaaggaagcttggggctaaccttacccatgttggccacgaattactgttggaattcgatggttaagaaaggggcgtgagggggccacgaatgg

SEQ ID NO: 593476 - DNA, 267 bp, Homo sapiens
tccgggccggggtcagccccctggaaagggcccggggtcccccgtcctgtttttttgctgtttttttccttgtttcgcgaattgctgacctcgtttaaacccttgcctaatgggctgctttgttctgtgtatttaaaggtgagcccctccctgtttggatggttttgatttgcaccagggccaggcctgttggtcattcccttgtttttttgaaaaaaggcttcattgccgggtcagcatttttccaaatagattttagaatcctta

SEQ ID NO: 593477 - DNA, 655 bp, Homo sapiens
tcaggtgtccctcctttcagcgggggcgtcctcctgttttgtcagtcacgtgcgtgcttccacccgcggggtgtatcttcgtccgcccgctcctcgtggttatgccgccgtcatgtcatattggcgccccccctctctgtgtttgccccgcctcactcctatcgtgcaggcggccacccacgtgtgggtggcacccactgtggtctcccccccccctccactagcggcttgttgccagcgcacccatgggtgtgcgtcgcgcacgcgcgggcggctcgccgcacaagacatctcggcgcagcatcccttgtctatgccccccctgacatgtcgtgcggcggtggcgccctcttcttgcgcgaccgcagcagggtgtgctccaggttgggtcttttcccgcgcttctacggcgccgtagatcgcactcacgcttggtgtctattcctccctgcgcgcccctctctaggcgtgcctggagccctccccctcctccttcccccaccactccttcaatgcgcatcttctctaggatctatttttctgtcaacccgctgtgcccccttcataatatcaaggaggacgaccatttgtcttactgtggggatggtgggtgtgtagagaggggcacctgtgggcggacccacaatgtacagaa

SEQ ID NO: 593478 - DNA, 208 bp, Homo sapiens
acaactctatgcatactacagagccactcccaattcgtcttcacccagagaaagccttcctgggaatggagggtggagcatgcagaggagcactcacagatagttgagggcatatgccagctgttgaccacctgcagcttacagctggctggcaccaggtggccacgtattcgcagatacatgtctatggcccccaggtgtacaaatt

SEQ ID NO: 593479 - DNA, 406 bp, Homo sapiens
ggggctcgcctcggtgctcacgcgcagtaggcacatgggaagtgcgggcattccccggcactgctggagtgctgagcgcgatgtgttcccacgtagacatggatttggtgagccacggttccctctctcaggggtgcctttccctgccacagttgcaggttgtggggctgatctgtcaccttcagtgttgtgatctcaggaagatagcagaccagccacctgacataaaaatccgcatagagaaattcaggatttctctcgatttattaactgtgtgcttagttgagggcagctcgggtgatgataagtacatttttataattatgcatcattaaatagtaattgttaaatagacttagagttttctttcctatattaaaaatctagatttaaaaaatccagattt

SEQ ID NO: 593480 - DNA, 172 bp, Homo sapiens
ataggaataaataaagtctctgatataggaagacaagatgctcccataatactctcagatagtgaagaaaagaaatgatcattttggaaccaaacaagaatccaaagaaaataagaacacagaccaccagatgcaaaacaatgcaaaagcaccaccagtgaattcttccata

SEQ ID NO: 593481 - DNA, 418 bp, Homo sapiens
  misc_feature (7)..(7): n is a, c, g, or t
  misc_feature (34)..(34): n is a, c, g, or t
  misc_feature (71)..(71): n is a, c, g, or t
  misc_feature (147)..(147): n is a, c, g, or t
  misc_feature (231)..(231): n is a, c, g, or t
  misc_feature (268)..(268): n is a, c, g, or t
  misc_feature (286)..(286): n is a, c, g, or t
cttttancagtagtaccccagcctggatgttttncaaaaatgtttaccttggaaaacttggggttttgttngtgaggagaaagagtacttgtggaaaacctctgcttgagtaccatgtgccaggcctatgtggatgctactccgtgntgtgcgcttcaccagcggttgggattgccccagcttggagtgcttgtgtgtccaacctcagtctgcccccatagtgactttttnccccatgattctgctttcactgttggatcctctttgnaagtcccccctctctttnctaaagcagtgaaggaagagaaccagagacaaactctttggactgtgaaagagaagggtagagaattcccaggcaacagtctgacccaagggtgtaaaccagtttattatatatatatttttcctttgaatt

SEQ ID NO: 593482 - DNA, 397 bp, Homo sapiens
ttatcgttatggctggtgatgggcaagtgttcacacactcatcgtcctccagcctgggcaacaaaagtgagaccctatctctactaaaaatacaaaaattagccaggcacggtggcgcatgcctctaatcccagctactggagaggctgacgcgggagaatcgctcgagccacgggagatggaggttgcagtgggccacagatcacaacactgcactccggcctgggcagcacagaaagagaccccgtttcacacacgaacaagcagatgggcgcagtggctcacgcctgtaatctcaacatatttgggaggccaaagcggatggatcacctgaggtcaggagttagagaccagcctggctaacctggataaacgcctctgccaggtaccgagctcg

SEQ ID NO: 593483 - DNA, 1045 bp, Homo sapiens
taaaacccggtcctggggggggtgtgggtataatactaagttgaaatgatatcatttacgggggaaggcgcttgggggaagtaggccttatttctctggtcctttcgtacagggaggaatttgaagtagatagaaaccgacctggattactccggtctgaactcagatcacgtaggactttaatcggtggaacaaacagaacctttaatagcggggtgggaccatcgggatgtcctggatccaacatcgaggtcgtaaaccctattggtgggatttgggactctagaataggattggcgcgctggttatccctaagggtaacttggtcccgttgggtcaagttaatgggatcaattggagttatagtagttccgctttggactgggtgaagtcttagcatgtactgggtcggaggtaggggttctggtccgaggtcgccccaaccgaaattttaaatgcaggttgggaagttaaggacctgggggttggtcaggtacggttggccttaataaattaaagctccatagggtctaccgacttgacgggtcatgcccgatcttcaagggcaggtcaattaactggttaacagtacagagacagttgaacctcggtggagcattcctaacggtcctatttaggacacgtgatcatggtacctttggcacggaaggacccggaggcgctacactgtgcgtccccggggcagacgggggactctaaaagcgggagccacaggggagatcgggacaccagcggggaaactcgccagactctaacatgtaaccgcccctatgaacgccgtgttggtctacagccggcgaacaccagtgtggggagagaaaaatcggaggacgacacacacagttaatataccgggtattgggagaagtagtggtacaccacaagtgtattagaggaaacaagccgtgagaacgtaggatataatgagggtaaacacatgactgcgccggaaagcatacactcgacacgtctcacagctgctacgtcggttgtccattttttgttgtttgctggggggaggggt

SEQ ID NO: 593484 - DNA, 214 bp, Homo sapiens
atacattgtctgatgacagataacatctcactatatgtcgcccaggctgaagtgcagtggcgtgatcttgtgctcacagaaactccactaattttatagtatttttaagtagagacgacggtttcacctagtgttggacaggcatagctctacaaactcctgcacctacatgtaatccacctcgccttggcctacccagaagtgctagggatta

SEQ ID NO: 593485 - DNA, 156 bp, Homo sapiens
caacgcgaagccagcccattcgtgctgcaggaagtgcaggatccccgggagactgtactgggtcgggccgccccccggcagcgcccgtcgccggccgcggcagcatccgcagaggcccgagcatctatgaccgcggcgcccgggtggttgttgctg

SEQ ID NO: 593486 - DNA, 348 bp, Homo sapiens
tgagctcggtccagtgtactccacaaacaggacacacaagcaggacacacacatatgcaacagacaagccgtactcagcacagctcacactacgaacatacgaacaacacacaatagaccacatatcagtgtgcatccacacaacacatacaacgcacacaatagaccacgcacaacggacgacacacccagctcacacgacagacacacagcatgacagcatatacaacccataacacagcacacacaacacacaacaaacacataccacataccacacacaaacacataccacacaaaccacacaccacattccactggctatacgctgtttgtggaggtagcact

SEQ ID NO: 593487 - DNA, 157 bp, Homo sapiens
tgttgccgacgtggtcgggtgtgctgaccgccgctgttcggccatgcttgccctgcccaaagaagtgactgctgccccagccggtggtgtgccacccgagctatgtgtggccatcaccacagcattgagcaaggttggcccggacaataaccaaccc

SEQ ID NO: 593488 - DNA, 554 bp, Homo sapiens
agtggagagagaagggcatggattgctgtaacggggacagttgtgtgggcgcctttgctgtacatgcgatcccatatgtacatatgaccaaattctacgcagctggcctggtgtcctgggggccccattgtgggacctatgggctctacacacgggtaccgcaactatgttgactggatattgaagactatgcaggataattgcaccccccgtgaggactaatccagatacatcccaccagcctctccaagggtggtgaccaatgcattaccttctgttccttatgatattctcattatttcatcatgactgaaagaagacctgagcgaatgatttaaatagaacttgattgttgagacgccttgctagaggtagagtttgatcattgaattgtgctggtcatacatttgtggtctgactccttgtggtcctttccccggagtacctattgtagattacactatgggtggggcactcctttcttgggctattccacagggatacctttattctttgtttcctctttaactcttcaaattccctttacttgatcc

SEQ ID NO: 593489 - DNA, 283 bp, Homo sapiens
gcacagggtgtaattaaaggtatatcataactaagagagaacgtgacatctagagatatagtaaaaactagtaccacgaatagcagaggcctactaggggtcctgcaggaccctcaaggccagaatgtgggcccaggccacattgccaacatagactgggttcacagtggagaactttccaacacttgacaggatcccattgttgttcagggcctcgtttatactagcagaaaggaatcggcttccttccccatagatctacataggtcgtacggcacaagtg

SEQ ID NO: 593490 - DNA, 359 bp, Homo sapiens
ctcaaatcatcagacttttaaaatgtctctctccaggtatttcttgagagtttggaaaatcagcatcagctgggcacggtcgtcgcgcctgtaatcccaggactttgggaggtcaaggcaagaggattgcttgagcccaggaatttgagaccagcctgggcaacatagcaagacccagtctctggaaaaagataaagaattagccaggtgtggtgtgcatgcaggtggtcccagctacttgggagactgaggcagaaggatctagaggtcaggctgcatgattgcaccaccacacaccagcctgggcgacagagtgagaccttgtctcaaaaaaactaactaaataacattcaaatata

SEQ ID NO: 593491 - DNA, 419 bp, Homo sapiens
ctccagcgtgtaacgttagtctctaggtcgctatctccttttcgtaatgccattccagatcagcaccggtacccaaatatgccacactcactacttcagtttgcaccctgctgtacctttagtgccgaggtcactacggacgccatccaagaacagatcacatggtacgcgagcagcttattttttaaatgcttcaaaaggatctcctccctttcatcttttttttttcctctttatgcttacagtgttcagtgaaaatccgtttggttggtttattttaggttttttggagacggagtgtagctctgtcactcagtctgcagtacagtggcgccatactggaacaattagaacctccgactcccaggatcaagcaatactcgtgcctaagcctctcaagtaagctaggataacaggcg

SEQ ID NO: 593492 - DNA, 225 bp, Homo sapiens
gaccgcacctcgtcttgaaatagccttttaaatgttcaactcagcttgcctcacagttgtaaaaataagcatttttttgtttttgtaggatcagaggagcttccacaggcactttgatacaccttttgatgtgggaaggaggggctctgtagagagctacacagatacacccaaccttcacagccctctcattagaggggtagatttgggtgtctcttttcggcc

SEQ ID NO: 593493 - DNA, 774 bp, Homo sapiens
  misc_feature (3)..(3): n is a, c, g, or t
  misc_feature (75)..(75): n is a, c, g, or t
  misc_feature (77)..(77): n is a, c, g, or t
  misc_feature (79)..(79): n is a, c, g, or t
  misc_feature (112)..(112): n is a, c, g, or t
  misc_feature (115)..(116): n is a, c, g, or t
  misc_feature (119)..(119): n is a, c, g, or t
  misc_feature (123)..(124): n is a, c, g, or t
  misc_feature (148)..(148): n is a, c, g, or t
  misc_feature (154)..(155): n is a, c, g, or t
  misc_feature (163)..(163): n is a, c, g, or t
  misc_feature (165)..(165): n is a, c, g, or t
  misc_feature (206)..(206): n is a, c, g, or t
  misc_feature (209)..(209): n is a, c, g, or t
  misc_feature (211)..(211): n is a, c, g, or t
  misc_feature (213)..(214): n is a, c, g, or t
  misc_feature (232)..(232): n is a, c, g, or t
atngacgtccagcgaagcgaggagcagcgatggacggtcgggtgcagctgataaaggccctcctggccttgccgntncnggcctgcgacgcgtcgctggaggaacccgattnccnnttncccnnagacgtttgacgtgcgataccganccgacnncccggagntncatcgtgcagacgggctcctacatgttcgtggacgagaacncgntncnnccagcgacgccctgaagngtgacgttcctcatcacccgcctacacagggccctgccctgcagtgggtgatacccctacatcaagaaggagagccccctacctacaatgatataccggggctattctggccgagatagaagcgagtactatatggatgggaggaggacgaggactatctaggccgggagaccctcgggcctgggggcgggtgctactggggagggtaccgctgtagtatacttggccgccgaccagggtcgccacctggctgccactaccctaccgagcctaccctacccgcctacgaagccgctgagatgtacccctgcgctacctgtatccctaccctgcgtagtagctatagccctttatgttaccacgggaataagctgctaccaggctccaagctagacgacccctagggcctacattactgaaagcgagcctgcgccctcctacctataccagtgcagacaggcccctccacatggtacatattggaaagctgtccatgcgctaccagttagaaagtagggatacttgttaaacattggacatac

SEQ ID NO: 593494 - DNA, 253 bp, Homo sapiens
tggattatcacttgagtccaggagtacaggtacagcctgggcagtgtggtgagaccccatctcaaaaaaaatataaaaagcgaaatacaccaaaccggctaaatgcattttttattcccggacttggctttgcctactttttttgggttgcttgaaggaacgcatcttaattggcgggatttaccccaagaataaagaaagaattatgattcatacgttcaaaggggaggaggatatatgcacagcttcagca

SEQ ID NO: 593495 - DNA, 914 bp, Homo sapiens
  misc_feature (3)..(3): n is a, c, g, or t
atngacgtccagcgaagcgaggagcagcgatggacggtcgggtgcagctgataaaggccgttcctaccaaaaaaaaaaaaaaaaaaaaaaaaaaatttggggggggcgaaaaggctttttaaacccttccgctggggcgccgcgggcgccaggctgggttacgtggcacactggcccaatagctgtgccaaaggaaaatccggcccaagacacaaggtgccgggctttccctccacaataaaaaaagcgcacgcgggggggacaacccagagcgtcttcttggaacacaaatccccgacaggagactccggagggccaaagacgggatctccaacaacagaggggtccagcggcgaagcccgaatataaaattagacgcgccgcggggggggaaaaaaaggctaaataagaaaaaaataacataaaacattcatcagaaaatgaacgcaacaaaataacgaatataaaaaaaaaaaaatatataaaacaaaaatgacatacaaatataaaaaagaatgatatagaaaatgaaaataaaaataataaaacacaacacaacaaaaaaaaaaataaaaaaaaaatgcacaaatgaaagaagcacaacagaaaatgattaacaaaggagtatcataatatcacagagtgaacgcagcagaggctgcacggcgcctacgggcacgacctgacgcgaggtgataggagaacgacgcacgacaaggaccgacagcgtacagagccgcacgagtgcaagcggcacagggagggcaacacgagagagacagaaacgaggccgccccgcgcagcgagccgaacagaacaaaaactagggttcaccatgaggcggcggagccggtacagacacgtcagggaaaaagacgcacagcgacaagcacacccaggcggtgaacgagccc

SEQ ID NO: 593496 - DNA, 129 bp, Homo sapiens
tcattggtatatggttactgtgtggttaagtaggctattatgaggagcgttatggagttggaagttgaaactcacattgctaggccggaggtctcgtttagagagggctgagaagggcccctgtttagg

SEQ ID NO: 593497 - DNA, 816 bp, Homo sapiens
  misc_feature (260)..(260): n is a, c, g, or t
  misc_feature (581)..(581): n is a, c, g, or t
ggaactcggtgttggccactgtgcagaccagacttcgctcgtactcgtgcgcctcggttcggcttgacctccgcaaccatgtctgacaaaactcgatatggcgtgaggatcggagaaattcggagtaaggtcgaacactgatgaggacacgagacgtgcaacgagaatagtagtcctagctgcctttcctaccatgacacaccgatgtgaacaggggacgaaacgcaatgcaggagcgacatcggtaattgacgtgcgtngcgccgccagagtatggcactgttaacatttccacaaagccatttggcacctgtccttagtttatcccctttgcctgtattaacggcatggttcaagactatctattgctacagggcacttgccacagagcccgaggttgtgtgcactcccagcaagttttgtcacacgaattgcacctttgttcgcctttgccctctcatttgtcccaacaagttcaacaggcaacacttacctgggaacaaacgggaacaagtggcccagggaggcaccgttggcccttttgtccccccaaatcttgggttcccttagttcgtaatttncgtgggcgctttggcgccacgcggcaacaccgcgaccactcggaaacgttttggcccattatgttccgtgttgtagacgcgacaccaccccgtgggcggtttttgggaaagcccaaccgctggggggttgggcgaacggacgcagggttaaaactgtcgtcacgcaagttaggaatacgccaagcgctgggccccaacgggttgtcccttgccagggcctggtcaactgcaggtc

SEQ ID NO: 593498 - DNA, 111 bp, Homo sapiens
tctgccctgcccgtccgctggcccatgtcatcctcagcactcctcggattcttctttctttgcttccacttatcttctcctcgagctggcgcagcaggctcgtgaaggggg

SEQ ID NO: 593499 - DNA, 849 bp, Homo sapiens
  misc_feature (815)..(815): n is a, c, g, or t
tatctcctgtccgagaacgaatgcaagctaacgataactcagtgtgactcccactgttgaaatgtagagagcagtcgtcttgattctgcctgcgtgggggacagttgctactttttagtgtccttacaaggtctttgcttcatcgctctagatacactctagctactctcctctgctaacggctgcagaaatcattaagacattaatttgtttacatttctgtttaaacatctcaagatgggctaggttaattctttttctccaaacgagaataattcctggatataaaatatactgtttggacaagtgtattagtccattttcatactgcatgtaaagatactacctgagactgggtaacattgataaaccaaaagagttctaattgacttacagttctgcaaggctggagaagcctcaggaaacttagaatcatgctggaaggcgaagcagaagcaaggcatgtcttacatggtggtcaggatagagatgagaatcacatggggaaactgccacttttaagtaactcagatctcatgagaactccctcactatcacgagaacagcatgggggaaccaccgcccatgatccaatcaccgttccaccaagtcccgtccctccatagcgtggggattacaattcgagatgagatttgggtggggacacagagtcagaccgtatcaataggtatataacacagtcttgttaactatagtcaacatgctgtacattagatctccagaacttactcatcttgcatgactggaactttgtaccttgggtactgaatacgctaaggactagtcttagtgtntaaccgagggtatgaatgtacttgtcatcctcgg

SEQ ID NO: 593500 - DNA, 635 bp, Homo sapiens
tagatcgagctcggtaccgtcagcgcttgccttacgatgcgatgacagtggtcttcccgctcgtcgcaagcacggcttcgaaaatgccgagttccgccgccaccgctggggcaagaggttctgctgcagctgtcgccagaacgagcctacggccacgcatatgctcctgacgtagataatccagaaaatcccgacgataaggcagtaaccccgcatccatggaaatgcggctcgcaatctgctgcttcaagtgggcttggccagacaccaaccagatgggaaacaaaaacagaaacaaagggttccgcttcaaaagaatgaaagcgctttcccatagaagatctgtcgcgaccagtgttccgtcgaggtctacggccaaaggcacttcctggctttttagccgctcatccatttttagtcattatcctcaaacccgccccggcaactctcgtcagccaagccccctgggcaacgaataaaaggagagcacaaatgaacaatgattagtcttcgctacaatcgataatggttattcatgggcttgtctctaccaaagtggcctttaagcaatcgctacgagttttggttaataaacacgtcatcctacataattgctggtctaacttgtcatcgcg

SEQ ID NO: 593501 - DNA, 102 bp, Homo sapiens
ctatgcaatgtgcatattcggcaacccagtgagtgccagcgcaggtgacccagtcacctgaatctctaccgaagctgccaagcccttaattcaaccattcaa

SEQ ID NO: 593502 - DNA, 663 bp, Homo sapiens
caaatttaaggggttcttttgtgtgatcaaaagttaatttccttcctgtaaaggttcccaggtaaagggtttattcccgtcccttcaagggataacctgattttctgcctcccaaccaccttgccttcccccgataaacattctgtaaggttctggaaaaggattgtgtatatcaacggcgcaggcattaatggccctcagaccttttggatccagtgtttccccctataactgtttttaagtctgtccaaggctttactcgctgccaccagcattggcccatcacctcgtgcagctatgccagcatctgcccatcgaacagtcttttcatcatattctctcctctttactagacgaacctcaattccctcattccgtaaactatctataatatgttctacattttgggtgtgaatatgatgtcgtccaaaaagtcccctgtaactagagcctttcaatgcaagcagctgcttcaggtcttcctccgaaagctccgcgtaacggtaccgctgctgctcaaactcgtaccgggtggttttggccaccccccccacccgggaggggcgaaagccgccgtcagggcggcttgccccagtcatccagctggcgcggctgcccttgccccaggtgccgccgcccgcctcggcacggccaagccggggc

SEQ ID NO: 593503 - DNA, 254 bp, Homo sapiens
atctagaggatccctggcgcgggattcttcggccggggatccgtgacatacccccgtgctggtagagccagactaatctggttattaccgaccagacttcagttgccctcttcatgtaggaacgagcctctctgggctgtcttctatcgggtggttgtaggtcgggaaacatcaagcctgtgtaaccttcctctgtggggtgaggggtgagaggtgtaggaaccaatgtagaggaatccacggtgggacgaggt

SEQ ID NO: 593504 - DNA, 638 bp, Homo sapiens
ttaaaagaagtattagcggccaggcgcggtggctcacgcctgtaatcccagcatttgggaggccaaggcgggcagatcacctgaggtcaggagttcgagaccagcctgaacaacatggtgaaaccccatctctactgcagtacaaaattagccaggcatggtggctcatgcctgtagtcccagctacttgggaggctgagacagaactgttgaacccgggacgcgaaggttgcagtgtgccaagatcacgccattgcactccagcctggcgacaggaaaacaaaaaaaaaaaaaaaagaagcattagccattctgatcttgtgtgcacctgcataatggatagagccccaaatgactacaaaacaaaaagtgtcaacgaaaggacccctgactaaatgagcacattctccacgcggaaattataccacttctcactgggaactggtggtttaagcagactcaatgagtacgaattatcgaacaaatgtggcgcaggcatagtggtctcatgctgtgtaaatcccaaacacttgtgggaggcgaaggcaggcggatacactttgaggtcgggagtttgagaccagtttgcggccagttgttgaaaataatatacaaaatacaaaattgagacagatgtg

SEQ ID NO: 593505 - DNA, 796 bp, Homo sapiens
atggcacatgcagcgcaagtaggtctatcaagactgctacttcccctatcatagaagagcttatcaccttttcatgatcacgccctcataatctatttgccttatctgcttcctatctccatgtatgacccttttccgtaacacgtcacaacaagaactaactaatactaacatctcagacgctcgggaaatagaaaccgtctgaactatcctgcccggcatcatacctagtcctcatcgtcctacctcgatcccgtacgcatcctttacataacagtagcgaggtcaacgagccctcccttatccatcgaatcaattggccgccaatggtactgaaccttacgagtacaccgactacgggggactaagtcttcaactccttagttacttccccggattattcctagaaccggggcgtagcctgctgacgtcctgtgaactgttgactagagtcagatgtatgtactcgccgcttgaaggcccccgatttcgtcataatagttacatcacacagacgtcttgcagtcatgagctgtccccacattaggcttaaaaacagatgcaattcccggacgtctaaaccaaaccattttcaccgctacacgaccgggggtatactacggtcaatgctctgaaatctgtggagcaaaccacagtttcatgcccatcgtcctaggaattaattccccctaaaaatctttgaacctaggggccgtatttaccctataagcaccccctctacccctctaaaaactgcaaaagagataaaacagggaaaaacggaccaaaaaaagga

SEQ ID NO: 593506 - DNA, 379 bp, Homo sapiens
  misc_feature (115)..(115): n is a, c, g, or t
  misc_feature (204)..(204): n is a, c, g, or t
  misc_feature (207)..(207): n is a, c, g, or t
agggggcccgcaatccaaaaaaggtggcccgccccatcggcatttttttggattcaagaagggggaaaaattcccgggagtccttccagcccaactgcaagcgggtaaaaaagtnccgtttcaaatttatctttttccccaggaagccctcggcccccaaaaaaggaaacagttttttttaaaaatttaaattggccccccaanttnccgggccggttatgcccctccggaaggtttataaaaaggaaaaagctcgggtcctcccttaggaaaagaaaaattttaaacccttcgttagtttccgtatggcccgtgccaacccccggttttttggcaaacgggcaaaaaaaaccaaggaaccccccaaacaggattttta

SEQ ID NO: 593507 - DNA, 178 bp, Homo sapiens
atatagaggatccggaatagttaggataaggtaggagatagggcactagaagacctacggggaggggtactagagctggggcccgaccaacaggttcggcgacactactaagactagaggcccccaccctaaagtacactacactataccctacaggcacacagggcctagcatgtgt

SEQ ID NO: 593508 - DNA, 121 bp, Homo sapiens
caagcggaccataccttgcattatccccaattccatctacactatgaacggacgtgctattcaagcttcaatcatctagcctatcttttggtgtcacatcttctatggttcctgtgtttat

SEQ ID NO: 593509 - DNA, 167 bp, Homo sapiens
agaggggcgtaggtatgggtatggcaggggttatattgatattgttgctgatgcaacttgatggcccctaacgatagagtgagacacctgctaggtgctaacgagagaagatagtcaggatctacaggaggctccagtgtgggagttagttccctcgctaagggcag

SEQ ID NO: 593510 - DNA, 109 bp, Homo sapiens
gggcatgagtttttattcttcagtgcacagcagtattggctgttcatcagcaaaaggctttattggctccaacaaattatcccttttaaaactcctcttcttctttttt

SEQ ID NO: 593511 - DNA, 226 bp, Homo sapiens
cttcggcacaggaggagcagctgcagctggtgacagaggctgtggcaggccagctgggtcggggacgccacgctgagaggagcgcgtgacgagcgggacctcgggaccatgagcgacgtggctattgtgaaggagggttggctgcacaaacgaggggagtacatcaagacctggcggccaccgtacttcctcctcaagaatgatggcaccttcattggctacaagg

SEQ ID NO: 593512 - DNA, 208 bp, Homo sapiens
  misc_feature (75)..(75): n is a, c, g, or t
ggtgacttagaggatccccgttcaatttttctcacctgtaagcctctgtaccactgcttcaaatctaaggatgtngatggagcccccacttgtgccaagtgtatgatgccaaggagctgcttcttggtcagctgactttacttctctgcctccttttttctctctctctctctcttaaagagtaatgtttagtagagacagcatatca

SEQ ID NO: 593513 - DNA, 418 bp, Homo sapiens
tatagctgttctagaggatccctcacgccatgtcacaacatggtgaaaccccctctctactaaaaatacaaaaattagccaggtgtggtgttgggcgcctatagtcccagctactcagtgaggctgaggcaggagaattgcatgaacctgggaggcagaggttgcagtgagccgagatcgcaccattgcactccagcttgggcaacaagagcgaaactccatctcaaaaaaaaaaaagggaaagaaaaaaagaggcgcagctacgaccagaggtcgaccgccatgtgcaccttgtccattggtccttgaaacccacgtggctctcaagctcaggatggttctatccacgcttggaattgtaggtgactcttgcctattgtgcttaaagaatttcacaaagcagatgtagttaaggggt

SEQ ID NO: 593514 - DNA, 132 bp, Homo sapiens
ggcacaggaacatgctcacccacggggcagttggcaccatagagtgatcacctccgttcttatatgccagagtagagtagtgaccagcaaaatggagaacatcagagaatgcagcagtagtttttttactta

SEQ ID NO: 593515 - DNA, 396 bp, Homo sapiens
taacatcctgcgcgtgatgtccaccgaggcctcccaaaacatcacctaccactaccagaacggcgtggactacatggaccaccagactgtcaatctcaagaaggccctgctccctcacatggctccgacgagatcaagatccggcgccaaagggcaatagccgcttcatctacagcgtcactgtcggtggctgcacgagtcacaccggagcctggggcaagacagtgattgtatactaaagcatctagacctcccgcctgcccatcatcgatgtggccccctcttggacgttggtgcccctagatcaggaatgcggattcgatgtcggccctgactgcttcctgttaactcccatccaatcctacctgggtccctcccagcccaccaacttttccc

SEQ ID NO: 593516 - DNA, 256 bp, Homo sapiens
gcttctttaccaaaatactatattcctaatagactaagtccttaaccatggcctggtaattctttcacttccatttggatggattattagctaaatcctaccacccacaaaagggttttatttggtattcagaaggtaccacttttggacaaaaggctaaaatattttatatttccaagggaaattaggcaccataactttaccaatatattctaatggatattttggcttggtggaggggatcctacggaaaatc

SEQ ID NO: 593517 - DNA, 409 bp, Homo sapiens
taagcaaactacctaggcttctgtgttctgacatgtgcatattagccactgtgagtaagtgtctgtgcaggaatgaatcatttagttaatcagattctcccccatactcccttctaatactctgtaaagcgcactggtctaaaatgttcaattcacattgtgtaatcaaacttcctcttatctttcctagaaccaaagaccaattggcagtaagttcatcaagaaaagtttgatgtggctgtctggcttcctgttgcctctcagttgggcaccttcgcacactctgacgggtctactccaaccaagagtgtcgcgcgacactctgggaggaaccaggaggcagactggctcagcaaataaacagaatttcgggagcattccccttggataacccgcataagacaaggga

SEQ ID NO: 593518 - DNA, 619 bp, Homo sapiens
  misc_feature (2)..(2): n is a, c, g, or t
  misc_feature (6)..(6): n is a, c, g, or t
  misc_feature (13)..(13): n is a, c, g, or t
  misc_feature (21)..(21): n is a, c, g, or t
  misc_feature (33)..(33): n is a, c, g, or t
  misc_feature (41)..(41): n is a, c, g, or t
  misc_feature (75)..(75): n is a, c, g, or t
  misc_feature (196)..(196): n is a, c, g, or t
  misc_feature (200)..(200): n is a, c, g, or t
  misc_feature (244)..(244): n is a, c, g, or t
  misc_feature (246)..(246): n is a, c, g, or t
  misc_feature (299)..(299): n is a, c, g, or t
  misc_feature (317)..(317): n is a, c, g, or t
  misc_feature (321)..(321): n is a, c, g, or t
  misc_feature (328)..(328): n is a, c, g, or t
  misc_feature (354)..(354): n is a, c, g, or t
  misc_feature (360)..(360): n is a, c, g, or t
  misc_feature (375)..(376): n is a, c, g, or t
  misc_feature (378)..(378): n is a, c, g, or t
  misc_feature (381)..(381): n is a, c, g, or t
  misc_feature (385)..(385): n is a, c, g, or t
  misc_feature (439)..(439): n is a, c, g, or t
cnggancggccanaaaaaggngctggaaaaagngaatttcntaaccagaagtcgcgaagccggagtatagccaanatgcaatcagcagactccgttacgcgttcctcgtattggtttggaaggaaccagcttgtttccaaaggagcgagctaagtgcccagaggacttttggatggcatgacgcagtttcgcaacnttgntcccaaaatacagggaagcttacttgaaagagtgttggccattngngcagaaagccttaaatgaacatcatgttaatgcaaccctggaccttatcgaangcagcatgactgtttttnctanaaagaanacttttgatccatatatcatcattanggccanacccccccccccccnntnaanaaanattttttcatttgaacaggcagttcgaattcttcaggatgatgttgcatgttanatcattaaaataggttctttagtaaggaataaagagagatttgtaaaacgaagacaacggcttattggtcccaaaggatctacattgaaggcattggaactcttaactaattgttacattatggttcagggaaacacagtttcagccattggaccttttagtggcttaaaagaggttaga

SEQ ID NO: 593519 - DNA, 384 bp, Homo sapiens
  misc_feature (202)..(202): n is a, c, g, or t
  misc_feature (356)..(356): n is a, c, g, or t
  misc_feature (383)..(383): n is a, c, g, or t
taaaaataatgagatatgttggggatgggaaccaagtctaaacacaaaattcattcgcttcatatacaccttataaacatagcctgaaggtagttttataaaacatttttaatactcatgtgcatgaaaaccaagttttgactgaaacctgtcacatgaggttcaagtgtgggaattttccacttgtgggtacggtcagtgncttcaaaaaggctttcaggttgtggggggcatttttgaggttagggaaatgctcttctaccctgtacttacttttccctatggctggaccacacacacacacacacacacacacacacacacacacacacacacacattttttggaggtggcantctcactctgttcgaccgccggggggnc

SEQ ID NO: 593520 - DNA, 171 bp, Homo sapiens
acaaacagcaatgcgaacgacccttccaccagacagaccaccaaagatctggatcttggaactagtctgacactgaccatggaatcaggtccccatgaagcctatctatgcctaccagacacgactgtatcaagatgagactggacgagcaaatctacccctatcaaggac

SEQ ID NO: 593521 - DNA, 187 bp, Homo sapiens
ttttttttttttaaaaaaaaaaaaaggcgggggccttggggtccccccgtttttccccccccttttttttccccagggggggggtttcccttggggggggggttttggcccccccccccccccctgggggacccccctttctgttttccccccccttttcttttattttttttttttgccccgggga

SEQ ID NO: 593522 - DNA, 328 bp, Homo sapiens
  misc_feature (177)..(177): n is a, c, g, or t
ggtctgtctggggagtgtggtggtggatctcggctcactgcaacctttgtctcctgggttcaagcagttctctgcctcagcctcccaagtagctggaattgcaggagcatgccaccacacccagctactttctgtatttttagtagagatgaggttttgccatgttgcccaggctgntcttgaactcttggcctcaagtgatccgcctgtctgggcctcccaaggtgctgggattacaggcatgagccaccatgcctggccttacttttttttttttttttaaagagggagtctaactgttgtaacctaggagtgagtgccgggttgt

SEQ ID NO: 593523 - DNA, 677 bp, Homo sapiens
  misc_feature (39)..(39): n is a, c, g, or t
  misc_feature (67)..(67): n is a, c, g, or t
  misc_feature (106)..(106): n is a, c, g, or t
  misc_feature (117)..(117): n is a, c, g, or t
  misc_feature (128)..(128): n is a, c, g, or t
  misc_feature (140)..(140): n is a, c, g, or t
  misc_feature (143)..(143): n is a, c, g, or t
  misc_feature (200)..(200): n is a, c, g, or t
  misc_feature (202)..(202): n is a, c, g, or t
  misc_feature (205)..(205): n is a, c, g, or t
  misc_feature (216)..(216): n is a, c, g, or t
  misc_feature (220)..(220): n is a, c, g, or t
  misc_feature (222)..(222): n is a, c, g, or t
  misc_feature (224)..(224): n is a, c, g, or t
  misc_feature (234)..(234): n is a, c, g, or t
  misc_feature (239)..(239): n is a, c, g, or t
  misc_feature (251)..(251): n is a, c, g, or t
  misc_feature (263)..(263): n is a, c, g, or t
  misc_feature (272)..(272): n is a, c, g, or t
  misc_feature (300)..(300): n is a, c, g, or t
  misc_feature (327)..(327): n is a, c, g, or t
  misc_feature (355)..(355): n is a, c, g, or t
  misc_feature (359)..(359): n is a, c, g, or t
  misc_feature (362)..(362): n is a, c, g, or t
  misc_feature (364)..(364): n is a, c, g, or t
  misc_feature (370)..(370): n is a, c, g, or t
  misc_feature (380)..(380): n is a, c, g, or t
  misc_feature (384)..(384): n is a, c, g, or t
  misc_feature (391)..(391): n is a, c, g, or t
  misc_feature (398)..(398): n is a, c, g, or t
  misc_feature (400)..(400): n is a, c, g, or t
  misc_feature (402)..(402): n is a, c, g, or t
  misc_feature (475)..(475): n is a, c, g, or t
  misc_feature (521)..(521): n is a, c, g, or t
  misc_feature (560)..(561): n is a, c, g, or t
  misc_feature (665)..(665): n is a, c, g, or t
ggggttttcggggcttgccctagatggaaaggtttgggncactccaatggggggtcaaagttggggntccagcttcccctcatcctagaagggggtgggggggggncctcagggggntttgggggggnggggggggaggnggnggggtttgggtgtgggtgggggggggtggggcaggggccaaggggggcccatctgtngnctncgagtggtggnaggntntntggggggggngggcngggggggggggngggggggcggcngtgtgggcngggggagggggggggggggagtttaggngggaggaagctggagtgtttgcttgtntttttaagatttttgatttttttttccntttnttnanttaacntggttatttntttnttttttnttttttnanantttcatggaataagggtagggtggggggttcggtggcctggcttcctggcatcactcgctcatcaaagttctnactcaggaggaagttggcagccaagttctcatttttttcacacgcnaaacaggcctggatgaccaggctctctgggaagcccagnnccttcaacctctctatagcttctttctcctgcggcgtcacctggatgtagttcatctgcggggcctcctctcctatggcgcccacctccccctccacatctganatgtccgccagc

SEQ ID NO: 593524 - DNA, 1100 bp, Homo sapiens
ccatcgcgtccggccgacggcagatgctgcatgatcactagtgcctgggaatcaatgacggagtcgaggatattgactatcctggtccagagcatactctttagcactacaattgacagtgtgcctatgtgtctactccggctgtccagagcaatgcaagcagggtagtgaaatgacccgctcgatgtgacacccactccaggcaacgctgcgagattgcccaacctgggagaaaggaagacctcgactactgcttcctggtgcaggccctgtgcagtacgggatacgaccgggtccatgcggattgatcgaagccccgcgtgtcctgccccaggcatgttagagtggagtgtatgcaactagctctaaggcatgtgatatggcgtagatttgcccgtcgcaccatagtcatagttttctacgggcaatcatgcccccacttgagtggtggcgtgttctggaatgtattctgaaatccgaggtacgtcaccagcctctgtacttcctccgaacctagaatatctgaagtgggcgagggtgtaggccacatgatgaattggtactagatgagcgtaatagtggaccccttggggtattactacatgcctgtatcagggctcgcttccctcgtgcatgcgccggtctatcacacatcaaaggcaccccgctctctgtgacgagttggagacttggtcaggacgtataagttcgccattgggtaggcaaactattaaattcgtgtgcaccctcattgcagaacttgagtgatgagtaaagaaagcatgaggtgatctggttccattccacctgaattccatgccttaaacttccctgcaagagaaatgccccctttgttggaagccccagggtccgggcgttggctccccaactaagcgctaatccagcccggttcactggactcccttgattgccccatatactgattacttaattccctgcagattcataacttatatgggttggcccacttgactttaggctcatgacgaatcaccaactcacaaagaaatatacctcagaaacttacgagggttgaaacacatatgttctgcatacaagcgtacctcacttaataaaca

SEQ ID NO: 593525 - DNA, 1007 bp, Homo sapiens
tgtaactaatactactgtgtgtgcattgaccctggtttataatttgaaggcttattctactttacatatattatgttaattcaacatatctcaaatgttgactttgagtggctaaaatattctaaaggaaactagaaaataaacagctcactatatctttcataaaataaacaaaaagtatttagaaaataaacagctcactatatctttcataaaataaacaaaaagtatttagaaattgatgtgctgcctgaacttaaatcacacatgactcacttcatttgaatagaagatggtggtttacattgtttgaaggacccacactctgagggaatttcccaacatccatcctggaagggatgaaagagttctctaaattccattattttcattccccccgggcaacaattagattctctggtatccagatgattgacaccttaggcggattttatagacacccatacccataaggcagagaccaaccacgatggccccaatcacaggaagcacaattgtgtagtcagacgagcactcatccacatttccaaagtggtcatcttcaaaatcaaaggcttgaagttggacatcggtttgttttcacctgcaggtgggctgacaactggaggctctgttcactcacgcacttgaaggaatgcccgactgctgtctggaacatcaccaccgcatgtttgattccttggtaaactgtctctggatctgagacggtcaaataggctcccacttcactgatatatatgattcttcatccttggtaactgtgagattcaccaatccgcctgaaaaattcaccggagggttggattttcgggtgccacagttccaagagcttgcgttgcgtgggggtccatgttgaagtattttccgaggctgaaaaaaccgaattcttgtctgaacaatcagtgttccccatcttggtgttatcagagctggtccgttaaaaccgataattccagctgaactgaccaggggggtgcagggtggcg

SEQ ID NO: 593526 - DNA, 134 bp, Homo sapiens
acacttagtcaaagagacaacagagggttgtgacaatggtccagtgagcctggcccagaactcccttcaactagtctcttgcatcttcccattgtcgaattagtctccagcctctaaataatgcccagtcttct

SEQ ID NO: 593527 - DNA, 404 bp, Homo sapiens
tgtgtagcgtcgggcatatcgtagggtagatactagccgctcgccgcgtctagattgtccagcacgaaaggggttcttctccatccaggcatgattgaccggactccgtggatacgtggcgtctggcgaaaggtagcgttcagggatgggcaagttattgttggggaccccgttggggacccatttcctctcctcagctccccagagcacagagttgagatccgggagatcttcaaagatgtcacagccctcctcagtccacagtcccagcgcccagttcccaaactctgagcccatctgcgctgccacctcgtagccatcaaggttcagtgaggggcccaggtggatgcgtgtgtcctgcaccatgctgcgcacacgttggttcccatcgcggtactctcggg

SEQ ID NO: 593528 - DNA, 176 bp, Homo sapiens
agttgctatgatggcgcagttgaggcggcgcatatgcatcctaggctatatatccggagtatacgtagcggtaatgtaacaacggtactctagaatatagctagcatggcaaattaaagcgctgatatcgatcgcgcgcagatctgtcatgatgatcattgcaattggatccatat

SEQ ID NO: 593529 - DNA, 338 bp, Homo sapiens
ggcgacattcagagctctctgtctgaggaaatataagaagagccttgggagctcctcactgagcctcctgtgtgtcacgacatatccttgcagtctgccactgaagcagcctcgccaaagcaaagattccctgctatggaagcgatggtgggcaagataaagtcccccaaagtagttacagatttttctttttctggagtaaaactcacttgctcagcgttgtcacacatctgtttaaagtctttaatgcttttaattctcaggtggttttgagggaaggagaagaacctgtgattttccttctgtgtatctttttagtgcttagaaattacgtgcca

SEQ ID NO: 593530 - DNA, 159 bp, Homo sapiens
gggggggggggggggggggggaccccccccgccccttcccagggtgggtggggttattttaaaaattttttaaatgggttcccggaccccccccccgggggtttttccccaaattggtttttgggtttttaaaaaattttaaaccggggttttgaatta

SEQ ID NO: 593531 - DNA, 286 bp, Homo sapiens
tgcgtcagcatctcatcgcttcctgaagccccagctgcctggagtggggccccttttgggtgtggctcttcaggagcaaggcaaattgacgcacagagaacttgacggatgtgtaaatggaacagcttcccggaggtacctcgaggagggcaagggtaatgaaatgaatgaaatgaacccctgcacagcgagggagcacttacaccctgacaccctcctgcagggagaaggaagatgacaaggatctctctgttgaccttttcatagtgcaaacaagctactgata

SEQ ID NO: 593532 - DNA, 290 bp, Homo sapiens
  misc_feature (64)..(64): n is a, c, g, or t
  misc_feature (221)..(221): n is a, c, g, or t
tcgcagcttcctgaccgtttttcagcatttccatcactattacccttgttcgtgacttgcattnatctttccgctagacaatataatagactctttcatagatgtccctgcctctgatagtctgtgccctacactggaggccgaaaaattcttggtaacacctaaatccggtggtcacattttcttcttcaaggtcagaagcctcccattagggtcccggngtcactcagagtcaaaagcaaggtcctccgggctgaggacagtgaggtcacgccctgttaatcctaagc

SEQ ID NO: 593533 - DNA, 497 bp, Homo sapiens
tctacgagccaacaaacagaatagttctagaaagaaaaaaaccagaaaattgagtagaggaaattatcacggtggtcacagaggataattcccctgaactgaagaacttaagtcttcgtcctgaacaaacctgctgtcaagtctcagcaaaatactttacagacagaaatccagatagaaattttagaatcccaaagagataaagaacaattgaacaaaaaatgaaaaactttcagagcaagagaaaaggcaacttacaaagaactgagttctatatggagataacctagcaaatataaaggcagacaatacgccatttacagaaataaaagggttccaatttacatttcaaggtgtcttttcttataaaattacttgagaatgtactccatcaaaactaaggagtaaattacgagaaaaaatcaaaatacttaacaaaacgggggggggcagggcacgagccaagaaacagtgggtccaactaaagaaagtggtac

SEQ ID NO: 593534 - DNA, 156 bp, Homo sapiens
gggggggttaatctaaaacactctttacgccggcttctattgacttggggttaatcgtgtgaccgcggtggctggacacgaaattgacccacccctgggggttagtatagcttagttaaacctctcgtttattgctaaaggtaaatcactgctgtt

SEQ ID NO: 593535 - DNA, 106 bp, Homo sapiens
aatagcgacgcacgctctgctgccaggggattgagaatgagtgtgaggcgtttataccatagccgagccttctttgtgctatccctattaggctctttttacaacc

SEQ ID NO: 593536 - DNA, 459 bp, Homo sapiens
tgatcttgaggatcccgcctacctggaactgacgaagacgcatagtagaggcctgagactagttcggactccccctctcgatcaggacaagagtagacggttggtctctgctagtgtggagataattcatattatggccaaaggtcatgatggcaggagtaatcagaggtgttcttgtgtagtgataaaggtgtagaggtaaaaggagccacttattactcatgttgactgtacaatgactggctatggtgactccatatgaaattgtttgctctactgctctgctgagcgccgatcaggggcgtagtttgagtttgatgctcaccctgatcagaggattgagtaaacggctaggctagaggtggctagaataaataggaggcctaggttgaggttgaccagggggtcgggtatggggaggggggttcatagtagaagagcgatggtgagagctaaggt

SEQ ID NO: 593537 - DNA, 1019 bp, Homo sapiens
aggcatcacgctggctttgcctggggttctcaggaggggagagtgggagaggcttgctgctgaggaaatttatttggtagattgaaggtttgaacgagagctacagaaacgaaagaaaaagtctgtataagccaatggtgttcgggaagaaaataaccccattgccttgagttgtaggtgccactactactctggaaaaatggcagatgacgaagactatgaggaggtggtggagtactacacagaagaagtggtttacgaagaggtgccgggagagacaataacaaaaatttatgagactacgacaacaaggacatctgactatgagcaatcagaaacttccaaaccagctctggcacagccagcactggcacagccagcatcagcaaagccggtggagaggaggaaggtcatccggaagaaagtggatccttcaaagttcatgaccccctacattgcacacagtcagaaaatgcaggatctttttagcccaaataaatacaaggagaagtttgagaaaacaaaaggacagccatacgccagcacaacagatactccagaacttcgcagaatcaaaaaagtacaagatcaactcagtgaggttaagtatcgaatggatggtgatgtgctaagactatatgtcacgtagatgaaaaagcaaggattttgacctgcaagaaagtgtcgcagcaggtcagtaaggtttatacaagcagaactgggaagacccaggataagtactgttcctcctgatgcccctgaacttgtccaggccgttaagaacaccgccatgttcagcaagaaactgtacactgaagactgggaagcagacaaaagtttgttttacccctataatgatagcccggaactgaggagagttgcccaggcccagaaagctctcagtgatgttgcctacaaaaaaggtctcgctgaacagcaagctcaattcacgcctctggccgatcctccagatatagaatttgccaagaaagtaaccaatcaagtgagcaagcaaaaat

SEQ ID NO: 593538 - DNA, 4045 bp, Homo sapiens
  misc_feature (72)..(72): n is a, c, g, or t
  misc_feature (271)..(271): n is a, c, g, or t
  misc_feature (1678)..(1678): n is a, c, g, or t
  misc_feature (1680)..(1680): n is a, c, g, or t
  misc_feature (1682)..(1682): n is a, c, g, or t
ctgaactacaaggtagagggagagaaactgaagcacaagtatactattgacgccatgagtcttgagcatacnaggaatgtcaatcaaattcagagtgataatgtgtataaagacgagtataacagcttcttgaagggcatcggatggatccctattggttccctggaggtggagaaggtcaagaaagcaggcgatgcattaaatgagaggaagtatcgacagcacccagataccgtcaagttcacaagtgtgcctgattccatgggcatgntgttggctcagcataacacaaagcagctaagtgatttgaactacaaggtagagggagagaaactgaagcacaagtatactattgaccctgaattgcctcagtttattcaagccaaagtcaacgccctcaacatgagtgatgctcattataaagcagattggaagaaaaccattgccaagggctatgatttgagaccagatgccatcccaattgttgctgcaaaaagttcaaggaatattgctagtgattgcaaatataaggaggcctacgagaaagccaaaggcaagcaagttggatttctcagtcttcaggatgatcctaaactggttcactacatgaatgtggccaaaatccagtctgatcgtgagtacaaaaagggctatgaagccagcaagaccaagtaccacacacctctggatatggtcagtgtgacagctgcaaagaaatctcaggaggttgccaccaacgccaactacagacagtcataccaccactacactctcctgcccgatgccttgaatgtggagcactccaggaatgccatgcagattcagagtgataatctgtacaaatctgacttcaccaattggatgaaagggatcggctgggtgcccatagagtccctggaggtggagaaggcaaagaaagcaggagagattcttagtgagaagaagtatcgccagcaccccgagaagctgaagttcacttacgccatggacacaatggaacaggcacttaacaagagtaacaaactgaacatggacaagaggctctacactgaaaaatggaacaaggacaagaccaccattcatgtcatgcctgacacaccggatattttactctccagagtaaaccaaatcaccatgagtgataaactgtacaaagctggctgggaagaggaaaagaagaaaggatatgacctgaggcctgatgccattgcaataaaggctgcaagagcctctagagacattgccagtgattacaaatacaagaaagcctatgaacaagccaaagggaaacacattggcttccggagcctggaagatgaccccaagctggtgcacttcatgcaagtggccaagatgcagtcagaccgggaatacaagaagggatatgagaaatccaagacctccttccacaccccggtggacatgctcagtgtggtggcagccaagaagtctcaggaagtggccaccaatgccaactacaggaacgtgatccatacctacaacatgcttcctgatgccatgagctttgaattggccaaaaatatgatgcagattcaaagtgataatcagtacaaggctgactatgctgacttcatgaagggcattggatggctccctctgggctccctggaagcagagaaaaacaagaaagccatggagattattagtgaaaagcccnantnccgccagcacccagacactttgaagtattccacactcatggactcgatgaacatggttttggcccagaataatgcaaaaattatgaacgaacatctctacaaacaagcatgggaggctgacaaaaccaaagtccacatcatgcctgatatcccccagattattttggcaaaggcaaatgcaattaatatgagtgataaactctacaaactttccttggaagagtctaaaaagaaaggctatgatctcagacctgatgcaattcctatcaaagctgccaaggcttccagagatattgcaagtgattataaatacaagtacaattatgaaaaagggaaggggaaaatggttggtttccgcagtctcgaggatgatcccaaattagtccattccatgcaagtggctaagatgcaatctgatcgggagtacaagaaaaactatgagaacacaaagaccagctaccacacccctgccgacatgctcagtgtcacggctgcaaaggatgcccaagccaacatcaccaacactaactacaagcacctgattcacaagtacatcctccttccagatgcaatgaacattgagctgaccaggaatatgaatcgcatacagagtgataatgaatataagcaagattacaatgaatggtacaaagggcttggctggagtccagcaggttctctggaagtggagaaggccaagaaagcaactgaatatgccagtgatcagaaataccgccagcacccgagcaacttccagtttaagaagctgactgattccatggacatggtgcttgccaagcagaatgcacataccatgaacaagcatttatacaccattgattggaataaagataagaccaagattcatgtgatgcctgatacaccagatattttacaagccaagcagaatcaaacactgtatagtcagaaactctataaacttggatgggaagaagctttgaagaaaggctatgatctcccagttgatgcaatttctgtacagctagctaaagcttcaagagacattgctagtgattataaatacaaacaaggctaccgaaagcaacttggccaccatgttggattccggagtctgcaagatgacccaaaacttgtgttgtccatgaatgtagccaaaatgcagagtgaaagagaatacaagaaggactttgagaagtggaaaactaagttctccagcccagtggacatgttgggagtggtactggccaagaagtgtcaggagttggttagtgacgtggactacaagaactacctgcatcagtggacatgtctgcctgatcagaacgatgttgtgcaagctaagaaagtttatgaactgcaaagtgagaatctatataaatctgaccttgagtggctgagaggcataggatggagtcccttgggttctttagaggcagaaaagaacaagcgggcttcggaaatcatcagtgagaagaaatatcgtcagcctccagacagaaacaagttcaccagcattcctgatgccatggatatagttctggcaaagacaaatgccaaaaataggagtgatagactttatagagaagcttgggacaaagacaagactcagatccacatcatgcctgatacacctgacattgttctggctaaagcaaacttaatcaacacaagtgataaactctaccgaatgggttatgaggagctgaagagaaaaggttacgatcttcctgttgatgccataccaatcaaagcagcaaaagcctcccgggaaattgccagtgaatacaagtacaaggaaggctttcgcaagcagctcggccaccacattggtgcccggaacattgaagatgaccccaagatgatgtggtccatgcatgtggccaagatccagagtgacagggagtacaagaaggactttgagaagtggaagaccaagttcagcagcccagtggacatgctgggggtggtgttggccaagaagtgccagaccttagtcagcgacgtggactacaagaactacctgcaccagtggacatgcctgcccgaccagagcgatgtcatccatgctcggcaggcctatgacctccagagcgataatttgtacaagtcagaccttcagtggctaaaaggcattggctggatgactagtggttctctcgaggatgagaaaaataaacgagccacccagattttgagtgaccatgtttaccgtcagcacccagatcaatttaagttttccagccttatggattccataccaatggttttggcaaaaaacaatgctattaccatgaatcatcgcctctatacagaagcttgggataaagataaaaccactgtccacattatgccagatacccctgaagttttattagctaaac

SEQ ID NO: 593539 - DNA, 387 bp, Homo sapiens
  misc_feature (29)..(29): n is a, c, g, or t
  misc_feature (214)..(214): n is a, c, g, or t
  misc_feature (381)..(381): n is a, c, g, or t
  misc_feature (387)..(387): n is a, c, g, or t
aggaacaggaaaatgaaggtttggattgnttaaagggggtccaacatttgtggtgtcaagaaagtggcagtagtgtcaagtgataagtaacctcaggggtaagagtggaggctcccatagctgtgggcaacatgcacagggcacctgtggctagaagaggcctcatacattgccagtctgaactccgcagctcttcctctggacctcagtctgnccaagccccacgcttggcacctgggcatacagtggtatgcaagtgattcacgtgctctagcttccaggagcttccaatccatggggaacatagaaggaattgatcactagtgaatgtttgttttttgttttgagacagtctcgctctatcgcccagactggagtacnagctgn

SEQ ID NO: 593540 - DNA, 155 bp, Homo sapiens
acgcctgactccggaccccacgaactcactttgccgcccgacacacgaccctgacctcgactatacttagacttactttagcgacgtgacacggacacttcgactggcgactgacgactgactacggtgaccttaccgacggcttactttacttt

SEQ ID NO: 593541 - DNA, 400 bp, Homo sapiens
  misc_feature (368)..(369): n is a, c, g, or t
  misc_feature (373)..(373): n is a, c, g, or t
gacatttctgcttatttttaatttatcatgcaaggaaatataaaaaggataaaagtttagggaagaaatggttgaagttcaacatgctattggttaaataccaatattcaagcaaatattgaagtggaaaagttacagaaaatttacaaatgaaatggaagttacagaatgttaaacacacacttaggattcttgggaagttccagtttcttctcataatttaatttttcctcttttgcagaatcagtacaaggctgactatgctgacttcatgaagggcattggatggctccctctgggctccctgagaaaactcccacgtctgttctgtagcttctgacatacagaaccctggtgttttgcaattnncttnccaaaaagaaaggtcttgcctggcaaa

SEQ ID NO: 593542 - DNA, 353 bp, Homo sapiens
  misc_feature (296)..(296): n is a, c, g, or t
gacatttctgcttatttttaatttatcatgcaaggaaatataaaaaggataaaagtttagggaagaaatggttgaagttcaacatgctattggttaaataccaatattcaagcaaatattgaagtggaaaagttacagaaaatttacaaatgaaatggaagttacagaatgttaaacacacacttaggattcttgggaagttccagtttcttctcataatttaatttttcctcttttgcagaatcagtacaaggctgactatgctgacttcatgaagggcataggatggctgcctncttggcaaccagcgttttcttttctttttgtattagtcggtctatctgtcgactcgt

SEQ ID NO: 593543 - DNA, 481 bp, Homo sapiens
tgccatggggataatagtacgcgagggaaccgtaagctaccacgtcaggtggctgcctctccagcggccaataaagaggtgtagaacttggtatgatggtcgatagaagtgtgtggcatgaatgtgcctatgacgccaccgagatgccatatgtaagtctatcagtgcgaggtgcctctagagtgctctctgtagaagcaatatgagtgagtgaagagagaggcctttggctgtggccgggatataggggtgctcttctacctgtaattgggtgttggaaaaactctggcttaattggtattccattaaggttcttttccatttaaagtacgtcttaaaatcaaagtatccaatatataaaacgccacaaaagtagattaccataattagcagagatttcagtcagtaaaatgttagaaatcaaactataagaccattcaagtcctttatatagtgtcttaggtatatgccattattttaa

SEQ ID NO: 593544 - DNA, 8435 bp, Homo sapiens
  misc_feature (4462)..(4462): n is a, c, g, or t
  misc_feature (4661)..(4661): n is a, c, g, or t
  misc_feature (6068)..(6068): n is a, c, g, or t
  misc_feature (6070)..(6070): n is a, c, g, or t
  misc_feature (6072)..(6072): n is a, c, g, or t
aggcatcacgctggctttgcctggggttctcaggaggggagagtgggagaggcttgctgctgaggaaatttatttggtagattgaaggtttgaacgagagctacagaaacgaaagaaaaagtctgtataagccaatggtgttcgggaagaaaataaccccattgccttgagttgtaggtgccactactactctggaaaaatggcagatgacgaagactatgaggaggtggtggagtactacacagaagaagtggtttacgaagaggtgccgggagagacaataacaaaaatttatgagactacgacaacaaggacatctgactatgagcaatcagaaacttccaaaccagctctggcacagccagcactggcacagccagcatcagcaaagccggtggagaggaggaaggtcatccggaagaaagtggatccttcaaagttcatgaccccctacattgcacacagtcagaaaatgcaggatctttttagcccaaataaatacaaggagaagtttgagaaaacaaaaggacagccatacgccagcacaacagatactccagaacttcgcagaatcaaaaaagtacaagatcaactcagtgaggttaagtatcgaatggatggtgatgtgctaagactatatgtcacgtagatgaaaaagcaaggattttgacctgcaagaaagtgtcgcagcaggtcagtaaggtttatacaagcagaactgggaagacccaggataagtactgttcctcctgatgcccctgaacttgtccaggccgttaagaacaccgccatgttcagcaagaaactgtacactgaagactgggaagcagacaaaagtttgttttacccctataatgatagcccggaactgaggagagttgcccaggcccagaaagctctcagtgatgttgcctacaaaaaaggtctcgctgaacagcaagctcaattcacgcctctggccgatcctccagatatagaatttgccaagaaagtaaccaatcaagtgagcaagcaaaaatacaaagaagactatgaaaataaaatcaaaggcaaatggagtgagacaccttgctttgaagttgcaaatgccagaatgaatgctgataacattagcacaaggaaataccaggaagattttgaaaacatgaaagaccagatctacttcatgcagaccgaaacaccagagtataaaatgaataaaaaagctggtgtggcagctagcaaggtaaaatacaaagaagactatgaaaagaataaaggaaaagcagattataatgtgcttcctgcttcagagaacccacagcttaggcagctgaaggcagcaggagatgccctaagtgacaaactatacaaggaaaactatgaaaagacaaaagcaaagagcataaattactgcgagacccccaaattcaagctcgatactgttctgcagaacttcagtagtgataaaaaatataaagattcctacttaaaagatattttgggacattatgtaggcagcttcgaggatccataccattcacactgcatgaaagtcacagctcaaaacagtgataaaaactacaaagcagaatacgaagaagacagaggcaaaggcttcttccctcagaccataactcaagaatatgaagcaattaagaaactagatcagtgtaaagaccacacctacaaagtccatccagataagacaaaattcacccaagttacagactctcctgttctgctacaagcccaagtcaattccaaacaactgagtgacttaaattacaaagcaaaacatgaaagtgaaaagttcaagtgccatatcccccctgatactcctgcttttatccagcacaaagtcaatgcctataacttgagtgataatctttataagcaagactgggagaagagcaaagccaaaaagtttgacattaaagtggatgccattcccctgctggcagccaaagccaacaccaagaacaccagcgatgtgatgtacaagaaagactatgaaaaaaacaaagggaaaatgattggagtcctcagcattaatgacgatcccaagatgctgcactccttgaaggtggccaaaaaccagagtgatagattatacaaggaaaactatgagaagacaaaggcaaagagtatgaattactgtgagaccccaaaatatcaacttgatactcagctgaagaacttcagtgaggctagatataaagacttatatgtaaaggatgttttgggacattatgtaggcagcatggaggacccatatcacacacactgcatgaaagttgcagctcaaaacagtgataaaagttacaaagcagaatatgaagaagataaaggaaaatgctatttccctcagacaataacacaagaatatgaagcaatcaagaagctggaccagtgtaaagatcatacctacaaagttcatccagataagaccaaattcacggcagtcactgattctcctgtactgttgcaagcccagctcaacacgaaacagcttagtgatctgaattacaaagcaaaacatgaaggtgagaagttcaagtgccatataccagcagatgctccacagtttatccaacacagagtcaatgcctataatctgagtgataatgtttataagcaagactgggagaagagcaaagccaagaagtttgacattaaagtggacgccattcccctgttggcagccaaagccaacaccaagaacaccagcgatgtgatgtacaagaaagactatgaaaagagcaaagggaaaatgattggagccctcagcattaatgacgatccaaagatgctgcactccttgaagacagccaaaaaccagagtgatcgcgaatatcgaaaagattatgaaaagtcaaaaactatctacacggcacctcttgatatgctccaagtcactcaagctaagaaatctcaggcaattgccagcgacgttgattataagcacatcttacacagttacagctacccccctgatagcatcaatgtggaccttgccaagaaggcatatgcgctgcagagcgatgttgaatacaaagctgactacaatagctggatgaaaggttgtggctgggtgccttttgggtccttagaaatggaaaaggcaaagcgagcttcagacatcctcaatgagaaaaaatatcgccaacatccagacaccctcaagtttacctcgattgaagatgctccaattacagtacagtctaaaattaaccaggcccagaggagtgatatcgcttacaaagccaaaggagaggaaattattcacaaatacaacctgccaccagacctgccccagttcatccaggctaaagttaatgcctacaatatcagtgagaatatgtacaaagcagacttgaaagacttgagcaagaagggatatgacctgagaactgatgcgattcccatcagagctgccaaagctgccaggcaggcggcgagtgacgttcagtacaaaaaagactatgaaaaggctaaagggaaaatggttggcttccaaagtcttcaagatgaccctaaactggttcattatatgaacgtggccaagatacaatcagatcgggagtataaaaaagactatgagaagacaaagtccaaatacaacacgccccatgatatgttcaatgtcgtggcggctaagaaagcccaggatgtggtcagcaatgtcaactataagcattctctccatcattacacctacttgcctgacgccatggacctggagctgtctaagaacatgatgcagatacagagtgataacgtctacaaggaagactacaacaactggatgaaaggcattggctggattcctattggcagtctcgacgtcgaaaaagttaaaaaggccggtgatgctctgaatgaaaagaagtacaggcaacatccagacaccctcaaatttaccagcattgtggactccccagttatggtccaggcaaaacagaacacgaagcaagtcagtgatatcttatacaaggctaaaggagaagatgtgaaacataaatacaccatgagtcctgatcttcctcagtttctccaggccaagtgcaatgcttacaatataagtgacgtctgttataaacgggattggcatgacttaatagccaagggcaacaatgtgctgggcgatgctattcccatcactgcagccaaggcatcgagaaacattgccagtgattataaatacaaggaagcttatgagaagtcaaagggaaagcatgtgggtttcagaagcctccaggatgatcccaagctggtccactatatgaatgtggcaaagctgcagtctgatcgtgaatacaagaagaactatgagaacaccaaaaccagctaccatacccctggggacatggttagcatcacagctgcaaagatggcccaggatgtcgctaccaatgtcaactacaaacagccattgcatcattacacatacctacctgacgccatgagtcttgagcatacnaggaatgtcaatcaaattcagagtgataatgtgtataaagacgagtataacagcttcttgaagggcatcggatggatccctattggttccctggaggtggagaaggtcaagaaagcaggcgatgcattaaatgagaggaagtatcgacagcacccagataccgtcaagttcacaagtgtgcctgattccatgggcatgntgttggctcagcataacacaaagcagctaagtgatttgaactacaaggtagagggagagaaactgaagcacaagtatactattgaccctgaattgcctcagtttattcaagccaaagtcaacgccctcaacatgagtgatgctcattataaagcagattggaagaaaaccattgccaagggctatgatttgagaccagatgccatcccaattgttgctgcaaaaagttcaaggaatattgctagtgattgcaaatataaggaggcctacgagaaagccaaaggcaagcaagttggatttctcagtcttcaggatgatcctaaactggttcactacatgaatgtggccaaaatccagtctgatcgtgagtacaaaaagggctatgaagccagcaagaccaagtaccacacacctctggatatggtcagtgtgacagctgcaaagaaatctcaggaggttgccaccaacgccaactacagacagtcataccaccactacactctcctgcccgatgccttgaatgtggagcactccaggaatgccatgcagattcagagtgataatctgtacaaatctgacttcaccaattggatgaaagggatcggctgggtgcccatagagtccctggaggtggagaaggcaaagaaagcaggagagattcttagtgagaagaagtatcgccagcaccccgagaagctgaagttcacttacgccatggacacaatggaacaggcacttaacaagagtaacaaactgaacatggacaagaggctctacactgaaaaatggaacaaggacaagaccaccattcatgtcatgcctgacacaccggatattttactctccagagtaaaccaaatcaccatgagtgataaactgtacaaagctggctgggaagaggaaaagaagaaaggatatgacctgaggcctgatgccattgcaataaaggctgcaagagcctctagagacattgccagtgattacaaatacaagaaagcctatgaacaagccaaagggaaacacattggcttccggagcctggaagatgaccccaagctggtgcacttcatgcaagtggccaagatgcagtcagaccgggaatacaagaagggatatgagaaatccaagacctccttccacaccccggtggacatgctcagtgtggtggcagccaagaagtctcaggaagtggccaccaatgccaactacaggaacgtgatccatacctacaacatgcttcctgatgccatgagctttgaattggccaaaaatatgatgcagattcaaagtgataatcagtacaaggctgactatgctgacttcatgaagggcattggatggctccctctgggctccctggaagcagagaaaaacaagaaagccatggagattattagtgaaaagcccnantnccgccagcacccagacactttgaagtattccacactcatggactcgatgaacatggttttggcccagaataatgcaaaaattatgaacgaacatctctacaaacaagcatgggaggctgacaaaaccaaagtccacatcatgcctgatatcccccagattattttggcaaaggcaaatgcaattaatatgagtgataaactctacaaactttccttggaagagtctaaaaagaaaggctatgatctcagacctgatgcaattcctatcaaagctgccaaggcttccagagatattgcaagtgattataaatacaagtacaattatgaaaaagggaaggggaaaatggttggtttccgcagtctcgaggatgatcccaaattagtccattccatgcaagtggctaagatgcaatctgatcgggagtacaagaaaaactatgagaacacaaagaccagctaccacacccctgccgacatgctcagtgtcacggctgcaaaggatgcccaagccaacatcaccaacactaactacaagcacctgattcacaagtacatcctccttccagatgcaatgaacattgagctgaccaggaatatgaatcgcatacagagtgataatgaatataagcaagattacaatgaatggtacaaagggcttggctggagtccagcaggttctctggaagtggagaaggccaagaaagcaactgaatatgccagtgatcagaaataccgccagcacccgagcaacttccagtttaagaagctgactgattccatggacatggtgcttgccaagcagaatgcacataccatgaacaagcatttatacaccattgattggaataaagataagaccaagattcatgtgatgcctgatacaccagatattttacaagccaagcagaatcaaacactgtatagtcagaaactctataaacttggatgggaagaagctttgaagaaaggctatgatctcccagttgatgcaatttctgtacagctagctaaagcttcaagagacattgctagtgattataaatacaaacaaggctaccgaaagcaacttggccaccatgttggattccggagtctgcaagatgacccaaaacttgtgttgtccatgaatgtagccaaaatgcagagtgaaagagaatacaagaaggactttgagaagtggaaaactaagttctccagcccagtggacatgttgggagtggtactggccaagaagtgtcaggagttggttagtgacgtggactacaagaactacctgcatcagtggacatgtctgcctgatcagaacgatgttgtgcaagctaagaaagtttatgaactgcaaagtgagaatctatataaatctgaccttgagtggctgagaggcataggatggagtcccttgggttctttagaggcagaaaagaacaagcgggcttcggaaatcatcagtgagaagaaatatcgtcagcctccagacagaaacaagttcaccagcattcctgatgccatggatatagttctggcaaagacaaatgccaaaaataggagtgatagactttatagagaagcttgggacaaagacaagactcagatccacatcatgcctgatacacctgacattgttctggctaaagcaaacttaatcaacacaagtgataaactctaccgaatgggttatgaggagctgaagagaaaaggttacgatcttcctgttgatgccataccaatcaaagcagcaaaagcctcccgggaaattgccagtgaatacaagtacaaggaaggctttcgcaagcagctcggccaccacattggtgcccggaacattgaagatgaccccaagatgatgtggtccatgcatgtggccaagatccagagtgacagggagtacaagaaggactttgagaagtggaagaccaagttcagcagcccagtggacatgctgggggtggtgttggccaagaagtgccagaccttagtcagcgacgtggactacaagaactacctgcaccagtggacatgcctgcccgaccagagcgatgtcatccatgctcggcaggcctatgacctccagagcgataatttgtacaagtcagaccttcagtggctaaaaggcattggctggatgactagtggttctctcgaggatgagaaaaataaacgagccacccagattttgagtgaccatgtttaccgtcagcacccagatcaatttaagttttccagccttatggattccataccaatggttttggcaaaaaacaatgctattaccatgaatcatcgcctctatacagaagcttgggataaagataaaaccactgtccacattatgccagatacccctgaagttttattagctaaac

SEQ ID NO: 593545 - DNA, 774 bp, Homo sapiens
caatcattttagatgaattgcaaacaaaattcaatgactttctgcctgaaagaaacttaaatttaagtatggaaagacttttgtttctgataattaccagaagttttttttaaacaaaaaaaaaaactatgctaacttatgttttaataaactaaatgactaaccttaaaatatctatggagcaactaggaaactagcgaacaaagatttcataaaagaaggaggaaagacccaaattagaacttctaaagaagaacaaatacactagcaaagctaaacaatttacattgaaccttgttctgacaacacggttggacttagccaaagagagatctcattgatttcgaagatagatcagaagcttcttcagaatgatcctagaaaagccaaagggtcggaaataccgcaagggaacttaagagcataagaacaatacggtgcaaaagatctaacatatgttggacttagagtccagagaggacgaacgtggcgccagaggcaataacttacacgcagatcttgactggggatttcccagaaattgcttaaagacttgattttccagcatttaacgagcgtccagctgaaatcccaaacagaattacttaacactgatttccaccagttagacttaccagaagctgaacctggttgaaaaccaaaagacggcagacaccttttaaaagcagctcggacgaaaggaccgattactccctagggaatttcaggttagaactaattagctggacttctctgtggacatattgttaggca

SEQ ID NO: 593546 - DNA, 152 bp, Homo sapiens
atcgtgccattgcactccagcctgggcaacaagagtgaaactccgtctcaaaaaagagaaaaagaaaagaaaagaaaaagaaacagaaggaaaagaaagaaagagaaaagaaaagaaaagcacttcaaacagtgcctggcatgtaatgagtc

SEQ ID NO: 593547 - DNA, 5826 bp, Homo sapiens
  misc_feature (4462)..(4462): n is a, c, g, or t
  misc_feature (4661)..(4661): n is a, c, g, or t
aggcatcacgctggctttgcctggggttctcaggaggggagagtgggagaggcttgctgctgaggaaatttatttggtagattgaaggtttgaacgagagctacagaaacgaaagaaaaagtctgtataagccaatggtgttcgggaagaaaataaccccattgccttgagttgtaggtgccactactactctggaaaaatggcagatgacgaagactatgaggaggtggtggagtactacacagaagaagtggtttacgaagaggtgccgggagagacaataacaaaaatttatgagactacgacaacaaggacatctgactatgagcaatcagaaacttccaaaccagctctggcacagccagcactggcacagccagcatcagcaaagccggtggagaggaggaaggtcatccggaagaaagtggatccttcaaagttcatgaccccctacattgcacacagtcagaaaatgcaggatctttttagcccaaataaatacaaggagaagtttgagaaaacaaaaggacagccatacgccagcacaacagatactccagaacttcgcagaatcaaaaaagtacaagatcaactcagtgaggttaagtatcgaatggatggtgatgtgctaagactatatgtcacgtagatgaaaaagcaaggattttgacctgcaagaaagtgtcgcagcaggtcagtaaggtttatacaagcagaactgggaagacccaggataagtactgttcctcctgatgcccctgaacttgtccaggccgttaagaacaccgccatgttcagcaagaaactgtacactgaagactgggaagcagacaaaagtttgttttacccctataatgatagcccggaactgaggagagttgcccaggcccagaaagctctcagtgatgttgcctacaaaaaaggtctcgctgaacagcaagctcaattcacgcctctggccgatcctccagatatagaatttgccaagaaagtaaccaatcaagtgagcaagcaaaaatacaaagaagactatgaaaataaaatcaaaggcaaatggagtgagacaccttgctttgaagttgcaaatgccagaatgaatgctgataacattagcacaaggaaataccaggaagattttgaaaacatgaaagaccagatctacttcatgcagaccgaaacaccagagtataaaatgaataaaaaagctggtgtggcagctagcaaggtaaaatacaaagaagactatgaaaagaataaaggaaaagcagattataatgtgcttcctgcttcagagaacccacagcttaggcagctgaaggcagcaggagatgccctaagtgacaaactatacaaggaaaactatgaaaagacaaaagcaaagagcataaattactgcgagacccccaaattcaagctcgatactgttctgcagaacttcagtagtgataaaaaatataaagattcctacttaaaagatattttgggacattatgtaggcagcttcgaggatccataccattcacactgcatgaaagtcacagctcaaaacagtgataaaaactacaaagcagaatacgaagaagacagaggcaaaggcttcttccctcagaccataactcaagaatatgaagcaattaagaaactagatcagtgtaaagaccacacctacaaagtccatccagataagacaaaattcacccaagttacagactctcctgttctgctacaagcccaagtcaattccaaacaactgagtgacttaaattacaaagcaaaacatgaaagtgaaaagttcaagtgccatatcccccctgatactcctgcttttatccagcacaaagtcaatgcctataacttgagtgataatctttataagcaagactgggagaagagcaaagccaaaaagtttgacattaaagtggatgccattcccctgctggcagccaaagccaacaccaagaacaccagcgatgtgatgtacaagaaagactatgaaaaaaacaaagggaaaatgattggagtcctcagcattaatgacgatcccaagatgctgcactccttgaaggtggccaaaaaccagagtgatagattatacaaggaaaactatgagaagacaaaggcaaagagtatgaattactgtgagaccccaaaatatcaacttgatactcagctgaagaacttcagtgaggctagatataaagacttatatgtaaaggatgttttgggacattatgtaggcagcatggaggacccatatcacacacactgcatgaaagttgcagctcaaaacagtgataaaagttacaaagcagaatatgaagaagataaaggaaaatgctatttccctcagacaataacacaagaatatgaagcaatcaagaagctggaccagtgtaaagatcatacctacaaagttcatccagataagaccaaattcacggcagtcactgattctcctgtactgttgcaagcccagctcaacacgaaacagcttagtgatctgaattacaaagcaaaacatgaaggtgagaagttcaagtgccatataccagcagatgctccacagtttatccaacacagagtcaatgcctataatctgagtgataatgtttataagcaagactgggagaagagcaaagccaagaagtttgacattaaagtggacgccattcccctgttggcagccaaagccaacaccaagaacaccagcgatgtgatgtacaagaaagactatgaaaagagcaaagggaaaatgattggagccctcagcattaatgacgatccaaagatgctgcactccttgaagacagccaaaaaccagagtgatcgcgaatatcgaaaagattatgaaaagtcaaaaactatctacacggcacctcttgatatgctccaagtcactcaagctaagaaatctcaggcaattgccagcgacgttgattataagcacatcttacacagttacagctacccccctgatagcatcaatgtggaccttgccaagaaggcatatgcgctgcagagcgatgttgaatacaaagctgactacaatagctggatgaaaggttgtggctgggtgccttttgggtccttagaaatggaaaaggcaaagcgagcttcagacatcctcaatgagaaaaaatatcgccaacatccagacaccctcaagtttacctcgattgaagatgctccaattacagtacagtctaaaattaaccaggcccagaggagtgatatcgcttacaaagccaaaggagaggaaattattcacaaatacaacctgccaccagacctgccccagttcatccaggctaaagttaatgcctacaatatcagtgagaatatgtacaaagcagacttgaaagacttgagcaagaagggatatgacctgagaactgatgcgattcccatcagagctgccaaagctgccaggcaggcggcgagtgacgttcagtacaaaaaagactatgaaaaggctaaagggaaaatggttggcttccaaagtcttcaagatgaccctaaactggttcattatatgaacgtggccaagatacaatcagatcgggagtataaaaaagactatgagaagacaaagtccaaatacaacacgccccatgatatgttcaatgtcgtggcggctaagaaagcccaggatgtggtcagcaatgtcaactataagcattctctccatcattacacctacttgcctgacgccatggacctggagctgtctaagaacatgatgcagatacagagtgataacgtctacaaggaagactacaacaactggatgaaaggcattggctggattcctattggcagtctcgacgtcgaaaaagttaaaaaggccggtgatgctctgaatgaaaagaagtacaggcaacatccagacaccctcaaatttaccagcattgtggactccccagttatggtccaggcaaaacagaacacgaagcaagtcagtgatatcttatacaaggctaaaggagaagatgtgaaacataaatacaccatgagtcctgatcttcctcagtttctccaggccaagtgcaatgcttacaatataagtgacgtctgttataaacgggattggcatgacttaatagccaagggcaacaatgtgctgggcgatgctattcccatcactgcagccaaggcatcgagaaacattgccagtgattataaatacaaggaagcttatgagaagtcaaagggaaagcatgtgggtttcagaagcctccaggatgatcccaagctggtccactatatgaatgtggcaaagctgcagtctgatcgtgaatacaagaagaactatgagaacaccaaaaccagctaccatacccctggggacatggttagcatcacagctgcaaagatggcccaggatgtcgctaccaatgtcaactacaaacagccattgcatcattacacatacctacctgacgccatgagtcttgagcatacnaggaatgtcaatcaaattcagagtgataatgtgtataaagacgagtataacagcttcttgaagggcatcggatggatccctattggttccctggaggtggagaaggtcaagaaagcaggcgatgcattaaatgagaggaagtatcgacagcacccagataccgtcaagttcacaagtgtgcctgattccatgggcatgntgttggctcagcataacacaaagcagctaagtgatttgaactacaaggtagagggagagaaactgaagcacaagtatactattgaccctgaattgcctcagtttattcaagccaaagtcaacgccctcaacatgagtgatgctcattataaagcagattggaagaaaaccattgccaagggctatgatttgagaccagatgccatcccaattgttgctgcaaaaagttcaaggaatattgctagtgattgcaaatataaggaggcctacgagaaagccaaaggcaagcaagttggatttctcagtcttcaggatgatcctaaactggttcactacatgaatgtggccaaaatccagtctgatcgtgagtacaaaaagggctatgaagccagcaagaccaagtaccacacacctctggatatggtcagtgtgacagctgcaaagaaatctcaggaggttgccaccaacgccaactacagacagtcataccaccactacactctcctgcccgatgccttgaatgtggagcactccaggaatgccatgcagattcagagtgataatctgtacaaatctgacttcaccaattggatgaaagggatcggctgggtgcccatagagtccctggaggtggagaaggcaaagaaagcaggagagattcttagtgagaagaagtatcgccagcaccccgagaagctgaagttcacttacgccatggacacaatggaacaggcacttaacaagagtaacaaactgaacatggacaagaggctctacactgaaaaatggaacaaggacaagaccaccattcatgtcatgcctgacacaccggatattttactctccagagtaaaccaaatcaccatgagtgataaactgtacaaagctggctgggaagaggaaaagaagaaaggatatgacctgaggcctgatgccattgcaataaaggctgcaagagcctctagagacattgccagtgattacaaatacaagaaagcctatgaacaagccaaaagcaaagagcataaattactgcgagacccccaaattcaagctcgatactgttctgcagaacttcagtagtgataaaaaatataaagattcctacttaaaagatattttgggacattatgtaggcagcttctgatccataccattcacctgca

SEQ ID NO: 593548 - DNA, 415 bp, Homo sapiens
cgcggaagctgaagtctgttatcccagctctctggcaggcctagccgggaggagcaccacaggagcagattaagaccatcctgtttaagacaacgataactggtcttttctatacacaatcttaattctgcgaggtggcgggcgcttgttagacgagctactcttgtgggtgttgacggcgaaaggtgcaatccctggaaggtgcctcctgtgttgagcacaatttgtcttacctgactgcaggccgggcgacagcaagagtatctatcttagtggagagttacatcgcttggtcactgaataaccctgaccatttctgatgctgttggcgcgactagaagcctcttctctggcagctgtgggcctgagatttggtaggcccagcaggctccgggtgccatgggctcttgcgccc

SEQ ID NO: 593549 - DNA, 478 bp, Homo sapiens
taaaagactttatacaccatcactcttttttttaaaaagcatgggggaactggggttaaatacccaaagcaccccaagaccttcgggtagtatatagtcagttgtacaaagacagaatgggttttcgtggaccagagaggcttaatttttcaaaatttttcagaaagcatgcagacgcgagggatcaggcttgccttccttcaacggccaaaaacgacatgggctatgtccataccggaggggatgtcaggccacatccaagcggcactatcctaagtctttttacaggggggactgtttcaaggggatgactccgatacctttatgaatgcccattttgggagcatccccttggcctcaatatgactgaaagtcttgacagaaaccggagatgtcccagttgttgaacttaaggcacttcttgggaccacctcggagctcatgccacaactggtggagagaattgctcgtaacgatt

SEQ ID NO: 593550 - DNA, 1423 bp, Homo sapiens
gggaatgagcttcattacagtgtgactgccgacataacaagttacaaagacaaattgtgactttgtatgccgcttcacgagatgtgcacatgatattgtcgtcactcttgaacgacatatctacacgatactgccgtcttgattatgtgcaacgggatataacgatctagtagaagtccttgattattcgatactagcttaaatctatgttagctcttctgcttgggaggacatggccactgttctatcagtcatttaaccagtacctggcagcaatccaaagtcatcgtgtttatgaagacaacaggatcgaagtggctcacgaagtggtatctagcaactctcgaggcaggagaccagttccagtgcctggaatcttgtagacttaacctgagtgcatcgtagagatgggttgcttcggccatgattcgttccttgcagtgaccttttgcttgcagtgcgctagaagagagctccggggctagagcacggatcagaatagcaacacgtagactcatccgttcatagcacacatagtgcccagaacgccttattcgaataatctctcgcgatgttgtcatccgcacatctctcaaatcggtaggcatcgcatgcgcgggttcgaacacaaaagatctccgatactgcgcggctttgctgaattagctcttagtccaagtccatttggagaccaggcgaacgttccattcacgtgagggttgacccacttctcactccctcgctaaccacttattttccctttaaagaacccgtggcagagaattgcgagatccgcatttggcgtaaaaacatgtggtcgcaatgtggggcgcctgatcttgccacgagcgcaaacatccgctccccttttcttccatggcaattgtgtcacactccttgcggcgaacgtctactcccttgcggtccgttgggggaccgtttgctaaggtgcgcctctataggtgacgagcgaacttcgccacaatactcttctcacagcacaatgccacacgttactacacggcattatcggatttggaccctaatgtgggtgggagcccaaatacatgtggccgctatctattgaccaattacacagaatttccaccccacaatctggcttttatcagccgccttggtaaagatcaaataggggatacaatcagctcataggcccttcaaagaaaaccgccccaaagtacttctcaattacagagagcccgttactcccgcactgagttatcaccacgccaattccacaaaccttacaaactggctcggaagcgtcgttaccacacccttcggtcatacgccggcgcccactccaccagtatcagacacaaaaaaatacagccaatacacccaggatgaacgataccagttacatgcttcgagttactgtaacatacacgcctaccgccgt

SEQ ID NO: 593551 - DNA, 519 bp, Homo sapiens
acattctaccattttcatcataacctttttttattcctactcaccctttacatctcccaccacgagggctttgggagacccaatcttgtctctccacctaacaccctttaacttaataccacccacactcatgcccttaaagagactccataatgcaagtgcaagtatacccttcccaagaccaaagcgtaaaagaaatataattccatcttcccttttcaaggctcaattctttctcctcctcgaaacctgaacataatgtctcacctctagataaacataattctgaagaagtggcaaacctcatacctcttttaatgtgcctctgacctctaatgaaagttaacacaatttccaataacagcccaaaaattcgtgtaaacgccccaacctccaaaagaggttaaacttacatgccggctctctattttattaccgtactcgattaccttcgctataaccgtgtttctgacacaggtcaaatcctcccaaatccagtccccgtacttcaccaattcg

SEQ ID NO: 593552 - DNA, 269 bp, Homo sapiens
tgggtactttgccgtcaatggggacaacttgactttccggattggccaagttcattcttggctcccttgggttttcccattcggctttccatggggggtttttattagttccttccccttgccctgcagagaagagaacccttccaggggggaaggccacccaccatcctgacccagggaggttccaacttttcccaatttacctggggtgaaatataccaaattttgcatttcccggggaaaataagaaataaagatgaattgttgca

SEQ ID NO: 593553 - DNA, 203 bp, Homo sapiens
gaattcccccccccccccccccccctattggggaatctctattatttggggatttaaagatatttttaaaactatgataactttatctaagttttatggtttactttaactggtaaaaaacacagaaaaatttagaattaaaaaaaaaatttttttttggggtggagatggagtctcactgtgtctcctgtgctggagtaaag

SEQ ID NO: 593554 - DNA, 397 bp, Homo sapiens
  misc_feature (74)..(75): n is a, c, g, or t
  misc_feature (97)..(98): n is a, c, g, or t
gtgatgggagagagcatccttgtcttgtgccagttttcaaggggaatgcttccagcttttgcccattcagtatnntgttggctgtgggcttgtcaannctttcttgcttttctttttttctttctctttttttttgagacagagtttcgctcttgttgcccaggctctggagtgcacggcacaatctggctcactgcaacctccgcctccaggttcaagcagttctcctgcctcggcctcctgagtagctgggatacaggcacgcgcacaatgcccagctaattttgtattagtagagacagcgattcttcatgttggacaggctggtctcaactcctgacctcaggcatctgccacctcggtctcccgagagctgggatacagatatgagcaccgt

SEQ ID NO: 593555 - DNA, 303 bp, Homo sapiens
accccgtcgttggaagtggggcctggtgggaagcgactggatcttgagggtggatttatatgaacagctcagcgctatccccttggtgctgttctcacgatagtgagtgagttctcgtgagatccggtggcacacctcccacctcgcgctcttgcccccgctctcgccgtgtgagacacctgctcccccttcaccttctgccatgactggaagcttcccgaggcctccccagaagcagatgcctccatacttcctgtacggcttgcagcaccgtgaccaataaaccccgtttattttgaaaaa

SEQ ID NO: 593556 - DNA, 820 bp, Homo sapiens
taaaaccccggtcctggggggggtgggggtataatactaagtggaaatgatatcatttacgggggaaggcccttggtgaagtaggccttatttctctgtgtccttccgtacagggaggaatttgaattaaataaaaaccgacctggattactcccggtctgaactcagatcacgtaggactttaatccgttgaacaaacgaacctttaatagcggctgcaccatcgggatgtcctgatcccaacatcgaggtcgtaaaccctatggttgattatggactctaaaataggatggcgctgtaatccctagggtaactggtcccgtgggccacagttatgggatcactggagtatagtagtccgcttggactggggtgaagtcttagcatgtactgggctcggaggtggggtctctggccccgaggtcgccccaaccgaaattttaatggcaggttgggagttaggaccttgggggttggtaggtacggttggcatattaaatcaaagctccatagggtctctcgtctggctgtgtcatgcccgctcttcacgggaaggtcaatcttcagtggtcaaaagtaaagagacagttggaccccttcgtggaagacattccatacgcggtccccaaattaggcacacagtgattatggctacctttgccgggttagggtacccgcgccggtaacattgtttccctgggcaggcgcgggcgcaaaatcgggatgcaaagcgagatgttcggcaccagccgcggcaaaattgccagatccttaacttttaaaccttcctataacatccggtcttggtgacagaggacaa

SEQ ID NO: 593557 - DNA, 204 bp, Homo sapiens
aagctaagtagccctgcattttggtttgttgaacaacgatctacttttacctcaagattttgaccgtctaaaaccggactggtttagaaaaccctcggggttatctcgaatatgtgagtccaacattggtcctccatagcccgggggctcaatgataaacctgactcctacataccacatccacacctgaacaccagaagcccg

SEQ ID NO: 593558 - DNA, 250 bp, Homo sapiens
acacacacacacatatttttttgtgtagagactgagtttggcatgttgcccaggctggtctcgaactcctgacctcaagccgtccttccgcctcggctcctgaagcacaggggccacaggtgcacgccaccactcccggctaatttttgtatttttttatagagatggggtctcgccttgttgcccaggctggtcaacgagagagaaaagtatttcagagacttaaaaaaagaaccatcggtggtctcca

SEQ ID NO: 593559 - DNA, 698 bp, Homo sapiens
  misc_feature (4)..(4): n is a, c, g, or t
  misc_feature (70)..(70): n is a, c, g, or t
  misc_feature (156)..(156): n is a, c, g, or t
  misc_feature (161)..(161): n is a, c, g, or t
  misc_feature (177)..(179): n is a, c, g, or t
  misc_feature (191)..(191): n is a, c, g, or t
  misc_feature (198)..(198): n is a, c, g, or t
  misc_feature (202)..(202): n is a, c, g, or t
  misc_feature (206)..(206): n is a, c, g, or t
  misc_feature (209)..(209): n is a, c, g, or t
  misc_feature (217)..(218): n is a, c, g, or t
  misc_feature (220)..(220): n is a, c, g, or t
  misc_feature (302)..(302): n is a, c, g, or t
  misc_feature (304)..(304): n is a, c, g, or t
  misc_feature (356)..(356): n is a, c, g, or t
  misc_feature (359)..(359): n is a, c, g, or t
  misc_feature (378)..(378): n is a, c, g, or t
  misc_feature (390)..(390): n is a, c, g, or t
  misc_feature (459)..(459): n is a, c, g, or t
  misc_feature (522)..(522): n is a, c, g, or t
  misc_feature (556)..(556): n is a, c, g, or t
  misc_feature (575)..(575): n is a, c, g, or t
  misc_feature (580)..(580): n is a, c, g, or t
  misc_feature (685)..(685): n is a, c, g, or t
cggnttttttgttgcgaacccttcatctatcactgctgatttcctttgacatgaaatatgactttttganaattttcctaaacctcactctggctgcacctgagtggttcctattcctacggttttttttttttttttttggtttttttttttttnttttnttttttgggttatttnnnttttttttttcnatttctntgcnattngtntggttttnncnttcagctgattgacaaactttgctgctagctccagatcaccatgctcaatgcaataggaagcatattttatttttttttttntnttttttttttttgggcagagctctgggggcggcttcagttgctgaggtgggnttnggtgtagggattgttggtnggtgaggaagtnctggtacaagctatttctggtttcttcaatcattgctacccttcgggccagtttttgaacagcataganacgggctctaagggtctcttcactgtacaccccacgggtcagggactctggagggatagctgnggttaaaacttgggtgaattcattatcagaacanttggctttgatggcctcanccgcnctacccagcgggatagtaggtgtttctgcagatgaggtcttcatgctgtactttaatgcctccactgaaagccagaagttggtgggcttttctggcttcctcttnagcaactgcatgg

SEQ ID NO: 593560 - DNA, 495 bp, Homo sapiens
tcttccggtatgtgcatacaattcgtcagtccagtaaacgggctgggcactccagctccagccgataggacaggttctcagggtgcacacgcagttctccaccgtcttgtgtcgtaatcggatgtgttcacacacgtgtggatcacatacaacagtgagtctaccagaccctcgcaggaccgcatttgcttccgagcttcttcccccggggagctgaggttccttaggcaacctgtcgggttacgcagaactagtgaagtctgacatttcattttatgatcatcatcaaaagcagagttattccatccagaatgtggaacaatcacagtgttggttagggttgagagagcatctcgaatgatggtcatttttacagcatcacatgaggatacattccaaagaactcctgtaacaagctcccttacttctgcatcaatagattttctcaacagtcgcaaccacaggatggacaaacccggaaggggtaccgagctc

SEQ ID NO: 593561 - DNA, 748 bp, Homo sapiens
ggaagcggccgcgatgtcctttgtgtcctacaagcagccggcggcgccgccgagtgaggggacgcggcgcggtggggcggcgcggccgaggaggcggcggaggaggggccgcccgcggcccccggctcactccggcactccgggccgctcggcccccatgcctgcccgaccgcgctgccggagccccaggtgaccagcgccatgtccagccaggtggtgggcattgagcctctctacatcaaggcagagccggccagccctgacagtccaaagggttcctcggagacagagaccgagcctcctgtggccctggcccctggtccagctcccactcgctgctcccaggccacaaaggaagaggaggatggggagggggctgggcctgggcgagcagggcggtggggaagcttggtgctcgggtccctgcgcaagcgcgtctggctggtctgtggggacgtggctccgggtgccactattggtgtggcatcctgtgaggtcctgaaggcctttcttcaagaggaccctccagggggagcatcgagtacagcgtgtccgggctccaacgagtgtggagatcaccaagggggagaccgcaatgcctggcagggctggcggttcaacaaagtgctgcggggtgggcatgcctccacggagggagtgcgcctggaacgcggcgggggggggggcagaatacacagcgggggcggaaggggacccactgccttccggggcccttaccggttgggcc

SEQ ID NO: 593562 - DNA, 87 bp, Homo sapiens
gcggccggctactactactactgctcgaattcaagcttctaacgatgtacggggacatgtcccatttcagacagagtaaccattaac

SEQ ID NO: 593563 - DNA, 436 bp, Homo sapiens
  misc_feature (199)..(199): n is a, c, g, or t
  misc_feature (217)..(217): n is a, c, g, or t
  misc_feature (431)..(431): n is a, c, g, or t
caaatatctagagagaaaagaaaaaaaagtttattttaaactgggcaattttgacttcagttgtgcctgaaatgaataatagtaagtagaatttatgagctatcattatatctttccttagccatattttatgactttccaaagtaagctaaagcatatcttacaaactttgacaaccacacaaacataaagatttacnacttaggtgagtaaaggnctgactctgtaataaaataatttgactgtaaaagaatgcttgccttttagtggacattagtcatgttgtctgattggcaacctctcgatgtttggggggaaattattgttttatgagtttcacatcatcaacacagaatgagcaaatttgattttgcagcctcccttgcagctcaaacccagaccatttacacgttttaacgagttccactggntcggg

SEQ ID NO: 593564 - DNA, 486 bp, Homo sapiens
  misc_feature (197)..(197): n is a, c, g, or t
ggtgcggtcgcgctgcccttctacaaccaggaccatgagaagctttgtgagctcatcctcatggaggagatccgcttcccgcgcacgcttggtcccgaggccaagtcgcttgctttcagggctgctcaagaaggaccccaagcagaggcttggcgggggctccgaggagcgccaaggagatcatgcaggcgaatcgncgtatcgtatgtggcacgggtaatcggtgatggacagtcacgtgtacgagaacgaacggcgtcagcccacccttcaagcgcccaggtcacgtcggagactgacaccaggtattttgatgaggagttcacggcccagatgatcaccatcacaccaccatgacctaaggatgacagcatggagtgtcgtggacagcgagcgcaggccccgacttcccccagttctcctactcggccagcggtacgggctgaggcggcggtggactgcgctggacgatagcttggagggatg

SEQ ID NO: 593565 - DNA, 989 bp, Homo sapiens
ctcttcgaaaacacactaatgcccaccttggctatcatcacccgatgaggcaaacagccagaacgcctgaacgcaggcacatacttcctattctagcacacctagtaggctcccttcccctactcagtcgtcgcctaatttactactctacgatacgacccataggctcgactaaaatcattcatacgtcactctacgtctccactcgtcccaagagactatcgtaagactccgtagagccgagacaactgtaaattatagactttacgctgtaacgacaaatgacgcttgtataataagtgaaatgatcaccttgctttacgggactccaactttatggagcttctcccttaaatgcccatggtctgaagaccaccactattcgctggggttctagatcatgatgactatagccctgcagcgtgcgatcttttgcacaacatacgagctggcatcatgtggatataaatactcgccgtcgaccaccggtcgaatttcatcaagactcgcctcgtgaacaaaaatacactaatatgctcatagttcccatgttaccatttgtttggctaattcctcttattgtaaggcaattacaatttattaaaccataggtcgtacccaattcatagcctataccggacaagaaaccaagacccttaagaaatcaggcatacatatgacatacttcctctcaagtcaggctgcatcatttagtccccctacagtagataaacagtccatttactaacatacgctaaaaacaccctcttgagagactattcaccctgggttagtcaatgtccaattgctgctagttaagatccgccgcaagcgggatctttaacatttcactcaattcactgattgctgtcgcctaagccataactacaataatctacggaaatcggcaacttcgacagcgtgcgcattcctattaaattccttcttcttcataggaactttccaaatatattcgtacttccccacta

SEQ ID NO: 593566 - DNA, 393 bp, Homo sapiens
agacctctctgtaggcgaccaataatttcaacttgtgcatcaaactagtttcctatgcttaaacacgcatacacgtatttggtttagaacaattaaacatatgagatgacatcatatatactgattcgcacgtggtaaaactcccccgtcatgcaactagtatttggaccactcatttcatatcagcacagtctgagagcaacctcaattttggtctccacatggttgcacaagatttacaattgcctggagtgtatcaaacttatttaaccagggaacatttcacgatctagaactttcagctgtgaaacaactgctggggaaacaaaaaaaccccttctatatgtgtcactgggcacatcagcaagagtactcttaaatacacctagaata

SEQ ID NO: 593567 - DNA, 345 bp, Homo sapiens
ctgccggtgacttactcgaagcctcggattggccacattttggcactacgccaaggttgagctggttcccccaacccctgctgaaatccctacagctattcagagtgtgaaaaaaatcattcaaagtgctaaaactggtagcttcaaacaccttacagttaaggaagctgtgctgaatggtttggtggccactgaggtgtggatgtggttttatatcggagagatcataggcaaacgtggcattgttggctatgatgtttgaagaccaatctttaacttctgatttgagttcttatttgaatgttcttggaccatgtgtaacaggactgctatctgaataaaata

SEQ ID NO: 593568 - DNA, 159 bp, Homo sapiens
cagactgcaactgcaagcacttctgctttctaaccccagttccttaaatattagaaatcttgtacaatattgtgaaattccagtatgttttgcttacggtgttaataaaattagtttagcatcgtgatagtcattcgagtgacggggagctcgacaggg

SEQ ID NO: 593569 - DNA, 144 bp, Homo sapiens
tgaataacacactgtctcatgagatgagcactttggattggccagccgagaggtctgcacatgaggtggacccaacatacattgttgtggccctgtttccctccacaacatgagacagacgtcagtaaccagtaatcattaatg

SEQ ID NO: 593570 - DNA, 1386 bp, Homo sapiens
  misc_feature (605)..(605): n is a, c, g, or t
tatggtggtttgtgggtgtgttgtgtgtagtttgttggtgtgtcgcgatttcttagcttagatttcgtgttgttgtgatgctgtttatgtgcgttggtggggtatggttagtgggttgtatggtataagtatatagttacataatagaaatcaaaagaactgtgagagacagtagaaacaggttcggcatctttttagtatggcgtgggtgtgtagcacggcgccactgttggggggaagaacgccttagtggcgttaatgagcacgccagagagtggtcctcctttctttcctgaagaggtgtgtgtgtgtgtgcgccgaccgtcccgtgtctctctataagattgttgtgggggacgcctgtcttttcttgcggccgcttaggtggagtcctctcgtattcattgttggtgtattaggcagaggttcgtggtttgtgaggtagtggtgttttcgttgtgtttgtgccggacagcgtgagttggtggggccgggctctttgttttggtgatactatgctgctgtttggtagttctggtagggtgtggtctgcgtcgtggttgggtgtcgtgtcggggtgagtagttttgtcttcctgcgacggnggtgtgttttgtctcgcgccgccacatgagattgttggttttcttcgcgtggggggttctttgtggttgtgcctgattcttggttggtgtggttgtccgtgttgtgtgttgtgttgctgctggtcgctcggggtggtgttggtctgatgtgtgtgtgtgtggtggtgttggtgttggtggaggtggtttttttgttttattgattgtcacactcccctcttgttctatattcatggtggggagcgcgactctctcttttgtgtgtgtaggcccgcgccctcgcggtcgtgtgtcctccaccctctccgcgcaggaggagaagagtgagggtgaagtctactactcgcccgtcggaggaggaggatgcgcttcacgtattttcttataagttaataaggtggcgtattgactggtgttggttcgctgcccgcgcgccgcgcgggtgaataaattaaattaataagtaagagtggtctcccctcgttactttgtttttctctctctctcctcgacatctttttgtttgttatgcattaaaaatatataatgatcgagaagatcccaccgctcagttgtattggttgagtgagttgcatgctcgtggctgttgttcgttgtggtagcagtgtttgctttttgtttgatgatccacccgcggagggagggcacgacgacggaagaatacttagtagagagcaggggaggaggaggcccccccccccccctcccttttttttgcccccctccatcttttggggcaaaaaaaaaactttttttttta

SEQ ID NO: 593571 - DNA, 438 bp, Homo sapiens
  misc_feature (352)..(352): n is a, c, g, or t
ccaacatggtaaggccctatgtctataaaaaataaacataaaaaagcacttctcagcttcatacttagaactggatcattgacaaaattatattcattattaacaataaatagattgtgaattctaggaagggcaagcttcaccccaattcctcaaagcagagagatgccctccactctctggctttctcagcactcagctgagaacctcggctaacaacacactgcacggggttggccacatgcccattggcctttcccagtgggccgtgaacttcttgacttctcaggaagggggtcgttcatcttggttccacagcctggagtggagtaagggttccactcatatttgnggtctgagtgagcacacccagtctgtttatccttttcatgttcactttcattcttccagacccggtgacttccccagtgctgaaca

SEQ ID NO: 593572 - DNA, 565 bp, Homo sapiens
  misc_feature (150)..(150): n is a, c, g, or t
ttgccccacgggcagttcccccagagcctgggttttccctgtttggggagccccgtttcctatttcccccccccgggggggggtggtttggggcccccccccaaccttaaaaattgtttttaaaagggccggtttttccccttttaaagnggccccttttaggggggggggtttttcccccccacaaaaaaaaagccaagccaaccggcttttcccggggaatcccctggagggggttttttttttggaacccaaaacgggcccggggaaccccgggccccctaaattattgggccgtttttccccccccccccgcccccggggggccaaaaacccctttgggggggttccccccccccccgggccccccccaagggggttttttggcccaaaggggggtttccggcccaaccaacgggtttggggggggaaaaccccccccgggggccccgtttttccccccccccttttccccctgggggtggggcaaattttttcccccccttgccccctaaaaaaaagggggggtccttttttaagcccaaaaaaaaaattttttttttta

SEQ ID NO: 593573 - DNA, 474 bp, Homo sapiens
  misc_feature (20)..(20): n is a, c, g, or t
  misc_feature (27)..(27): n is a, c, g, or t
  misc_feature (68)..(68): n is a, c, g, or t
tttaaagggaaaaactaaanaaccaanccctctgtaaaaaagctgaaaaaagggaaaaaaaatacccnaaaacccctagtaaaaaattttttccctccccagtgccttaatccatccccttaatgattaatcctcagtgaagcaagtggatgcctaaagaaatacccctaatggggcccaggcgtggtggtttacccctgtaatccccaacattctgggaggccgaggtgggcagatcgtttgagctcaggagttcaagaccagcatgtgcaacatggcaaaaccccatctttacaaaaactacaaaagttagccaggcatggtggcatgcacccacagtcccagctacttgcagggctgaggcaggagaattgtttgagtccaggaggtcagggctgcagtgagctaagtaagatcgcaccactgcattccagcctgggtgacaaagtgagaccctgtctccaaaaaaaaaaa

SEQ ID NO: 593574 - DNA, 506 bp, Homo sapiens
  misc_feature (2)..(2): n is a, c, g, or t
  misc_feature (6)..(6): n is a, c, g, or t
cncttngggaaaaacccccgggagttttgggggaaatgacgcgggagggtaaagtatagcaaggggtttttgaccaggcgaaagatttgtggcctaagaggggacacagttagggagctggggtgagaatgagggatagaagccaaacctgcggggcgggaaacacagagcatatgcaggtaaagacgaggagtataggtaagaaaagagggcgacctgataaaagagcctcatggcgaaatgggtatgaagaggcgagaacgactgaagagccgggggaatagatgacggcctagacggcctgagacacggggacgcagaggcagatgaccagggcagcaagaggacgcacggccgaatgggatttccggaggaggaggagggagggggcgcacgatgaagacggggcagacggtaatggctaggagagcagagcgcgacttggaagatgacgggcggcatgggcggtaaatgatcgggaaagaatgcggaaggagttgccaggg

SEQ ID NO: 593575 - DNA, 142 bp, Homo sapiens
cctgcagaactgttcatgtacaacaccacttgtccccatatacactattgacataatacatgtagccacattgctgcatcagtactcaaaacaaagttcttcctgattttgtcgtaatgaacacgtcgagactcatttgcta

SEQ ID NO: 593576 - DNA, 857 bp, Homo sapiens
gaatgggaccgctgggttataagcgatcatgtttctccagtattacctcaacgagtcagggagatcgagtctatacagctgaagaattttgacccgatgggacaacagatctgctcagcccatcctgctcggttctccccgagatgacgaaatactcgttcgagacgaatcaacgatcaagaaacgcgttcgaaggtgctcatgacccaggatacgcgccctgtcctctgagggtcccttaaactgatgtcttttctgccgtcgtgttatccctcgcaggactccgtagtccaaactcttcggactgtgagccctgatgcctttttgccagccatactctttggcatccagtctctcggtggcgattgagtcatgcttgtgtgaggcaatcatggggcatctagcccataaagggaacacattctgacgttttttatctcatatgttaaagttactaccaagatgattaggataaaaatgatttgtacaaaatggcccataaaaaaaaaatgtgttggcgcgccaaaggccccgaaaacttttccacacacatccgtgtggcgcacgacggcgccagggggtgaggcacacggtgcaacagcgcgttcccaaggaaaacccgcgcccggagaacaggcggcgggatcccacgcaatgaaaaacgcgccggggaacagcgccggttggaaccaccccgaggggagtcccgggggcactatgggtccacaaggaggccaggcgagcggataataccacgacgtaggaccgtgtgcgaacaacatcaccgacaccagacagcacacacacaccaccacagacgtgaacagcagacgacgcacgccacaccgatgagtaga

SEQ ID NO: 593577 - DNA, 457 bp, Homo sapiens
ttatccggggagactttgaagattagaacttcatcctaaagcatacgggtctggcattttgtccatggcatatgctggacccaacacaaatgttcccagtttttcatctgcactgccaagcactgagttggttggattggcaagcatgttgtgttgtggcaagagtgaaacgaaggcatgacatattgtgtgaggccatgtgagcgctttgaggtccaggatactggcaatgaccagcatagaagatcaccagttgctgacgtgtggacaactcgagattagtttgacttggtgttttatcttgacccaccagaatcattccttactgttgctcatggagagcacccgctccacccccatttgctcgcagtatcctagaatctttgtgctctcgctgtagttccctttgggttccatgttttccttgttccctcccatgcctccccgggatacagga

SEQ ID NO: 593578 - DNA, 161 bp, Homo sapiens
aatccgagcagtgtgcatcatctaatacaaggttcatatactcatcaaaacatgatacagccttctatccgcatattcacttgctcatagagccacacctgaatccgcgatctatttgtaagtatctgaagatgaggttgatgggctgcaccataaccttc

SEQ ID NO: 593579 - DNA, 937 bp, Homo sapiens
  misc_feature (495)..(495): n is a, c, g, or t
aagaaagtggaagacgagaagaaggagcttgcagtgcggaggtgaacgatcttccacgaaagaatgagagcagtcggcctcatgttactacagatcccatggcccaggcaattcatggggcccatgtcgagaccgaaggtaaaggatcaaggaataataaaacatctaggcatggtgtcagccgcactcgctgctattcggtggatcctcgtaacgaattctattccgtctctgcggatgtcatctcactttgtctccacattctaccacgacctgagagaacctcgcgatctctttgaccgagtacatagcattaacacatgcaagttgatatttgtcctcttactagttagtcgagggggagagtagtagataggaatgtgtatttctcaacaccttcgtctattatatagacatgggtaagcatcaaagagactttagagctctctactaatataggcggttatacaccatcgagagtttggatcacgaaancgcataggtctatcgcgctcttagagtatgcgacatcccatgtttgggtcttatcctaggataggccaactcatttcccatacaacgccatacaaggcatacgagaaggtttccgtcataacggagacgaaccatggcgcttgcagtagattctcgttaccaggcaagccccctcgttggaaagaaacaatctctcgtcgcattgagacctcattgaatatcgatgaagcagttccgtacaatgagttcacaaaaatgtgtgtttgagaccattttagctgctttttgcgcctcactttccgtgggtgggtctgggtaacagggaccgtttaccgtttataagcccactatgttacgcaacatgaacaagtctcattcgatggtgcacccaaaaaaatggaccaccccaatttgtgcgagaacgcaacgcctgtcaataggt

SEQ ID NO: 593580 - DNA, 549 bp, Homo sapiens
agaagcgcaatcttacacttaaatctggtcatacaagctttggcttggaatcctagtctgtcttatgacacagctagaaagtagtgttatccagtgtaacccagtgttacatagtctcatctttgaactttactagcgtcagccttctctctttgggaatgctgcctgtttctagtactaacttatactccctgatatagatgtggcagtgaagtctgtgctagaagcccatctgctaggtacctccaaatgcacattatgcaaatgtattaggataagacagggagatgcccggaacgtgattatcctcctccctccctattggagccatacctcctaaaatatattagactagggtacccaaattgtatgagccctactacctactgctctacataggactagctcttggaatgccctagtgctaaggaacagagacctagcaggatgacaggcctcagagacaagtaagagcaaaaaaacataaatataatcgggaaaactccccttacccctttaggaagaatattaccacctcagctaatcgta

SEQ ID NO: 593581 - DNA, 121 bp, Homo sapiens
  misc_feature (34)..(34): n is a, c, g, or t
  misc_feature (42)..(42): n is a, c, g, or t
  misc_feature (44)..(44): n is a, c, g, or t
  misc_feature (47)..(47): n is a, c, g, or t
  misc_feature (52)..(52): n is a, c, g, or t
  misc_feature (67)..(67): n is a, c, g, or t
  misc_feature (84)..(84): n is a, c, g, or t
  misc_feature (88)..(88): n is a, c, g, or t
  misc_feature (102)..(102): n is a, c, g, or t
  misc_feature (105)..(105): n is a, c, g, or t
  misc_feature (115)..(115): n is a, c, g, or t
atgtggccctgatcagacatgttcatggctaacncagaattntncangcttncaggcttaaactgancagatgttaaagacttnctgnttagaattgttttncancttggtgatncatgtc

SEQ ID NO: 593582 - DNA, 129 bp, Homo sapiens
atgttatcgcccaacactatgcagggataaataagcattgcaggaaaacgttatttgtaaactagcttcctcaccataatactttgacttgtgcaatcaatactttctactttgtgttggggataaata

SEQ ID NO: 593583 - DNA, 1100 bp, Homo sapiens
gcatcctaatgaaaatcaagttgatatgttctgtttggaaagtagcgtggaagagttgtggggggtaattcctgcagtccatagtcactggctgaagctctcgaaacaagagtaaataaaagccgtgttcatgtagttgcttcctcttactcagacagaagaacattatgataccaatggtatatcattgcctctgtcattaagagaacagcttattctaaactgtgggcgggaacatgtccatagtacatgtactcagtcaaaacttgggttctcatgagcctaaggacctattctagatttagtgtacagttagtatggagtgtgtgtgtgtgtgtgtgtgctgtgtatacataaaagtgcagtatgtagagattccgacatgggtcgtaaggcgatacacccaaaaactgaaaaaaatcacgaggttagaccccatagttcacgaggacgcgcaatagtcccaagcaaacagtgagagatactccccttcgagccacacacggaaaatgtcacccgcaaaccgatacatccaacgcgcactcaacgcgacctccagcagagggaacccaccaaccggacaacaccagaggcgacgaataccagccacgggcaccactgggccaccaccaacgagggaccagcgtaccaccacggccaacagaacgggccccccccgagtcacacagaccaccagccgccagctcccccaccacctcacaaacactagccacgaccacacaaatcccccacgagccccccaacacgcggacccgtcgaaagcacaaaaagcaaacgaaactcaatacatcaaaacataaggaacgccacacacaccgagatcgcccagaccatacaaccagagtggtaagcagaaatcagtcgataaataaaaaccccaaccaccccgaaacacacacacagcacgactaacacatccaactaacacaaccactacaagcaaccaccgacaccagaccaaccacatcaccaacacacacgcaacacacaaccaacccaccgcacacaaccaaccaatatcaaaccacacaccacgccacccccccaacacacaacaccaccacaccacccaccacacc

SEQ ID NO: 593584 - DNA, 343 bp, Homo sapiens
gacagaaggcaggatagtgcttttgaattggcctatttccattttgaaagtagatttcaggctaggtgcggtggctcacacctgtaatctcagcactttgggaggccaaggcaggcagatcacttgaggtcaggagttcgagaccagcctgaccaacatggtgagaccctgtctctactaaaaatacaaaaattagctgggtgtggtggcggcgcctgtaatcccagctacttgggaggctaaggcatgagaattgcttgaacccaggaggtggaggctgcagtgagccgagatcgcgacactgcactccagctgtgtgacagaatgagaccatctccaaaaa

SEQ ID NO: 593585 - DNA, 788 bp, Homo sapiens
gtcagaaccagtcacacctgcatctcttgctgctttacagaagtgatgtgcagccagtgggccatgattatgtggaacgaggtacgaaatgatgaaggaaaagtaattcggttccattgtaaattatgcgagtgcagctttaatgatcccaatgctaaggagatgcacttaaaagggcgaagacacagacttcaatataaacaaaaaagtaaatccagatttgcaagtagaagtaacagcctagtattcgagcaagaaagattcaacgaagagaaaatgaggaagcaaatgcagaaggaggcagtacgtggcgcaagacgagaaggcaagaggcagcgctcgcgacgaactggaccacttgcagcacgctctactgacacgaggacatgtacctggcaggacgacactggacgcgaagaacaacatcattggcgactgcatcgccgccgaatgccagatggagcgttatcctcatggtcctccaggcccattaggccttctgggagtccgaccaggcatgcctccctcagcctcaggggcctgcacccttacgtcgtcctgactcatctgatgaccgttatgtaatgacaaaaacatgccaccatttatccaaactgaagaggagttacaggcagttcagaaaatcgtgctattactgaacgtgctttacacactcgctttcaggacagttcgtctgaacatgagaagaacaagaacaaagaagggagatgatcacgaacagacgcgaggtaacgaccgaacgccttcgaaaagcgagttctgccgat

SEQ ID NO: 593586 - DNA, 109 bp, Homo sapiens
gatggctggaagtagtgggacatcttcagcacctcaaatacatcatgagcttttagcctgcttcagtcttcaaacatgcaggcaccaaaaaataaatatgagagtggat

SEQ ID NO: 593587 - DNA, 247 bp, Homo sapiens
aaggataaggatcatcagacatcactgtctccacctccacaaggatttcttcctactggaaggtctatcagggagtagtaacaggtatagagctatcatactccagtgacaacacatagccttcttctaggaatacctacccgaaggagttgcctagaggctactattacacgttaactattttaaacaaaatacaataccatactactaagcgatagactagcatacataaactacatacaaccag

SEQ ID NO: 593588 - DNA, 1502 bp, Homo sapiens
taaaaaagcatttttccaccattttacttcttgttatactcaaaaatatagtttcaacttctttctttgcaaaaacaaaaacaaaactagctacatatacgtggacacattatcatctcacattttttcttctccatagtggcttttagccccaccccgcagccccgaccgaaaaacgaagaagaagagagaagaagagaaagaagaaagaagaagagaagagagagaagaaagagaagaagagagagagagggaggggaggacggagaagaagagggcagacagagagggaagagaagagaggagaacgcagcgagcgcggcgggcggacgagaaggagacacaaacacacaaaacaacacaacccgacagcaggagcggggcgggcggcgccgccgatgccacgtcttctcgggcgcgagcgggcgacgcgccgcctcgcgccgccacgacgcggcgcacccccacatgtgcacggacgagcgtgacgaggcggccacagagcgtcagagtgctgcggaggtgagcggcctcatccccgagctaccgcaacggcgcgctagggcgaggcagcaaatcaagagagcatcacgatcgacgcgagctacgcggcgcggtggtccggggacgaccacagcccagcaggaccacgcacagggcggacacagtaacctgcaagagcagacaagcaaataaagacgaggagagacacgccgcaacgtgtaaagagaggagaggggacggaagacagcacgatcaaccggacagcagcacccacacccccagggacaccgacacacggcgccacagccaccgcgagcgtgcgacagccgaccaaccatccagcagccaccgcacgcatggcgccgcgtacctcgcagaacgaccaccccacgacccctacgcgccccagcccgcaccccgcccccccccgcgcacgcagccgccagtcccagacgtgcacacattcaatcacaggcggaacgcgcgagcagcagagatccacgacccgcacagggcaagcagggagagaaggaaacaccacgctgcggcgacatggagccgtagcaccggcaccccgccaaggagcgccccaaccaaaggacgtaccacccgtccggcgcgcccctgatcaccaacaccagctcacccaccgggcactgccgggcgactgactcgtagcggcatgcaggagtgccacaccgaccaaaagcgcgacagagcggacggaagagcgagcggggacgctcgcagtcgaacgcacagcagggcggcgatgccacgcgcgcggcccaggcgcggaacaagagaagcacgggcgtggctggacgaagaacagagcgacagacagtcgagcggcaccgcgagcaaccacagaggaccccaccaccaggacgagcaccgccggcagccacaccactcccgccaacacgcacgtgcaaacagcgctcgccaagacccgaacaccagcacggcggagcaggcacacacgcatcgggaac

SEQ ID NO: 593589 - DNA, 326 bp, Homo sapiens
aaggacaattctcttcattggtgagagcccaggccattaacacctacccagtgttattgaaagaagagaggtgggggtggaggggaatcagtctgtcccagctagagtgagataaagggggctagctagttcttggcgcagctgcttttgaggagccaataggtagctttggacacgaggccgatcgaggaaattttcactgaacatagtaatggttaggtctttggcttggatttccagaaaagcctcttaattttatgctttctcatcgatgtaatgtaccctttttttctgaaactgattaaatactcattttatctttgaaa

SEQ ID NO: 593590 - DNA, 124 bp, Homo sapiens
tgcctccagagcgtgcttgcgcaaacggcatggcaacccgtgcgccataacaacaaccaatggagccatcaatgagctgccaatacccccatgctgatcacgttctgtgatgggtacctgagct

SEQ ID NO: 593591 - DNA, 910 bp, Homo sapiens
  misc_feature (413)..(413): n is a, c, g, or t
  misc_feature (500)..(500): n is a, c, g, or t
cgcaggccgcctatcccaccttcaggcagcctatggacgcagggccccatctgtcccctcggtcgccgtgtggccagagtgggtcccgtcgtccccaacactcgtgctcgctcagacactctggcaggatgtctggggcctcacccagcaggagcgcgtgcaagccgggcaggcggtccacctagacccacacctccctcgggagcaccccacccttgtgttcgacgtagctctctctccctcaccctgcaaggttccgttctgccatccgaaaaagaccactcccacctcttcctttcctcttttgtcaatccccgaagccggagctgctaaatttatcttggggaaacctcagaactggtctatttggtgtcgtggaacctcttcactgcttccctcacccgatcagtaancaactgttttgtatacttgttttcagttttcatttcgacaaacaagcactgtaattatagctattagaataaaatctcttaactatnaaaaaaaaaaagggaaaaaaaaaaaaaaaaaaaaaaaaaaaaaaaaaaaaaaccaaaaaaaaaaaaaaaaaaaaaaaaaaaaaacaggggggccgcctgggccaaggggactttagactggggcaggctaaggcagggggccgaaattggggctaactgggccaattggcccaaaggggggcggaataacaatcaacgggccggggtttaaaaacgtcgggacgggaaaaacccgggggtacccaaactaaatggcctggaagaaaatccccttttggcaagtgggggaaaaagcaaaagggcccgaacggatggcctttccaaaaagtggcgcacccggaagggcaaagggaaatggaaggcgtaaaaattgggtaaaaatccgggtaaaattttggtaaaacaagcca

SEQ ID NO: 593592 - DNA, 342 bp, Homo sapiens
  misc_feature (1)..(1): n is a, c, g, or t
  misc_feature (110)..(110): n is a, c, g, or t
  misc_feature (330)..(330): n is a, c, g, or t
nggccgggggaggacttggggggataagaagggaaggtgaatatattaaactcaaagtcattggacaggatagcagtgagattcacttcaaagtgaaaatgacaacacantctcaagaaactcaaagaatcatactgtcaaagacagggtggtccaaaggattccactcagtttcctttttggaggtccaaagaattggtggtattattcctccaaagaacctgggaattgggggaaaaaatttttttttaattttttttaaaaaacaaggggggggtttcaaacagtaaaaattttcttttattttttttttttccccccccttttttntttaaaaaaaat

SEQ ID NO: 593593 - DNA, 347 bp, Homo sapiens
ccgagttatctagaggatccttggggctcatgcatggcttagacagcttaataattagctggggaaccagcctatcgggcgctttttcccagttgcttgcagctctccttcccaccatccacgtggggttcttttgttcggatcaaaatcagctgaccaggggcgagagtgagcggctcggggccgggggcggtgtatgaggcaatagccggggcaattgcaggtttttttcctaaactcccggttttcccagcagttccagagccctctgaatctttaagcctcacatagtgggaagggaagactccgggctggtcgcccatggttccggtccaccagtcaccatc

SEQ ID NO: 593594 - DNA, 147 bp, Homo sapiens
cacctcactgttgcaattccttcattctgttgagggcactgacagctgctggaaccactcaatctgcgtctcgtctgaaggtgtggttcaggatggatggtctcctgtggtcccaggtgggagtgcttgactgatgctacttcagtg

SEQ ID NO: 593595 - DNA, 675 bp, Homo sapiens
tgaacttatacggtaacacataatatgggcgaatctgatgaatgccaaacctgttaggtgatctttgtatcactgacagggatgcgcattgatcccgcgagggacagaaaggctatgccatcattcagggcataggcgaggcactctaactatatggagcgcccaaagtgtctgagaccatgggctagatggcgaagacagggactctttgaggagccttgtattgacaataacaaggagcagagacatgctgtaatcccttcactctgacttacactagacccaggactataatatccatggcagctatcccaagatgacaagggtgcttgaacccacaagtgcataactcacgatgtgccaaatgttgactgctatgaacctccttctcacagagatatgatctattggttggatcgagaaagataaccaacaaaagttgttggacgtgcgcatcacaggattctagaattgcacagatgcagggctggtatcattgttagtggctttattatgtcccatttgtcctttttcgccgattactgtgacggggcccacatgtcgttgtggctgcgggtagactatcttctgcaccagggtttttattggcattccatgggtatcaaaaaaggtaaccacttttgcttaaggctttttggaatggaacacgattag

SEQ ID NO: 593596 - DNA, 162 bp, Homo sapiens
ttcagtaagagcggtctgcggtctcctgttacttatagccagtcaaaacacacctcccgacagacagacagacagacacacacacacacacacacaattttaaataaacagtctgattcctgtgatcagtcatttccaaagatcacattgtacacctatggg

SEQ ID NO: 593597 - DNA, 596 bp, Homo sapiens
  misc_feature (40)..(40): n is a, c, g, or t
  misc_feature (172)..(172): n is a, c, g, or t
cttgatcgggaagcgattcatctccggagggagggtgcgntgtttttcttggtcacaatgtcattccgcccaccagtgccacaatgggtcaggtgtacagagacacccttgaagaagacttctttttttacattgcctacagtgacaaaggtgtctccggtctgtaaagctnctgcccctgggtggagggggggtttcattttacaaagagagaggtggccccccttttttgacctcctcctccttgaaggtcaaaccccacctcccttattcaggggcggccctttttaatgtttgtggctttttttccagccttttttaggaggggtaatggtggggttggcattttgtaactttcctttttccttttttcccctttttttggccgcctttcccatcctgctgtagactttttgattgtcagtttgtgtcccatccagtgattgttttggtttttgttccctttttggctgcccaaggggttcagaaccccagcattcccttcctttcactacctttttttttgggggtggttggaagggattgaaattttggggggaaggttgggggcccttcatttaaggggaaccccccca

SEQ ID NO: 593598 - DNA, 209 bp, Homo sapiens
  misc_feature (9)..(9): n is a, c, g, or t
  misc_feature (20)..(20): n is a, c, g, or t
cctacttcnaggccagtttntaaggacttactgataatgagtaatttacaactagacactatttagtggacagcagggttaagtgcttttctctttcagagaaaaggttttattatctccttttttttttttgggggggggacagggtctcactctgttacccaggctggagtgttgtggcatggtgtcggctcactgcaacctccatc

SEQ ID NO: 593599 - DNA, 758 bp, Homo sapiens
gtggtgaaaccctttctctactgaaaatacaaaaatcagcggggtgtggtggtgcacttctgtaatctcagctacttgggagtctgaggcaggagaattgcttgaacccagaatgcggaggttgcagtgagccaagatcgtgccactgcactccaggcctaggtgatagacgttagggttagggttccgggttaggcaagacattggcagattgtagacaagaataacttttgcattttaggaatttgcactgctggtaaatggtattccaagttgctatagagattccttgccttctaaaaggtattctcgtaatcacaaggccaggtatccgtaggaacgtatggagtacagccgtaaggcaacaacatacataacaataaacacatcaaaatacaaaatatagatattactggagggaaacctcgagtccactctatgagagccctgtactcaaacgccgttccgaggaggacgaccgacgtgtcccaaatgggcagttgaccggcacaacgagagtgcgcacgaaaaatgggtcgagtcaccgcagagaaggagaaagctccacgggagagcccaacaacaaacaaacggggaataagagggaatacactacagcagccacgaaatgaaacagagcggccagcaccagggggggcacacacaccgagggaacggtctggcagacacaacacacccagacacacacgccggccaagcaaggaccggataaagaacaccacgaggcgacacaagac

SEQ ID NO: 593600 - DNA, 512 bp, Homo sapiens
ggcgtcctcccggagttacggcgcttccggggccccgtgcgtccccgtgaccatggctgctctccgtggctcttctctagctctcagctgtgctgcgaatgtctgtaaacctggtggccaagtgattgtaagtcagtgagactttccttcgtgtttcttgcctttgatgtgcaatgatgggtggagatttgtggctggctgattacatgaaaacatctgggaatgacaagtttgctgttttttatggtgaatcgcaggcttggaagagacatgaagcaattccatgaaataaatttggaaattgaagatttagaacaagtgtcagtgctaaaagtatttcctaaagttcagaaagaaagtgatttgccagggagaacatttaaaaatggggggcttgcgcaagaactaggcaaagggggccactggaagggggcgcgggaacttgaaatccatgataagagactattagctgaagagagacagagtggaggtgagggatgaatatgggtaaa

SEQ ID NO: 593601 - DNA, 237 bp, Homo sapiens
gctcgaccatggtgaaagcaagaacaagagagtaagtgggaggtgccacacacttggaaacaaccaaatctcatgagaactcattcacaattacaaggatagcaccagtcaatgaggaatccacatctatgatctaatcacctttcaccaggccccacctccaacattaggaattacattttaatatgagattggggggacaaatatccaacctatatcagatggtttataatatgc

SEQ ID NO: 593602 - DNA, 339 bp, Homo sapiens
ttccccgggtttttttcaaaaaaaaaaaaaaaacccctgggtttggggccggcccccccccgaaatttaattaaaaagaaaaatttaaaccccccccccggggcccggggttttttttggaccccgttgttttttaaaatgtttacccccttggaccccctttttttttgatttgggcaggtttttatttttggaaaaaaatggggtttgggttccccccccccccccaaacccaaaaaaaaaaagttaatccccccccccccccggggccgaaaaaatttttggctttacccctttttttgccccccggcttaaaaaagggctttttttttgggtcca

SEQ ID NO: 593603 - DNA, 113 bp, Homo sapiens
gatcgggaggatacctgtggcagagcgataggaggtggagcttgtagagagccaaggatggcgcctactgcgactccaggcctgggatgacagtcgcgagactccatctcaat

SEQ ID NO: 593604 - DNA, 172 bp, Homo sapiens
tgcttatcctcctgggcgatacctcctcctcctactccttctcagttcacgcatctctcctgccagtgcatttccacgatttaatatttgttacaaactccaaatatacaacaccctgaaaacacatttctatttgtttttttttttttttttggggaaaagggagtttcgc

SEQ ID NO: 593605 - DNA, 201 bp, Homo sapiens
  misc_feature (71)..(71): n is a, c, g, or t
caatacaggtagtctctccagcagccgcgcgagctcatgcgggccagcagtgacatatattcagcctaacngcttccccgaggcgtaacatcgttcgccacccaacccgccagagtcagtccggcgtgttgtattacctgtgcagtcaacatcgcgtgattaatacagccgagtttcacaccactaccagtatcaccggca

SEQ ID NO: 593606 - DNA, 649 bp, Homo sapiens
  misc_feature (644)..(644): n is a, c, g, or t
tcggccgagcgaagggttgtttttcccttcaagctggaaacaagagcgcgagcgtatttatcaggagaattcctggtcaggcagagtgttcagagaaaaagagtcgagcacagcctgaaaatcagcaacttgcagggcttttctgatctggcggcccaagagcataggtggaagctgacaagttgctctgcagcatctggtctctgtacgtacgtggtatacatgaagtcccgtaggctatcctatccaaagctgtgtagactcgggtgcacaccaaacgcttgtctcagggcatgcagctgacaggtagtcccaaacatcctggaacccaagcatatgagagctaccctgtcgggtcgggacttacattggtgcaaatagaggttgaaaagtctcgcctttctgcttattataagccgctccactttctacacgcgggatttcattaaatcagccactatcttaagactcctgagtgtcgcatcatgcacaacaacaactgctaagccacatccatttcatttatttctgagaaggtgccttatgatcccctcccattggagcgtgacttaagctgatctttttttgaatccacgcttgggtgaaacagggcacctcttttatctgctcctttggggcctctncctcc

SEQ ID NO: 593607 - DNA, 1246 bp, Homo sapiens
  misc_feature (909)..(909): n is a, c, g, or t
  misc_feature (923)..(923): n is a, c, g, or t
  misc_feature (929)..(929): n is a, c, g, or t
  misc_feature (941)..(941): n is a, c, g, or t
  misc_feature (949)..(949): n is a, c, g, or t
  misc_feature (957)..(957): n is a, c, g, or t
  misc_feature (1030)..(1030): n is a, c, g, or t
  misc_feature (1116)..(1116): n is a, c, g, or t
  misc_feature (1126)..(1127): n is a, c, g, or t
  misc_feature (1139)..(1140): n is a, c, g, or t
  misc_feature (1174)..(1174): n is a, c, g, or t
ctgtcttctgcgcttggtagtgtgtactgttttgcttttcgtgtcttgcgtcgttatcgttctttgggtggccacttccttgttttggagcgtgacaagtgttgcgctgagtgtgctctcccatccctggcgcacacttgaccatggttttgttgccacttggccctcctttggtgctgccctttaccttgcaactggcccccggattgggcttgtcctttgagcccaagggcccctattggattccatgtcccccgctctttgggcgccatggccccacacacattttggacggaatggcccttggagcccatgggccccaacaacccttggagcgcatggcccttgagccccattgggtcccaccagcctttggcgcaatgggccccccccatgggccccggcccttggcaacatgcacatttagcggcatgggcctcggccacattgggttgcccgcttgccgggtgccccaacattttggaccggtgcccaatctgaagatgtgagacctggccaacattctggagggaacttttctcccagagattccctttggtgggagccctgggaggcccatagctccctggggggtgcgccccgagaaggccccttcccgaaaatattttgtgtgtgagaaaatttctgccccatttctggagtttccaccatgggaaagaattggcttaagagcaccacaattccacgcgagttgcgcggcccacgcgtgtcgtgttacagccggaccactcccagaatgggagacaatgtggggaagattcccagaggggtttgtgtgtgtggttaagatttcggaattcgcccagagaggtggggcctcgcagaagaagccctcgcccgcggatgtgatagtgaatggcgctctgtaagactcgtgagatggcccgngagagagagttganacgctntcgagaattgantagagaancgccttanagcccgcttgcctctttttaaaacactcgatatcgagagcctctctgaaatttgtaatttttttcttgttaanccactctttaaatttgttgggctggaatgtataaagaatgtttaaaaaaattcacgttgctttttggggtaaatttgaaatacttntttaaatganntggggttccacnnttgagctgtttgcacttgagattgccaatgtgcnccaattttttttgtagttgtggcattttgttgacatcgaatatgactttgataataaataccggttcctgta

SEQ ID NO: 593608 - DNA, 1067 bp, Homo sapiens
  misc_feature (765)..(765): n is a, c, g, or t
ccccccttgtgtgccccacaccggaggtgtgtaaaaaggtagtggtggacctttggggtttttttttcccgacatgggtctttctgtgtttaatcttataagggacccttttttggggggaggggaacacacccacggcctttaatgccccaccttgagccccccgctggatgggaggatattgccctcttcacaccggaggcccctctgtgtcgtggtggcccccccacttgagcgccgcgagagttttctgttgaccctctctgacgtgtttgtgtagcacgcacagttcacggtgtacacactgacgcctataactgcaccctcgtagaggggtcttttttataggtccacatgtcccacacagcgtgggagaagagacgcagaattggtgatacaccctcgcgcgcgtggggtgtagaaatagtgtggagaacacacaccgtgttgtgccctgcccccccgcgagacccctcaccgaggggatattctcggctttctcttaagagtttttggcgagagtactcacactactccctccgagatattgtgtcgctgttatagtgtgcggtgtgagatagtgtgagactctttgtgtagtttgtaacaacaaaagtgtagtataggtgatatagatatataaatatactccacgaacccaagtaagacccctttctggggtttttctctgttggccgcggttgaaaatatggtccccacacacatggtgggtcacatcacgagacaaatatagaccactttccntcactatcccaatatatatggagttcacggctccttgagcccttctgtaggggcacagactcgctttcctcggtgtgtggtgattagaattccctcttcctgcactcttgttttcatggcacgtggaaatagccttcttggtgcctcgtcacacacatggtgattcttttcacctgatatttctgaattcatgtttctagttggcttgaccctgccacatgggtcccgatgttcatccgagcataactgtacttaatcctttttcccaaatccagtataataaagggagtgatgtgccaatt

SEQ ID NO: 593609 - DNA, 156 bp, Homo sapiens
tcgcggccccggcctggtacactcccaggcgcttctgcaggtcatcggcatcgcggaggcaccgttacgcagttgcgcaggtgggaggcgagcgcacccgcagctcctcggtgtctgccgagcatggcctcactcgccgcggtatgcaccggggcc

SEQ ID NO: 593610 - DNA, 621 bp, Homo sapiens
  misc_feature (12)..(12): n is a, c, g, or t
tcagagaccacntggatcttgggaaggtgtcagctctacctgtggcacttggctgagtgggaaagggatggaaacatgaataaagtaagaattaggaaggaaaaggagaaatggatccagggtatgaagccaatagtttagttatctcaacaaatatgattgatttcatctttatgaatttgattatcctaatttaatacattcaatcaatgaagtaaaaaaaagtgcaaggacaatatgacatctgtcattctctgttgagatttgagaggtaataatacccaagaacgtgtggtgacctgggtcctcactgctactgtcttcctgtacctggacacttctagcaagagacttcaacttcagaacaaagaggatcccaacttgtagctgcattatacacaccccagcagcacacataagttgatttctaattattcctctttaagaaattgtttgtggaatatttatctatttataaatggaaaaatagaaaattaaaataacaaaaataagtaacaccatgtattgagtgtctactgcgtgctaggcactgtgctaagtgttctgcatatattgtcattgtgctgccaacgactgcaataaagatgttcccattcctaa

SEQ ID NO: 593611 - DNA, 182 bp, Homo sapiens
gaactagaggatccccgcgaaaaaagatgaaaacaatcacggggaagacgttttcatcccgctaatcttgggaataagaggaggaagcggtggcaactgaaggctggaacacttgctactggataatcgtagcttttaatgttgcgcctcttcagtgttcttaagcggatcagcgggtaccg

SEQ ID NO: 593612 - DNA, 797 bp, Homo sapiens
ctcccggaacaacagccacaacatcaggagcaggagcggcagcgggacggggatagaggctcccccacccgatccccacagtcatcgccccgtccctgggggcgggcggagggggcggggagcgatggagacggcggtggtggactaaactgggtcacctgcaaggtattttatgcaatggggttgtacatggaaggagacaactgtcgctactcgcatgacctctctgacagtccgtatagtgtagtgtgcaagtatttcagcgagggtactgtattatggagaccgctgcagatttgaacatagcagaccattgaaacaggaagaagcaggtgctacagagctaactacaaagtcatcccttgcgtgcttcctcaagtctctcatcgatagttggaccacttgttgaatgtgaatacagggcgaagctgagtcaagaacattcaaacttgtgcaactgtaggagcaggttcagaggactgggtgacatgctattgagttttgttcctgggcaaccctactgtgggcgtacgtgcgccttccgtgcagtgaagcaccccgtgagtgggcctcagttgaccaggggcaagagctccggaggaaggagcgaagcgccgtggagaccgaatgaagcagtgtgccctattgtgcagtgcgagagtgcgattcggggaggacctgtgtgttctccccggggattcttgtgcctgtgtgggcggcgggtcttgctcagtgtgtgtgcccgggattgggttacttgggtttggcctggaggatggctcttgcgggcccaggtt

SEQ ID NO: 593613 - DNA, 201 bp, Homo sapiens
ttgtcttgggtagatttaagcagagactcaaaagatgagcaaacttagggagaaattccaaagagaaatattacctgaagaaagaatatttctcaaaccaggaaagagctgtgtgtttgcagtaagaaccagatagagaagatttgctagaatagagagttaggaagacttatatgtaccatactaaagttaaggaagccc

SEQ ID NO: 593614 - DNA, 115 bp, Homo sapiens
gtgtgactcttagtgtcctctctgattgatcctgactaatcactagccccctgtgccccaatttcaacagtatgctggagtctaatctgaaccccaaactatgccctcttaagtg

SEQ ID NO: 593615 - DNA, 118 bp, Homo sapiens
ggatccccgaaccaacccgtcatcaaacccttcatcaaccctaaatctctcattgttttatcaaacccttcatcaaaccctgaaacccgtatacaagtagaccactacagccagggtt

SEQ ID NO: 593616 - DNA, 471 bp, Homo sapiens
ggccatgttctctactgaactcagcggttctgactcccccctcctcaggcggcacccctgacaggatggttcggtgtcgtcctgggctcccttccagtcaagaacctactcctccaacccttctgagagagcttctaagcacccagttccctagatgaaacccccaccctgcttaaaaagaccttgtttgggccaggcttggtggctggcatctgtaatcccagcactttgggaggcctaggcgggtggatcacttgatgccagatgtttgggaccagcctggccaacagggcgaaaccctgtctctactaaaaatataaaaattagctggacatggtggcacacaactgtaatcccaggtactcgggaggttgaggcaagaaaatcccttgaaccagggaggcgaggcttgcagtgaaccgagatcatgccattgcactgcagcctgggcgacagggcgagactccaact

SEQ ID NO: 593617 - DNA, 118 bp, Homo sapiens
gaaaaacatttgtgtcgttactccccacgccacatttaactcttagtccattaaatcccacctggctcatttcagcgaatatccctgaacacggggaggggggcggtttgctcagtgc

SEQ ID NO: 593618 - DNA, 2465 bp, Homo sapiens
agcggggaagtgcttgcggcctctgcccagcgagctgccccggggtctctctggtttcctaatcagggcaacgccgcgggagagaacctttaccttggctgcactaagttctcggtgccactccctggcagggcgggaccttgtttaggccctgtgatcgcgcggttcgtagtagcgcaaggcgcagagtggaccttgacccgcctagggcgggaagagtttggcccgccgggtcccaaagggcagaatggacgggctcctaaatcccagggaatcctctaaattcattgcagaaaacagtcgggatgtgtttattgacagcggaggcgtacggagggtggcagagctgctgctggccaaggcggcggggccagagctgcgcgtggaggggtggaaagcccttcatgagctgaaccccagggcggccgacgaggccgcggtcaactgggtgttcgtgacagacacgctcaacttctccttttggtcggagcaggacgagcacaagtgtgtggtgaggtacagagggaaaacatacagtgggtactggtccctgtgcgccgccgtcaacagagccctcgacgaagggataccaataactagtgcctcgtactacgcgacagtgaccctggatcaggttcggaatatacttcgttctgacacagacgtttccatgcctttagtagaagagaggcatcggattctcaatgaaaccgggaaaattctgctggagaagtttggaggctcttttctcaactgcgtccgagaaagtgagaatagtgcgcagaagttaatgcacctggtggttgaaagttttccttcttacagagatgtgactctgtttgaggggaaaagagtttctttttacaaacgagcccaaatccttgtagcagatacgtggagtgtattggaaggaaaaggagatggctgcttcaaggacatctccagtatcaccatgtttgctgattatagattacctcaggttcttgctcatcttggagccctgaaatactctgatgacctactgaagaagcttctcaaaggagaaatgctctcatatggagacaggcaagaggtggaaatcagagggtgctcgctttggtgtgttgagctgatccgggattgtcttctggagcttattgaacaaaagggtgaaaaacctaatggagagatcaattccattcttctggattattacttatgggactatgcccatgaccatagggaagatatgaaaggaattccgtttcatcgcatacgttgcatatattattgacctcaagtgtaaactgatccaaagaaaaccccctgcgttttatatcatatcatctgtacagttttgctttgatatttagagaacatgatcgaggttataggaaattgattgcccattctcacttgaaaaatacttcctaggccgggcacagtggtttatgcctgtaatcccagcactgtgggaggctgaggcgggtggatcatctgaggtcaggagtttgagaccacctggccaacatggtgaaaccccatctctactaaaaatacaaaattagctgggcgtggtggcacgtgcctgtaatcccagttacttgggaggctgaggcaagagaatcgcttgaactcagaaggtggaggttgcagtgaggcgagattaggccattgcactccagcctcagcaacaagagtgaaactttgtctcaaaaaacaacaacaacaacaacaacaacaacaaaacttcctaggccagatgtggtggctcatatgtataatcttagcactttgggaggccaaggcaggaggattgcttgaggcgaggagttcaagaccagcctaggcaacatagggagacccccatctctacaaaaatttaaaaattagcctagcatggtggcacgctctgtaatcccaaatacgcggtaggctgaggctgaggagggtggattgcttgagcccaggggtttgaggctgcagtgagccacagtcacgccactgcattctatcctgggcaacagatggagaccttgtctcacaaaaaaacaaattcctgacatcgctatgtattcccaactttatcatttggtctgcctgtatagattagacttatgtctagtttttctcccccctgtggaccattgtgttggaccggacatccgtgaagcgaccttctatcaatctatctccacactttccccaaaacatatacatgcgcctttattgtggactaatgtctctccagggacataatatcccccatccacccggcaataactccccagaaggcggggtggtcattaccgccgtaaacccctcaatcctttgggcaaatctacaacagaaacaatcgctgtgacaccactagaagtgcgtcgtcctgcatccaccacccctttggaacacatcatctccacacgctctacgggcaataaccgggagcgtagctgccatcacggtaactccacattagcacaccg

SEQ ID NO: 593619 - DNA, 2324 bp, Homo sapiens
agcgggaggacaaggagcccggatgcggggcgttgccgaaggcgtcttgctcaggctgcgggaaaggagaggggtgggagcggggtgggggcatcgcgacccagggcaaggcggcgagtcgccgtcttcgagtcccacctgtccgaagcgggaaaacagtcgggatgtgtttattgacagcggaggcgtacggagggtggcagagctgctgctggccaaggcggcggggccagagctgcgcgtggaggggtggaaagcccttcatgagctgaaccccagggcggccgacgaggccgcggtcaactgggtgttcgtgacagacacgctcaacttctccttttggtcggagcaggacgagcacaagtgtgtggtgaggtacagagggaaaacatacagtgggtactggtccctgtgcgccgccgtcaacagagccctcgacgaagggataccaataactagtgcctcgtactacgcgacagtgaccctggatcaggttcggaatatacttcgttctgacacagacgtttccatgcctttagtagaagagaggcatcggattctcaatgaaaccgggaaaattctgctggagaagtttggaggctcttttctcaactgcgtccgagaaagtgagaatagtgcgcagaagttaatgcacctggtggttgaaagttttccttcttacagagatgtgactctgtttgaggggaaaagagtttctttttacaaacgagcccaaatccttgtagcagatacgtggagtgtattggaaggaaaaggagatggctgcttcaaggacatctccagtatcaccatgtttgctgattatagattacctcaggttcttgctcatcttggagccctgaaatactctgatgacctactgaagaagcttctcaaaggagaaatgctctcatatggagacaggcaagaggtggaaatcagagggtgctcgctttggtgtgttgagctgatccgggattgtcttctggagcttattgaacaaaagggtgaaaaacctaatggagagatcaattccattcttctggattattacttatgggactatgcccatgaccatagggaagatatgaaaggaattccgtttcatcgcatacgttgcatatattattgacctcaagtgtaaactgatccaaagaaaaccccctgcgttttatatcatatcatctgtacagttttgctttgatatttagagaacatgatcgaggttataggaaattgattgcccattctcacttgaaaaatacttcctaggccgggcacagtggtttatgcctgtaatcccagcactgtgggaggctgaggcgggtggatcatctgaggtcaggagtttgagaccacctggccaacatggtgaaaccccatctctactaaaaatacaaaattagctgggcgtggtggcacgtgcctgtaatcccagttacttgggaggctgaggcaagagaatcgcttgaactcagaaggtggaggttgcagtgaggcgagattaggccattgcactccagcctcagcaacaagagtgaaactttgtctcaaaaaacaacaacaacaacaacaacaacaacaaaacttcctaggccagatgtggtggctcatatgtataatcttagcactttgggaggccaaggcaggaggattgcttgaggcgaggagttcaagaccagcctaggcaacatagggagacccccatctctacaaaaatttaaaaattagcctagcatggtggcacgctctgtaatcccaaatacgcggtaggctgaggctgaggagggtggattgcttgagcccaggggtttgaggctgcagtgagccacagtcacgccactgcattctatcctgggcaacagatggagaccttgtctcacaaaaaaacaaattcctgacatcgctatgtattcccaactttatcatttggtctgcctgtatagattagacttatgtctagtttttctcccccctgtggaccattgtgttggaccggacatccgtgaagcgaccttctatcaatctatctccacactttccccaaaacatatacatgcgcctttattgtggactaatgtctctccagggacataatatcccccatccacccggcaataactccccagaaggcggggtggtcattaccgccgtaaacccctcaatcctttgggcaaatctacaacagaaacaatcgctgtgacaccactagaagtgcgtcgtcctgcatccaccacccctttggaacacatcatctccacacgctctacgggcaataaccgggagcgtagctgccatcacggtaactccacattagcacaccg

SEQ ID NO: 593620 - DNA, 531 bp, Homo sapiens
  misc_feature (91)..(91): n is a, c, g, or t
actgcatccaacgccgctcggtgagcagggagcagcgttgatccccccgcctatcagcttcttctgtggagcctgttcctcactggaaatnggcctctgtgtgtgtgtgtgtgtgtgtgtgtgtgtgtgtgtgtatgtacatgtacacttgggtgtcaggctttgtgtgcatgtactaaaaagggagaaattataataatattagccgtcgtggggcgtgggatgcagtcgagtgtatccaacgccggtgggtgtgttctaggaagccagagagccagtgcagcgtggtcatcagggggtgtgagttgttctcagtcaagcggagcacactgtgtgtgaagtcagacgccatgatatagggcctgaaggatgctgtagacatagcatgtgtcgcccaggttgatgagaccaatcgcgcgcgtgtctgacgtggccacgagccggggatagaaacccgccagcgcgctcttgtgcgaagtccaggcatcgtgccccagcagctgctgcggcgttggatgcagacaggcggcg

SEQ ID NO: 593621 - DNA, 336 bp, Homo sapiens
aaggcctcgaagatcatgaacctcccccaattgctcctgtagataatattattattgtaaaaaccctaacatggggtgtttgagggtatttttcagaccctgccttctgatggatcagctggcacccaccccagaccagtaaactggctcatctggtcttctggcccccaccccaggaaccaactcagtgcaagaggatagcttcaactccttatgatttcatccccgacccaaccaatcagcattcccgcttcccgagccccctgcccgccaaactacctttaaaaaaccctagcctccaaattttcagggaggctgatttgagtaataataaaa

SEQ ID NO: 593622 - DNA, 102 bp, Homo sapiens
tgatgaatgacaagaccagagtgagataggcttattacccctgcagacagtagccttatcactccgtggaggcttttcatcagtgcctgctggatggacgag

SEQ ID NO: 593623 - DNA, 751 bp, Homo sapiens
  misc_feature (413)..(413): n is a, c, g, or t
  misc_feature (500)..(500): n is a, c, g, or t
tgaaggagccccgccccttataggaccagaagaggaagagagccccactccagagcccccctggattgtgcccttatagtgtttgacctctcctttaggagaagtctttcttaattgatattgagattgatctccacgtgagtgttttcgaaagattcttcatagttgaataatattttaggtggttaaaataaatttaagggtatagattaacctctacctgcaccacctgtcctaattatagttcccttctttttgggaagtgtccacccccaggttagttccatctggaattcatattttaaatttgaagggtatgaaatggttttcacaaatgttctcccggtcacattattggttaataattttctgaggagcctgccacactgccacgccacctgtgatatgaggcntggcggagtcccaagccaatgggcccactgagatcacttgtgaaggcccaggggaaatgtaatgtgcaccactctgttgttgtaacntgtttatgaatgaattgtcacgttgttaatttaattgaaaatgagtttcacacgtgtgtggtccacactttctgcatgttgaaactttatagaactataaatgttctaaatatcccctggaccttttatgtctttcttgtaaggcatactgccttgtttaatggtaattttaccatgtttctggcttagaaccaaaggggcttaattaattgatgttttcatagagaatattaaaattaagcccttataga

SEQ ID NO: 593624 - DNA, 609 bp, Homo sapiens
cccctaaaacccttgatggttattttagaaagaaaatgtggggtttcccccaagaacacccccaaaattagcggcgcggctgggtaaccgcggaataaaagtgcccacatcccatttggcggcaaaagggggccccctatgcttaaaatgaacataaaaagccgccctccctcttataaaaattatttcacaggcgggcaggaggaaaaacactttttttttcaaagaaagactgtgtttccccctcgcctcatagacattacccctcttgtgttccacccgcggaaaaatgcacccgttaaaaacttcttctctcttggtccgggtttggggtccttctggtttttggtagctccaccagtttccccaggggttgcccccaataagatatgcgcgtcccccagccaaagttgttaataatggggtgttattgttaacagtcaagtttacgttgtgagacgcaacggctgaagttggacaccaacagagccttcaaagactttggagtgcagagagtataaagacatttagaaagaccacctgccccgcactagtgagaagaagaaaaaaccaataggaacaaaataaaaaaaagaggagctataggac

SEQ ID NO: 593625 - DNA, 108 bp, Homo sapiens
caacacaaagaaacacacaggcgtactaagtgacgcgagagcgtatacccaactagggactatccgaggcaacttgaactcaaaacactaacagacggagacgccacc

SEQ ID NO: 593626 - DNA, 1402 bp, Homo sapiens
  misc_feature (127)..(127): n is a, c, g, or t
  misc_feature (188)..(188): n is a, c, g, or t
  misc_feature (242)..(242): n is a, c, g, or t
  misc_feature (245)..(246): n is a, c, g, or t
  misc_feature (265)..(265): n is a, c, g, or t
  misc_feature (268)..(268): n is a, c, g, or t
  misc_feature (305)..(305): n is a, c, g, or t
  misc_feature (320)..(320): n is a, c, g, or t
  misc_feature (624)..(624): n is a, c, g, or t
cgcgcagaagggtacatatgctgtcgaggctgttaattggccgagggcggacgcggcgctgcggggtgggccgttgctgttcggccctggatcgccgccactccgcgatcagaccgctctgtgccgngagccgcgtgagcactcggattcaagccggcgccaacgagtccgggggcatcgcccgcagnggcaagctcatggccggctgagcgggacgccgctccgcctcagcaccgcgcgcngcnnctcctcctcctcagccggnggnggcccgggcccagcaaccatggctgaagactactggnacgggcgcctgcggngaacaggaggagaaggaggtcgcgcgagctcatcccgggccgcctgcccatgcgccggcctcgccgtgccccccgggctctgaggttgctcgcgcgcccccgccgatcgccatgggatcggatgaagaagatcaaacggcagctgtcaatgacactcagctctgcaccagagattgtgcacgaggacttgaagatggggtctgatggggagagtgaccaggcttcagccacgtcctcggatgaggtgcagtctccagtgagagtcaacagcgctatactaccagtgacatcggctgcctgaggnctacctggagaagctgaccctcaatagccccatctttgacaagcccctcagccgccgcctccgtcgtgtcagcctatctgagattgggtttgggaaaccgtggaagatctattatttactgcgtgcaacatgcgggagcggatgagcctatgtatgcggtactcgctctggacaagggcaaagacgtcaacgctcacagtacaagccttgttggcgactcacggagatcagactggaacatgaagagggggcaccctgcaccgcatccgggaagtgtccctgctcaaggacctcaaacacgccaacatcgttacgctacatgacattatccacacggagaagtccctcacccttgtctttgagtacctggacaaggacctgaagcagtacctggatgactgtgggaacatcatcaacatgcacaagtgaaactgttcctgttccagctgctccgtggctggctactgcaccggcagaaggtgctacaccgagacctcaagcccagaacctgctcatcaacgagaggggagagctccagctggtgactttggcctggccagagccaagtcaatcccaacgaagacatactccaatgagtgtgacctggggtaccggcccctgaaatctgcttgggtccagggattactcccttcagatgccatgtggggtttggggtgctctctatgagatgccacgcgcctcttcggccacgaggggcaaggaactcctcgtttagaccccgggatgcgcgtcgcccggcacatacaccgcgacgctg

SEQ ID NO: 593627 - DNA, 173 bp, Homo sapiens
tccccgattgagcctctacagcaccagacagatgggaacgtggtcatcgcctgccttggtacagggcttcttcccccaggagccattcagtgtgacctggagcgaatgcggacgagggtgtggaccgccagaaacttcccaaccagccatggatgcctccgggtacctgtacg

SEQ ID NO: 593628 - DNA, 1449 bp, Homo sapiens
  misc_feature (127)..(127): n is a, c, g, or t
  misc_feature (188)..(188): n is a, c, g, or t
  misc_feature (242)..(242): n is a, c, g, or t
  misc_feature (245)..(246): n is a, c, g, or t
  misc_feature (265)..(265): n is a, c, g, or t
  misc_feature (268)..(268): n is a, c, g, or t
  misc_feature (305)..(305): n is a, c, g, or t
  misc_feature (320)..(320): n is a, c, g, or t
  misc_feature (671)..(671): n is a, c, g, or t
cgcgcagaagggtacatatgctgtcgaggctgttaattggccgagggcggacgcggcgctgcggggtgggccgttgctgttcggccctggatcgccgccactccgcgatcagaccgctctgtgccgngagccgcgtgagcactcggattcaagccggcgccaacgagtccgggggcatcgcccgcagnggcaagctcatggccggctgagcgggacgccgctccgcctcagcaccgcgcgcngcnnctcctcctcctcagccggnggnggcccgggcccagcaaccatggctgaagactactggnacgggcgcctgcggngaacaggaggagaaggaggtcgcgcgagctcatcccgggccgcctgcccatgcgccggcctcgccgtgccccccgggctctgaggttgctcgcgcgcccccgccgatcgccatgggatcggatgaagaagatcaaacggcagctgtcaatgacactcagctctgcaccagagattgtgcacgaggacttgaagatggggtctgatggggagagtgaccaggcttcagccacgtcctcggatgaggtgcagtctccagtgagagtgcgtatgcgcaacatcccccacgcaaagattctccactgaggacattcaacagcgctatactaccagtgacatcggctgcctgaggnctacctggagaagctgaccctcaatagccccatctttgacaagcccctcagccgccgcctccgtcgtgtcagcctatctgagattgggtttgggaaaccgtggaagatctattatttactgcgtgcaacatgcgggagcggatgagcctatgtatgcggtactcgctctggacaagggcaaagacgtcaacgctcacagtacaagccttgttggcgactcacggagatcagactggaacatgaagagggggcaccctgcaccgcatccgggaagtgtccctgctcaaggacctcaaacacgccaacatcgttacgctacatgacattatccacacggagaagtccctcacccttgtctttgagtacctggacaaggacctgaagcagtacctggatgactgtgggaacatcatcaacatgcacaagtgaaactgttcctgttccagctgctccgtggctggctactgcaccggcagaaggtgctacaccgagacctcaagcccagaacctgctcatcaacgagaggggagagctccagctggtgactttggcctggccagagccaagtcaatcccaacgaagacatactccaatgagtgtgacctggggtaccggcccctgaaatctgcttgggtccagggattactcccttcagatgccatgtggggtttggggtgctctctatgagatgccacgcgcctcttcggccacgaggggcaaggaactcctcgtttagaccccgggatgcgcgtcgcccggcacatacaccgcgacgctg

SEQ ID NO: 593629 - DNA, 258 bp, Homo sapiens
  misc_feature (65)..(65): n is a, c, g, or t
ccaaaaatatgtagcagcaaaaatttgacaatggacatgattaacagaattaccatttgactcangcaatcccattattggttatatacccaaaggaatctaaatcattctgtcataaagacatatatacacaaatgttcacggcagcgctatacacaatcgcaaagtcagggaatcaaactaaatgtccatcagtggtagaaaggataaagaaaatgtggtggcagggagtggtggctcatgtctgtaatcccagca

SEQ ID NO: 593630 - DNA, 158 bp, Homo sapiens
cggttgcagatatggtgcatttgccgcacgttgtagtgccggaatgggcgtattataaccgactatagaagtcaactattgagctaatgctatgatccgtataacagatactgcacaggaacactttgccaaactgctggcaaatcaagaagaaggca

SEQ ID NO: 593631 - DNA, 329 bp, Homo sapiens
ggggtggtttttgcccccgtcccaacaacttgtttccttaccccctcagggatggccccaaactgtccctgcctttggcaccccctttttttggttccatccatccccccaacagcctgccaattgaagcccgtccctgcatccaggatggtaccagttcccgcccctcgccccccccctccccaggtgccttaaagggccctcgtccccccaaggtggggggcaggggccccccctctccggccctggtgtgggggaaaaaattaggggttgggggatcgccagttgggaggggcgcttttaaattaaaaagttttcccttttaaata

SEQ ID NO: 593632 - DNA, 228 bp, Homo sapiens
  misc_feature (82)..(82): n is a, c, g, or t
tagaggatcccccctcccccacagtgagcattattattaaattgacaagttgtcgattcgataattacaatgacttgtacanaaaattcacatgcgcctgtagagggagccttatggttaggaactaggtgacacatgtgcctctccggacagaggaaggaagtcccaccccgccttccagcagcagcaagccctatatctggcattccctgttccgctgctcccacc

SEQ ID NO: 593633 - DNA, 835 bp, Homo sapiens
tgttaggtaagaaaagagaggatccaaggaggcagagaaaagatggtgaagccacagacggagccaggccccaggcccatcccggagcccatgcaggagtccaaggctgaggggaacaatcaggcccctggggaggaagaggaggaggaggaggaggccaccaacacacaccctcacagaccagacctccccagccagaaaatacccaggcccacagagccgagggggacagtgatggtgtgcctctctcagggtctggtggacagagagaagggcctgagatgccgagccagaggtggcagtgcaaagagagaagaggagagaggaggaggaggaggaggctgaagactgcagaggaagctgtcacccgcaggaaagaaggacccacatgtagatgctgaaccaaccacccgagaccttgagcatacaaggaagatccaggcaaaggcgagagatcggtcggaggctcatggctgttgggatggagctgggaagcactggaggactgaggaggctcagagacccccgacagggaagggagaacaaaggagcactcccagcagaaagaggaggaggcaggagatggcagatggtccccagaaaggacccttcttaccaggggctgggaacgaagcgccagaacctggcacgctcggagagcaggaagcagactctacccaaggcaatgggcggaccgacccaaacagctggatcacagaatggaccatgatgggcccacaggaagctgcatgtgctgaaaagcgctgcaagggcagaagagacggaggcacaacggacgaacataaagcttacatcggccagagcaaggcatagg

SEQ ID NO: 593634 - DNA, 377 bp, Homo sapiens
aagtagtccacatagtgaaactcatctctactacaaatcatacaaaaaaaaaaattagccagatgtagtggcacacgcctgaagtcccagctagaacctgggaggtggaggttgcattgagccaagatcgtgccactgcactccagcctaggcgacagagcaagactccatctcaaaaaaaaatgttatgtttacactatactgtagtctattaagtgtgtaataacattatgtctagtaaacaatgtacataccttaatcaaaaatactttatggctaaaacatgctaacaaccatcagacacttcagtgagttgtcatcttttcccaagacccaccagcagggtctggccttgatgtcgatggctgctaactgac

SEQ ID NO: 593635 - DNA, 602 bp, Homo sapiens
cgtctccactgatgggatcacgcggctctccacgagagggatcacctgagcaccacgagctacgtccatccgagctgcgactgttcgagcaatctgccacgaggaaaaccagctctgatggtacctggctcacccacgcccgcgagttactatactttttgccgttttaaaaggccctgggcaccctgttgatcacgagcctcccgtcatagctcagggaggcaaacagccacgggtcagccgaggaccagtccacggcatagacgctgtcctcgtgctcctcgtaggtggcgatcacgttgtcctgcaggggctccttgctcttctcttcagaacggtggtcctcctggtcactgatgtcatcgtcgtctaccaagtggccgaagggctccgacgagatggacaccatgttggaaaggatgactctgctgtcactgctgcccgtgaggaccagctggtcatgagagtggttgtagcggacgttccacacccagtgggagtgctcctccagggtcttcacgggttcggtgacatttcgggtgtcccagaacttcaccttacagtcgtctccgcagctggccaagtagtactgcttattggga

SEQ ID NO: 593636 - DNA, 124 bp, Homo sapiens
tggcagcagagctccctgtggggcagctagtgctgtgtgtgcatgtatgccctccagactggtcccagtgggagtatgcggggacagtgtgacagtccagtgcagccagtgttgacgtgaattg

SEQ ID NO: 593637 - DNA, 913 bp, Homo sapiens
atacagaggaacaaagaaagtagatagtcgctttgacatcacctgcacatagctcacaccgattgggtatctcctacgtcagccctaactatactgggattccgcttttcccgttatctcgccctcacccgtttacttcctttatattcggacacacccgcgaccttactctatattgtgcggccctacctcccattgtccggggaactaaaacatgggtttgtcgaccacgtgaacttctctttggttcctaaccctgtgtccgcctgtgacgaacgtctaatgacgaccccctctttcatattgggaatgagcccaacctcttgttgccactaaacacggagacaccattcttttataatactcacgcgccacttctggtttaaactacccatccatcaagaactccccgtgcatactagattctcgccccatcaagtagtgaaaattgtatttcgttgggtctaaatcccgtccctgctgaatgaatgtgaaatagttatccccccgggcactatatcaagatagtttctgcatgttatattcatgtcttgatatctacaaccaccaccgtttcccgagtttcactagttcacatctgatgaaaaagcacttctatgattaaattcagccacccaatatggcatttttaacaggataccacccgattgattcatcttatccactcgacctttttctccggtctattagttctaccgcaaatagtccttgtgaagttccctctgaacattaatagttaattacttttttatcgagtaggcgtgtttttttagaaatgatttgatagctaccaccgggaggttcacaccatttcttccacgcccaaactatcctctcacagataatctgcccttccttccagcccacatttacccagccccccaacatatac

SEQ ID NO: 593638 - DNA, 285 bp, Homo sapiens
tagcatcagtccttctctgtctccctttttcccctttcctaccccaatggattttagcctaacgaagaagagtcctgaatgactttgaccaggaaggtctaggagaagaggaaaacatgccagaggaagacagcgaagaggatgaagagaaagaggagggctcagaagcagaacaagcccaaggtggctctgtcctttcagctcagaacgctgggcaaagcctgcatcaggaaggtgaggactcagggtgggagagacatctcaagtggcatgccgaaccgcgca

SEQ ID NO: 593639 - DNA, 187 bp, Homo sapiens
ccttaaactttagtagacttttgcttatcatatccctcatttcttgcccgtgaaataaagatacacacaagcaaaaaaaaatgatagtgtcacatctcgttagttccctgtgccagaacaggaatattcttagttccactggccaggattttcctacatagtcagaacttaccttactcggtacaca

SEQ ID NO: 593640 - DNA, 395 bp, Homo sapiens
  misc_feature (395)..(395): n is a, c, g, or t
agtggacttcagctacatccactttggccaccatgttttcgttgtgtgtaagcagggaagggaactcacctgccttattaaacctacgccgagactcgtggaacctgctgtatcagagactctgaggccaaaaacgcatcatacttcttggccagcttcttgaccagttttatattcttgtggagtattattcagcgcctcgatatccatatgaggaatatccacggccttagcactcgtcacagtgctgctggtcccccaggacacacacagagacacttagggcgggaagtggacctaagcctaacggtgcccaagaagcgcttgtccttctggggatcatagttctacacgctgatctgcaactccaccgtctccaggaacttgcggcgttn

SEQ ID NO: 593641 - DNA, 218 bp, Homo sapiens
  misc_feature (9)..(9): n is a, c, g, or t
  misc_feature (19)..(19): n is a, c, g, or t
  misc_feature (45)..(45): n is a, c, g, or t
  misc_feature (49)..(49): n is a, c, g, or t
  misc_feature (54)..(54): n is a, c, g, or t
  misc_feature (162)..(162): n is a, c, g, or t
tcattcttngcaggttggnttctcatcgtctgctcctcctctgcnttgntggantggtatttttttctgaggcttgccctacggactcggtgaatccaagtttcctctgatggtcaaagttctagatgctgtccgaggcagtcctgccatcaatgtggccgngcaatgtgttcagaaaggctgctgatgacacctggggagccaatttgcctctggga

SEQ ID NO: 593642 - DNA, 413 bp, Homo sapiens
  misc_feature (401)..(401): n is a, c, g, or t
tgggcataaagttttatagttttgtattgagaaaaataatttaattaattagatgtatgccaccctataaggctattttccaaaatgactgactccaggttcatctgaagagctcagagtccttccactcaatgctgccaaagactgggacttcctgtctaagactttgctgttttagcctcactaaagtttcctcaagatgaaaagtccagtagactgctgcataaaaatttatttttctacgtgtgaagacactgaggatgctctactggttgtttccacttttatttcactgtgtgagttattgttgtagcagtagactccaacccctcaggcttctggaaccctgtttggtttgatatgttttctatggctaaaaatattggtgactattaaaaccngaaatgaaaaaa

SEQ ID NO: 593643 - DNA, 307 bp, Homo sapiens
ggtttggtttcttttgagaccgggtctggagtacaatggcacagtgccggaatcacgactcactgcagccttcaactccctggcccaagtgatcctcccacctcagcctccaagtagctgggactacaggtgtggaccaccatgcctggcttttttttttttagagagagacagggtcttgccatgttgcccaggctggtctcaaactcaggagtttgagaccagcctgggcaacatggggaaaccctatctttactaaaaatacgaaaaactagctgggcatagccccagctactcaggaggctga

SEQ ID NO: 593644 - DNA, 142 bp, Homo sapiens
cccataggccggaccggatagcgcccaagtactaggcgctgtggttaagggctgtactcgcattatgatgctgttgtgaactctgcttcctccggagtactttcagctggcttaaattcaggggtacttgtgggcgctcgtg

SEQ ID NO: 593645 - DNA, 449 bp, Homo sapiens
  misc_feature (353)..(353): n is a, c, g, or t
acatgcatccctttcttggttactctgcacagacgtcaggctctcatctctgcacttgatgtcaaatactagcctgcctcctacccaggatcacaaatccactagtgctcccctctctctagaatcctctatttgtccatcttaattggattttattttattttgttttgttttgatttgagacagggtcttgctctgtcacccaggctgaagagcagtggcatgatcatggctcactgcagcctcagcttcctggactcaagtgattttcccacctcagcctcccaaagtgctgggattacaagcataagccactgtacccccaagcctcttttaaaatataccatattatntatctcatttgagagaaacctgaaagtcagttaaaaaaaactgtatgattccacttatatgatgtacccagaggtagtcaaattatagagacagat

SEQ ID NO: 593646 - DNA, 329 bp, Homo sapiens
  misc_feature (163)..(163): n is a, c, g, or t
  misc_feature (205)..(205): n is a, c, g, or t
  misc_feature (258)..(262): n is a, c, g, or t
  misc_feature (266)..(266): n is a, c, g, or t
aggatcattagcacgaatgtatcgcgaaggccgatgaacctggcgcctacagcttcttcaatgcgttcaactacattccaccgatcattgggttttccagtgtcgggcgtaaagacagcctgaacaatatcgaacagactggagaattcgtctggaacctggncacccgcccgctggccgagcagatgaaccagagctgcgcggncgtatcgcccgaggtgaatgaattcgaactctccgggctgacgccggtggctnnnnnaatngttggcgtaccacgggtgggcgagagcccggatgaagacgagatgcaggagacgcagatcatc

SEQ ID NO: 593647 - DNA, 100 bp, Homo sapiens
gatgaatgacatagtctggcttacaaagtagtctcgctctttaattgtactctacagtgtttcgctcacgcgccgaaacttcaagttccctttttgccag

SEQ ID NO: 593648 - DNA, 199 bp, Homo sapiens
  misc_feature (36)..(37): n is a, c, g, or t
ccctgttatcgaggaccctgcttacctgtgatgtanngtagtccagcagaagccatcacctcagatggcagcttttaacaagattttatttttttctctcgatgacgcatgattccttttaacaacatgtttccagcaatactgcccagtgtcacgccagggtcaccgagtctctgaattacgtaaatctatggctcat

SEQ ID NO: 593649 - DNA, 117 bp, Homo sapiens
ctgattccgcgtagaaaaaaaagaaaaacctatctagtagctgatatgatggacaacggagagagctttccctgtgattataaaaaaggaagctagcatgctctacaggtcatctta

SEQ ID NO: 593650 - DNA, 926 bp, Homo sapiens
agcggggtgacggccggcaggccggtgcggtcggatgcgccgggcagccccgggccccggctcggaggctcccggcggagaggaggcggcgcgccgggcccgggacccgcgcgagtcggcgcccggccgaggggctgcgtaggccccgactcggccaggcccagtcgggcccttggacagagacagggcagggcattgttcagtgcacttgaccgacctcagcaagccccggcaatgacctcagggcaactggaaactctgccttccgagcagtcgccggcagtgcccacgcacaagaaactggtggcaacggcctcgtgccctgactggatgggggaaactctcacagacaacgaaagatactgcaccccaggggcgttcccttggccctgacgaacactttcccacagccataggattcactaaccagccaccaccttgacctccgggaccgcaatgggccgggaatgcccctaagtgtggccaccagaaaattcgcacacatgagcgcacgcggtgcatccccggtacactactcacacgtgctagagcactcctgtggccccagagccatgggaacttttgcccctagttaaggtttcacacggcggatacacgaagcgccgctttcattgatacaccaaaggcgcacttgcgaccgccagcggccagcaaacgggcacaacaacacaccgcaagcgcagactaggaaaaaccacacaacccggcgcgctggagcgcacaactaacaacccacacccaccaacgaaagcccggcaacgcacacaacgacctgcccaccacacccccccaacagacgacccaggccccaaccacccgaaccaacgcgcccggcacaggcaccgaccgccaccaggccaaacaagacacacatcgtacgtggcacaacccacccgataagacag

SEQ ID NO: 593651 - DNA, 408 bp, Homo sapiens
gctcgacaacaaaaaattatcggttgcctctacctgcatcgctgcaatttttgtattatccagcaatgttgtattgcaggctacaacaatggttgagtttccagcaccaatatccttgtgtgcaataacatccttgatcggtgtgactataactgcagctatccaattaattcaagatcacaaaattgaaaccggttggccacttgtgagcgttggaaacttggttggctattctctactggcaggtgctgtaagtggatcatgtctaagcttcaacaattgggccatgaaaaaaagagggccggtcttggtgtccacatttagccccgtcagtacagtctgcacaatcattttctctgtggtcaccttaggagaaaccgttaatattggaagcattgctggtatgtt

SEQ ID NO: 593652 - DNA, 222 bp, Homo sapiens
accccccatttttggggcctcatccctgtggaaaacggggataattaaaaaataattgggtgggaggcccgggaaagtttttgagtaaaaccaggggtgtgtataaaaggggggtacaaggtcccccctgggaaggggaccaaccttgtttggtggatgagaaggcgtatttatttttccctgtccagtatttaaaaagagaataaaaaaatccaaatggca

SEQ ID NO: 593653 - DNA, 472 bp, Homo sapiens
  misc_feature (311)..(311): n is a, c, g, or t
ctcagtagtcagaagtcgcacagcccggcagtcttcgtcgcgggaggtgcgggtctagctcaccaactcccagttcggtgtcttgagctgccagaagcttgggcagccctggaggatgctgagactccgcatgcttgttccttcagccacttacatcttcttgttgtgatgtgtgttccgtattttaagcaatctcaccaggattattattttatggccactttctctgccctccactctcttgtgtccgatcttctgtctgggattatgttgcaaacatatcctcgttcatttcctgcagtaaaggtctnctggtgaccacttcttcacttctggcgtgtctgaaaatacctttatttcatcctcattcttgaaggctcttttccacaggcgcatggcttcaggctgttgtttgttttctttatcccggtagatacgctgacccgctgtcctcagcctcttctatgtaagg

SEQ ID NO: 593654 - DNA, 247 bp, Homo sapiens
  misc_feature (10)..(10): n is a, c, g, or t
ctctagaggnccccttacaaccccacgatcacggggttggtgtacaataggttacaaccccacgatcactgggggttggtgtaaaataggcaggcaagagtccgaggaggttagattgtggctataaaaatcattaaggatactaatatgacagatcaggttcgtccttaattgttgtgtatggttttcatttgtttcgaggttagtttgattagtcattgttgggtggtgatcgtggggttcgtaa

SEQ ID NO: 593655 - DNA, 492 bp, Homo sapiens
ggacgcgtgggtcgacccacgcgtcgatattatactagcattgaccatctcacttctaggaatactagtatagtcgctcacacctcatatcctcgcctactatgcctagaaggaagtaatactatcgcgtgttcattatagctagtctacataagccgcgtcaacagccactcgcctcttaggccaatattgtgcctatgtccatatcgtagtcttacgccgtactgcggaaggcagccggtgggccgtagcgcctactagtctcgaaatctaccaacaacatatggcctgagatctaccggtatcaataaaccataagatgcttatctccatggtgccttaaaataccttacattcgtcgcactaacacaattcatatttaagctagccaactggatcactgaccttttccagatgaagcgaccataactttcggagatcagacagcaaatcacccatgaggctaattattagcatcatgcccctactatg

SEQ ID NO: 593656 - DNA, 1330 bp, Homo sapiens
gtgaactccaggtccatgttcatcgggcgccgtggaggagctgtgagtacgaactttggctgggccatagtcacaggcttgtcccatgaagagcaacgaggcatgatgactgtcaggctcactcaactcctaagacacagagacacctgtatgatctgagctccgttacgtggcagggcgggattcacagcttgcttatcgagcgagtaaggggttggtttacatgagcactctgctggaggagaatgaaaagctgtcctccgtgagcgtgggggcctgctttcggacgagaccaggacttatacgtgggcatagggccagacatagaggctgactatacttggaccagggtcctgtcgatgttaggtgtacaagggatgggtccccttgtcccatcgcaagatccggcccgtgagctagtaagagctgtgatcaggtatcgggtgcgaaggccttgatgcccgggcgcgaatgcacataggcgccatgctcagtctccctgtgacagagggagaacatgcacgtcgtcattgcgttctcgctgggcacagcgccgagtggttctgagaacaaggcgtagcgaagtgttccgtgaggagtggaagctctataggatgactaggtagttccccgttagttcatcgccacttggcgctggttatagcaggctctatgcatcgagacgtgaggatgatcgcgtccggttaccaactcctggatgactgagatcagaatctgcgccagcccctaaagtcccagtgggccaggactgaccctgttctggcaagctaaccccatggatgctggccaaaagttccgttagtgggataggggcaccccccccacaggcagatacccgaggcggcgcgaaaagaccagcatcccaccaacgagccccaacatccccagcaaagccgccatggagggaaactgagtgcaaccacatgcgcagaacccgcgagtcaccataggagtgtaacggacaacagcgccatcaccacaccacagcgccataaagcggcactcacacgaaaccacacaaggagcacacagcaacacaacaccgcacgagagtctgacaagagcaaagacgaataacgatacaacgggagaaaaccgaagacaaccaacacaaccacaccacgtagtgccagccgcggcagccccgccacgcatacaacagttcgacgcaccactacacaccagagtagagccccaccaaccgaagggtccctcgcacacaaccacacacgacgagaagcaacagatagacgacactacaagtgaaacagcacctagtgtacacaggcgtacagcagtaacctaccaa

SEQ ID NO: 593657 - DNA, 133 bp, Homo sapiens
taccccaagggtccttaagccacttaacaatttttttttttagacacagtcttgctctgtgctcaaactggagtgcagtggcgtgatcgtggctcactgcaacctccacctcacaggcttaagggacccttgg

SEQ ID NO: 593658 - DNA, 316 bp, Homo sapiens
  misc_feature (167)..(167): n is a, c, g, or t
  misc_feature (193)..(193): n is a, c, g, or t
  misc_feature (222)..(222): n is a, c, g, or t
  misc_feature (262)..(262): n is a, c, g, or t
cggttcacggtatttaataacgctcatgcgttcggcggcggcaaaggagcgttccaaatcgtcggcgaaatcttctgtaccgcgggccggggtgaaaactcccaatgccactgttgcgcagatagccaggtggggaatgctgaggtcgccgcggcgaacagcgtcanaccaacaagtacagtggtcacaactncgaaaaggcggaggccctcacagagactncgacggataccggagtgaggcggttcgcgaaagagcattnccaacctcttcggaaatacggtcagtttcggcgaggcgacgatccccatagccg

SEQ ID NO: 593659 - DNA, 824 bp, Homo sapiens
  misc_feature (546)..(546): n is a, c, g, or t
  misc_feature (592)..(592): n is a, c, g, or t
gagaagcttactagatcgattcgtttggcgctgcggagacccagtaggtgaagtgaacaatgtgtcatcagctgttatccgtaagagtagtatccatggctcatgacattatagtgctctgagaattcctcgatgctaatcaaataaacgctcctggtggagcgaacaggatacgcgggtcatcgaaacaaatatcattacggatggaagcttcatcggagagggttcactcctatcgtcggtaatctcagttcagagcaagtgaagctgcgcatatgtcggagacgtcagattagttcagcaatttatcggcctccgttcctcatgagctggaacgacgcacgggggaaacatatctaaaaagtgttccaatttcgactcgtgatcacacattgccgtgttgggcaagccccaaggggcttttgcttggtagagagtcaactgaacatgattgcgtcatgcggcctacttcacatagtattcgagagacatttctggggacacataaccgtagacgacctttagcacagcacagcagcactggcntgttacttgggctcctatgattcgggcagcgcacgactttggcctntatcagatttcaccgcatcgctctttcaatctcactttcacgatcgcttcacgcgtagtctcactctcgtctcgcgaccacacctcacacagcgtacactctctctgaccactcggcgacgttcacaacgcattgcgctatcaccatcgcgcactttctttcgacatactcgcgtcgccttcacgttctcctttgtcacgcgcctctgaatctctcgcttctgggtcgaacc

SEQ ID NO: 593660 - DNA, 474 bp, Homo sapiens
aaacacattgcgcggggatatcagcaaagctcaatggtagaagtggatttgagttgggcttgctggtggggagggcataggcgggggacttgttaacaaaagaatttcagatcatttaatggggcacagagtgagggagaggggcactactttaatatcatcagggaggcaactaggaggaggtaacatttaagctgaaacaaattatgagaagaaccaagaaattcaaagataaaaatatcacaagacctgtcttatcccagcaatgatcagaaaggtcagatcactcatggggtttggggcaaggaggtcccaagggcctcctacttattctgaagagagatgagggatcgaaatgttatccagtaggtaatggagaattatgaaagactcttcaacagaatagtgatctgactgggaagactactctggcattactggacaggatgggttagagaggaaaagagggtgaag

SEQ ID NO: 593661 - DNA, 114 bp, Homo sapiens
  misc_feature (83)..(83): n is a, c, g, or t
ggtcctcgcagccatggcggccgccgcgctcccagcatggctgtctctgcagtcgagggcaaggactctgagagcattcgtcnctgccgggtagtcggccactccggtcccgac

SEQ ID NO: 593662 - DNA, 746 bp, Homo sapiens
gtgtcctgacaatgtggagaaactctttccaggtttgagatagaaactgtgaaaggaacaacctcgaggatcctttttaataatgctgtaagagaaacgttgatgacagacagatagtgtaatgggctgcctttatcagggggctttggtactccagcgttggtttgtgccactctgttgaagcaggtgaagagaagccgaagtaacagtatcctctccagacatttgcaatgggttggaagaagcccgatttactggctgcctagaaaggtggcagatcatattggaggtgaacattatgaagtcctttttaactctgaggaaggcattcaggctctggatgacgtcatattttccttggaaacttatgacgattacgaacagttcgtgcttcagtaggtatgtatttaatttccaagtatattcggaagaacaagataggtggtgatcttctctggagaaggatccagatgaacttacgcagggttacatatattttcacaagggtcttctcctgaaaaagcgagggaggagagtgagaggttctgagggaaactctatcgtagatgttctccggcagatcgactatgctgccatggtcttgaactgagagtccatttctagatcatcgatttcttcctattacttgttctgccacagaaatgaggattccagaatgggttaaaaactttctgtaaaaaagttgaggtccattggtcccaaaggatctctggggcaaaaatcaa

SEQ ID NO: 593663 - DNA, 358 bp, Homo sapiens
  misc_feature (129)..(129): n is a, c, g, or t
  misc_feature (155)..(155): n is a, c, g, or t
  misc_feature (164)..(164): n is a, c, g, or t
ctctacaggatccatgctaagaaaaaggggacgaggtgttatatgaatactgatataaaggtataattacaggccaggtgtggtggtcatgctgtaatcccagcatttgggaggccgaggtgggcaganatcacctgaggtcaggagtttgagancagcctggncaacatggtgaaaacccaatctgtactaaaacatacagaaaatttgggcaggcatgtttggcaggttgcctgtaatccccagctactcagacaggctgaggccaggagaatctggcttgaaccctggtaggtaagagactgtagctgagccaaggatttgagccatttgcactccgggccggggtaccgaagct

SEQ ID NO: 593664 - DNA, 828 bp, Homo sapiens
gcctcttccggcctctttgggacttggaggtgggatctagccccttatccggctcaagtttctgggacgttggccgcccctgtttgcctgcaccctcgctcgtgcgcgctccctctcttctggggagccacttggtacacgaagatgggattctcccgacagcgctcttccacttgatgggactcgatcttgcacccctggtctgtccagataccctgtttctggagtccaccctccattggaggagggatttgggtaagaggacagaggcaagggtgcctgtggaccattggggtggagaagggaggtgccccagccactagtaaaggaggaatattgcttgctgtcccaccaggaaaaggaggaggtttctggggtgagggattagggagagagaatccaggccagataagttggaggccggggttggtccaggcccacctctgcctcttagtcccccaggcctctctctgcctgaaatgttacaccttaaccggattttccgtcaatgaagaggtggcttgtgtgtttgtcacagttctgttctcctgcgacctctgacctccccccggatgagctgggccttggttttttactgattaagaaaggaccgggccaaagaagtagttacttgagtagctgaagctgccaatgaggaaatccctgtacttttgggcccagagccagccccggagccattcctccctgttgcttttgttgttgtggttcttgtctttttcattgtctaataacagctttattgggatttagtttacatacctccttcctctgattttgaaaagattataaaatgaccactccctctga

SEQ ID NO: 593665 - DNA, 214 bp, Homo sapiens
acaaactgcaccactggatgggcttcctccccaggttagatgtcaggaagtgatctgagctcgttgcctctgacctgataccacatagctcgccgctatgcagggtctgtctcatcctatgcatcagccctggaggaaagccaggatcctgctctctggatcagagaactctcagtaggcagatcaggccctctgactgaagactagtgtatta

SEQ ID NO: 593666 - DNA, 1841 bp, Homo sapiens
  misc_feature (834)..(834): n is a, c, g, or t
  misc_feature (1090)..(1090): n is a, c, g, or t
  misc_feature (1092)..(1092): n is a, c, g, or t
  misc_feature (1518)..(1518): n is a, c, g, or t
tggttttttcgtgtgtgctctgtttggacgatgcgctcaggctgtctcgcgttgcgtgacatgatcgtctcggtagtgtgctcattactcctcctagtttgtctgtgttgtctctcctccctccatgtgggctgtcttgttgtgtctcctccagcgtcgtggtgtgtttcttcttctcccctcccccttccccttgttgtggtgggtggtagcgactcactcactgtgggtcttctccatacatacggggggtgctcgcccccaccaccgctcgtgttgtggttgggtagctgtccctccccctttcttggacgtggtgtgtttttgcagtagtgcagtcctgagtctggtgccagccagagttatggtgtgtgaccgcccgcggcggtgacacgccccactgtggttggcacccagcgacgtttgtctcacaaacgcttttgatggcctcttttgttgtctgctcccgcccttgttttcccgccgtgtgagatctattaagacgtgggttggttgtttgcaaccccgggcgcagagaagacaatggacccctttttgccacattgctcctggggggaaacactggtttgtttggttcccccacaaggctaccgcgtgatgcctgctgttgccccccgcgagagtggtgccccccacactatgcctgctggtgtgttgtaccccagcaggggttgggtgcctcttggggggatgcccgtcccccttttttgacctgttgtgtcccccctgcctgtggggttattcacagggccccctcttgtctcttgcgcccttttcccccccgccttggggggcgcaccacgggtgttcttngcgccccctaggctgtcctgtctactcggcgccaccaggggggcgcccccccacaagccgcccccctcgttttgtgagccccacacctcgtctggtgcgacgagcgtgtcagcacccacctcagccacacgctgtgaatgtgccccccacagagttgtgtttgtgggtgggtgccccccctggtgtggtgcacccactagccccccctctggggagagccccccttctgccgcacccactctctcaacagagaggngngtgtctcctcctgtgggctgtgaggaagagacgcccccctcgtggcgtgtgtcacacctcggggcgccccacaccactactggctttggcgtttgtgccctctggggcccaccaccctcatagcgcgctcttctcgttggccacactcgcgctatagagagcctctgagagccctcgtttggctctctcttctctcccgcgggagaggagaaatatagcggtgcgagagagagccgcgcgagaagaggtgtctctgtgctcccctctaagttggtgtgtcgtcgcgctcgttgggcctcttttttgtgccctcttctccccacacaagagacccacctcgccccagcgtgtcccccacaggttttcacgccgctcgtctctgtggctctttgtgtaagccacacagtgtgagagagaaccctctgngggtgttgtggaggcccacacctcatactctctctctctggcaccgcacatcacccactccccaactccccggcacaccactccacggcccacacgtccacccccaccccccaccacctgtccacgcagatgttggcacgaaagggctaaaatttgacccctccttgaactcggctggagacccctccaaaccccccgggagatgtcccccccgcaccccgggtgcccccgagccccctgccccctccccctcaaggggtgaggcccttccccggtttatgaagcccgagggttccctaaaaaagttaagaactcccaaaaaa

SEQ ID NO: 593667 - DNA, 261 bp, Homo sapiens
cccaggaactaccaggcaaatcctgagtacatggagcttggtgcagagagacattgtgagctcaaatcagaagaggttccatttccaagttgctgattcataagagctcccccaagtagagccggtgtcctattgaatcttgattcatctggaaggatctcggacatctcttaagaaacaagggactgatctatagccacattcttccatctccagctgaatcgtcagagccactgctatggttcagaaagaccattgaag

SEQ ID NO: 593668 - DNA, 273 bp, Homo sapiens
tttttttttggggggcccccggggggggggggggttttttcggggggcccccccccccttgggggggcccccccccggggttttttttggggtttccccaaagggggcggggggccccctggcccccggggggggccttttttgggggggtttttttttttttgggggggaaaaaacccccccccccccctgggggtttggcccaacccctttttgggcccgggggtgggggtccccccctttgggggaaaatccccctttttttttggggga

SEQ ID NO: 593669 - DNA, 521 bp, Homo sapiens
gccagcccccaggtaaactgatgcacactgaagttggagaacccctgggctataaggtgtcagactttcaaagccccactcaagctgtgtcatcaccatgtaactgtcacggcaatagcagcactggatgtgtgctggtcatcttctgtgcgttgccttgtccccagcatttgacctgtgttgtgtcatttgggcctcgtaacagcctgtgaggcagtcatgggcattactccatgtcacagatgggcaaactgaaacttgcccaggtcacacagcagacggtcgcagaccacgggctcacacccaggcactgggctcacaactcaaagcatgagctgccaggccaccctgaggttcagctggctgcggcgacacggccaaagccatggcccataagcccgctgtgaccttggatggccagctctgccattcacctggcactgcaactgaggacagatcacttcactggcctcagttttcccatctgtagaaaggaacaatagcacccaccacatgagatc

SEQ ID NO: 593670 - DNA, 696 bp, Homo sapiens
  misc_feature (195)..(195): n is a, c, g, or t
agtaggcaactgaatgtggctgtcctgtgtggtttatgctggaaatagtaaccccaacatcactgtcatctctctctaatgcggttgccatataccatggagcacctcagttgactggacaataatattcctggtaacaggcactcttattactggcagttgaagctggagcgatttgtgaatctgctactcacnttgccgtatggtacttttagtcgactattatcagactgagatggcagagagtcttaactgatagcaaccatgtgccgtttgctaactgacgtgtctcttctggttcacaaggtctctgtaatgcacaagtctctggacaaacatgccaaatgatgagcattggaaagccctgtcacgaaagagcaccagctttcgggtctatataatggctttgatatcaagagtgaagatatgttcaaagattctgaaacgccagtataccactagagaggattcagtttgatagctatatcacgttgtgtttcaggagctagtgtagatcttatatccaggcaatatgacaagttcctcactcatttgattttaactgaatgatgtgattgaccacatcgtggttttccagatcttgagtgacaaccgaaagtgaagatccgttggttggattagcatggaggtgcacaaagttctctcttctgggaatgcatggttaaccgagtgtgg

SEQ ID NO: 593671 - DNA, 153 bp, Homo sapiens
  misc_feature (1)..(1): n is a, c, g, or t
ncgaggggtgagggtgtgtccccaatcttcagcacacaacgccagttgggaaaggtcagcttcgtccttcgttgtactgggcacagtgctcagacagcccatccaacccttggtggtagtctcgcattgggtccctgccattgggacagcggg

SEQ ID NO: 593672 - DNA, 222 bp, Homo sapiens
ggagtgcagtggcttgatctcagctcactgtaacccccatctccctggttcaagttatttgcatgtcgtcagcctcttgagtagctcggattacaggcgcccggcctcattcttttatgtaatcatccagcctcctgagaagctgggaccgcaggcgttagcaatcattcccagccagctccatatgagttttggaatgagtttgtctattttcagcaaaaa

SEQ ID NO: 593673 - DNA, 142 bp, Homo sapiens
  misc_feature (40)..(40): n is a, c, g, or t
  misc_feature (66)..(66): n is a, c, g, or t
tctcagacacagtcagaaagcagtggagtagaacagagtngagtgtctgggaagccatgctggtanctagcatgagtgagagctgcattcctgtagaagattcgcagggaacccaatggagaggagactatttctcagacat

SEQ ID NO: 593674 - DNA, 1117 bp, Homo sapiens
  misc_feature (1117)..(1117): n is a, c, g, or t
gggcaaccgaggccggggatcgcgggatcggacgccatcgccgccgccgagtggactgggagcccgcggggtactggagcgggaggcgctgccgttggggccgtcgagccccaggatggtgcagagttcgtgacgaaagtgaggagccccgagagggtacctcaggaggcaacatgagtgagaatgaggaagaggcaatgtctcgagcgaagaaggcagtggggactatgacagtcgaagagatagcagtgtgggcattgaacgcccgagagccctgggtttgagccgacgaagagcccagagttggaagcccaaagcccgcagatttgagcctgaaagcccggggtttgagtcccgaagccctgggcttgtgcccgcaagccctgagttggcacccagaaggcctgaatcagattctcagagccctgagttcgaatcccagagccctaggtatgaacccaaaagccctggctatgaaccgtcggagccccgggtatgaaccccggagccctggctatgaatcgtgagagctctagatatgaatcccaggaacactgtagctcaaaacccagagcccagaacttggaagctcagaagttccaaattccaggcaaggtgcggagatgcttctgaaccccgaggcacacgagtcctttgaatatctccgtaggagtcagcccggtggactccttcactcagggagtcagcgagagcagacgacagggcactggcgcataggggcacctaagagatgcgacaaggagcgcgcatggatacaacgcagttgacagctacagaagccctgagctacacggagccaaagagccacgtcgcaggctagccagcgaccaggcgacggggagcgacaggggaaccaaagagtgaggccacgggcagaaacggatgcgaggggaacaccaggtagacgaccggactgacgggaggaaagacaaaaaggaagaaagcacgaccagccacaacgcaccaccaacgggccgcaggaaaggagccaacgagcagggagacagacaacgatacaagacagaaaggaagaaggagctaggaaacagagacgaagagcgccccacacgaccgggaccagcgaccaaacacgaan

SEQ ID NO: 593675 - DNA, 425 bp, Homo sapiens
tctagagtgatcccctccttatgcccgctgctattcgtgtgcattgtgaacacgactgtgcagttatgcattatcagttgtgttcccctttgcttggcgtagtgattgttgaaggagaatcacatccagcttcgtgatgcaggctgagtgttgaggaaatttccgcagttttaagccgtcgtgtctgtgattgcccctgcgtacatttgctggtgtattaataggataaatgcttttagttcatttctggtggtgggaggggactgaagcctttagtcttttccagatgcaaccttaaaatcagtgacaagaaacattccaaacaagcaacagtctacaagaaattaaactggcaagtggaaatgtttaaacagttcagtgatctttaatgcattgtttatgtgtgggtttctctctcccctccc

SEQ ID NO: 593676 - DNA, 86 bp, Homo sapiens
tttttttttagcttttaaaataaacaataaagcccgttatttattatctaaaagccagtaaatacatttacttctttggtacccat

SEQ ID NO: 593677 - DNA, 409 bp, Homo sapiens
  misc_feature (18)..(18): n is a, c, g, or t
gaggatcacgatgtccgnttagaatggtatgttttgcagggctggtacccgtgatccttttatgtgtaggcttttttcaggagttctgtaaggcagtcctggtggtgacaaaatctcagaattggcttctctaaatgattttatttcttcacttatgaagcttagtttggctggatatgaaattctgagttgaaaattctttttttacagaatgttgaatattggcccccactctcttctagcttgtagagtttctgcagagagatttgctgttagtctgatgggcttccctttgtgggtaagtcaaactttctctctggctgcccttaacattttttccttcatttcaaccttgctgaatctgacaattgtgtgtcttggagtcgcccttcaccattagcgtacggag

SEQ ID NO: 593678 - DNA, 234 bp, Homo sapiens
tactttgcatgttctcattgccaaaaatcaaacattcaggtataatacaaagttttttggaaaaatgttttcgatctaaaacatgtaatattccctcatttataaaaatatacgtacttttctttctttaaattgttggcttatgcagccttctaatggcacattaatagaaactaggtgtatgaactggaaagttttctgataaatgcctaaactcaaagctcttgttccatt

SEQ ID NO: 593679 - DNA, 179 bp, Homo sapiens
gtgttgtccctgcttaacacggttgtctcactttatctcgcccaggtgagtgcagtggattgattatagctcattgcctccttgaattcttggactcgagcaatcctcttgcttctgcgctcctgagcagctgagaccacaggcatgtcctgttagaacacccagctagtttttgaatg

SEQ ID NO: 593680 - DNA, 136 bp, Homo sapiens
ggcgaatctctaaggacaacggtattaaacatttttgcatatcttctttgccatctatagatcttctttggtgaaatctgttcaaatcatttgctcatttttaaaaataaaagattgaggccatagtgcggtggct

SEQ ID NO: 593681 - DNA, 499 bp, Homo sapiens
  misc_feature (12)..(12): n is a, c, g, or t
  misc_feature (58)..(58): n is a, c, g, or t
  misc_feature (78)..(78): n is a, c, g, or t
  misc_feature (128)..(128): n is a, c, g, or t
  misc_feature (178)..(178): n is a, c, g, or t
  misc_feature (186)..(186): n is a, c, g, or t
  misc_feature (205)..(205): n is a, c, g, or t
  misc_feature (214)..(214): n is a, c, g, or t
  misc_feature (226)..(226): n is a, c, g, or t
  misc_feature (238)..(238): n is a, c, g, or t
  misc_feature (240)..(240): n is a, c, g, or t
  misc_feature (316)..(316): n is a, c, g, or t
  misc_feature (320)..(320): n is a, c, g, or t
  misc_feature (323)..(323): n is a, c, g, or t
  misc_feature (330)..(330): n is a, c, g, or t
  misc_feature (436)..(437): n is a, c, g, or t
  misc_feature (442)..(442): n is a, c, g, or t
  misc_feature (485)..(485): n is a, c, g, or t
aaaacactttcnaaagaatccttctgccccagagtggctgggcttagaaccatctctncagccacagggcggaaactnttggtgtttgggtggtggggtatggtcccccatcccaactatcttggagncctcatcatggctttgggttggtccttgccctgcggggtgtcacacctgntgccctanttttacctcctttatttcnccgcgctgntggtgccccgtnaggcccgggatnancggcagtgccttcaaaagtacggcctggcctggcaggagtactgccggggtgtgccttaccgcatcatgccctacntttnttnaaggggntccccccccccaggtgggggcatgtgcccctttttcccccagcccccccagggccaggagccttgacccctttgggattcaagggcttgccccccccccagccctnnggatnaacaccctcaaaaaaaaggtggtttagagcaaggaaaaaaatnaaccccgtgcccca

SEQ ID NO: 593682 - DNA, 113 bp, Homo sapiens
tttttttttcacaggagtactgccaatcagaagacagtgaagcatttgttctgggtttatatcttattagatcacatccctttacccagaacaaatgcttcactgccaatcag

SEQ ID NO: 593683 - DNA, 780 bp, Homo sapiens
atcctgacctcctgccccttcagaagcgtccctgcagctcctgcctgcacctggcagggagcaccgctacagagtttgctgctgtaccggctcagaaacgggagttcccggcacagggccatcggcgagcctcccagctggagtgtgggcagaggcagacactggggctgcaggggagtggcccccagggtgtgaataggagggcatcctgcaggctccagacattgccatgcgtgttgctgtgattaacccccaaacccagctccatcattcattcactccttcatttgttcatcctattgtcccaggagctgggctataacagaaaggagacaggccacagacagacaggcaaggccatcccaggcagtgagaggcgacgtgaactctgtgaactgagatgatgaggaagagaggagaagggcggggccgctttagaaaggctgctggggatgtcctgtttgaggaggtgaccctgtcactggagccaagccaagagctggggaagagcatgtcaggccccgagaactgcaggtgcaaaggccctgaggcaggaccctagcaggaccctagcaggtgcaggtgcaggtgcaaaggtcctaaggcaggacctgagcaggtgcaggtgcaaaggccctgaggcaggactgagcagattgcaggtgcaaaggccctgaggcgggacctgagcaggtacgggtgcaaaggccctgaggcaggacccgagcaggcatgtctgaggggtcaaaggacgcctgtgtgcctggagcagagggtcaa

SEQ ID NO: 593684 - DNA, 674 bp, Homo sapiens
acctcctcggactcctgcctcactcatttacaccaacccacccaactatctataaacctagcgatggccatccccttatgagcgggcgcagctgattatagggctttcgctctaagattaaaaatgccctagcccactgtcttaccacaagggcacaccgtacaccccttatccccatactagttagttatcgaacaccagtcaggccgtacgtcattcaaccaagtagccctgggccgtacgcgctagagccgctgaacatctaggtgcaggcgcacctacgtcatgcacctgattcggaagcgccaccctagcaatatcaaccattaaccttcccgtctacagctgtatcatgcgttcatcaattgctgaattctagctgactatcctagaaatcgctgtcgccttaatccaagcctacgtttgtcacacgttctgagtaagcactctacgctgcacggactaacacgattaacacaagaaaaaacacaaaaaacccggaggggaccgaatcgcgcgggcgcggggataaaagaccgtagcgcaatcgggccacagaggccgataagcgtagtaccgagacccggtcttctggtcccacggggtcaatcccgccggccaccctgtcgggagccgtgaaagtagcccgaaaccgcgtcacctgttcaaaaagg

SEQ ID NO: 593685 - DNA, 119 bp, Homo sapiens
tcacctatcccggatctgggtatgactttcctattaatgataaagttagtacattctatggctactgtggtcactgggacctcggcacatcatctctattggccctgctacccaccaga

SEQ ID NO: 593686 - DNA, 597 bp, Homo sapiens
  misc_feature (313)..(313): n is a, c, g, or t
  misc_feature (454)..(454): n is a, c, g, or t
cacacaaggacaccattttgtgatgatgatggtgctttatgcagcttccaccatttacaagattttcctgtggtgtggaacctctcatgataaagcaaaggaactagaagcttattccagtcaagatttctgatttatcttgtggtaagcatttgggaaggacatatctgcacatgacctgagactaagtactatacactgaatcagatgaaaattgctcttaggaagcttacaattttccaaatagttaggacaaaaacaaactctccttctctcttcctatatgtacatactgacatcttatatcattacntgtcttccttaggggttatgattcctgtatggtttctttggggtgctgcattaggacctgagactctgattgaaaattcttccacgggctcgctaccattccaaaactttattctccaaatatgaatttcccaagatgccntcacaaggttctgagctccatttctgaaggcttttcccagtgctgtgtcagcattgcatacaggcttttataacaactctcgacctcctatgagtgtcgaagtaaaagtgtgtatctctgatttgcacaaaagaaaaaaaaaa

SEQ ID NO: 593687 - DNA, 358 bp, Homo sapiens
  misc_feature (75)..(75): n is a, c, g, or t
  misc_feature (236)..(236): n is a, c, g, or t
  misc_feature (316)..(316): n is a, c, g, or t
tgatgaggtcacagctggcttgcgccatctcagatggagtggtccttttcattgatgctgctgagggggtgatgnctgaacacagaacgccccgggccctttgggcaccttccaaaaaggccaaattgctggtgccaggaagagcgctggcagtcactgtgtgcataacagattgacggctgatcctggagctgaagcgtgcctccaactgatgcgttattacaagctgcgccacnattgtggcatgaaggtcacattggaaagttcctaaaacgtaaacgcccaattggtaatttccaacgtgatgagaacctgnatcctttccccactcctgggtacgttgcttctccagtcccag

SEQ ID NO: 593688 - DNA, 108 bp, Homo sapiens
gaattgtgtatattttaaataattataaataacatttatttttaaagaatatcaatccttaaaaataaaaaataggacaggtacagtttctcatcctgggagcaattt

SEQ ID NO: 593689 - DNA, 442 bp, Homo sapiens
cagctaccaccggaagctggaagagtcagaaagggtctccccaaaagcccccaaaggaagctggacctgcttgagcttcgacttccagactccagaactgtagagagcagcagctcctcttgcccggcgcggtggctcacgcctgtcatcccagcacttcgggaggctgaggcgggtggatcacttgaggtcaggagttcgagagcagcctaagcaacatggagaaaccctgtctctactaaaaaatacaaggactagccgggcgtggtgatgggcgcctgtaatcccagctccttgggaggctgagggaggagaatcgcttgaacctggcaggcggaggtggcagtgagccgagattgtgccactgcactccagcctgggcgacaagaggggaaactccgtctcaataaatacataaataaataaggtgaaacgccaaaaa

SEQ ID NO: 593690 - DNA, 765 bp, Homo sapiens
  misc_feature (1)..(1): n is a, c, g, or t
  misc_feature (17)..(17): n is a, c, g, or t
  misc_feature (211)..(211): n is a, c, g, or t
  misc_feature (222)..(222): n is a, c, g, or t
  misc_feature (243)..(243): n is a, c, g, or t
  misc_feature (249)..(249): n is a, c, g, or t
  misc_feature (270)..(270): n is a, c, g, or t
  misc_feature (282)..(282): n is a, c, g, or t
  misc_feature (290)..(290): n is a, c, g, or t
  misc_feature (311)..(311): n is a, c, g, or t
  misc_feature (320)..(320): n is a, c, g, or t
  misc_feature (330)..(330): n is a, c, g, or t
  misc_feature (333)..(333): n is a, c, g, or t
naaattttatattaatntaataagttataagagaagtgagatttcaagcccgcagcccgtgtcgccgccatggcttcgccgcagctctgccgcgcgctggtgtcggcgcaatgggtggcggaggcgctgcgggccccgcgcgctgggcagcctctgcagctgctggacgcctcctggtacctgcctgaagcttggggctgcgacgctgcgnacgcgagttcngaggagctgccacatcccggngcgccngctttcttcgacatcgaccangtgcagcgaccngcacctcngccctacgaccacatgctgcnccggggccngagcatttcngcnggagtactgcagtgccgcctggtgctgtgtggtgcagcggccacccaacgtcagtgatctacgacagccatgctgaccagggcctcatacatcctgacccgcagcgtctggtggatgttaccgcgaccttcggacaccacagccgatgtcactgacttgatgtgccggctccgacagctggctgcagccagaacctcccgacaacagcatccggcgaagagccaaactgctcccgacgagtatccgcgcatagctcgaccccgacatcatcaagacctacgaggacatcaaggagaacctggaatcccggagctcccaggtggtggaatcaccgagcacaggcaaggaccagggaccagacccgagccgacagaggatgaccaggcaaatccaggtccggaaaaccctcaaaaatcggagcagaggctgaaa

SEQ ID NO: 593691 - DNA, 961 bp, Homo sapiens
gacaggcggtcaagatggcggtgatagtagtataggccgtctcactcggaggaagtcggaggctgtcgtgcggctggttcgttgtccctccactcacgcgtgcctaggaaggtggtcgtacgcagtcgttggtggaattatgtggtaacgactacgatagatcaagcctgtgcaaacatcgctaatgatgggaatgagttgagcttattagaaattctagggattgagtccgtgctgaagaacaggtacgtgtcgtggaaaaatacaaaatagttgtggaagaattagggtcataatgggacttggttcgacttagcattctgtaaaatctaccttgtaattgtttagcacaaatagtgggtcctgatttgagatttatatgcagccccgttttgagagtccaaacccgtttttggcttggtgttgtcatatccctatcattgtgagttgctggggattcttgaccatttattacctcatataccggagtcagacgcatcttctcattcgtgcccgacccggaaaagatcctacaggaagtggctcctttgatgactcttcgttacagactgtcctccatgtcttactaaggttttgatgaacaatgtacacgcttgaaggctggatcttcatcaggctgggattatcacggaagaggctaaagtctgagttctaaatcgtccataggtacgtctttggtccaacagtggaagttggtcatgatggagtattgagctgaaatatcagggctcaatgatgccttgtaggataaaagaaacctagtgtggcatttaaagtagccgatgcggggattgtaaataacggaggggggggggcaaaagattagtggtcgaaacttgcaacacttttggcggatatgcaaggacagggccgtattagatccgttaagagagcctgggggataagtggcgggggaagcgaatatgggattaatgaagac

SEQ ID NO: 593692 - DNA, 888 bp, Homo sapiens
tcctggtgtcccctagtcttggcggaggagcctttagatgagccccgaaaggccgggcagggaggacaagctctttggggctaccaaaatagaagcagcaatgcctgtgtgtggccaacccttctggatctcagcagggatgagagtgcaaaacggaattcttcgaaaataggaattggaggcatatgctggagttatcagtgcacttcgggcacaagggggatctcaccaatggaaaagagagatcttctggaagaactatcagaaagttcttagcatctcaacagaacgccaccgtgctgaagtcggagagcagtaaaccgatgaacggttaacaaacgaagtatgcacataatatgtctggaccctaactagctcttcagcactggtccattgacggtcgctcgattgttaccacgtgatgccccgggtcgttccacaaaaccggcgttttactgtaacagctaaatgctgtggctaaatgcaggtatccagataatgcattcttccagtgcctgcgcgaacaggaagcaaggagggtgagtagaaaaatatgcgggtgttagagaatagtttcttaagaatcgtacaggaaaagttcaagaaacgggggatttatcattgtaattgagtatagtgttaaaggttatgaacaatgtaggaaatctattctgaatggactgcgagtttagcttagacaaatttgttcccttgtgagggtgattatgtaccatagaatgagactggaggattggaaaggggaggcaaagaatagggtaggggatagaaaaagaatagtatgaacaagatgagtgaaaaaagaagaaaatgatgaggagagaagaaagaataaagaaaaagaaaaaagaaagaataaactgactgaga

SEQ ID NO: 593693 - DNA, 947 bp, Homo sapiens
  misc_feature (1)..(1): n is a, c, g, or t
  misc_feature (17)..(17): n is a, c, g, or t
  misc_feature (211)..(211): n is a, c, g, or t
  misc_feature (222)..(222): n is a, c, g, or t
  misc_feature (243)..(243): n is a, c, g, or t
  misc_feature (249)..(249): n is a, c, g, or t
  misc_feature (270)..(270): n is a, c, g, or t
  misc_feature (282)..(282): n is a, c, g, or t
  misc_feature (290)..(290): n is a, c, g, or t
  misc_feature (311)..(311): n is a, c, g, or t
  misc_feature (320)..(320): n is a, c, g, or t
naaattttatattaatntaataagttataagagaagtgagatttcaagcccgcagcccgtgtcgccgccatggcttcgccgcagctctgccgcgcgctggtgtcggcgcaatgggtggcggaggcgctgcgggccccgcgcgctgggcagcctctgcagctgctggacgcctcctggtacctgcctgaagcttggggctgcgacgctgcgnacgcgagttcngaggagctgccacatcccggngcgccngctttcttcgacatcgaccangtgcagcgaccngcacctcngccctacgaccacatgctgcnccggggccngagcattttttggggacgcggggtgactgggcgtgggctggggcacggacggtgggtatcagcgaagccggggaccaatgccatctaaaacgtttcttgtgtgtctggtgtagtatgtgtcgccttcgacgtcttcgaggagtccgtggctcgccgaggtgcatccctcgctctcgcgctccttggcgtagatagtcacgcttgaggtcgctagagcgttagccattaggaagtggtgcatacagttagactactaatttacagagaccgtatgatgatatgtagagagaagagattgagcgctggatggaagagtgtggtgcgtaccgctcgtcagggtgtgtagggcgttggggcgtcttgggagtgtccgaggtacggagatagctagtgatgctgcctacgcggagagatagatagttccggcagatccgaattaagtagggctatgttgttagtggtaggcgcactctgccgcggttattatatcacgtcgcgcgtatgggccggcagtcacagagacctgatcagagagaggtgagagagagggcatgctggtcgtctcctcgtgcatccggcacggcaccaagagatatcgtttgctgtgtttgagcgggtggaataggt

SEQ ID NO: 593694 - DNA, 116 bp, Homo sapiens
tacatagtccctaacaaacacttactgcagcacctactatatgcaggcactataataggtgccaggaaacagcagtgaacaatggtgtaatgagtttctgcctttgccatggagca

SEQ ID NO: 593695 - DNA, 164 bp, Homo sapiens
tccattaaattttctagccataattcttggcattcccgaaatatccaggtttgttatatatagattttttaataaaataatatttcttggtagggtcgggatttcccccccttttttttggaaaaggttgcggccggttccctctcccggcccgccaccccata

SEQ ID NO: 593696 - DNA, 156 bp, Homo sapiens
  misc_feature (101)..(101): n is a, c, g, or t
agagcggatgactgggccgctgccgcccctccgtccgatctgaagccggtctggcacgactggttctaggcgccgcgccgcctggccccggtgcggcgtgntcgcgccgtccttgaaccgacttgaactgattgcgcgcccgaggcgccgccgcca

SEQ ID NO: 593697 - DNA, 484 bp, Homo sapiens
aagtatgacgctttggcatccagagtgctttgaactaaaggagactgaaggccccagaagccaagtttccctctgaccttctcctgccttcctgtcttccaccccctacttttcccctgaagtgagtcctggagcccagaattcgttttgcccaaagcaagccgtgacaccctggaaatatcactctagccttccttgcctttccgtgtggcagctgcccatgaagaaattctttgacctaccttgtttgatagcagatcacaagaccctggttccagagcggtcttgctttacgccgagggaaaggaatgtcatacagaaagcccaagaagagtctgaaaagatgtccaatcacctttgcacgtggctgcccattattcattgaacctaagcattaaaatagacaggttcccctgggtctttgggtcttcatttatgaagcctccatgtcatgtacaactttgattaaataaatggttcatga

SEQ ID NO: 593698 - DNA, 444 bp, Homo sapiens
gagggtaagacaggaagatcacttgagccaaggaggttgagaccagcctgggcaacatagtagacccatcttaaaagaaaaaaagattttttttttgagacagagtctcgttctgtcgcccaggctggagtgcaaaggtgcgatctcagctcactgcaacctccacctcctggcttcaagtgattcctgcctcagctttccgagtagccgggattacaggtggccacgacaaaacccagctaatttttgtatttttagtagagatgaggtttcaccacgttgataaggctggtctcaaactcctgacctcagggtaatccacctgtctcggctcccaaaagtgctgggattaggggggaacgcccataaccgggccaaaaaaaattttttagccaaagaattccttttaattttccaagggcggtttttttttttttttttttg

SEQ ID NO: 593699 - DNA, 235 bp, Homo sapiens
tttttttttgtgacaggatctcactgtgtcacccaggctggaatgcagtggcagtggcatgattatagctcattgcagcctcagtctcccgggctcaagtgatcatcctgcctcagcctcccaagtagttggaactataggctcatgccactgcgcacagctgatttttaattttttaattttatatttttttagtagaggcagggtcttgctctgttgcccaggctggtttcca

SEQ ID NO: 593700 - DNA, 667 bp, Homo sapiens
gcggccgccaactagctggcgggggcggaagatggcgacgcccctcgggtggtcgaaggcggggtcaggatctgtgtgtctcgctttagatcaactgcgggacgtgattgagtctcaggaggaactaatccaccagctgaggaacgtgatggttctccaggacgaaaattttgtcagtaaagaagagttccaggcagtggagaagaagctggtggaagagaaagctgcccatgccaaaaccaaggtcctcctggccaaggaagaggagaagttacagtttgccctcggagaggtagaggtgctatccaagcagctggagaaagagaagctggcctttgaaaaagcgctctccagtgtcaagagcaaagtccttcaggagtccagcaagaaggaccagctcatcaccaagtgcaatggtaggcgggaggcccgtgctctccaccacggttatataaacgggctctttcctaaccacccagtgcctgtgtcaaaggcagggtttcactctaacacctgtccccagctgaggatacaggcaggcccgggtgggccacaccttcgaaaaggccttaagggaccaggcaggccacggaaatgagggaagcagtcggtgtactatattcttcaccgccataaaggaatgggcttgctcccatttttcctgaaa

SEQ ID NO: 593701 - DNA, 906 bp, Homo sapiens
gcggccgccaactagctggcgggggcggaagatggcgacgcccctcgggtggtcgaaggcggggtcaggatctgtgtgtctcgctttagatcaactgcgggacgtgattgagtctcaggaggaactaatccaccagctgaggaacgtgatggttctccaggacgaaaattttgtcagtaaagaagagttccaggcagtggagaagaagctggtggaagagaaagctgcccatgccaaaaccaaggtcctcctggccaaggaagaggagaagttacagtttgccctcggagaggtagaggtgctatccaagcagctggagaaagagaagctggcctttgaaaaagcgctctccagtgtcaagagcaaagtccttcaggagtccagcaagaaggaccagctcatcaccaagtgcaatggtaggcgggaggcccgtgctctccaccacggttatataaacgggctctttcctaaccacccagtgcctgtgtcaaaggcagggtttcactctaacacctgtccccagctgaggatacaggcaggcccgggtgggccacaccttcgaaaaggccttaagggaccaggcaggccacggaaatgagggaagcagtcggtgtactatattcttcaccgccataaaggaatgggcttgctcccatttttcctgaaacataaaagacagaatagaacaaagtccgaggggaccaatggcagggggccgagacagcgggtatcgccgtggccatgggcatagcggtactgaccaggttcttggacagcgggtacattcgcggccccaaaaggggcgataattcgatagcaggtaccggtaggaaccggaaaccgaggacacaaagacaagccagctcgcaccaagacgcacaccaccgcgagaccagcggacagaaa

SEQ ID NO: 593702 - DNA, 195 bp, Homo sapiens
attgcaggggagaggctggcgcaattggacctttgggttttgaagaacagcccaagtctggcgcttgaaatcctgcagacccagagtatcatgcttgtgacttcaaggacttggagacacgcttctggtaaagttaggaagtgccattatctctgatccccctacagtgctaaaggctgcacgattaaactcttg

SEQ ID NO: 593703 - DNA, 111 bp, Homo sapiens
tgctgttggtgactctagatgatcccctcatgggctacattttctaccccagaaaactacgatagcccttatgaaacttaatgtggtctgaagtgtgggtgtacctgatgc

SEQ ID NO: 593704 - DNA, 782 bp, Homo sapiens
  misc_feature (701)..(701): n is a, c, g, or t
  misc_feature (704)..(704): n is a, c, g, or t
gcggccgccaactagctggcgggggcggaagatggcgacgcccctcgggtggtcgaaggcggggtcaggatctgtgtgtctcgctttagatcaactgcgggacgtgattgagtctcaggaggaactaatccaccagctgaggaacgtgatggttctccaggacgaaaattttgtcagtaaagaagagttccaggcagtggagaagaagctggtggaagagaaagctgcccatgccaaaaccaaggtcctcctggccaaggaagaggagaagttacagtttgccctcggagaggtagaggtgctatccaagcagctggagaaagagaagctggcctttgaaaaagcgctctccagtgtcaagagcaaagtccttcaggagtccagcaagaaggaccagctcatcaccaagtgcaatgagattgagtctcacattataaagcaagaagatatacttaatggcaaagagaatgagattaaagagttgcagcaagttatcagccagcagaaacagatcttcagcccaccaccagccggctccgttgcaggaatcacatgtctgacttccggatccagaagcagcaggaaagctacatggcccaggtgctggaccagaagcataagaaagcctcagggacacgtcaggcccgcagccaccagcatcccagggaaaaataaaatggccgccgctttcctgttcctgntgnaatccccagcctctgccttctctgctctgggagtccccagcctctagcccctgctacttccctccctcttggatagtg

SEQ ID NO: 593705 - DNA, 1150 bp, Homo sapiens
gcgctggccttgtttgccgtggcgcgggttggtgtgtgggcgggtcgtgggggcgctcgttccggtgtcttggtgtgtgtggggggcgcgcggtgttgtggtggttgtgtgtgtggtgggggggtgtgcgcgggtcgtgtggggcgtccatcggccctcgtcgggcggtgtggccctggggtgtcgggtggtgtggggggttgttgtggtgtgggtggggggtgtggtgtgtggggtgtgggcgctggtgggggcgggtcgggtgggggggggggggggggtggtgggtgggggttcatataagccgggtttcgttttaggggggcccgtgcgtgtttccccctggtgtgtgggccattggcgccggtgtgtttgagcgccgccgctagagatgacgcccgggggccgaggtgcacgcctttccggagctttctatgccttatgggccccggggggcgggagtaaccatgttgcggcgcccggggtacacggctattgacccctttgtgggcctcattttaaggggagcccgtattagggaaccagtgttggtggacccaagtaagggccggcgtggtgtatccgcgttccggggtatgtgtcccgcggagtaattcgtgtcgaggcccaccggcgttccgggctcggctcgccacggggcgcttgtagcggagcccttattctatgggaaaattgagagcctgagtggaaacgccctatgtttgagaccccacgttgtaagctccagagagaagttggaacttggaggttcacgagatacacgctacactttttctccacgccactttcccccaacaacactcctcggagaaggcttggttttgagggcctctttgtactcgctgagacttataatagagggtttttttaaaggtatttgggtcacgctaaccacgaggagactggaggttgtcacgccctggacacactttatgagaattcttttgaggcactatgaaagaaattctggggagttattaatgttaccacgttgtatgaaagaatgtgagcttctaggagcacgagttgttggctacggcacaactctgattatagaacataaattcatcccttcctgtgctaaggtatgtgctgcttataaataaaatggacagctgttttttagcca

SEQ ID NO: 593706 - DNA, 583 bp, Homo sapiens
  misc_feature (570)..(570): n is a, c, g, or t
gcggccgccaactagctggcgggggcggaagatggcgacgcccctcgggtggtcgaaggcggggtcaggatctgtgtgtctcgctttagatcaactgcgggacgtgattgagtctcaggaggaactaatccaccagctgaggaacgtgatggttctccaggacgaaaattttgtcagtaaagaagagttccaggcagtggagaagaagctggtggaagagaaagctgcccatgccaaaaccaaggtcctcctggccaaggaagaggagaagttacagtttgccctcggagaggtagaggtgctatccaagcagctggagaaagagaagctggcctttgaaaaagcgctctccagtgtcaagagcaaagtccttcaggagtccagcaagaaggaccagctcatcaccaagtgcaatgcctttgggcaggcctgcccacttctctccaaggaccttctcctgccctcatgtgggtcctctggtccagaatagacttgtgaagtcattgacaacaatcctcaaacactgcactcccccaagactgcataataaactcattcatactaaggtantagcagttcttca

SEQ ID NO: 593707 - DNA, 926 bp, Homo sapiens
  misc_feature (913)..(913): n is a, c, g, or t
cgcttggccctctgccccggtgtctcctcttgcgctttctgcctcttccccctcggctgcaggtgctccgcccctggattttggtcgtgattccgatgtgctctttttggtcgtgtacccctggcttccgtttagtcggtctgccagtatgctgtgtgacaccactatgtccccgggcttcttacggcccttaggtgataagccgtgggatatcccggggtcgcgtgtccttgggggccgctacagtcccgccacgggaggagatcaagatggaggtaagtatatgtatcctaggtaaaaatgttatagcacatataatgcacggaatgtttgggcatctgttgctcacgcctgttatcccagcattttgggagctgaggtgggtgcatcacctgaggtcagaaattcgagaacagcctggcccacatggtgaaaccccatctctactgtaaaatatccattattagctgggcgtggtgtgcaggcgcctgtaatcccagcgtatctcgggaggctgaggcaggagaattgcttgaactcaaggagggtggaggtttcaatgacccagatcaagccccgcactccagcctggcgacagaccagactcagtttccaaaaccaaaaaaaaaaaagagaaagcaggaagagggaacaggaagtactgggaaatgtaattttttgatgagggagagtttctccaaggaggcaacatctgtaaagacctgcaggagttgagggcaggcgccattcatcttccagcctttgggcaggcctgcccacttctctccaaggaccttctcctgccctcatgtgggtcctctggtccagaatagacttgtgaagtcattgacaacaatcctcaaacactgcactcccccaagactgcataataaactcattcatactaaggtantagcagttcttca

SEQ ID NO: 593708 - DNA, 151 bp, Homo sapiens
ggcctgtattgtatgggctgtcctaaatacagcactcgatagtttctctatttctcccaggtcctagctgtttctgttgttaaaatactaacagaccgcaactcaacagcaccttcttcgaccccgccggaggaggagaccccattctata

SEQ ID NO: 593709 - DNA, 756 bp, Homo sapiens
  misc_feature (675)..(675): n is a, c, g, or t
  misc_feature (678)..(678): n is a, c, g, or t
gcggccgccaactagctggcgggggcggaagatggcgacgcccctcgggtggtcgaaggcggggtcaggatctgtgtgtctcgctttagatcaactgcgggacgtgattgagtctcaggaggaactaatccaccagctgaggaacgtgatggttctccaggacgaaaattttgtcagtaaagaagagttccaggcagtggagaagaagctggtggaagagaaagctgcccatgccaaaaccaaggtcctcctggccaaggaagaggagaagttacagtttgccctcggagaggtagaggtgctatccaagcagctggagaaagagaagctggcctttgaaaaagcgctctccagtgtcaagagcaaagtccttcaggagtccagcaagaaggaccagctcatcaccaagtgcaatgagattgagtctcacattataaagcaagaagatatacttaatggcaaagagaatgagattaaagagttgcagcaagttatcagccagcagaaacagatcttcaggaatcacatgtctgacttccggatccagaagcagcaggaaagctacatggcccaggtgctggaccagaagcataagaaagcctcagggacacgtcaggcccgcagccaccagcatcccagggaaaaataaaatggccgccgctttcctgttcctgntgnaatccccagcctctgccttctctgctctgggagtccccagcctctagcccctgctacttccctccctcttggatagtg

SEQ ID NO: 593710 - DNA, 116 bp, Homo sapiens
ggatctcgagaagttgtgagacgagccttaagcaggcctaatgtggtgtgctgtggcctgttctttgagtccgagccagtctcggcttctatctccgcgatcttagcgtaaggtgc

SEQ ID NO: 593711 - DNA, 867 bp, Homo sapiens
  misc_feature (786)..(786): n is a, c, g, or t
  misc_feature (789)..(789): n is a, c, g, or t
gcggccgccaactagctggcgggggcggaagatggcgacgcccctcgggtggtcgaaggcggggtcaggatctgtgtgtctcgctttagatcaactgcgggacgtgattgagtctcaggaggaactaatccaccagctgaggaacgtgatggttctccaggacgaaaattttgtcagtaaagaagagttccaggcagtggagaagaagctggtggaagagaaagctgcccatgccaaaaccaaggtcctcctggccaaggaagaggagaagttacagtttgccctcggagaggtagaggtgctatccaagcagctggagaaagagaagctggcctttgaaaaagcgctctccagtgtcaagagcaaagtccttcaggagtccagcaagaaggaccagctcatcaccaagtgcaatgagattgagtctcacattataaagcaagaagatatacttaatggcaaagagaatgagattaaagagttgcagcaagttatcagccagcagaaacagatcttcaggtgaggggtctgggcccggctgggggttgttgatgacactggggagccagacctctggcccctacctacccttggctgtccacagcccaccaccagccggctccgttgcaggaatcacatgtctgacttccggatccagaagcagcaggaaagctacatggcccaggtgctggaccagaagcataagaaagcctcagggacacgtcaggcccgcagccaccagcatcccagggaaaaataaaatggccgccgctttcctgttcctgntgnaatccccagcctctgccttctctgctctgggagtccccagcctctagcccctgctacttccctccctcttggatagtg

SEQ ID NO: 593712 - DNA, 160 bp, Homo sapiens
gagttctatatctgtctcaagtcatgactcatctgctcttgatatggccgagctcagctgtctagcttatggctgcagcctcatggtggatgatgtccaggagctcattctcagcaatgactgtggtgtcctctgggtctaaccattctgttcccttcat

SEQ ID NO: 593713 - DNA, 770 bp, Homo sapiens
  misc_feature (581)..(581): n is a, c, g, or t
  misc_feature (594)..(594): n is a, c, g, or t
  misc_feature (678)..(679): n is a, c, g, or t
  misc_feature (689)..(690): n is a, c, g, or t
  misc_feature (694)..(694): n is a, c, g, or t
  misc_feature (699)..(699): n is a, c, g, or t
actctcttaataatcaccgctacagttgaaacgcggtgtctgggcgttgaaaaagggcagtaacagcagtgcggaaatcccggcggcgatagagataaccacaaaaaatccgctccagtgccaggtatcgagtactttcgccagcggccaaccagcaagcgacgcccccagataagcaaacaagccgacaaaccccgtcgccgcccctgccgcctctttgtgggaacactctgccgccgccataccgattaacatctgtgggccaaagacaaaaaaaccaatggtgaagaagcaggttgcctgcatcacgtagctggcaaatggcataagccacagggagccgactgaaagcaaaattccggcggcgaaaatcaaattcatcggccctcggttgccgttaaacaatttgtccgagccccaaccggctaccagcgcaccgataaatccgcccagttgaaacatcggcactgccgtattcgccgtgaccagatcgtatgagtttactaaggaaatataatagaagttttgggtctctgaaaccttgaacgagttgcattaaatttaacaaaacgacactaatnttcttattaattnttcttaaatgaaattaaactcccatgcttttaagccatttaaatacctgaggcactggatagctgctaaatattaacctggganngagggtgatnntttnaaaanaaacaacgaagtgagattgttctcgaacagaaccataacttgggaaaggcctaattctccacaccggaggg

SEQ ID NO: 593714 - DNA, 125 bp, Homo sapiens
tacttaagagaaggaacccgaaggcaaggagggttattcttggtgcaaggttaaaaaggttaccttaaaggttaaaaggccaaggaggggaagccccccttgagagcgcacacccttttctctct

SEQ ID NO: 593715 - DNA, 494 bp, Homo sapiens
cctttataagtacattcaattttatgatttacatttatcatgtaatttttaaaaagaatagcaaaagcagactttgtatcaacatatcctagatagatggatacaaagtctgcttttgctattctttttgcttaaatactcctatcattttctgaattacttggtatttagaactcctagcaccacggggaagaatagaggtatcatcaaacgtggcaaattttctttcaggaataataaagagcatgattccacagcttttctgggatgtttgagattcttttttagtactaagcaaaattctcatcacagaatgtagcccaggccaatttataactaaatctctatttgttcggatgatgcttctaaaacagcattgataggttaaagaagcttggtatttttaatttacttcaatgattagctcagttgcttaactggagttttaatcctgtgatatgtacattggattcatgactgtgcagcatttttag

SEQ ID NO: 593716 - DNA, 529 bp, Homo sapiens
  misc_feature (117)..(117): n is a, c, g, or t
  misc_feature (125)..(125): n is a, c, g, or t
  misc_feature (129)..(129): n is a, c, g, or t
  misc_feature (132)..(132): n is a, c, g, or t
gtttgcatgtctacagtttttttatagtagcagcaaaatatggtgtacactttataagatacacttcaatatttagtgatttacactcttatcgatgtaagtatttaaaaaaatccntctatctngganatnttgatacaaagtctgcttttgctattctttttgcttaaatactcctatcattttctgaattacttggtatttagaactcctagcaccacggggaagaatagaggtatcatcaaacgtggcaaattttctttcaggaataataaagagcatgattccacagcttttctgggatgtttgagattcttttttagtactaagcaaaattctcatcacagaatgtagcccaggccaatttataactaaatctctatttgttcggatgatgcttctaaaacagcattgataggttaaagaagcttggtatttttaatttacttcaatgattagctcagttgcttaactggagttttaatcctgtgatatgtacattggattcatgactgtgcagcatttttag

SEQ ID NO: 593717 - DNA, 207 bp, Homo sapiens
gggcaatcgtgcatggtgcttgtgtacatcctacagaaaactcatctctccttatccacactgaaatttaagagaacttactgaagttaacatataccattctgggaagtgaattataatgcgtaattattacaattaccacaactggaatgtaacagggttctaattcagagaacagaatttgtcagaaggagaaggaagaacaag

SEQ ID NO: 593718 - DNA, 1119 bp, Homo sapiens
ttttagcttccctaacttacctttcactgcacatatacagcaaacaaggagcagcttttagcttttaacttaattaacaacttaacacgcatgctgactgaggacttaaagtgaatcaaaagcacttaactttgtacgacttcttttacgagttactgagctaggtatagtttggggaacactcaacctggtgctggctgctcttaacaattcttgtaaatgaagataactttcctttctctagaggtacatattaggccttttatgaacactaacaacaatgcaggaaatgcttggctcatggggcaaagctatcacttaacaattgaacttcatccatttttcacaaaaacacttcatgcaaagcattctggtgtgaattgccattttctttcttactggcttctcaattttcttccttctctgcccctacctaaaacattctcctcggaaattacatggtgctgaccacaaagtttctggatgttccacttacacctcttggcccgtcgtttccagtccggcgcactttccccctcctaccttcactgggtcgatcacaggcggacgctgcagcgaccacgggtgccccattgcctagtcccaactgctcttctctcctggagtcggaatcttttcctccccaccatccttaggatcttctactacggtagcctggctcgaaacgggcaacacgtgattcacgcaatttgacgcggatcactggcgcgcatctgccccctgggtttaagcccttcccgcacctccggccccggctctggctcagccttaggccgggcgtgtggagcacacgtgcttatgtagtttcgccccggctatggcgccccccgctaaaagggtcttttcttggacacgcggtcatcactcagcgccggcgttttacgcctcctctgaggcacaaacgcctgctggtggggctcgcgacgaatcctcatcagttcgtgcagtcctcacaacaatcaattagagggctgttgacagtcgttctccgcgcacggcgggacgcaatacccaactcgttgggagtggcgataggcatcaccattcctctgtctcatcacgacgcgcgagtatgcgcgacttcttcaacaagaacgg

SEQ ID NO: 593719 - DNA, 823 bp, Homo sapiens
  misc_feature (143)..(144): n is a, c, g, or t
  misc_feature (180)..(180): n is a, c, g, or t
  misc_feature (189)..(189): n is a, c, g, or t
  misc_feature (218)..(219): n is a, c, g, or t
  misc_feature (221)..(222): n is a, c, g, or t
  misc_feature (225)..(226): n is a, c, g, or t
  misc_feature (239)..(239): n is a, c, g, or t
  misc_feature (242)..(243): n is a, c, g, or t
agcgggcggggcccttccagcatatccactttcgtcaggtactggagagggctgccggccggatgccagggcagaggggcagggcggacggctaggagttcaagaaacatcctggtctgagggaaaggctgcagcctgcaccnncatgaataagcttttcagcttctggaagaggaagantgagacccncagccagggctacaaccttcgagaaaagnntnnaanngaaacttcacagngcnncttcagccgggcatctgaagaagctgaaggaataccttcagatcaagaaatatgatgtaaatatgcaaggacaaaaaaataccagaaaacgttttgcacctagacttgtgctaatggaccatacagatgtagtacattaccctaatttgagcaacaatgcgaacatagatgtccggggatagtgaaaaagaaatccccattgattaaggcagtacagtggtcaaaatgaggatagtgctactattcttctaaacttgggtgcagacccagatctgagggatatccgtgataatacgtgttcttcactatgctgtcagtggtcaacgctcgacacgtcacgcggaaacaacctgctgcaatcacgaacgctgatcttcacaacgcgaacaaactacagcgatggcggtaatacgtcccaccataaacaaagcggccggacaactaacccactaactcccaacaacatgcgcacacgatgccatatcgggaaaaacagcggcccgcaccgtgaaatcgccacaagaaacacacaccaaagaaacacgcacgtacaaccggccggcaagagatgaaccacaca

SEQ ID NO: 593720 - DNA, 407 bp, Homo sapiens
acataaggccgggcacggtggttcacaccagtgatcccagagctttgggaggctgatgtgggaggatcgtctgcgctcaggagtacctgaccaggctgggcaacatggcggaactttgtctcttccaggaatacaaaaagttggctgggcgtggtggttcatgccggtggccccagctgctggggaggctgacgtgggaggatcccttgggcctgggaggcaaaggttgcagtgacctgagattgtgcctctgaactccaacctgggtgacatagtgtgatctcgtttcaaaaaaaacacacacaccatatttatatatggctgtctgcctgtcaggcatggggactcatacctgttaatcccgggagcgcttttgcgagcttagggggtagattcctctgattttt

SEQ ID NO: 593721 - DNA, 587 bp, Homo sapiens
ttgaggatacccgacctatgcctgcacaattgcctattaaatattctccatctactgtttttcatttctattatttaaactacctgataggtaaaaataggatactttactctaaaaacccaactagctctttccagccagcgccgagcaatgggcatctctcgggagaactgacacaagcaccgcaagaccgggggcaagagaaagccctaccacaagaagcggaagtatgagcaggggtgcccagctgccaacaccaacattggcccctgccacgtccacacagtccatgtttgaggaggtaacaagaaataccgtgccctaaggctgcatgtagggaatttctcctggggctcagcgttgtatttgcaaaacaaggatcatcgatgttgtctacaatgcgtttaataacgagctggtccataacaagaccctggtgaagaattgcttcatgctcattgacagcacaccatactcatcgacagcacaccgtatgggcagtggtacgagtcccactatgcgctacccctgggcaacaagaaaagagacaagctgactcctgaggaagaagagattttaaacaaaaa

SEQ ID NO: 593722 - DNA, 428 bp, Homo sapiens
gggggcacaggcactagcccattggtactctcaactgtgctctctaaattgatgatagacattctacctaccttgctgcacactttctcaaagcgaattgcatcttacagtataaactggacttaacaatcttaagaactatctcgagactccacgcaatctggccattgcaactgtacagccgcttatacccggctccactaccactgccttctatcggtaaccaacatgcttaactctcggagggtcacactgccagagatgggacttccatatagccctatacactatgtcctgtaaccgttaatcaaccagtaaggctgatccgacgccacaatctactataaatcctttatttcaaactagtaggccaacttctcaaggggactatagattaaagcgctgcaatcttcatgtcgcatctcgtt

SEQ ID NO: 593723 - DNA, 169 bp, Homo sapiens
gaaggttagtgcacatttggtacactgcagtttcagcagcatgttagagttcaaagcctgatcccagagaggtgagcagtgaatgggaataagaagagggagacagaacagaaacgaatattctttcaaggtgtgcaaaggaaggaggaataaaaaaagggcggcctct

SEQ ID NO: 593724 - DNA, 102 bp, Homo sapiens
gaaaggctgtactttaaaaaataataattcttacattcgttggaaggtttttttagggtgtgtttttgagacagcctgggcgactgagcgagactccgtctc

SEQ ID NO: 593725 - DNA, 412 bp, Homo sapiens
gtgcaagggtatggaacaggagagaaagagtacgaagggccaaacaaaaaaacccggattttaagaattgtgactaatttaggctttcattccagtttggtttggtttcttttggtttagaataccaaatccttttaaattccttggcagtttcaggtaagaaagcctaatcctattcttactggactggttaggcaggcttctaattggaccctacatatttggtaaactgggtctggttctggggcagggtaaacattactggttactggcaggtggttctggaaaccagggagaacttcttctctacatttccctattctctacttctcgctctataattctgactatcactatatataatcttaccgctgggtactatagtggtctccgctctcaaggtctctacatg

SEQ ID NO: 593726 - DNA, 730 bp, Homo sapiens
ggtggtgccgtccaggttgcgggggtgtcaagaatggatgtggccgcgtgtggcgcccccttttccccttttcttggccgacttttgggggcggtgtccgccccccccccctgtgcgccggggggcacacccaagccgttgtgccccccacccagaaacgtgtgtttgtgtcggcaaaacccggtgagggacccccgacacgggggccgtggctacagcggacgccccccgggttgtttgcgcctcccccgcgttctctgatcccagagcaggttgtgctgcaggcgctcccccccttctccgctggtgtgtttgaatcacaggggggggaccccctcccccccccttctctcctgtctcctcccacccttttcttcgcgccagcgggccctctttgggccatctacctggtgcccaccgccgtcgtgtgtgttgtgctccgccactcaggtcgtggtcttggtgagccgctagtgttgcacacgaggaagaccaccattctcctgctggtttgtggtatgaaaacagccaccgctgcttgtcagacgacgctggtggttttgtttctatgatgcggggacacacgaatttttgtttacaccctttgaaaattttcccccaacccccgggcttttggtgttttttttttcccccggggcccgggggggttgcccccttccccttcccccccccctttttggaaagggattattttggtttttgttccaga

SEQ ID NO: 593727 - DNA, 1138 bp, Homo sapiens
agcggacggggtcacagggtacggtaatatagcaaactggacttacgtcgaccatgctgtaccgggtgggacttgccgacgccgcacggaggccccctctctaaagaatgcagtctctccgtagggtccagggggtagtagcgcagggcaagtgatggatctctatcctacagggtcaggcgagagcgtgggtatcctgtaacacaggccgtcggttcactgagatagcgggcgggaaagagttcgcgatggatcttgataccgtgaggaatgcttccagattcttcatgcctacgaactggtgtagcacggaatccgctattgttggcttcgggacgacatgggctggagtcttggttaccgtctcccactccggaggaccagtgactatgtgcatgagacgtccagaggatcgctcttctgcgtgggcgcataatccagggtagcatgacgggtgatcaaatggggtacgtaatgggagaattattggccaactggtgggtcccagtttggtctatgcaaggagctattggtcgtgtgatgtgagacatccaaggtgagggcagtagacaacgtatagctctcgacacgctaaggacaatgcagggcggaaaggcagagagcgttgtgcccacttcgaagggaaagcgagttcccaagagagttgcaaagtcttggagtagccgtgacgaaaacgtcaagttgcccgttgggccgacctctaggtttacacggaaatggcggccattgtcgacgcactgttttggggcactggttgcgtcggacaagggacagttaaaaacccctcacgagcgccattcgggtcctatttcgtggcacaggtgattaggtgcaaaaccgggggaaaacagagacgggtgaataagccacgtgatactacagtgcggaccccgtccacaggacactccagccgtggggccctgaatccagtaatgaaactcggtgaccggaccaccagtgcacttgtggtcccgcatacagtgcaaccaaggaaaacgggggtttgacacagaatttggtgggctggggggatagcggcgcatttgtggtagcagaaaggcttgcttgcccaacgaatcgcgagggaaaatgggcaagatcgcacttgggccctgaa

SEQ ID NO: 593728 - DNA, 294 bp, Homo sapiens
  misc_feature (28)..(28): n is a, c, g, or t
  misc_feature (65)..(65): n is a, c, g, or t
gctggaaggaggttcctttttgttgggngagtccgcaagtaaatttcactgatgttgagaatcantgtgggtagattaaatacggacccagccccgtttccttttaatttggagctaaggccagctgcgtgtctagttttgagcgcagtaaaatagaagcagcaaaccactcttatttttcaccctttcccggtattttttgggatgatactgtgggagcagtgacaccaactcttcctggaaacgcctttcgctggaaaatgatgtatgtgaaaaaatttctaaaaaattaag

SEQ ID NO: 593729 - DNA, 695 bp, Homo sapiens
cacgaagtacctgcctgcggtagtaagcttgcaaaggatgctgtcctgtgctgcgttgctgcaggccagtggtcctgcgcccttcctcggcgggccggagctggtctccagaaatgcttctgggttcatctttcattgcttgcacgggagacttccatgcctctaacactcatcttcgaagagatgactggtgacttgctgagatgtccgtctattcttgaagagcggtattcttggagctgatacctctgttgatcttgaagaaagttgggcgtgtctataagttatttggtgatggtatttgccctgcgatacatggtgctgaggaatgttcaatgcagaagaaatggtagagttttcttcagtgcttaaagggtatgtccttgaacttggaacctgacaatgttggtgtagtcgtgtatggaaatgataaactaattaagtgaaggagatatagtgaagaggacaggagccattgttggacgttccagtttggtgaggagctgtagggtcgtgtaggttgatgcccttggtaatgctatttgatggaaagggtccaattggttccaaagacgcgtaggcgagttggtctgaaagcgcccggtatcattcctcggaattacaggttgcgggaacaactgcagactggcattaaggctgtggatagcttgggtgcacattgtgcgtgggcagcg

SEQ ID NO: 593730 - DNA, 137 bp, Homo sapiens
cactccacctatcctaaggctccagatttaccctaaactgtacccttcgatatatggagagagaatcagcgaggactcgataacgtacgaatcgagaacgcacgacttgagccattctccagcacctcgatattaat

SEQ ID NO: 593731 - DNA, 194 bp, Homo sapiens
ggtcgacataggagatggaggagatcctgggttcaacgataacactcctctcaggttggggcacgcaaagaaagctcgtctatgtactgcaacaaggcacagtcgttacttggcacggtataggccatgaggtctgaggccaatgtttctctaaagattgtgggagagaacggggcatgctggtttgcgcctct

SEQ ID NO: 593732 - DNA, 356 bp, Homo sapiens
taccctgatttctccgttataaactacactaaaagtccaagtaaccaatgatatatcttaaccagtcatttgctttatcccataaaatcaacacaaaagccttagaataacaataacaacataacaagcataatacgattactctaacagttgaggattcatcacttttggcgacgcttaatcctttcaggttataatctcattagggcccatattatcgcaaaatcttcacatttgcaacatcagtgcctcatctgtaatggttcatgtacagcccaatttgagcagcagagcaacaacagcagcagcagaaaaacacatgcaattagcacatccacctgtcatcgtatcacatc

SEQ ID NO: 593733 - DNA, 647 bp, Homo sapiens
ccggttgttatttcagtaccgggctggcgctttcgttgttcattactgtgcctggctccaattacagcgctgtgctggcttctacaccacgatttgctgagtgggtgctgcccctgttgattgagaaagtggattctagagttctgagtgccaagattggatatctctacagcactctagaatagcttgctagtgctgtagtatggacagaaggaactgaaggacttcctaccccagcctttgggcttctatccgcagagaggtgttaccagacggcaagtgagcagggtggagagcagagggcctggcggccctaccacatccctagactaggcgtagtatatagtactacgactactagtcgctagaagggctagatagctagaggacctaccttagactaccttaccttaagcaacattactaacaggactgcaggcaccacctagtagtgaaccggacatgaaactaggtagtggcctagtgccaagctgttgcaggcagactgcaggtgcatctgcccgggcctgtgactctgtcaccagccaatgtactagcctttactgctggaacagatccacaagcacagacagagcagccagcggcggacactccttagaaatgctcctgggtttcttgaagctgca

SEQ ID NO: 593734 - DNA, 774 bp, Homo sapiens
  misc_feature (288)..(288): n is a, c, g, or t
agctacggctaggtacgaggccgcggtgtaggatcaagtaaggcagaacgcacctgactgcaccccgccaacctgccgctcgggcctccgtcgctgacgcgatcgctttctacgctcctatggatcgcacatcctcccagatgcatgcgcctgggacgaccccgccgctgctgcatgagccggtcttctgtggccgtagctgtgctccatggacccctcctgtgtgcccacccctctgtgtgctgtcagactgcctgtctctgtgcatgcctgcctgcatagccatcnagcctgtgctaccctgtgtgtgtatgtgctgtgatgtgtgtgtgatccctgctgtgtggtgctgccctgtgtgcctctgccctgccactgcatgcctgccacctgctgctgccgccctcggccacgggtcccgacgcgacagtgggctgggccagcgccgacccctgctgctagcccccctacggccacagcctcggtcaagatggagccagagaacaagttacctgcccgaactcatggccgagaaggactcgctcgacccgtccttcactcactgccatgcagctgcttgacggcagcacactctgcgacgattccagaaaggagactcaaaaaaggatgatgaggagaattacttggattatacctcataagaacatgaaactgaaagagctgagtgctgatacctgtcaagcagtatcccaagtcaattctgtggggcaagattcttggaccaccatggaataccatcaacgactgctgaag

SEQ ID NO: 593735 - DNA, 315 bp, Homo sapiens
  misc_feature (163)..(163): n is a, c, g, or t
cggtacagtgactgcccatgcaaggtctgtgatagactgatcgtgtgtgcagttgagagaagctcctgcctgcctacactggccttgggcttctgaatacttccccatcctggtcagtccacttgcccgtccacttccccatctcctcggtataaatcatgtntataagttatggaagaaccgggacattttacagaaaaaaaacaaaaagcaacaaaaaatataggtggggaaaaaaaaaagatacaccatgcttatctagggctttaagtacttcctgtcatagttgcatatatgccggatggaggggcacag

SEQ ID NO: 593736 - DNA, 877 bp, Homo sapiens
gggcggggattggtctgtggtcctctcttcggctcctcgcggatcgcggaggacgatggttcctgtggacacctgcttgcttggacccgtccggcggactcagggcttctctgctgcgctcccggttcgctggaccgggaagaagggctgggccagtcccgtacccgtccccatcggaaccccaagtcgcgccgtgacccgtcgcagggcgagcatgagcgcggacgcagcggacggggcgcccctgccccggctcctgctgccatggagaagggtccgcacggctacggctatccacctgcacggggagaagggcaagtgggccagtaacatccggctaggtggagcccggctcgccggccgagaaggcggggcttagcagcgcgggggaccggacaggtaggacggtgaacgggtgaacaacgtggcagaaggagacccaccagcgaggtggtgagcacgataccgcgccgcacacaaacgccgtgcgacctagcatggtaggtaacgaaccccgaggacggacgagccagactgcgagacaggctacggagccacacggtcccgagaggaagctgatgcgcgccccagggaaggcagcctgggggcaaggccgacgccacgaccgggccggccagcacgcaggatgacagggggggggcgtgggcacaacgaaaaaatgaacccatcaggaaggctggacaaggagctccacccggggagacaacacgacgatgactgtacgaccactcgcggctcctggtaaccagtgaaaaggaaagagggcacccagggggcaatagggcatccaaccctggcacagaggaggacgtcacacgcagggcagtccactcgggacagaggacccacgaccccc

SEQ ID NO: 593737 - DNA, 397 bp, Homo sapiens
ctgatccgcttagtaagcacagaaagaaaaaatcacttcatggaaattgcagtaagaaacccaaacttctaaataatcgcttgcagatgagctaaataataaacaaaaaaaaaaggcatcaaattacccttttctttagagttagaaagtagggaaaatgtgttatttttacgttattaccaaagaaaaacttaaggagacttatctggcatttccaatgaattcttccatgtgctattccttacccgtgacatatcttaccttaatggcaggcaatatacaaagatgggctcactaccccataggttattggaattcccgggttgagaaactacctggttaggtatcccaaaatttggctgaaatcttgtaaaaaatgacttcccctttaacggga

SEQ ID NO: 593738 - DNA, 567 bp, Homo sapiens
  misc_feature (367)..(367): n is a, c, g, or t
  misc_feature (488)..(488): n is a, c, g, or t
  misc_feature (498)..(498): n is a, c, g, or t
ttcaaaaaaaaaaaaagaaaaaagaaaaaaaccataagagcaacatttgcattatagaaattcttcaaaaataggaaaaaagaaaaaacccgcaaattacccaagcatagccacagttactttggcatccttctaatctattttcaggcctattttagaacattttttaaaaattgtagaactaatgctgttatagttgcaatgaggaaaacaaaagcactagaaaagtatataatcacctctaacccaaacgtccaaagatttagttttagttgttaatgttttagttttagttgttaatgtttcatagtaacatatatttttaaaaagttttaagtaatgatactacctcaagaatataagcganaagttatacatactcacagacgatacacgtcatctcatgatatccaagtgggggcataggcatcagagggaggaacgggaaccgagaacgttagggacccgaggcgcctgtgtgctgtctncactgcgggnctgatcagtctctagcagacagctgtttgtttccagaacatggagaggcgcccgtactccatcagggcc

SEQ ID NO: 593739 - DNA, 212 bp, Homo sapiens
ttgctatcttgcacaagcttggcagcctggtggacgaacaacgaacgggtgtttgaccacgagcagggcacctacgggggccacttctctgagaccagaatgacggctaccgcataaacgagggctacatgcgctgcggtggctaccgccagtcgcagtctcagacggcctactgagctctccactctgtctcccgccttggccattcgacg

SEQ ID NO: 593740 - DNA, 358 bp, Homo sapiens
atatctggaacacactactagtgcaccaatttatcaccctatagaagaactaatgtttagtataagtaatcgtgaacagattctcctccgcttaagcctgcgtcagattcatgacactgaactgacaattatcagcccaatatctacaatcaaccaacaagtcattattaccctcactgtcaacccaacacaggcatgctcataaggaaaggttaaaaaaagtaagaggaactcggcaaatcttaccccgcctgtttaccatatacatcacctctatgcatcaccagtattagaggcaccgcctgccctgtgacacatgtttaacggtcgcggtaccctgaccgtgcccggaatcgtg

SEQ ID NO: 593741 - DNA, 292 bp, Homo sapiens
tcctcctcctcacctgcacatttagtcagatctatgaatatgaccttatttggaaatagcagtattgttgatctatccagatgaacgtcatactggattagggtgggccctaaatccaactgctgctgtacttagaagaacagggcaatttggccgggcgcggtggctcacttttaaaatacaaatttattatatgtctaaggacattatccataaagtgaaaacacaacccacagaatgggaagaaaatatttggcataacatgtatctgaaaccgcggaggaggcattcg

SEQ ID NO: 593742 - DNA, 270 bp, Homo sapiens
gtacctttattgcacttttatgacattggaaactatttcacaaaactttgtaaagagtgaacccacaggtgtgcacaggcaggcctgtaagatgcacttggaccaaccggtcacaggcaagttccaggtgggtgctgtaagccaacgggcggacttgcaagacacctgtgcattgggtccttccttcttccgtgctcagacaagaaccttcagaccttcaagagcccagggcccacgaaggagaaagggtttttacttgaattaaggccc

SEQ ID NO: 593743 - DNA, 115 bp, Homo sapiens
cacacgctacaggtgacatccctaagcaggttaaagtgaaaaaactgaagaatctatagactctggatccaacacctggcagttatacttcatatcagccatatttaaatagaga

SEQ ID NO: 593744 - DNA, 324 bp, Homo sapiens
agtgcgggtgatctagaggatccgggatgaggaagtactggacaatggttgatagatgatgtgataggatgggatgtgatgtactaatgatggggcacatcttaagcatgatggatggttgatcatcagattggcaagtgatggtggaactgttcaagcctcaggatgatgaaattggagatggaaccacaggagtggttgtcctggctgggtgcttgttagaagaagcggagcaattgctagaccgaggcattacccaatcagaatagccgatggctatgagcaggctgctcgcgttgctattgaacacctggacaagatcag

SEQ ID NO: 593745 - DNA, 1108 bp, Homo sapiens
tgtggagccccgcgccaaaggcgtacttctggagaccctttgtccaccaggtcggggggcactcatgcgtgctccgcattcaagtgagacaaccctgtgcaagccccgtggtcccaagggaacatcagttctacgagaccctccctgcatgagatgcgcaagattcactcccacagtacaaaggggacatcagcagccaccagcatggtggggtctttgtagagggagtgggggagtcttttgtaaatcaagacaaagccaaaggccccttgattagctggccatcccatgccccattttttacccctggtcctttcccctgatggcacacaggagaagtgtggcctgaataccccaacccggcatccatctgcacccagagcatgggggccacactcagaagtgtcatctactcatctgagcacagcaattccccgtgcagacagtcgaggactgagcagatatgagatgatgctggggcagagaggcctgggaggaaaggtgtcagccagatcgtacgtaaggcgctcgatcggcacctgctgaaaccgcccccagctgacagccccatcctcaaagactgtcttaattactcatggacaggttctagagacttcaggggaaaagctgacttccacggccaccacatgtctgtgctccccaaccagctctatctgccttgtgttcattatggaacttttgtgacagtgagactgaaagaacaaataaaacgatattataagaacaaaaggctgggtgcctaccgtgtggggcaatggggaaacattagataaggtgtctgggcagggtggaagaaagttggaccacttataaggattagctaacaagctcattacactggatgatctaaccttcaggaactgtggtccactgtataggcctgatacagcagcataagtatggaacacgataggcataaaatccggaataacaggcaggtcagctcggatagcacgccatcccaccatcaagagacaaaacacaagcacaaaacgacaatagggacaagaagagcatgaccccagcagaggcgacaggacgacagcagaaacaagagcgacaaaccaaccaaagaagacacagacca

SEQ ID NO: 593746 - DNA, 528 bp, Homo sapiens
  misc_feature (11)..(11): n is a, c, g, or t
  misc_feature (17)..(17): n is a, c, g, or t
  misc_feature (53)..(53): n is a, c, g, or t
  misc_feature (76)..(76): n is a, c, g, or t
  misc_feature (98)..(98): n is a, c, g, or t
  misc_feature (118)..(118): n is a, c, g, or t
aatatatagcngctctncaggaaaaagcccgtcgcatcttttccttgggactntgaagctactgcatggaaaaagngcacctaccccctcccctgttngaatgctgtattaatgtagnataattattactggttttgtaaatttttcttataatgtcccctgtctttaaaacatgtttccttcctcctgtcaagtcttgtacttggttgtatggttagcctatttttaaatgttttgcccagtttctcttcaatatttgtgtatataaactgatcttggtaatactgtacatagctgtttaaaaataccagaatgacttctgactattccaagttttccacaaaatacattttacctgtgaatagccatttgactaacaatatttggctagtagatgctgccctccaaaaggagggaaatgtctcacttgttttcctattaactttggtctgaaacacatttgcacttgtctgtttgacttgtgtcttattaacattgtctggtgtattaaaagtcattccgtgctta

SEQ ID NO: 593747 - DNA, 136 bp, Homo sapiens
ctgccccgtgattatcagatgcttcatgcctatcagttacatacgtacttccgctcaaatcctgatctggtccattaaagagtgtcgcagacaaagtttctgaaagattagagaagaatccctccccagagattgc

SEQ ID NO: 593748 - DNA, 117 bp, Homo sapiens
atgagatacgactcgagctcggtaccggctctgcctgtgcagcaggcttctgttggaaacaggggagtgggggtgggtgttgttctttcctcaatggttaagcaccatcttcatgat

SEQ ID NO: 593749 - DNA, 152 bp, Homo sapiens
tgactgacgacaggccatgcctttcaagtgcatgcagctcactgatttcatcctcaagtttcctgcacagtagccacccagaagtatgtcctgacaagccctggcagaaaggcagaccatcaataacaaaatgtggcagccacactgatggg

SEQ ID NO: 593750 - DNA, 206 bp, Homo sapiens
cccagaggatttcaggtggatcctctcaaacatacaagaagcaagagagccttgtccgagcctatgacagagaacactgcctgaagacacacagcattaattgatcacaggtccttgactaccttccaaaacctgtgtgggaagcatcttacagaaatgatttcaagtaccctgtattttggatgctaaaaaacaaaatctggcta

SEQ ID NO: 593751 - DNA, 121 bp, Homo sapiens
gcagtcctaggaagaacacagcccccagtcccagagtcagcagacaagcgcacatagaggtcacgggacggggagggacggaggggaggggcgatctgcaggttgcgcaaaacagcatgaa

SEQ ID NO: 593752 - DNA, 431 bp, Homo sapiens
  misc_feature (68)..(68): n is a, c, g, or t
  misc_feature (73)..(73): n is a, c, g, or t
  misc_feature (136)..(136): n is a, c, g, or t
  misc_feature (141)..(141): n is a, c, g, or t
  misc_feature (327)..(327): n is a, c, g, or t
gtctgcctagagccgggagaccctggatggctacacccttacttctattgaccaaggagctgaagctntattngggaaacatgatcaagattgtgtattagaaaaacataaagatgatttcccttgggttagaaangaganaaaatatacagtgctatttttgtcgaattagcacggacgccaatctaaccacagcaaatatttaacagtagctttaatgaattaatgcacaatattttgaaaaatctttgaccttgctcataagcagatgcctgccttgaagaaacactccaagtctgccgtgattccgagcgaaatgccaaggcngagtcaagacaatcattacctttagggctgaaacctgggcatgaggctgccctttctgggatgcctcctaaccagtctgatgtactgtctgtaggaggagtgag

SEQ ID NO: 593753 - DNA, 177 bp, Homo sapiens
  misc_feature (9)..(9): n is a, c, g, or t
  misc_feature (52)..(52): n is a, c, g, or t
  misc_feature (55)..(55): n is a, c, g, or t
agtattttnggaagaatatatatgaagtagatactaaaacattaggcagggnttnagtgaatcaagagataattctgtggccgcgcgcagtggctcatggctgtaatcccaacactttgggaggccgaggcgggcggatcacctgaagtcaggagttcgagaccagcctcaacatgg

SEQ ID NO: 593754 - DNA, 427 bp, Homo sapiens
  misc_feature (59)..(59): n is a, c, g, or t
  misc_feature (124)..(124): n is a, c, g, or t
  misc_feature (336)..(336): n is a, c, g, or t
  misc_feature (373)..(373): n is a, c, g, or t
  misc_feature (377)..(378): n is a, c, g, or t
aaaagtggaagtgaccattgtgtcaagtttcaggatccctgatccttaaagaggctganagcttcctacttgctgtccccttggaactcttgctatcggggaagcccagacgcccatttaaaantctgccctatccctggcccaggtgtggtggctcacacctgtaatccccagcactttgggagacccaaggcgggcggatcacttaaagtcaggagtccaagaccagactcgccaacatggtgaaaccgtatctctaataaaaatacaaaaattagctgggcattgtgcgggcacctgtagtcctagctatcaagaggctgagacaggagaaanacttgaacctgggaggtggaggttgcattgagctgangaanngccactgcactccaggctgggtgacagagcgagactccaacacaaaaca

SEQ ID NO: 593755 - DNA, 277 bp, Homo sapiens
gtcagagcgaactatgtgagatatcatatttttggtgttctgtaatacctaaagcactgtcttactttcaatcagtatgttgatcaacttgactaacctttaagtgtttatgtttacttatttagctgtatgatctggacaagtgacctaacttccccatgtctcagttttcctccataaaatgtgaataataataggacctacaccacaggtttgctgtgaggattaaacgggtaaagtgcttagaatagggcttggcacatagttcagcgtctga

SEQ ID NO: 593756 - DNA, 235 bp, Homo sapiens
  misc_feature (225)..(225): n is a, c, g, or t
ctcggagactgtaagactaacagcaaggattctggccaaacagaaaatccacccagagagaacaccttcggaaaaattgttagctgtgaaggagtttgaatcacatctggataagttagacaatgagaagaaggatttgattcagagtgacatagctgctctccatcacttttactccaagcatctcggattccctgacaatgatagcctcgtagtactctttgnacagggttaa

SEQ ID NO: 593757 - DNA, 417 bp, Homo sapiens
  misc_feature (59)..(59): n is a, c, g, or t
  misc_feature (105)..(105): n is a, c, g, or t
  misc_feature (185)..(186): n is a, c, g, or t
  misc_feature (199)..(199): n is a, c, g, or t
  misc_feature (204)..(204): n is a, c, g, or t
  misc_feature (336)..(336): n is a, c, g, or t
  misc_feature (350)..(350): n is a, c, g, or t
  misc_feature (373)..(373): n is a, c, g, or t
  misc_feature (382)..(382): n is a, c, g, or t
  misc_feature (405)..(405): n is a, c, g, or t
tggcttccaagaacagcctcggttcagaccactccagtgttgtcacgccaaaaaagttnagtggaaaatcaaaatccggccgatccctgaatgaagagctggggnatgaggacagcgagaacaagcggaaagccgcgtttttctcgtggtcgcggaccaggagcaccgggaggtcccagaaaaanngggagcacggggnccacngcagacgatcgccctgcatgcccaatggaggccctgtgtcgtccgagagtcgcagggctctgtgtgcctctgccgggagcctggtccctgtcggaggcctgcaggactttggtcacccgagaaggacaaggnccaccaagcactgnctgcattcatctcccggatgggnacatcctgncgtggtggtctgtcaaggcgggncttctccatcaa

SEQ ID NO: 593758 - DNA, 105 bp, Homo sapiens
  misc_feature (73)..(73): n is a, c, g, or t
cggcacgagtgaagaagagagaaaagagtgtgatgcttacagagatgtgagagacctccaagtgatgctcatnctattgagataatcacgaagtgataatattta

SEQ ID NO: 593759 - DNA, 896 bp, Homo sapiens
  misc_feature (30)..(31): n is a, c, g, or t
  misc_feature (33)..(33): n is a, c, g, or t
  misc_feature (664)..(664): n is a, c, g, or t
cttgagcccttcggattgacgccatcgtanngnccagcgctcctttgcgccgatactccgctaattcgctcattatggccgggggggcattcctgaagctgacagcattcgggccgagatgtctcgctccgtggccttagctgtgctcgcgctactctctctttctggcctggaggctatccagcgtactccaaagattcaggtttactcacgtcatccagcagagaatggaaagtcaaatttcctgaattgctatgtgtctgggtttcatccatccgacattgaagttgacttactgaagaatggagagagaattgaaaaagtggagcattcagacttgtctttcagcaaggactggtctttctatctcttgtactacactgaattcacccccactgaaaaaagatgagtatgcctgccgtgtgaaccatgtgactttgtcacagcccaagatagttaagtgggatcgagacatgtaagcagcatcatggaggtttgaagatgccgcatttggattggatgaattccaaattctgcttgcttgctttttaatattgatatgcttatacacttacactttatgcacaaaatgtagggttataataatgttaacatggacatgatcttctttataattctactttgagtgcctgtctccatgttngatgtatctgagcaggttgctccacaggtagctctaggagggcttgcaacttagaggtggggagcatagaattctctatccaacatcaacatcttggtcagatttgactcttcaatctcttggcactcaagcttgttaggatagtaaaccgcgcatagttactcccattaacttctctgcttagaatagggggaaattacaaattattggccggttattgaaatttgtttta

SEQ ID NO: 593760 - DNA, 135 bp, Homo sapiens
ggtgtaactggtcacctgggaccctgagcccagagaagatgtgagctgaactcctgccgcgataatgccctgccaccaagtgatcaccagacgctgcggaagctccgctagcctcatgatggtgtcggaagtgtg

SEQ ID NO: 593761 - DNA, 841 bp, Homo sapiens
  misc_feature (30)..(31): n is a, c, g, or t
  misc_feature (33)..(33): n is a, c, g, or t
  misc_feature (609)..(609): n is a, c, g, or t
cttgagcccttcggattgacgccatcgtanngnccagcgctcctttgcgccgatactccgctaattcgctcattatggccgggggggcattcctgaagctgacagcattcgggccgagatgtctcgctccgtggccttagctgtgctcgcgctactctctctttctggcctggaggctatccagcgtactccaaagattcaggtttactcacgtcatccagcagagaatggaaagtcaaatttcctgaattgctatgtgtctgggtttcatccatccgacattgaagttgacttactgaagaatggagagagaattgaaaaagtggagcattcagacttgtctttcagcaaggactggtctttctatctcttgtactacactgaattcacccccactgaagttaagtgggatcgagacatgtaagcagcatcatggaggtttgaagatgccgcatttggattggatgaattccaaattctgcttgcttgctttttaatattgatatgcttatacacttacactttatgcacaaaatgtagggttataataatgttaacatggacatgatcttctttataattctactttgagtgcctgtctccatgttngatgtatctgagcaggttgctccacaggtagctctaggagggcttgcaacttagaggtggggagcatagaattctctatccaacatcaacatcttggtcagatttgactcttcaatctcttggcactcaagcttgttaggatagtaaaccgcgcatagttactcccattaacttctctgcttagaatagggggaaattacaaattattggccggttattgaaatttgtttta

SEQ ID NO: 593762 - DNA, 891 bp, Homo sapiens
  misc_feature (30)..(31): n is a, c, g, or t
  misc_feature (33)..(33): n is a, c, g, or t
  misc_feature (419)..(419): n is a, c, g, or t
  misc_feature (434)..(434): n is a, c, g, or t
  misc_feature (439)..(439): n is a, c, g, or t
  misc_feature (659)..(659): n is a, c, g, or t
cttgagcccttcggattgacgccatcgtanngnccagcgctcctttgcgccgatactccgctaattcgctcattatggccgggggggcattcctgaagctgacagcattcgggccgagatgtctcgctccgtggccttagctgtgctcgcgctactctctctttctggcctggaggctatccagcgtactccaaagattcaggtttactcacgtcatccagcagagaatggaaagtcaaatttcctgaattgctatgtgtctgggtttcatccatccgacattgaagttgacttactgaagaatggagagagaattgaaaaagtggagcattcagacttgtctttcagcaaggactggtctttctatctcttgtactacactgaattcacccccactgaaaagatgagatgcctgccgngtgaaccatggactntgtcncagccaagatagttaagtgggatcgagacatgtaagcagcatcatggaggtttgaagatgccgcatttggattggatgaattccaaattctgcttgcttgctttttaatattgatatgcttatacacttacactttatgcacaaaatgtagggttataataatgttaacatggacatgatcttctttataattctactttgagtgcctgtctccatgttngatgtatctgagcaggttgctccacaggtagctctaggagggcttgcaacttagaggtggggagcatagaattctctatccaacatcaacatcttggtcagatttgactcttcaatctcttggcactcaagcttgttaggatagtaaaccgcgcatagttactcccattaacttctctgcttagaatagggggaaattacaaattattggccggttattgaaatttgtttta

SEQ ID NO: 593763 - DNA, 241 bp, Homo sapiens
gcgggctgagagcgtcgagctgtcaccatggggtgatcacgcttggagcttctaaaggacttcctggccggggcgtcgcgctgccgtctccaagacgcgtcgccccatcgagaggtcatctgctgctgcaggtccacatgccaccaacagtcatctgagagcagtcaagggtcattgatgtgtgtggaatcctagcgcaggctctctctctgtaggtactgccacgtgtcgttctcccacc

SEQ ID NO: 593764 - DNA, 965 bp, Homo sapiens
  misc_feature (502)..(502): n is a, c, g, or t
agcgggggccgggggcggagcgcggggcgccgggtgctctggcggctcccgcggctccggctggcggttcgggccctggcacctgtgactctcggccgcgctcgccctcggcccgcgccggcgccagctagctcccgatggccccgtccgggctgcaagctcggtctccggcgctcgctctactccgatcactcagcatccgatgagtgcggcgttcgtcgcactcttccgtcgctgtggtacggtgggtctaccgacagccggggaccgcggccagtgggagggctcacagggagtgcatgggcactgtgagtgtcctggtagacgcgacggtagacagaaacagagctgtactactacggtattaaccagagcacaagagatggcgaatttcagacaacatcgagacaaggacgaccacaacaacatacgcgagacaactcaagcggtctgatccaacaaagaccaatgcgcagctaaccaaaagctgactgcgcgcatntgaacgagcagttcacgaaaaaacccccagcgagcgaggaagccgcctacactcaatccaacagtgaactatacacactaacccaatcaaatgagacgaccaacccatgtgctacaaatctctactgagagcactctatctcacaaacgcatatatcaatacttataaaaactgattgcaaaactgtgcataccgagcattcaaagttacaataatcccaatattaataaaagagggctacgaggtgtctccgaaacgtgaagactctagaaaaatcctaaacaccacagtgctcacataatacatttaaaatattaagtacaagttacctcatgcaccctgaaaggataacccccaggagggcaaatttccagaggatttgacagcggaaagaaccgaaaaagaaaggcgacccaggggagatcaagtggccagcgctcaagcccaaggcaaaataattgca

SEQ ID NO: 593765 - DNA, 940 bp, Homo sapiens
  misc_feature (30)..(31): n is a, c, g, or t
  misc_feature (33)..(33): n is a, c, g, or t
  misc_feature (708)..(708): n is a, c, g, or t
cttgagcccttcggattgacgccatcgtanngnccagcgctcctttgcgccgatactccgctaattcgctcattatggccgggggggcattcctgaagctgacagcattcgggccgagatgtctcgctccgtggccttagctgtgctcgcgctactctctctttctggcctggaggctatccagcgtactccaaagattcaggtttactcacgtcatccagcagagaatggaaagtcaaatttcctgaattgctatgtgtctgggtttcatccatccgacattgaagttgacttactgaagaatggagagagaattgaaaaagtggagcattcagacttgtctttcagcaaggactggtctttctatctcttgtactacactgaattcacccccactgagtgtagtacaagagatagaaagacaagtctgaatgctccactgaaaaaagatgagtatgcctgccgtgtgaaccatgtgactttgtcacagcccaagatagttaagtgggatcgagacatgtaagcagcatcatggaggtttgaagatgccgcatttggattggatgaattccaaattctgcttgcttgctttttaatattgatatgcttatacacttacactttatgcacaaaatgtagggttataataatgttaacatggacatgatcttctttataattctactttgagtgcctgtctccatgttngatgtatctgagcaggttgctccacaggtagctctaggagggcttgcaacttagaggtggggagcatagaattctctatccaacatcaacatcttggtcagatttgactcttcaatctcttggcactcaagcttgttaggatagtaaaccgcgcatagttactcccattaacttctctgcttagaatagggggaaattacaaattattggccggttattgaaatttgtttta

SEQ ID NO: 593766 - DNA, 369 bp, Homo sapiens
  misc_feature (38)..(38): n is a, c, g, or t
  misc_feature (87)..(87): n is a, c, g, or t
  misc_feature (102)..(102): n is a, c, g, or t
  misc_feature (105)..(105): n is a, c, g, or t
  misc_feature (172)..(172): n is a, c, g, or t
  misc_feature (206)..(206): n is a, c, g, or t
  misc_feature (233)..(233): n is a, c, g, or t
  misc_feature (237)..(237): n is a, c, g, or t
  misc_feature (273)..(273): n is a, c, g, or t
  misc_feature (345)..(345): n is a, c, g, or t
  misc_feature (358)..(358): n is a, c, g, or t
ccaggacagtttcaccgaaaccccggcgccccggcgantccttgagcggagagggcggggcgggacagggaaggccgcgctgtcggnaggggcggggacctnccnctttggcccaggtcttggacacctgggcgcccctggccctcggcagaacacggcgccggacagaagngatccagcggttagtgggcgcggccggcgcacgnaaggctggagccgcctgcatttccagnaatnacggcgccctttccccttcgcccgcagcggcctttncaggcacttcgagccctaatggtggtctccctgggtgctgggcttcctgggccatgttttttggccacgatnggcattgaagttncacgtcgcttt

SEQ ID NO: 593767 - DNA, 896 bp, Homo sapiens
  misc_feature (30)..(31): n is a, c, g, or t
  misc_feature (33)..(33): n is a, c, g, or t
cttgagcccttcggattgacgccatcgtanngnccagcgctcctttgcgccgatactccgctaattcgctcattatggccgggggggcattcctgaagctgacagcattcgggccgagatgtctcgctccgtggccttagctgtgctcgcgctactctctctttctggcctggaggctatccagcgtactccaaagattcaggtttactcacgtcatccagcagagaatggaaagtcaaatttcctgaattgctatgtgtctgggtttcatccatccgacattgaagttgacttactgaagaatggagagagaattgaaaaagtggagcattcagacttgtctttcagcaaggactggtctttctatctcttgtactacactgaattcacccccactgatagacagatgacgtattgccttgcccgtgttgcaaccaatgtgaacttttgttcacaaggcccaaagcatagtcaacgtggggatcgaagaacatagtaacgcatgcatcctgggcagggttttgaggacatgaccgcaattatggactatgggcatgactatccagaagtcctcgccttgcttctgccatttttaactactcgactattgccttataacacatatacgactttactgcaccaaacatgtacggctttgtacatacatgttacaccatggaacactgaatctatcttctataatttctacgtttgcagtgcatgtctccaatgtagagactgtatctcgagccaggttgctcccacagggtagctctcaggaggggctggacactttacaagttggggcagcagagacatctcctattccaccatcacctcttggtcccacttcaccccacatctcttgcctccaagctgttcacacaacaaggtgc

SEQ ID NO: 593768 - DNA, 511 bp, Homo sapiens
cctacatcctataaaacgggcccaccccatctcctttcgctgactcttttcgggactcagccgggccggcacccaggtgaaataaacagctttatggctcacacaaggccggtggggtggtctcttcacatggacgcgagtgaaatttagtgccgtgactccgatcgggggacctccctggggggatcaatccccggtcctccggctcttggctcggggagaaagatccacctaggccctcgggtcctcagaccaaccagaccaagaaacatctcaccaatttcaaatccgaaaagcggcctctttttactctcttctccaacctccctcattatccctcaacctctttctcgttccagtcgtgggtgtcacacttcaatctctcccttctcttaatctcaattcctttcatttcctggtagagacaagggagacacgttttatccgtgaacccaaaattccggcgccggtcatggactagggagggcagcttcccttggtgctaatcact

SEQ ID NO: 593769 - DNA, 641 bp, Homo sapiens
gaaccgggcattacctccagttactatacatcatgaagtctgaattagcgtcaaccgagttgcagtactggctgttgggtatggagaaaaaaatgggatcccttactggatctgtgaaaaatcttgggtgtccccagtggggaatgaacgggtacttcctcatcgagcgcggaagaacatgtgtggcctggtgctggcctctaccccatccctctggtgtgagccgtggacaacccgcagctgcagactggcggagaaaggcgaggaacgggcagctgggcctgggtggaaactcctgccctggaggaagtagtgggagagatccacaagggaccaccaaatactgccatcaaactctgtgcccagcctggaaacctacagacaatggaggagttccacatgagctcacccgtgtatatgaccgcaaagatcaccagctcatgtgactagagtgtcctatcttaacagagttcaaaaccaacagtggaccgacgaataatcttcctgtccagaagggctactataccacaatattaggagctcacagggaactgtacgcgatcttgtattcagcatgcttccaactaaaattgacgtgagcacctacacccagattgtagaaaaacaataaaacaaacatg

SEQ ID NO: 593770 - DNA, 680 bp, Homo sapiens
  misc_feature (30)..(31): n is a, c, g, or t
  misc_feature (33)..(33): n is a, c, g, or t
cttgagcccttcggattgacgccatcgtanngnccagcgctcctttgcgccgatactccgctaattcgctcattatggccgggggggcattcctgaagctgacagcattcgggccgagatgtctcgctccgtggccttagctgtgctcgcgctactctctctttctggcctggaggctatccagcgtactccaaagattcaggtttactcacgtcatccagcagagaatggaaagtcaaatttcctgaattgctatgtgtctgggtttcatccatccgacattgaagttgacttactgaagaatggagagagaattgaaaaagtggagcattcagacttgtctttcagcaaggactggtctttctatctcttgtactacactgaattcacccccactgaaaaaagatgagtatgcctgccgtgtgaaccatgtgactttgtcacagcccaagatagtttagcttggctcgcagacatttaaccagcttacaggcgggcccgaagacactgctttcggtttcggaggccacccactctcccgcatcattgcctggaactaactgtttcgtcagtcactcacacttcgtcggcgccatacagtctcccctccgccgtcttttacccttgcgtgacgcccttcgattcgtatcatatatgttgcttccaaagtgattggttat

SEQ ID NO: 593771 - DNA, 680 bp, Homo sapiens
  misc_feature (30)..(31): n is a, c, g, or t
  misc_feature (33)..(33): n is a, c, g, or t
cttgagcccttcggattgacgccatcgtanngnccagcgctcctttgcgccgatactccgctaattcgctcattatggccgggggggcattcctgaagctgacagcattcgggccgagatgtctcgctccgtggccttagctgtgctcgcgctactctctctttctggcctggaggctatccagcgtactccaaagattcaggtttactcacgtcatccagcagagaatggaaagtcaaatttcctgaattgctatgtgtctgggtttcatccatccgacattgaagttgacttactgaagaatggagagagaattgaaaaagtggagcattcagacttgtctttcagcaaggactggtctttctatctcttgtactacactgaattcacccccactgacacagacaaccttcactgctcttgggaactggtatttttgtttgagactggtttggtcccttctgcttggggtagttcccgcgggcccgctgggtggccccgcccgtgcggtgtgtttgcggccgcgggcgagtggccttgtgtgcgccgcctgcggtaggaccgaggtgcgctcgcgttgccctggcctcctataccgggcgcggtcgccggcccacggtttctgttgtctcgcgtgttttggtttgtctcggactgtgtttgtacgccattgctgccct

SEQ ID NO: 593772 - DNA, 1283 bp, Homo sapiens
  misc_feature (1283)..(1283): n is a, c, g, or t
atgcgggccttgcttgtaatgaccgcgcgaggattaaagaatcatgcagaattgccggtctccgtgcctgcgtattcacttcgctcgtgtctcgcgagcagtccgcggagacctgcggtagcgtagccgaagaacggttcttgcgaatacccgtgagacatcacccgttcggctgccgccatatgacatccttcaatcttgcatctctctagtgacattgaacacgttatcactaggcacctagtgctacactgagcggagcactccgatttcgcactgacaatgtggaggacagtgagtcgacctttagagtgccgtggaatccgcgatgatcgggagaacggacaatatatagtgaagggcgccaatggataggaaatccctactatgagacccaatgtctggcgagaaagcatgtcacgtcgcttaagcatcatcgcactttcgctcgcggaacgcgctcatttcgtagtcgttcgggagcctaaaaaacaaaatttctcacggcgctacgcataagtgtgccccttccgcacgagggaagttgacaggggtcgtagttccgagacagtgtgcaggtacaaagactgcatcggttcccttaccggaaggggagggacagattagtgacctttttgtcatcagaatccgtaggaaagtttgtacacagcaagctcgcaccgtgcacggccaattggtacctcgctggtaacgtagaggggacccgtttgcttaacgaaagcgaatacccacctggggggggtccgtggaacagcgaagccataggaggccccacaatgccattgggaataaccgcgaggtacgcaaaatgtatgggccacgcgggtttgcctatgcggctcgccatgctaccagcgtaacggccgtaatggggggtcccctggttgtcttcaaattttaatccggcaatacccgcaaacgaccgttatgggaaattgacaaatctctttttgcaaatttcgagttttgttaccagttaggcacgttcgatttccactcagggcggcagccacaagataatgtaggcccttgggtgttttgggccgaattccgtttgttggcacaaaccggaaaagagttaacgacggaggaaggctggtgtggtctccaccccggtaaaggcaccgcagttgtggacaaccaaaggctttgaaattccaagatacggccggtatggcggctggccaagcgcttattccgaaccaaaggacaacattattccagagaatggttgacccacccagaatccaccccgttcgggn

SEQ ID NO: 593773 - DNA, 107 bp, Homo sapiens
attgtgtctgatgcagctccagtgtctcgatgcgggtggcgtggctcagacggacaagcggttcgaactggacgcgcgtcgacctgcgcgtttgtcgaatctctgaa

SEQ ID NO: 593774 - DNA, 607 bp, Homo sapiens
  misc_feature (30)..(31): n is a, c, g, or t
  misc_feature (33)..(33): n is a, c, g, or t
cttgagcccttcggattgacgccatcgtanngnccagcgctcctttgcgccgatactccgctaattcgctcattatggccgggggggcattcctgaagctgacagcattcgggccgagatgtctcgctccgtggccttagctgtgctcgcgctactctctctttctggcctggaggctatccagcgtactccaaagattcaggtttactcacgtcatccagcagagaatggaaagtcaaatttcctgaattgctatgtgtctgggtttcatccatccgacattgaagttgacttactgaagaatggagagagaattgaaaaagtggagcattcagacttgtctttcagcaaggactggtctttctatctcttgtactacactgaattcacccccactgacacccaccgacatgcccgccgcgtgcaccatggcgcctcccacccacccccacctcgcctcgcgtcctccccccgccccccccccccctccagcccccgcggccccccccctcaccccaacctccggcgccccccccccgctcccctcccgccaccccctccccccccctccgacctccctcccggccagcccaacctcccgcccctc

SEQ ID NO: 593775 - DNA, 211 bp, Homo sapiens
ctggtctggatgtcttaataagccaggagtcagagagacacgaagaagtggtggtagtcttccatgtactcctccctccctcccctctcttccttctaatgactcatggattcaattaacaagatattaattaaggctttattagcaagtctggacaccatcataggtactaggaactatcgtggccagcgggtgcccttgggccagcgag

SEQ ID NO: 593776 - DNA, 306 bp, Homo sapiens
aacacgacataccaacaatgcaagcaaatcactttgtgaatagagaactcagacttaaacttcagacgagactcaaagtcatacttccattaagggacttgatacacaaaattagtttgaactgctattagcaggtggcaggagccaccttcaaatagaatcttcaaattggaaaatactgcttcaccacctgtatggggataagtagcaaatggaataattgagtataggttagtagctatatagatgaccacctcgcctggataccttcccataaaccactctagctggacaccaactcttaca

SEQ ID NO: 593777 - DNA, 798 bp, Homo sapiens
cccagttgtcagggggtgacccgggatttgcccccccctccgttcctcccaggctcctgccccccactggtttacccacccttgccaaggtcaccagcacgcttggtatcctggaaggactcaggaccacagtccatgccatcactccacccacaagactgtggatggcccccccgggaagctgtggcgtgatgccccgggctctccagacatcatccctgcctctactggcgctccacaggctgttgggcccaggtcatccctgactgacgggaagctcactggcatgaccttccgtgtcccccctgcccacgtgtcagtggtggacctgacctgccgtttagaaacctgcccgatatgatgacctccagaaggtggtgaaccggcgtcggagggccccctccagggcatcctgggctaccctgagcccccggtggtctcctctgacttcacagcgacaccccctcctccccctttgacgctggggctggccttgccctcacgacccctttgtcaagctcatttcctggtatgaccacgaatttggctaccgccaccgggtggtggacctcactggcccccctggcctcccaggagtaagacccctggaccccccgcccccgcccagagccccagaggaagagagagaccctcactgctggggagtccctgccacactcagtccccccccacactgaatttcccctcctcaccgttgccaagtagaccccttgaagaggggaggggcctagggagccgcaccttgtcatgtaccatccattaagtacctgtgctcca

SEQ ID NO: 593778 - DNA, 943 bp, Homo sapiens
cccgcgtgtgtgagcggggaaaacccagtagtgtgctgccaccacaccacgcgggggtggcttcaccaaaaggggacccggctgtaaatgcgcccaaagctgcgtgtgttttagaccgcccgaagttgctactgtccccatgtgcaggcaggccgccaacggtggggggcaccgccaccacacggtggggaaatggcccccagatgggtgttgtcgcagatgagtttgcacggatgtcccccctcggcgcgcccgaccgctccgtggtggggcaagacacagagaagcaccaacggggtcaagatagtcgtgcgcaccgccggcgagcaagtccacactcgttggtttcttttgataaacagcacgacacaaccgccgcgagggtagaaggtgtggtcgggtggaaacacacaccacacaggttagaaccagcgcaagtgcggtgcaaactaactgggaatctggcggtgcgaaaaaaacccccgccccgttgtccccccaagtggcgggacacgggctcgccatcgcagccgttcttaatatgtcccgatagaatttcccccgcgacacggttcttggggggcacccacgcgcttgctgtcacacccaggaagcgaagaacccgcccaccactcatccaataccctggacaaccctgggtccacatgtgagggaaattttaaaacgggttgttctcacttaatccagtgtgccaaaaacccacggcccactttgttatacaacaacgcttctttgttagacgagtgactgcgtaacacatgtacggggccaacgaaccgcccttcaaagatggggtagaaactagtcccttgtaaccccgccaaaggaaatcctccagaaataggaggtgttccccctcaaacaagtaccaagggttctctgttggcgccaaaaaaaccttctttgttctaaaaggaaaaca

SEQ ID NO: 593779 - DNA, 120 bp, Homo sapiens
gaattagaatctagaagggacacttgtaaaaacaggatgctttcaggctgcaatactctgatgacaatacccaaaatactatctccacaggcatgctgatggattctgcaaacagggaga

SEQ ID NO: 593780 - DNA, 1285 bp, Homo sapiens
cgcgagtgtggtggaggccgggtgtatggtgggggcccctgtaggtagttcgtggggtcgtggaaggagggtttcctcccgggcaataggtgggggaaaaggctcccttgggggggaatgttcgtcactacagggggtgggacccgcggatgagtggagggttgctgtaaagaagtaggggttaggttatgatagggtaggggtccccaaagaagtgggggtgtgacccccgctgtggggagaagcttgcgaggagctttatgggggggtggttgaaaaagaagctcggtaaattgtgggaggggccgtttcggcacgccaggtgtcccgcgaagaatgtgttgtggccccgggaaccatataaaggggggaatatgtgggcagccagcgaaacgggggttttaaaagtttgagaggagaaagttgcgccgccaagtgtagtttagttattgttataggagatggaggggaggtttctacaaggtccccccgtgttctttgggtggggatttttagaaaagggggattaaaagagagagggagatgttaaaggaggggactcttaggagaagggaggcctcttgcgagaatagagaatgtctgtgggcgccactggctgtgtgggcgcctcggctgtgtggtgagccgcccacctgtgccacgcaccgctgttgcccaccaaggagaagataagggggagcgcccaacgatataatagttgtgtgatatgtgtgggggtagatatagtttgttcacacaggcgttatatacccacgtgagacactcgagcaccacatgtgagatatgtggcgttagaaatagatatccccacacacgacccaaaggtggaggtttgtgttggtgagatttaatggtttgtgggtgaggagcttaaagggtgcgctttgtggcgtgaggagaaggtttttcacgaggccctcttaaagtgagaaatattcttgaacacatgcactttgggaccacctgaaatgttgcacactcccacacaagtgtcaccactttaaatatattaagtgtctctaaagtgatggaggcaccacggtgttaagtgtgagaagtgttaggctttctttttcttctccacacacctatgaatttgaaacacacactgatggaatgtcacagaggaaaaaaaatttaccacttatttaaaattctgtgaatgttaaaaggacccacttaactattaccacaattgtgattaaccacaaaaatgctgtattttcccgtacccgtagtaatagtaataaaaattataactaga

SEQ ID NO: 593781 - DNA, 1048 bp, Homo sapiens
ggcttaattcataaacactatgaattacagacgaaaattaaccagacagagggaggccgggagagcagggtctggaagccagaggccagggagcccgaggtgcgcgggggagactgtgtgccgagcctgtcgtatgctcctactggcatcctaggtaccgcctgctggattgggggcacagggggcgagaggccaccaacagggtacatggactcacagggcacatcacgccccaagcatctaacgctacacatccatctccgacgggcacggtagaccggaccgagagaagacacgagacgcggcccactgaactagaaagaaagagcagaacacccgccagcccagcaggaagccgggcaccgagaacacccacgagggctcaggccgcaccgcaccccacgaggaccaatcagtgcgcccccgccgagacggcgcaccacgggcagcgagagtcaggacgaaacagaagccaagacacgagtccagggagacaaaaaagcaagaaacgaccagaacgagcaagatcacagcaaaagcgcgacagaacatcgcaacgcaccaacaaacaggacacacaaggaaggagaccaagacaggcacagaccacagacaacgtacaccatgagcgtaggccaccaactcgcagagggctagaaaaacaagagcgccagacgaagagcaagcaccaacagcggcaagaaggcacaccgaacgcagcgatcgcgccacaaaaagaaaacagaagacagaaagcaccacaactggaaacaagcaacaacataagaaaacacaacgccagcatgatatagaagtacacaaataacacaataacaacaacaacaaacgacgaacaacagccggacagaatgcaacacacagaaaccacacgcacagaaaacaagaccagagacagaaaaagcgaacctcgaacaaagagaacaacaaggacaacaaaccaaccagagacacacaaagagaacaaccacggaactacacgacaacaccacagaagcaaaagaaagaagcaagaagcagcaaacgagac

SEQ ID NO: 593782 - DNA, 681 bp, Homo sapiens
  misc_feature (529)..(529): n is a, c, g, or t
  misc_feature (598)..(598): n is a, c, g, or t
gccaaacatgttctgcaggtcaagcaggcataaagagggatgtaagttaatgtaatcattttatcctttctaatcttcaattgatgttagagtctttttagtgttcctaaatgtctgtacactagatcctggttggctgaattgccatctgcagtggtcctgctactggattcctctgacctttggtcattcttccctttaaaccttttacattttgacacttcattattttatgctgcttattcaaaatgtatactttcttttaacgttattctttctttagtctctttacttcacttggagtcagattctactagaatcttttttgaccccaaaagcatttggaaacacatgaagatatttggcggaaggggagttgtcatggtaactatggaactcccgattcctagactgcagtacagcgtcatgatctcggctcattgcaatctctgactcccgggtttgagcaattctcatgtctcagtctctagagtagctaggattacaaatgtatgccaccatgcctggntattttattattattattattattatctttcgatctatagtacaaatggtgtcttgccatgattgccangctgggcttaaactccttggactcatccatctgtcctgctttactctcttacatgcgtgagccacttaaccttgccctctacc

SEQ ID NO: 593783 - DNA, 295 bp, Homo sapiens
atattgccaagtcaggacatctgcacgtaattctattcctcatccttttttttggagacggagtctcactgtgtcacccaggctggagtgcagtggcgcgatctcggctcactgcaacctctgcctcccgggttcaagtgattctcctgtctcagcctcccgagtagctgggactacaggcgtgcaccaccacgcctggctaattttttgtatttctagtagagacggggtttcgccatgttggtcaggctggtctcgaactcctgacctcgtaatctgccctcctcgacctccc

SEQ ID NO: 593784 - DNA, 301 bp, Homo sapiens
atcgagctcggacatccttttattcaagcagtcgcagcgcaggccatacacaatgaaatggtaggtcaacaaatcttctggtcaagagaaaaaaaaaagaaatagcactctgcatgcttgagcctacaagatgaattaccctagaaaagaatccaatgaaggcgtgagcaaccgagcccagccacattaatcgatgtttaattgttaaacgaaggtcccctgagtcaaactcaactttggtagactattaaacttggtttactagttatctggtaaaggacgactgcttggattacaagga

SEQ ID NO: 593785 - DNA, 650 bp, Homo sapiens
  misc_feature (637)..(637): n is a, c, g, or t
tgcagtggctcacgcctgtaatcccagcactttgggaggccgaggcaggcggatcatgaggtcaggagatcgagaccatcctggctaacacggtgaaaacccgtctcgactaaaaatacaaaaaattagctgggcgtgatggcgggaacctgtagacccagctactcgggaggctgaggcaggagaatggcgtgaacccagcaggcggagcttgcagtgagccaagatcgcgccaccgcactccagcctgggcgacagtgtgagactctgtctcaaaaaaaaacactctgtcattcacactagactgcagtggcatgatcatagctcatggcagcctggaactttcaggctcaagtgatcctcctgactctagccttccgagcagctgtgactccaggcatgctccacaccggctaatttagtacttttgttttgtttgtttgtatgtatgttcgtttggttatgtagagacaagggtctatgttgagaaagactggtccttgaattccctgcccttaaacaatcctcccacctcagccttcccaaagtgctgggataaacaaggcgtgcgagggccggacttcagtcctaaaggttaaatttttatatttgggctacctatactggggatcaatgntacaagactatct

SEQ ID NO: 593786 - DNA, 170 bp, Homo sapiens
tactttacgggactttgataaagaatgcaaacagatgcttcttgctctgaaatccaaacatctttcccactgtaaactgtccttgcggttattggcagcaccggagcttgattaaaggggattgtgcacctgaccagagtggcaaggaccatcttgagtctgtacaacta

SEQ ID NO: 593787 - DNA, 138 bp, Homo sapiens
ataacagatacccacaaaaggagatatatgacatgcgtaaagatcattccagtaacgatatcaagaaactcagtgaggctaggcatgggggctcatgtctgtaatctgagcacttctgggatactgaggcacggaaca

SEQ ID NO: 593788 - DNA, 627 bp, Homo sapiens
  misc_feature (230)..(230): n is a, c, g, or t
  misc_feature (245)..(245): n is a, c, g, or t
cgtggtggctcacgcctgtaattccagcacttggggaggccgaggtgggcagatcacgaggtcaggaaatcaagaccatcctaccatcgtggttaacatggtgaaacaccatctctactaaaaatacaaaaaaattagccaggtgtggtggcgggtgcctgtagtcccagcaggagaatggcatgaacctgggaggtagagcctgcatgcagagagctgagatcacaccnatgcactccagcctnggtgacagggcaagactcgtgtctcaaaaaacaaaagaaaaaaaaaaccaataatgtgttatttagtgtgcaaatagttagaaggaggatatgtgaatggttccaacacaaagaaatgataaatgtttgagatgatggatatgctaattacccgtgatcagatcactacattatatgtatcaaaacgttactatgtaccacagaaattgttacttataattatttcagttaaaagaattaaattcaactttaaaaagaagtaatgtgggtaatacactttctgtggttccaagtactatatgtgtaattaaaactggaaagatcattataattccagtttatatcaactgaaggtaaatattaagaacataggcacatttgg

SEQ ID NO: 593789 - DNA, 1088 bp, Homo sapiens
  misc_feature (94)..(94): n is a, c, g, or t
  misc_feature (377)..(377): n is a, c, g, or t
gggtgggacgtggtctggggtatcgggaaagcaagcctacggttgctcactaattgacgtatagatcctgtgctgctttgtcaacgatgcctgnaggaacgtgcagcacactggatgaggaggaggtggagactattgcctttcaggcagaaatagcccaactcatgtccctcagtgatcgataccttgtattccaacagaggagattttccttcggagagtggagtctctaactggctgtcttgatggccttggacaagagttcgctaatgagagtcgctgaacagagcccgtatcgaagcttggagcagtggctaaagagctgaaagattgaccattcattcgcccgaacccgtcagaggaaacgttacccgtgnactttgggctaggactacagggcatgggccatgcaccaagaggctgagtctgcataaggtcaagtttagggaagccgatgtgccgaacgtctggatacctaaaggcagttcagtggaggcgtcttcacggcgtgggtgcaagacactctaccatgacttggggcagattcgcgtgtgggccttttagttctgtcctacttggtggcagagaaaggtgggtgtgatcgagcaagagcacagacgactgatgaagagtatggttgggagtcttactgctggaggttccttcgctgtgagtgctgagcatggggagcccattggcaggggtaccgaggtgatcgtccagtcttatagacggatcagacggagtacctcagaagagaggcgggtcaagaggtggtggaagaagcggtctcagtgccataggcatccaatcaggcttgatgggacgaaggaagaagcaggaacagcgatgatgaagcgaggacgagaacggggaaacagaggaagcaaaggacgcgaaaaggcccagagtcgaaaagttgcgctcagagagcggggcggaccagagaaggcacggcacaggacatgagcctcggacaagcagagcggaaaacaccacggacagccaggggacagacctggtaatcccgagcgtgggaattaggagccatacggcaacggacaggatacaacacgatgaggcagaac

SEQ ID NO: 593790 - DNA, 197 bp, Homo sapiens
gacagtctgaggttataataagttctagtccagagggatgggtaatttacagaggaggaaaaggtattatacagcctctggggaaggtgactgtggagatgctggaggagaaacctggaaggttcctggttgtttaccatggaccagagttttctgaaagatcttggaaactgttctgttctgaatactgggaaaca

SEQ ID NO: 593791 - DNA, 392 bp, Homo sapiens
cacgaagcgagcactcagcacgttaaagctgtggctcaacacagatatattgagctctgtgggcatttataatctgggccacaaagctctcaagcctcctccaataaagctctattgggaaacacaatggaccagtggaaaccacagacccggacctttaatacacagtacaagcgggttggttctggctatcgataccaagagggctcagatctatgggaggcggcagattatactcgggaaagagggaaccgaagagctcaaaccggttgatgatccaaggttgatgctcaagggtttcaaggcggtggtaccggtgaagcaccattacctgagggccttcctgttcgtgtacccacaagagtcgcttgtgaatgggagcgcaccctgtt

SEQ ID NO: 593792 - DNA, 131 bp, Homo sapiens
cacactgtccaacggtgcggaccagcacgaacctggggccgagctggtgaggctgtgtggtcaccagcagcaaagaggtgctgtatgcctggtagccccgtggtcaagggggactgtcgggctagtcgggg

SEQ ID NO: 593793 - DNA, 250 bp, Homo sapiens
ctttacttcctatcaagatttgggaacttccctgtaatctcagcactttgggaggttgaggtgggtggagtgcttgagcccaggagtttgagaccagcctaggcgacatggcaagaccccatctttacaaaaaattagccaggtgtaatgatggacatctgtggtaccagccactcgggaggctaagaagggaggttcacttgagctcaggagtcagaggctgcagtgagctatgatcacaccactgctc

SEQ ID NO: 593794 - DNA, 163 bp, Homo sapiens
gtgggggcggggttcccccttttggcccgggggggttcaaaacctttaccttggggggtctccccccctttggcccccccaaggggtggtttttcagggggggcgccccccgcggggccccgctttccccctttaaaatggttggggtttaggggtgggggga

SEQ ID NO: 593795 - DNA, 927 bp, Homo sapiens
  misc_feature (460)..(460): n is a, c, g, or t
ccataggcgtcgaatcctacaaagtctctgctgtctgtgaataaatccaccagtaacccaacgttctccggagggcgcggactcattcaactcgctccatcccggtgctgacagcagggcagagatgggctatacatgcccccagtacatctcctacaggtacctcagatccacatgggagcagctgtgctggcacctcagatgtatccatatgctgtatccaattcagtgcctgggcagcagggcaagtaccggggagcaaataggctcccttcctccgcatgacgctcggaccataagacccagcacaagcctctagccccgcccgatgatgcacggccgcgcgggtgctggctcgctctggtggatgccatcgtccctattcttcctacatccgcctacaagacctcatgctagatttcccacgtgcgctagcctatggccaatggattgcgatgcncccaatggggccacatgactcctccttcgagcagcctggtggtttgcccctctagtgcttcagagtcaaacccatcgtcaatgctgaactgtcggggccacgtcacatcgcccgaggccatctgtgtcaatcgctctaccccctcagtacccttctgctgagcagtctaacccctatgcctgtatatgctcactgttcaccagtacctacttctatacacatgtctacgacagctctcaattgcccagtcatgaccgtcagctgggataaccattgccctactggataaccacggcggtgtcactcaagcaatgcgtgccccagtctgtcaaggccgcatctgtgcggggaggccccacgtctgtggtcagcggaatgcacagcaaatcttgtcgccccggggcctggtaggccggtgctgttgggcgggctttctggcgttcctcaaggagttccccgccaacgtg

SEQ ID NO: 593796 - DNA, 182 bp, Homo sapiens
tctattgccgcgagggtaaaacgcagaaaaatcatttctagaacattctacattacttcagtcttagaaaaagtggacccttaagtgctatactagactatgactgggaggcaaaattttttaaaatttcctaaggcacttctccagaagaaaacaaaaattaaggtcaggtcttcctcttg

SEQ ID NO: 593797 - DNA, 127 bp, Homo sapiens
gcgcaattaaagctgctggcagccttgaactcctgggctcaagcaatcctcttacctcagcaactaggactacaggcacatgccaccacgcttggcttctaatttatttctgtgtcaacaaaataaa

SEQ ID NO: 593798 - DNA, 344 bp, Homo sapiens
acacttgaaggtcgtacttccttccgctacggcggactgattcaccgctagactgtgtggcgtggagccggcagccgacggctaaaggtgtcgtggttggtcattaaagcggagacccggtccagcggaagcctgtcacctcctatgtgcggaccaccatcaacaagaatgctcgcgccacgctcagacagcatcagacacatgatcctgcaagaacaacgtaccgtcccgaaccatcgcatgtggaggcattcgcagggccagcgccatcctgcgcagccagaatcctgtgatggtgaagaggaagcggacccgccccaccaagagctcctgagccccctgcc

SEQ ID NO: 593799 - DNA, 152 bp, Homo sapiens
accggcacgaacaatatgagcccggcgagggaagttcggctactcgtgcagcttcacctgcattcgcaagaagattccctaccgtcctgcgttcgacggcgagcgtccgacgatcgtcgggccgcagacggcgattgtcgtcggcccgaagg

SEQ ID NO: 593800 - DNA, 490 bp, Homo sapiens
ggggtggaggggctgtagatgaccctggacatttgtgcgtgactagtgggacagtcacgctcatacagctgttccagcgggccaggtcaggctggtcgctccagtgcatgggggctgcaagtgcagctgagcttggagaggtatgaccgggaccacctggtgcgcatgaaatggcccagttgtgccaccaagtggaatcgtggtcactggatcttggctctggtttgccctcaggggaagcatctccaaccgtacatctgagcgtggtggcctccagccagcatgctctgcccgcagggcctgcttgactcctcctggcacctattactgagggctgttcatctcccaatagaaaggatgccgcctcctgagcccagaagcacccccggggtccagctggatgcctggaacttgggggggcacagtcacttcaggctgactgggcagtgcccgggcctggagagggggtctgctctgagcccacagtgaa

SEQ ID NO: 593801 - DNA, 310 bp, Homo sapiens
actctcgacgagcccccaggtgtcttcatgacactgaacaaaagcttaacaatcgtaatggtatactgttggcgggttgggctgaccccggccggtatgcattcatggagtcctgcctttaaaatcaccataaccctaaacacgtcctcattgacatcatgaagtgtaagtggaatggtgattttaaggcaggccccattattgcagctgtgccggtctaggccaaaccgcccaaactgtatcctttacaatctttaagcagttcttactagagtctaaatagtaacgtgccggaatcttcaagagcaca

SEQ ID NO: 593802 - DNA, 293 bp, Homo sapiens
  misc_feature (4)..(4): n is a, c, g, or t
aggnctcaacggaactttttaatatccaaaaaaatctaagctcctcccaagctgactctgagtctaaaaatttgaacatgtaatcatcactttgttggtataataatgatctcatttacatataaaatagatttaacattctgaaataattttacatttaatttgtgtaaaccctgtaggtagtcttcttgaactgtaagtcccgtgaggccagggatctctagtgcagccctttacactgaaagtccagttagtaatatttctgctgtttctggtaagtcaatataaaccat

SEQ ID NO: 593803 - DNA, 422 bp, Homo sapiens
cgatatctctctcctgggcctgaagtttcagaatgctaaggcaagcaggttgaatccagtgtcaagaggattacagagttctcatacattgctggtgggactgtcaaatggtgccgctgtataggaaagcagtccagcagtttctcacaatgctagacatagaattacacagtccactctgagtcccattccacattcaaggattgaaagagcatagaaagcatatgtctcacacaaaaaacgtgtacatcaatgcccataggagcataattcatcatcagccaaaaagaggacacaacataaatgcccatcgatggaccactggctccacaaaatgtggtatatgcatctgctggaatcttcttcagcccaacattccagccgtccaggggtcccagaagactcgaattcagtaactcatg

SEQ ID NO: 593804 - DNA, 393 bp, Homo sapiens
cctcagaggcagagattgcagtgagctcagatggcgccactgcactccagtctgggtgacagagtaagatccgtcgcgaaaaacaaaaaacaaacaataacaactacaaaaagagttaagtctctacctcaaagtgaacatgggttgtatgttacatgcatgtttgttcaataagcatgagtcaggatgaccttcataattattcatagctcctcctgtaacctgttgaatatgtatgtttagccaacctattcagcatcaagttcctacccctgctcctcctttgaagtgcctgtctctggtctttgccagagattgtacttcctggcctgtgggatggccaccttgcaggcctttaaccctttataagaaataaagtctcctctccaaaaa

SEQ ID NO: 593805 - DNA, 215 bp, Homo sapiens
gagagtataggccagttggtgcttcggagccaacgaggccaagccagatggtgagggggcttgcagtctgcaaaacataccgggggtggtgtattggggctacaattcccttaaattccacccggtcattatctgtgcttggacaacccagtgaaaaatgactggtgtggtgacacttttctcctttgtcagatcctgctccacgtcctcggcct

SEQ ID NO: 593806 - DNA, 86 bp, Homo sapiens
acggccgtgtattactgtgcgagagatctatttggttcggggagttatggaggctactggggccagggaaccctggtcaccgtctc

SEQ ID NO: 593807 - DNA, 225 bp, Homo sapiens
tgctgaatttataggtgtgagccattgcacccagcccctcagactacttttttagagtcccttgattggcagtagcgtcagcattcttatggttagctatttcttctataatcctgttaatgttggatgggaatttcatttccaactttatactttttggtttctctgctacccttacttcattcttggccaattctctccttctgttactcatttttgtaacat

SEQ ID NO: 593808 - DNA, 100 bp, Homo sapiens
catgaagggcaaggggacgtgagataagggtctaaaggtcattgtctcccgcagtgaagtggacatgttgaaagttaggtgtgagttcaagagagagtac

SEQ ID NO: 593809 - DNA, 471 bp, Homo sapiens
ccccctcataaaccccgggggcggttcccccccgcggttttttcctgggggggggggggggatcaatttcccccggggacccgcttgcgcctttgggcctttttgtggtgcccttatacccaggttgtgcccaaaacgggggggggggccgggcggggattcccggggaattcctttttgggcccccccccccccaaaaggggtttgtttcctaaataggaaaaaggttttttgggggggggggggggtttttttctccctttaacaccccccccccaaaaaccgggctttggggggggggggttttttggttaggggggggggtccccctttttcaaattgcccgggggggggtgggtttaccccaagcccggtttttttgggtcccccttttgtttttttttcccccttttttttttttttttggccattttccccccggggggggggggggaatttccttttttttta

SEQ ID NO: 593810 - DNA, 141 bp, Homo sapiens
cattagcaacgcttcttaataatggcttatcatcctcagtgaaaaatgtaatggcttttcccttattcccggctcttccagttcgacctatccggtggatatattccacgtgagctagtgggaaagtcatagtggatcccc

SEQ ID NO: 593811 - DNA, 144 bp, Homo sapiens
tagtgttgtagctccaagtgtcccttggtaaatgtgattgctagcaaaggggggtccgtcagggtggtgggccaggaagtgtcgcagagatggtggtgagagtggtagccgatgcgggagtcagcagagtgggcaccgtagcac

SEQ ID NO: 593812 - DNA, 170 bp, Homo sapiens
gctctacgaggatcccttactacttttattattacctcttctaaacaaatttagagtcatttgtcaatgccaaaaataaatctgctggaatttctactgaaatttgtatatatacatatatatacaaaatttatatataaatatacatatagagatacaaaaaaagagtt

SEQ ID NO: 593813 - DNA, 376 bp, Homo sapiens
  misc_feature (154)..(154): n is a, c, g, or t
gagtttcagatgcctttgagaaatgaatgaagtagagagaaaataaaagaaaaaccagccaggcacagtggctcgcgcctgtggtcccagcgctttgggaggctaaggcgggcagatcacttgagaccggcttgggcagcaatggcgaacccantcctctacaaaaaacacaggaattagcctgggcattgtggcgcacacctgtattcccatcctagtcaggaagctgagatggaagaattaattgagcccacgagttcaaggctgcagtgaagtcgtgattgtgccactgcactccaagccgggggtgacagaaagaagaccttgtctcgaaaaggaatctgaaaacaatggaaccaatgccttcataattcta

SEQ ID NO: 593814 - DNA, 285 bp, Homo sapiens
  misc_feature (68)..(68): n is a, c, g, or t
cccccccccaaaggtgggttttcccccggcccggggggggttttaattgaaatttttattaaaaaaanttgtttttaagttaaaacccaaataaaaaggcccgggttttttccccccccccccgggaaccccctttgtttaaagaccccgggtccccgttgggggctttaacccggtttttttatcccccaaaaacccaaatttttaaaatcccccggttggggtttggtttgggatgggccttttttccccccccttaaaaaaagggggtttgggtttttttga

SEQ ID NO: 593815 - DNA, 205 bp, Homo sapiens
  misc_feature (99)..(99): n is a, c, g, or t
  misc_feature (102)..(102): n is a, c, g, or t
tcagctcggccacgcttaagtactggaataagaggcagcttctggtagggctggtaatgttgtttattgaaacggatgcttgtgacataggtgggcccngtntgtcaaaaattcacaaaggtgtaggcttcagtatgtccatttatttgaatgtgagttatacttaagaacaagttaaaaagcaagaagattacattggctgcgg

SEQ ID NO: 593816 - DNA, 1516 bp, Homo sapiens
  misc_feature (792)..(792): n is a, c, g, or t
cgtcactatattataacattcccgtgtgttaattggcggcccccacccattgtgtcgcatccctcctcctctatttcccgtgtggcgccaagggataggacgtcccccgtatgtctctttattggggaagacgtggtgctgggcccccaccacatgttgtggtttgtttgtcttcttctgttttgttcgccgcccctctgtagtgcggccatagtccctgtttgtgcgcgcctaaaaagttttgtgtggtccccgacgccacaccacgccccttgtttggtgttggggcaaaacaactgtatataggggcccacccacgtgtggttcttccttggtcagaagcatcccccacacgtcccccaagtgtaaggtaggagaaaatgtgtgggattacctttcctcttcggccaaccgagcgccctattcttaatgtgatgtatagagaacaccacccgctgttggggaagaaaccctctattaatagggcgtgcataaatgacgcacccacagctgggttttttttccctgccggggcgacaacaaacaccgccaggtgttgttttgttttacccgtcgggggttttgttcggcccacatccctcgctgtttcgtaaaaaattgtcctcttcttcaagaagtcctgcttataggtgtaggattgtgcccgccgcgtgttgttggagaaagattgtccgcccgcggtgtagtaggagtatggggccccccccccacctttccccgcgtttgttcgcctctctgttgtcttgttccccccaccgcggttgtgtggtnccccaccggcgagaaatttagaaatgtcttttgggtgttttgtcacacctcagcccacacttttgatagagagatgtttccgcgctccgcctcttgtgtcccccactgtcacgtcgtccacctttgaaaaaagtgccccccctgtataacacgcgcaaaagaaaatattgggtgccaccgtcgagaattggcgagaattttctttctctatagagagagagccccctcggagagagatttataagaacacaagaccctatcatttttgggaattaacactctaataaggagaagcgcctctgagacctctcccccgctaagaatgtgggaatttttgttctcgtttctttccctctttcttctcttctggaccccaatatgctttaaaattagccacgctaattatgttattgaggtcttgggttccacgcgtgttcttatttcttgttggggctgaatttcccacaaagccacccatgctgcctgaaatgttatcccgcggagtccctcactatcctcaccacaatgccacaaccaccttatactaccacggcctctttttctgtgtccacactggaaaagcttgaggctcacacactccaaagatcacagaggagcctatcaagaagagggctctttggtttgaggagcccatggcttacctttcctgcctttgagcccctcaccaccccctttcctcctctttccctctcccccctgccca

SEQ ID NO: 593817 - DNA, 847 bp, Homo sapiens
tgtacagagctatctcgccttttatgactgcggcgggatccgcgtcggcgttaccctgtcaagagactttgctagcccacagaaatgccgttctcagttcacggatctaaatggttctaaaagatttcggcatcaacactttggcacgatgcagagtgggatttatgctaattcagatgtaaaacagaaactctatcccttgactagtgggcctattgtgccaatttaaaaataatgtctggaatcagcatctctgactattgaaaaatggatgtagcagagtgatgattttctatcttaataaatgcataggaagtgttaaaaaaacgccaaacatcggactccatggcctcaacgtttgatctttacggctgttacctttccggaggcttaataccggatactgaatccctacgactcaaggtactggatcactaacttatagactcaagctccttctccttaatgggcgtatacccgtgacccgatcacacgacggattatcgcactccaaacttcctttcggagaggcggtaaggtagcttcgtaaccagtaacagcgggtctcccctgccgacggcgtgttgggttcacataccgcaatactgagttcgggtatatccgtcaacacgcaaggcgagataatcctctatcgccagtccattccacattctgattccaacacatagccaccattcaccggactgggtattgcctaccataaaattgacatacatccctccactctctcatgatctcgaggtcgatgagccgcaacactcattggtcccgccgtggctaagcgcgcagcacaggctccgaagcgagctggaaagaattgttggag

SEQ ID NO: 593818 - DNA, 380 bp, Homo sapiens
tgcagcagcacacagcacccagaccatatgacagctggatgagcatcctggtgcccaagagggtgcatgtgatcctgcccatagttcacagctgtagcacagacagatttgaaggagccgctgaatgttcttgggattactgacatgtgtgattcatcacaggcgaattttgcacaaattcacaaggtcagaaaacctccatgtttctcatatcttgcaaaaagcaaaacattgaagtcagtgaaaatggaaccaaagcttctgcagcaaacgacagcacatggtacaaaccaatcattaccaggtttctggctaccctggttcacattgaatcacagccatcgctggcagcatctatccaggtcagggatttctaaagg

SEQ ID NO: 593819 - DNA, 861 bp, Homo sapiens
ggacagactcagttcactgaatagggaaaaggagtgacaagacggaagtccggtcaaagccccaacagcttggtatttctccagtcccggcgcagaccccggagcctcctcgaggcactcccttccatgcattctggacatcatcggccagatataggttgtggatggattagacaggacagtctcatgtagggtgcacccctagtgcagtcaatctcatggtgactagttaccggtttggcctttttcttggcaggtagtgcctcatcgcacaaagaggctggtactcgtgttccggaggctcggtagagggttcctggtgtcctgtctaggattacttgcgcaactctacagaagggctcgaaagacagacagatgtccgggaacatagtgagtcgggccaaagcctaacattgcgatgcacgagccaggatgagaaaaacctggaaggtgagtggactcctatgaggtagcatgcactctgtccaaaattccttggacgaagcgtcccagttgccaggaatctcatctaccttcgaaacctggaggttgctctaagggtcatagactcctctctcacagtcaggctttgtgctcaattgtgcttgccctcctcagaggccaccttccttaccacctccgttcccatttctaatgcttgttctgctcgcctactgttgttggtggtgctgatggaatctgccagagttgagtactatgtatttatttatctatatggtctaatgcgcaggacattgtcaaataagccttcaagtcacaaagtaaatgggtccaagcaatggggtacgggcgcagggatgcccttttccaccccaatattaagtccgaaaataagggaag

SEQ ID NO: 593820 - DNA, 515 bp, Homo sapiens
ctcaacgcttatacttcattatgtacattcacaccatgtacaaccatcaccaccctccactgccagaactcttttcatcttgcaaaactgaaactctgtgcccattaaacactatctcttcattctcccctactcccacccctgatagccaccatactactttctgcctctataaatttcattactctaagtaccagatataagtggagtcacacagtatttatcttttttgtgactgacttatttagcataatgttctcaaggttcatccatgttgcagccaggattttcttcctttttaaggctgaataatattccattgtttgtatttttatttttattttttttttttggggaactaaaaaagaactttatttatgggggcgcaggggatgcaaacaatacaaaaatcaaaagcttatcgggtatttaacttttctttctcggctggtcaacggggagtcagattttattttcacattggctaagtgtccggatctggtcatgaaatcctt

SEQ ID NO: 593821 - DNA, 486 bp, Homo sapiens
gggggataaggtagagatgacacttgtggcctgattaaggagttcgtactctgtccttatataatgtatataaactattcaggccttctaagcaatgatatgtggtggctcagatctttaccttcgagaatgacatggtatggagaatagattcggacgaggagcaagatttggcggcaaggagaccagttaggaggactaactccagaagatggatatctgatgattgtccatactagagatagtagagaacgaacgactgcgagtacctagcttttcatgtctctgtatgggtaaactccttttcactggcccgttgaatcagtcttccctacattttaccccatgggttcatgtactgtcactgtgctttccagatgtgtcaaatatggtagattggctggtatacttatattcgtgagctcacataatggtatattagccgtgctaatatgagtttaaagagtgagttcagtggaagtataa

SEQ ID NO: 593822 - DNA, 345 bp, Homo sapiens
gcctctgtccctttgggcacgcctcatgccaggtgcatctgtggacaggggccatgctcctgggcttccaaagttggagaaaactgccaggctcaggtttgaaggccagaattttccagtaagtcctattgagtcaaggtgggagcagggtcggtagcttccaaggctttgcgggaaaatctgtttcctggccgtaaaggtggcctgccctccccagcctgtgttgcccgttttgaatgactggagtttcctgcttctgtccctacccctccccccccaatcccaaattttgttttggttctaactccctccaaaatgtgttcaataaaatgcttttataatata

SEQ ID NO: 593823 - DNA, 194 bp, Homo sapiens
tcgcggcgcggtccacgccggggcccttgccgtaccacatggcgaagacgccatcgacgttgcggtcggcgcgcacgccggcctgctgggtgcccatgacggcggtggcggccatgtcttcgttgatgctgggcaggaacgagatctggttggcgtcgagcgccttctgcgccttccacatcgccatgtcgacg

SEQ ID NO: 593824 - DNA, 391 bp, Homo sapiens
cggaccaggtctttcccctcaaatcctaaaatgtgtgtcttcaaagaatcgtggaaaggactttgaatacgagtttgtaccatattcaagtattcttgaatacaggtttcagataactatggagatgataccattggactaggtaaaaatttccaaaattcgaataaaaaactgatgtgttaatgaagattgctaagccaacatgaaacagaacaggaattaattacatgggactgaactgatagaggactgaaatgattttttaatcactttttgtttgaaacattgttgattcttctcatatttgttttgccagagtccacattttttttgggccatttatagctcatagcaattaggtgaagtatacttttgaggggaaaagaccctg

SEQ ID NO: 593825 - DNA, 135 bp, Homo sapiens
atgaatctagaggatccctaatcactatgtcgtgagagataagattactgagctccgtgtcagaaactctctgtctccaagcccacagtgacaactggcagcggttatggcttcacggtgccccagtggaatgag

SEQ ID NO: 593826 - DNA, 262 bp, Homo sapiens
  misc_feature (5)..(5): n is a, c, g, or t
  misc_feature (125)..(125): n is a, c, g, or t
  misc_feature (129)..(129): n is a, c, g, or t
  misc_feature (139)..(140): n is a, c, g, or t
  misc_feature (185)..(185): n is a, c, g, or t
ccccngcaaactggttaaccaagtcctgtttgctttcgtctttttttgtgcgtaataaagtcaactgaccaagtgaccatgaaaaggggtctgtctggggtctcctgttttttagtctgctgttncttncagtctccgnnccatgttgcctgtgtgcattatctgcaattggttttaattgaggncgaaaactgaaactctaccaatgaactgtttagaaacaagtacacacttttgtattaaaattgccttggcagtaaca

SEQ ID NO: 593827 - DNA, 279 bp, Homo sapiens
ggcaggacactgtctgataaaagcatcatgtgattcattatactcaattttgtatatgaggtgaggtaagggtcaaggtttatatatttattatgagacagagtcatgctctgtctcctggccagagtacagtggcgcgatcttggctcactgcaaactccacctgccagattacaggtgcacaccaccacacccggctaatttttgtatttttagtagagatggggttgccccatgttggccaggctggtctggaactccagacctcaggtgatccgc

SEQ ID NO: 593828 - DNA, 90 bp, Homo sapiens
atctaaaacactcctggaccattaacgtaaattaaatgtcttaagagatatggatatagatatagatatatttatatgcatatatatttc

SEQ ID NO: 593829 - DNA, 412 bp, Homo sapiens
taagcacatggttagatcactgcgatctcaatgggtatagcaggtgtatgtcaagcggcaagctaaagggtcgctgcagcggcattatatgccaatgattatgccgttctgaaaagcgtgtagtcccaggaaagtttccatagttggcaaaggtgaccagttagaatggctatgtcgtcaggtgtgctggctccagtccacagcctgatgttcccttctttatacctgtcgcagttgctcctcagatgaaggtataaagtcatgtcccttcaggtccctcttcgtagcaaagcctccatgggtaatatagggctaagatcagtgaatcgcagaatcgatgatttggacaggcaagtgccgcatgtcttagagtgtagtgtaggctgaagcgtgtgacagagaggtgtctccc

SEQ ID NO: 593830 - DNA, 236 bp, Homo sapiens
ttgatgagctcggtaccattcgtcgtcatctgcagtacatcgagggcaatggcgctttgcgtacgcactgcctgctcagacctacgatgagatctcgatgttgatcgaccgcggcatcaagccgtacctgtgaggcaccgccccctagcactcctcacggggcgctagggggcttatgccgtcagtcgatttttaacccaggtggtcgatgtccagttcgggcaacggccaatcct

SEQ ID NO: 593831 - DNA, 511 bp, Homo sapiens
  misc_feature (54)..(54): n is a, c, g, or t
tatgtggtaatatcttactgttaggaaaaaaacgggagccttagtgtaacccanaggccttgaacactgaacaccacaaaagaagtgaaaatagccttaactgctgacattccaccattgtggtttgtttctgccccactctaactgttcaatgtactttgtaatctccccacccttaagaaggttctttgtaatctccccacccttaagaaggttctttgtaatcttccccacccttaagaaggttctttgtaatcttccttacccttaagaaggttcttattatcttccccacccttaagaaggttctttgtaattccccccacccttgagaatgtactttgtgagatccacccgctgcccgcaaaacgttgcttctaactccaccgcctatccccaaacctgtaagaactaatgataatcccaccaccctttgctgactctactttcggacccagcccgcctgcatccaggtgaaatgtgaaataaacctgtggcctcgttggcctca

SEQ ID NO: 593832 - DNA, 107 bp, Homo sapiens
cttccatctgtcatgtgtcagcatggcatggaccctgaactgatcaatgcaggtggtcaatgcagatgttctacatcatatgtgggccatcaccctgaacaaccttc

SEQ ID NO: 593833 - DNA, 305 bp, Homo sapiens
ttccccgcgtcccgtttgcgcagacagcaggtatactagatccgggccctcaggggtctcgtttcttgctcacttctgtcttgacagaagcattgctaaaatgtatcccctctcggtccaacaacaggaaacctgactggggcagtgaaggaagggatggcatagcgttatgtgtaaaaaacaagtatctgtatgacaacccgggatcgtttgcaagtaactgaatccattgcgacattgtgaaggcttaaatgagtttagatgggaaatagcgttgttatcgccttgggtactacgctttggca

SEQ ID NO: 593834 - DNA, 269 bp, Homo sapiens
  misc_feature (137)..(137): n is a, c, g, or t
  misc_feature (159)..(159): n is a, c, g, or t
  misc_feature (235)..(235): n is a, c, g, or t
  misc_feature (249)..(249): n is a, c, g, or t
ttcttaaacctatcatcatctgaaatagctggcccatcaggaaggtactttgttgggtgattccatttggccagagaaaagtgatctttgttttccaaccctttctcctgttccaaggcaccagccagagatttgcnatatagaagttatcacggtcangagaattcgcggtggtacccaagtgatagtctatctctcatcatctcgtggattccactatttgcaaatgcacctnatttgtaaccccanaagtccgtactcatgctgac

SEQ ID NO: 593835 - DNA, 1366 bp, Homo sapiens
cccacgcgtctggctcgcaagaggactggcagagtgcccggcagctcggagctccgtggaccttgtgtgctgcatcatggactgctggcttgtccctcttgcctgggacccatgatgcctgcctgcctgcctgcttctggccttcctgctgttgttatgcgctccttctgctgctgctcctgtgtgcatggctgtgcctgtgtggagcctgcgtggtgtgcgatgtgactggctgctgatgtgcttgcttgcttgcttgccctcctgtggccctgctgtctgtgcttgtgaacactgtgatgatgtgcctgatgccaattgctgtgctgtgcctccattcttattgcttgtgtgagtgatagcttggacgatgctaccgcctggacttgcaatactgctgcttgaaccggactgcggccgtgccttggatgaaatgcctgcaagctgacctgtgcgttttgttttgcacggctcgttgtgacccggaccaacacaccgctgtttgccatccaccttcaagcactgatggaaactgtgggcttgcatggccattactcgccggcgccaaagcgcatggcttgcacatcaacccacgccactgcacgcacggcaacacaatgcaatcgccacgccaacggccactgcaatgcaaacgcagaacatggcacccaggagcatcgcggcgcacctgatgcacctggacagcccagattcaccaaaatcaccaactgatgtgtgacccccctggcactagatcatggcccaatgatcacaatacggaaggcccatggccctgggatccacaccgcctcctacatgggacaaccattggcacctcttcttcccagccgagttgaacagaaccctggcctgcgaacccttgtattgattgagacacgccaggccaactggggtgcccaccatgattagccagttgcttacgctttcaaccttgggctggacttggacctgagccaacgacagctggttcaaatggggatgacatacggaacccttatatcacgggaatgcccccccggaccaacggaaccgcagagggggacccttgggacaaaaccggccccggcacgaactctcacacccggcattagccaacgagaattcgggcgcatcgcaacagggaaaccacacaggcaacatccagggctcccaagcggggcccaactacccctatgggggccaggggatccacagcaattccaaggcgaaccagcgacgacagaaactagccacaagcaacggcaacagcccttcggcggtcccacaggcgccacacggacacagggacctcccccgcactcgcacgagcccaggcagagcccggacacaagcagcagagaagtcg

SEQ ID NO: 593836 - DNA, 977 bp, Homo sapiens
tgggtacctctggcacccaccatgagggattggttctgagctggaagccatccctctggtgggtacctctggcacccatcgtgcaaatatctccctactctccaatcaagatggacgtagcatccccctggggcacttgcatgaggcccaagtcgcgactcacatcctcgacttatgcatgtcccaccatcgtgctgacaactttccattagaagccatggttatgctgtatcggtcaataatctcaggccctttggcgctgggctcttgtggtctgtgtgcattccatggcttcatgctcaagaccaccagaggggtctagggttggtaggcctgtgcttgtgattctgctgctatatgtcgcgagcttacagatgccgaatgaggatagggacctactggagctacgtgggcatggggtccctgccttgtcggtgtacatcatgtgtgattctggactagcacactctgtcaggtagggccgtcgaatctcccatctgtgacatagagggactctcgaccttacgtgggacccgtccattgtttgctgggtatttagccaaagcgtggtcctggagaagaagtgcacgatagcgtgtctcgatggacttatccataggccttggacttgtatatcttagtgccaggaggactaacaggatcctaatggggagctccgtggttgctcatgcgcaagacaggtatcatacatagacacccagaagggggcactatgaggccctgtcgtccgccagtaggccagtacgggaactcgtgccgttcacaatcacaagggctagttccaggtcccacagggccattggtactgctagtcgaggggggacagggcctgtagatgtgggcactccaggagttcctctccagtgtatgccctattctccttgggagccatacttgaacaacaggatagttcgtgcggccagggagatcaggcccatggaacgccgcacccttaa

SEQ ID NO: 593837 - DNA, 1322 bp, Homo sapiens
  misc_feature (858)..(858): n is a, c, g, or t
ggagatcctcccttgtccgacagggtgcggcgtgcatggtgaaactgagcataatcagggcaacagctagagagcgtacatccatcctcatataacaatgcgtgagtcactatgtttcgcacattccgactgtggcgtcgttaattcgcctcttggtgcactattacctgggattgtactgacgtgggtgcaggattactcgcgaaactgcctgtaacccaatgtgctccagactcctactttgagtgataggaggcttatcctgggtcttctggattcgagaggcaatcagtgaagcagccataggaacggattgtagtgtcatcttgtgcgtccggcaactacatgacgatgtggatcggactcactgcacgtcaactagcttggggagtggccaacaacggggtcttccacactagcggcagtctgtagtcacctacctggaactatgttagctacagctgtatgatacgacattgtatcacgtaagataaagggtcgtcaatcataccatggttgattgacagacccttcgctaattagagagtaccctccaagtaagcggggcgattccgcccccttgtgagaggacgcggacttcccaagtagagagcatttgcgcccgcttccgtggacacttgctgtgccttcgattcccgccctagggggacttgctggatgcgccctattcttagacgaagcccttggcggccatcaagcaggtaatagggagagcgtaagccgtactcggcaagatggcggttatggggctctgaatatgccgtacaggggacccacggtaaagtcaccaggaccctagtgtgcgcgcacccctgaatagtcttggttcgttcagangggagttgctcaatggaggactacaggtcctttggggtgttcccccatatacgagggcggccccccctaccacacgcggggaaattgcaggccacctacgcaaggcggccagtaaggacggtcaatcctttagggccgctaccccttcaagttagcccctgccttagaaatgccccggttaacaggcgtgtaacaataaggttccgtttataagtccatcccttttggttgggcccttagttggaaacacctgaggttttatcaactaaaggcgcttcgtttacacgacaggaaacccattttatcctcacaacaaaaagacacggcactctgtcgctgcagtgcaacttcgtgaaaacattagagaggggttgggagagcgagacagcagaggtagacagcgagagaactaggggagcagagtggtggtcacatgaagcagagtgtttcccctggagacacac

SEQ ID NO: 593838 - DNA, 351 bp, Homo sapiens
ctttactgcttatacgcgcgagagcgcgaagatgcggtgaatgagattaccgaggctagcagcggcatctggctggccctgtgcaagcggcatgatgtcggaagatgatcagcttcatatgaggtaggcgtgcaggaatatgagcacggcataagctgaacgtgctgctctgatgagctatcaccccactgctgaagtcacacattgtacacctggatgtcaacaacctggcacaattgttactgtccttcaaagatcttaagcaaaggtatatctgttgctgaaggatgaacctttctcaagtgaatgctcagcgtaacacttagtagacgagaggctagcgaccgttgg

SEQ ID NO: 593839 - DNA, 184 bp, Homo sapiens
catcagcgttctcgcagtcatcacagctggttactgatatctgaaggaagattcggcactcgtggggctgcagcttcatcagtttctcagagtccctctcctcatgagatgggaggaacgtatgggcacgagttctctcaaagccagatcatcgcggtcaaagtagtaacgacatggacaggtg

SEQ ID NO: 593840 - DNA, 1196 bp, Homo sapiens
  misc_feature (310)..(310): n is a, c, g, or t
  misc_feature (370)..(370): n is a, c, g, or t
cccacgcgtccgcccacgacgtccgcaaaattagacccccgtaagtaagagattcaagttaaccactcattcatcgacctcccccactcccgatcgcaacaatcatccagtcaatagatgaaacgttcggcgtactagcgtccgttgagcgcctgtcgcatggatccatcctaaatcatcgcaacgaggtactattacctaagcgcgatgtcacgtaactgcacctagacgcctcaatccgaccgtttatcaatcagatcgcgcacagcagtcacatcgaagacggtaagagttattggcatgaagtcantccgacgtaccgttcacgtccaagtggacggccgtcaaatagttcgttgtattcgtgccntcgttccgtacatgcatcggggcgaaggcctatagttagcgggatcatgttctctgaactcgagacaacctagataacatacgagcattgatccttcctgacttgcaactgatagcaagcaggcttcataggctatgtcctcccgtgaggccaagatatcattctgagggggccacagtaattacaaacttactatccgccatcccatacattgggacagatctagtgcaagtgaatctgaggaggctattcagtagacagtcccaccctcacacgatacttgagctttcacgtatcatacttacccttcatggattgcagccctagcaggactccaactcctattcgttgcacgaaacgggatcaaacaaacgccctaggaatcacctaccattcggataagatcgactttcgaaccttactaaagcaatcagagaagagctcgggttacttactcttcctttctctccttaatggactttaacactattcttaccagaactcctaagggaccagaaaattaacctagtaaaacccgttaaaaaccccgtccaaattagagccgagggagatccaataggcgcaacaaattcgagcaggcccaaaaacaaagagcgggggcgaggcccaaaaacatcacacgacgtcataacagaaaagccaacccagatttgacacacagcacaagtatcgcacagcacaacagtagtcctcagagcacactcacagcagagaggagaaccacacatgcagaacaccagtcacactgaccagccaagtcacgcagaacaaaagaggcgcgggcgcctcctctccagcaatattt

SEQ ID NO: 593841 - DNA, 466 bp, Homo sapiens
cacgagggcaaccgccgggcctgccagtggtacctgcgctaccacgagtgtcgggaggcttcgcccatccctcatgacggcatctcccgtggccacatcgaggacagttgtccccagttcctgggacgcagccccctggtgatccccatggaccactctacagacgtcaccttccacgggcatcaaactggacaccgtgatgggttcctccctgcacgtgcgcagtgacttgctcaagttcagtggtgccggtgaccatgcaataagtctgggaccttcgcctttcggaccccaaagctgtcccaccatgtcattgagacgctggccctgcacctctacgtcaagtcttaagggaacaatatctatagtccgctccatgtgagcctctagatctgctcctttgcccgcagcgactgcatcctgtgccgggtcgcatttcccgtttacaggtgtgcgtggtgcggcg

SEQ ID NO: 593842 - DNA, 184 bp, Homo sapiens
tacgggtagcatgtatgagatgagccatgataacattccagccacgtggctgctaaacaagtcagcaaaagacactgcgtgaaaccctgagcagaaagaggccttctggtatggccaaagcccagattattaacatgatgtctctgctaaaccaagcaggctaccaactatgtatacccggcct

SEQ ID NO: 593843 - DNA, 196 bp, Homo sapiens
ttttgcctctggtcaaagtgtttgctgcgtcgtcagcctgtcccggggaggcgctccgtcggtccgggtagcgccggctcgcggctccggctctggcgtgggtggtcccggctccgaggagcggcggtggctgcgcgtccgatgccggttctcgttgtcccgctcttgtgtattctcgttgagctgccgcacgacg

SEQ ID NO: 593844 - DNA, 291 bp, Homo sapiens
cgtcgttcggctgtccggtcggagcgtagccgacaccgctgcacaccgatgctatcaatgggtaccggagagagaagaggtgtctgccccgcaacctccccgtgtggctgtcactggccagatgtcatgagggaagcaggccttgtgagtggacactgaccatgagtccctggggggagtgatcccaggcatcgtgtgcatgttgcacttctgccaggcacagggtgggtgggtaccatgggtgccaccctccaccacatggggccccaaagcactgcaggccaagcaggg

SEQ ID NO: 593845 - DNA, 377 bp, Homo sapiens
ccccccgggccccccccggggccccccccgggggcgcccccccccaaaaaaaggtttcaaggttggtttgcccccccccaaaaatagggtttttttcccaataaggcccgcccccccaaattttcccccttgggaagaggggggggggttgccaaaaccggtttttatggcccgggtttttaggggggggccctttcgggggggtcccccccttttggggggtcccccccgggccggggttttaaaaaataaaatcccccccccccccccccccccccccgttttttttttttttcccaaaaaaacccttggggatttggggggcccatttggggcccccaagggggccccgggggaaaaaaaattttttgggttta

SEQ ID NO: 593846 - DNA, 268 bp, Homo sapiens
gctcgacgtattatgctctgagaaggaaaaattgcccaaaatttccctatcaaaggaaactgaaggatccagcctgggcaaacatagtgagaccttgtttctgcaaaaaataaacaaaattagccaggtgtggcagcacatgtctgtagtcccagctacccaggaggctgaggtgggaggatcacttgagcccgggaggtctaggttgcagtgagccgagattgtgccactgtattgcagcctgggtgacagagtgagactccgtctc

SEQ ID NO: 593847 - DNA, 140 bp, Homo sapiens
aaacaccgcaatctcactaacacctgtagtttcttgacatatcaataattgccattttgattggcatgagatggtatctcattgtgggttttgatttggctttaggtcttgatgaccagtgataatgagcatatgttcat

SEQ ID NO: 593848 - DNA, 861 bp, Homo sapiens
ggaacgccgcagttcctgatggcggcgcatgcatcagacaaggtctcgagaccgtttcagctggatcatgcaaacatgcgcccactgctggtacggcattccatgtacgcgataaaatcggcattcagacgactgtccatagatgccaatagtgcagaaaagtcgttagacagccatgcttatcgtcggcggtcgaatgactcttgcagatatgctgtcttggacttatgatcaatttgtcatgcatgtgagtcccatagtgacttctcacaagcagttgtcaatgagtgtgatcgcgagccattgaagtgtcaagtcccaagatttcattccctcctgtcgttcgactctttagccttctgcagtgacttgcatccaggagatatgttgcattgcctttcgcaattgcaagccttatgaaccactccgctagatattgcatatggagcagatggagaagtttttgaatgattgcaaatacccgccgcagcctatcgagctacggactttcagctgcgtaccacttagtgcgctcgtagtcactgtgctggctctgcgtcttcactggaggaactgacatgtgtcatctatgtaatgggacgaatgcctgttcaaccaggagagagggctatctgttggaatttcggtgcgatctgctaagtcgttgtcgaagcaggattgttaagtcccactttgcccctcgtcagctcaaagttggtttaatacacgatgtgctcgaagtcggagtccttgctccaataagatgtggattgaccaagattttaaaagcaccagacctgctcctatgacccagtgcgtggaaacagctagctttctccagtgccgccatctgtcgtctaa

SEQ ID NO: 593849 - DNA, 181 bp, Homo sapiens
  misc_feature (19)..(19): n is a, c, g, or t
  misc_feature (169)..(169): n is a, c, g, or t
atcagcgacgcacccggcncataaatccaccatttctaaagtgtttatagtagaagtagtattacattattgcaaaatagtaagtgaactcatggaaaatggagtttatttccactgaagacttctatgccaggatagtggggaggaagagttcactcagaggtgcgtngctgatcacctc

SEQ ID NO: 593850 - DNA, 233 bp, Homo sapiens
tccttgcccctcccttgggggtcccccaggaagccaggtgaccccaggtgggagcctgtgtgtggaggccttcctggaaggaagtttagccctgcccaggtgtggagcgaggggcacaggggcttcctaccctcagaaactgaaataacgcctttgaaaaaaaaatttgtaaaccttccccccccaatcagaagatggcaaatggggaataaaaatagcaggtaaaaagtcca

SEQ ID NO: 593851 - DNA, 320 bp, Homo sapiens
tgctgatcactagcagggaggggacgccagagtcacgtacttaagtcgctactgacgatataagtgctgcgacagagcggattagaggtaggtggtaacagaggcatctagaagtcgtggtaacagaggtgctacgggggctgacgcttcctgctgaggaagggaaaccaatcatcttggcgtcctggccctcgagcaggctgcggtaggtggcgatctcctgctccagacgtgtcttgatgtccagacagcatcttgtaactctatggttctaggcactaccatactcactagcgagagctacgctcaagctaggagcc

SEQ ID NO: 593852 - DNA, 1218 bp, Homo sapiens
gggcgtgcgggttgtgtctacgctgtgcgcggcggacgtcggagtgcagctggggagcggagctggggccgcctgtgggcctctccatgggcctgcagctggcatgcagttgtggccccccagccccgtgccggctggaccgacagaacgcaggaatgtgggtgcctgtgggggacccctgaaccccgagcctggccagacatgccatgaacatccatactgtaggagaacctacccccgacacatcatccgcctggtgtacaaggacggtgactgacactgaccagcagacccaccctgattggcatcaaggtctattcccaaacgaggaggaccttcaccgacctccagtgtcagcatacgagggccctgagtgggaccaccatatagctgcgaggtctgtaaccgcaatgaaacttcctagctaggggaaaggacttacccctgcctacccacaacaccaaggtgctaactatacctgaccaacgatcttcacaaccgaaacgttggagcgcccaatgggcgcagattctgacgtcaacgatgctcgaaggagggactggaccggctgagcatggagcatccgaccagcgtacttgctagaccatcaagtgcactagctagatccaacccttaacccccgagtctagaactccaaacgaaggacaggcataggcctgccttgcttttttggagaaattaaccaagcgagtactgcgggtccgggaccagatctaggtcaccaagaagataccaatggaggccaccacggcgggaccccaaacgcgggcaatgaggcgcgcagagctgggtcggtggccctgaggcacagagggacatagaagaattccattcaacagaaccatgagagacccgagagggccagagacggacaacagcggtccaattgccacgaagcatgttagaaaggaaataaacgttgcggccatgaaaaggacggacaactaacacagatacatagtaactacatatatatagacattaatccaccttttcccgtgtagctccaaactacttatttcccaatccgtcaaatttatcaaaagaataaaacaatgacagagacaggaaagaaaacgccaagtgactgcatgttttcacaactcggcacgatcacaacaaaaaacaccgacatatgcaccagcaaaacatcactatcaatataaagtccccatttaaagaataacacactccaca

SEQ ID NO: 593853 - DNA, 325 bp, Homo sapiens
ccctgtctctgaacttagggtgccggcacttgctgtcggaagcatcctggtggcctccccttagtgtgtgaagctgggggactttggtctttcccgagggcggttgagtgcacgaggactattacaaagcctctgttgactcgtctccccgatcaaatggatgtccccaggagtccattaacttcccgacgcttcacgacaccccgtgacgtcctaggatgttcggcgtgttccatgtgggaatttctgagctccggggcttcgggccttcttccgtcttctggctggaggaatgtcgttgtcatcgtggtgcagaggaaagggg

SEQ ID NO: 593854 - DNA, 188 bp, Homo sapiens
gggatttgctgaatatggcggtatataagctgagcaagaggtggtgaggttgatcgggggtttatcgattatacgaaaagtgcacctcatagaggtatatgaatgcaccgtcgaggtctctttgatattataatgctgtatgtgtcgataatgttctgggcgagcacgttttgattgattctacactg

SEQ ID NO: 593855 - DNA, 303 bp, Homo sapiens
tgtagtgtggctcatggcactttttcagaccatgggtgacacatactcaactctatagtcatagctggttccggagaacacttctcaagaggtaatcgatgtacatgcagtaccaaaaaaatagtgcactccagttgtgccctcttgtggttaaagttaaatctttacagaatttaacctattttccatctggtggggagctaaacttgaacagcctctgcgtttctgaccaagtcctgttacgcctatttatcaagccacattatttagaagaccacaactttttttaaatcattccccttc

SEQ ID NO: 593856 - DNA, 771 bp, Homo sapiens
gcaaatggataactcgttttaagatgggacgagatgatgttgaagatgaagccctcaaaggcagaccatccacatcaattttgcaaggaaaaaattaatcttgtacatgccctaattgaagaagaccaataattaacagcagaaacaatagccagtaccatagacatctcagttggtttaacttacacaattctgactgaaaaattaaagttgagcaaactttctgcttagagtgccagaaccattgtgctcagatcagctatagacagtagcagagctttcaatggaaattttaaacaagtgggatgaagatcccaaagcatttctttgaagaattgtaacagaagatgaaactgattttaccaggatgaccctgaagataaagcacaatcaaagtaatggctaccaagaagtggaataggtccagtcaaagcagaagcagactggtcaagagcagaggtcatggcaatagtttttgggacgctcaaggcattttgcttgctgactttctggagtgctaaaaagcaataacatctgcttattatgagatcgtttgagagagttagccaaagcattagtagaaaacaaccagcaaaatctgcactacagagtcctccatcatgacaatgctcctgcttattcctctcagacaagggcagtttgcaagagtctcagtgggagatcattaggaattctacccttggtcgtctgatgtggctccttgtgactgctgcggttgcctaatcttaacacaacattttctcgggggcc

SEQ ID NO: 593857 - DNA, 153 bp, Homo sapiens
tagcaggatcctttatgttctcgatccgttagtgggagctaagttgcgaagatgcaaaggcataagaatgatatagtggactttgaggactcaagggttgaaggatgagactacacattgggtacagtgtgcactgcttgggtgaatgagtgc

SEQ ID NO: 593858 - DNA, 688 bp, Homo sapiens
  misc_feature (4)..(4): n is a, c, g, or t
  misc_feature (92)..(98): n is a, c, g, or t
  misc_feature (118)..(118): n is a, c, g, or t
  misc_feature (126)..(126): n is a, c, g, or t
  misc_feature (165)..(165): n is a, c, g, or t
  misc_feature (167)..(167): n is a, c, g, or t
  misc_feature (183)..(183): n is a, c, g, or t
  misc_feature (189)..(189): n is a, c, g, or t
  misc_feature (193)..(193): n is a, c, g, or t
  misc_feature (197)..(197): n is a, c, g, or t
  misc_feature (199)..(199): n is a, c, g, or t
  misc_feature (202)..(202): n is a, c, g, or t
  misc_feature (214)..(215): n is a, c, g, or t
  misc_feature (218)..(218): n is a, c, g, or t
  misc_feature (230)..(230): n is a, c, g, or t
  misc_feature (232)..(232): n is a, c, g, or t
  misc_feature (260)..(260): n is a, c, g, or t
  misc_feature (270)..(270): n is a, c, g, or t
  misc_feature (281)..(281): n is a, c, g, or t
  misc_feature (322)..(323): n is a, c, g, or t
  misc_feature (328)..(328): n is a, c, g, or t
  misc_feature (332)..(332): n is a, c, g, or t
  misc_feature (349)..(349): n is a, c, g, or t
  misc_feature (353)..(353): n is a, c, g, or t
  misc_feature (356)..(356): n is a, c, g, or t
  misc_feature (361)..(361): n is a, c, g, or t
  misc_feature (383)..(384): n is a, c, g, or t
  misc_feature (390)..(390): n is a, c, g, or t
  misc_feature (394)..(394): n is a, c, g, or t
  misc_feature (402)..(402): n is a, c, g, or t
  misc_feature (414)..(414): n is a, c, g, or t
  misc_feature (430)..(436): n is a, c, g, or t
  misc_feature (447)..(447): n is a, c, g, or t
  misc_feature (458)..(460): n is a, c, g, or t
  misc_feature (467)..(467): n is a, c, g, or t
  misc_feature (497)..(497): n is a, c, g, or t
  misc_feature (546)..(546): n is a, c, g, or t
  misc_feature (549)..(549): n is a, c, g, or t
  misc_feature (555)..(555): n is a, c, g, or t
  misc_feature (574)..(574): n is a, c, g, or t
  misc_feature (687)..(687): n is a, c, g, or t
tgtntaaaatattcattttacatatctacaacatgtatttcatatttctaatcaaccacaaatcatataggaaaatatttaggtccatgaannnnnnncaaaacattaaaaaattaangttttganacaaatcacatgtgaaagctcattaaataataacattgncnaataaatggttaatcngctttncttnttancngcngccatgcatttnnggnattccattccangngggggtcagcatgcagggtataattttntattatgcgnccgtaaagggntacagggcttatttttggggtggaatgtcacagggtctttnnttctntttnaaaggggggtcactcgngggnggnggggngttcccatggggggtgccagannggggcntttntggggtgntactgtgagggntcgtgggaacatgttnnnnnnntcctgttttgngggggttttgnnntgttggnggggtgggccagttggtggggggtatctgngaagcccttttctgttttaaaatataatgtttcactgttgttttttgtntcnacagtnttttaagaacaatgagggnttaaaactacaggatacgtggaattttaatgcaaattgcattcatggatatacctacatcttgaaaaacttgaaaaggaaaaactattcccaaagaaggtcctgatacttaana

SEQ ID NO: 593859 - DNA, 275 bp, Homo sapiens
gggccggaaatggctagtggatattcttctagatagggtccagaagaggaaaatatctttcaaacaaagaggacaacaatgtgttgtgtatgattttcacccccttgatctcacgtcaagcaaatcaacagttgaaaggaactgctctaacaactcagactcaactagacaaattcacaaaacctaagtaggccacaccgggcatgtgtttacagagaaagctacaggacaggacaggctagcaggggagtatcacgccaggcgcacaacaggag

SEQ ID NO: 593860 - DNA, 939 bp, Homo sapiens
  misc_feature (2)..(2): n is a, c, g, or t
  misc_feature (25)..(25): n is a, c, g, or t
gnggagaggacaagaaagcggtgcnggaaactacggcctgcgacgtcgacaggagcaagctttcgccgcctgtcccacgcaggggtctcccagagggactcaactgtgcctaaggatcatctttaaagggcaccgtgtcaccccaggtacggtctggtgaaaccccgtgagacatcggggacaacccctgggaccacctcattcaggattgcacagcacaagtactgggggttctgaaaaaaaagacaaaaagtggagcgcgccaactacaaaacacagggggcccaaagcgccataccaaagcgtttgagttaatcaggccgtcatgggccccccccgtcttgtcccgcagggggccaccggttctccagtccccgggtgtttcccgaggagtgtcttaggccccgtttcaggaacccccagggccccagtcacgatttttcaaagaaactcttgttgttacgcctcagtccccaaccacccgattggggtatttgaggcggaggccccccctctcttggctgaacacctgaaggcccgccgcccaaagatccctccactgaacgcgtggctgacgaacacaagtgaaacccttctatgtgggcgcggtccacaattgtccccacccgactcccctccgtccctcggtggtgagcgcacgtgtttcactcactgggcggagtcattccgggcactatggggttatgtgcctcccggcgataccgcgtgttcacccccacaccggcgcttctcaatcgccttgacgaaccattagaccgcctcttgtccgcccacttgggaacagcgtagacttttgtagcgccacccacacaggggcgattcatacaatacgggatataatacgaatcgcgcgggcccctgtgagatttttcccccacccccccggcccctaacaccctttttttcacccacataaca

SEQ ID NO: 593861 - DNA, 1188 bp, Homo sapiens
gacacacgcagaattccactgcctgggtgacggggctcagaacacaggcagaagggaccaggacgtaaaagtcacctacctgatgtttaccatggaaaactagcttctacctgctcatctctcaggcgatgcggtacctatagggacccggctgtgcacccccgggacaaacagcggatgaagccaggagctcagctctagagatatgagcactgctgctagtcccagcccatctacgcgctactatacccgccagggagagacacacacagcatacacccatgcacacctagaggtgtacctccaccatcgaccgcaagggacaaagtcccaaccttcttactaccttccaaaaaacccaagacccctgaagcagtacaggagaccctactgattccagatttgagtcgccaggcgttagtgtcccggcacttcttgcacaacgataaggtgacagttgactgtttctgacaccaaacataaccgaccatcatacaaagcagacactaccaccatggacaccgctgggaccttggcaagagtggatgactgaaatgggaatgaataaggaggccctatacccaactaggcagaggccaacactaccttggtacacccacccgccatacccccggaacggtaagacaaacaaaaatacgcagagacaaacaaccacagcttgcaccgtataattagagaaaataagctcagaacttagaacagcagagttcacacacaggcacagggacattggggggacgaccgacagtgatatactgggtagacgtaccgggtatccctacaacgcgttacaaggaacggaccccacactttagaaggacaaacattatccagtacccacattacccaggcaataaccgcagaccacgcaactgacacaggggcccagaggagcagaagcggccgagcacgcccccagcgcacgaagggcatcatagtaacaagggagaaataacaacacaatgaataacacaacaacctcctgaactcaggacagatgccaggcaactacagtaaggccaattaccacccgggatattaacacattagctacacagaccaaaacaaaacaaacaagaaaacgtgagcaacaacagaccgacggagagacaccaaagggatcagaacacaggccaaagacaaaccgagtagtaaagcgacagacca

SEQ ID NO: 593862 - DNA, 345 bp, Homo sapiens
taacgttgcatattcttgagcgtcttttatctactcatacaggccatgtcttgcaacgatctatgtttggagttcatttactctttgcataatccagcgcatcataaatcatgccaaagccagatagtcttgccaccaccaaaatgagttctgaatccaaatacaaagatgacatccggtgtggtacttgtacattattaggctagttttatacccgaatttctagtcttaggcactgtcgccttcccggggtgaaggacataaatgaccatttgtttcctctgaagtagtcggttggtcatgaactttctagtgcggatagtaaacggtgtcgttcataatgga

SEQ ID NO: 593863 - DNA, 908 bp, Homo sapiens
  misc_feature (876)..(876): n is a, c, g, or t
tacccacttccttcagaaaattcccatatgggaaaccccaacaactaccaatacacttttggaaaagattacagggacaaattggttggattttataatttcctatgtttaattttggctattggtattatttaatacttctggaaaattttttttaattggactaaggaaagcagctctccaggggtggttaatcttcataattggcttaaattagggaaaacccagattatggtttggtaaattaaatatataaagggactggatggtttattacaccttattttggtatatgggatccataatggaaaattacaatttagccatatgcattaatattaaatagggcaaaaatccactttactccaaacatttggcatttggtacctattaaatcccatggtcttcggtatgcatttattaaaactccttaaagcattataggtaatccttttccaataagggactttattaaaggtttaaaaatggcaccgcagaaattggattccaattattaagttactaaatacattcttatattggccccaagtggcttatatttatactttccaaaagacttgggagttggcacttaactggtcctacttttaagaattgacggtcagggtctttgtcaccaacaattagatttatggttgaaccattcttgcggaccgcactctcattccgtggcgaataaccccctagcggggaaccaagatggtcggaaaatgtggagttcttcaacgaaaaaatggtatgacaaagcaaaacggagagagccgagagtcaccgagggacagtttccgcctttccacggagacgggcccagcgaataccgctggattaccgatacccgcggcgggccgcggaganaaccagcagaccaagacaagagaccacgacag

SEQ ID NO: 593864 - DNA, 152 bp, Homo sapiens
atgcgaacgaacagtttatggattggcgagtggatccgcgtttcgcaagccttgcatctggccctggttatttggcgcgaattgtagtatggtttatacgcagacaagattatccaccaatttcttaatgattccggaaggcaataaggggc

SEQ ID NO: 593865 - DNA, 324 bp, Homo sapiens
  misc_feature (161)..(161): n is a, c, g, or t
cataaccttgacctcctgaacagttgcaggttcttcacatcggtgatgccgtcggaacgccttcctcgggactcccctgggatctggttttcactccaactctagtctggtgatgcttcggtcgtgctctgtataaagcagatccagggcgctgcggccgngcggcccggcagctcctggagtgctagtaggatgacactccagacccactcagatgagcaacgtgctgacaataggaagttggaagctggactcgcgagaaggggacgtccacatgaccctcgtcgacttccttctccgcttctctatgacccctcgcaactc

SEQ ID NO: 593866 - DNA, 111 bp, Homo sapiens
  misc_feature (95)..(95): n is a, c, g, or t
tactttccagggaggcataattagtcctgacacagaggcttctcccatagaacctcacttctttaacaaggcattactgtaagagaacgtgttcntgaatcagcatgcgaa

SEQ ID NO: 593867 - DNA, 330 bp, Homo sapiens
gggcctcactgtcgcctaagctggagtgaagtggcacaatcatagctccctgcagcctcaacctccctaggctcaagtgatcctcccacttcagtctcccgagtagctgggactacaggtgtgtgtcactgtgtgtggttaatttcttttatttatttatttttgagatggagtcttgctctgtcgcccaggctggaatgtagtgatgcaatcttggctcatgcaacctccgcctcctgggttcaagtgattctcctggggctgaggttgcagtgggtcgagattgcactaccgcactccagccagggtgacagagcaagactctgtctc

SEQ ID NO: 593868 - DNA, 904 bp, Homo sapiens
  misc_feature (128)..(128): n is a, c, g, or t
  misc_feature (145)..(145): n is a, c, g, or t
  misc_feature (163)..(163): n is a, c, g, or t
  misc_feature (188)..(188): n is a, c, g, or t
  misc_feature (206)..(206): n is a, c, g, or t
  misc_feature (208)..(208): n is a, c, g, or t
  misc_feature (223)..(223): n is a, c, g, or t
  misc_feature (232)..(232): n is a, c, g, or t
  misc_feature (236)..(236): n is a, c, g, or t
  misc_feature (238)..(238): n is a, c, g, or t
  misc_feature (242)..(242): n is a, c, g, or t
  misc_feature (636)..(637): n is a, c, g, or t
  misc_feature (658)..(658): n is a, c, g, or t
gagtggcctcgccgcttgagtttgattcatcatggataatctgtcatcagaagaaattcaacagagagctcaccagattactgatgagtctctggaaagtacgaggagaatcctgggtttagccattnagtctcaggatgcaggnatcaagaccatcactatnctggatgaacaaaaggacaactaanccgatagaagaaggcttngnccaaataaataaggncatgagganacananaagnctttaacagaactcaacaaatgctagaggccatgatgtaacaacccatataaaaaaaacaaaaaacaaaaaacaaacaaaacaagaagacaacaaaggagatggtggagaaaactcaccttgcaatgtagtatctaaacagccaggcccggtgacaaatggtcagcttcagcaaccaacaacgggaggcaagccagtggtggatacattaaacgcataactaatgatgccagagaagatgaaatggaagagaacctgactcaagtgggcagtatcctgggaaatctaaaagacatggccctgaacataggcaatgagattgatgctcaaaatccacaaataaaacgaatcacagacaaggctgacaccaacagagatcgtattgatattgccanngccagagcaaagaaactcatngacagtaaagctactgtgtcttctttatcatttatcacttccgtagctctctgaaagttttaccttttccgagtttaagtttcggtccacctcttctaattggagaaacttggacgaagggccgagcgtaagtcccttctttggtgtgctgggggggcgctgtggtctgctcctgtgtctttttgtgtctagctgcttgcgtttctgctctgttgtgcttctcgttttctgtgtctcgttcggtgg

SEQ ID NO: 593869 - DNA, 465 bp, Homo sapiens
ctacaggatccttatgctgctccctcttcactgctgcctggtaggctgaagcacgagaatcgcttgaaccctggaggcggaggttgcagtgagccgagattgcaccactgcactccagcctggcgacagggcaagactttgtctcaaaaacaaaaacaaggccaggcacagtggctcatgcctgtaatccctgcactttgggaggccaaggcagtggatcacttgaggtcagaagttcaagaccagcctggccaacatggtgaaaccccatctctactaaaaatacaaaaattagctgggcatggtggcacgcacctgtaatcccggctactcgggaggctgaggcaggagaatcgcttgaacatgggaggtggatgttgcagtgagctgagattgtgccactgcactccagcctgggcaacagagcgagactctgtctcagaaaaaaaaatgctgttagagaaa

SEQ ID NO: 593870 - DNA, 101 bp, Homo sapiens
gaatttgacggtttaaagtggtggaaattggaaggaaaccaggaggtatttgggaaggccaatggggtggctccttttaggaaataaaaccctaagcatga

SEQ ID NO: 593871 - DNA, 503 bp, Homo sapiens
  misc_feature (412)..(412): n is a, c, g, or t
  misc_feature (445)..(445): n is a, c, g, or t
  misc_feature (454)..(454): n is a, c, g, or t
gatggagtggtgctaccaaaggaccccaaagagatcctggctgagaagaacttcaacactgtgccttacattgtgggaatcaacaagcaagaatgtggctggcttctgccaacaatgacgggatttctaccagctgatgtaaaattggacaagaagaaagccattgcactcctggagcaatttgcttccatgactggcataccagaggatattattccagttgctgttgagaagtacacaaaaggtagtgatgaccctgatcagatcagagagggagttctcgacgcaatgggggatgtggcatttggtgttccatcggtgattgtgtcccgtggccacagagacactggagctcccacctacatgtatgagtatcaatactacccaagcttctcatcaccccaaagacccnagaatgtagtaggagaccatgcagatgatgtcnactctgtcntcggtgctccaatttttaagagagggtgctccgaagaggagttcaatct

SEQ ID NO: 593872 - DNA, 329 bp, Homo sapiens
tcagagatgttgagacgttttcagagtaatggaagaaggcatcaccttctctagctaggaaaagggatagagctgcgtctacatgtgtgagtggtgtccgaagcagaaagggagctgtcgtcattgcaggggccagccgatgcactgccgttaggaaatgccatttgactcgacaaactgggttatggtagtagctgatgaagaagatgaggagccaggatgtgattcctgttttctagctagagaaggtgatgccttccttcgcattactcagagatgttgagaagctttcagagatgcttgttgaaaatgaaaaaagataagataaa

SEQ ID NO: 593873 - DNA, 573 bp, Homo sapiens
  misc_feature (573)..(573): n is a, c, g, or t
tctggtattttaaattttcttactgggtccctatctctaaaaaaaaaaaaaaaaaaaaaaaaaaaaaaaaaaaaaaaaaaaaaaaaaaaaaaaaaaaaaaggggggggccaaatcccccgggggggcgcagattagtcgtcacacccctttttgttgtatagaaaagaagggtcccaccttgaagagggccgtatttatttataaagagcgcagacgccgcggcgccggtgttaacacacacgtcgagacgcagggacaacaacatctgctcagcgggaatctttttggggggagaggacaacccctctatcttgtgtgggggggggggggcaaaaattggtggagaagaaacatcctcactctacagagaaagtattatataaaagtctcatcagggggagagaatattataataacattttgtcagttggtggtatatatgtgtggtggttaaaacacaaggggtgataatattgatgtgggtggtgggggtaagagataatttggtgctataggagggattgtgtttattatagaaagtttttttaccgaggaggggtattgtgaataan

SEQ ID NO: 593874 - DNA, 291 bp, Homo sapiens
ttcgacggtgtctgcagttacttccttcccgtcaaaatttggcctcctatgattttcaatatatatatatttttttggtcttactctgtggcccaggctagagtgcagtgacgtgaccttggctcactgcaacctctgcctccggggctcaagcaatcctcccacctcagcctcctcagtagctgggaccacaggcatatgctacaaagcccagattattttttatagaaacagggtttcaccatgttgcccaggctggtcttgaattcctgggctcaagtaatctaccca

SEQ ID NO: 593875 - DNA, 548 bp, Homo sapiens
  misc_feature (77)..(77): n is a, c, g, or t
  misc_feature (528)..(529): n is a, c, g, or t
caaaacccattgaaaaaatggtgttcctatccaaaattactgaatccttcctgtgggggggttccttgtaagactgnattgcagcctaggagtctctggcctttggtgcatgcattcttacttttgttttcctttatttgattcattctttttggttctagaacacaacagttccctattctccagagaccacccaagttggtgataaggaaatggagacctcctactattcactgacctctcagaagaataacctcagcaaatgccgcctctcccccaacagggtggcagtattttaaaaaaaatgtttttttttttttggtttgttaaagcagtttctttgtcttaaacatttaaatgccacttgaaagcaaaaacaaatgctggtgttacagagtaaactgctaatattttatctctgggggatgaaaataacaattattttgactttcttccttgtacattgctccttgatttttttatgcactgcatttaaattgaaaataaaacaaataaaaatcaaaaaanncgctctctgccacaaaaaa

SEQ ID NO: 593876 - DNA, 517 bp, Homo sapiens
  misc_feature (4)..(4): n is a, c, g, or t
  misc_feature (24)..(24): n is a, c, g, or t
  misc_feature (497)..(498): n is a, c, g, or t
tatnaattgtcccgggaaagctanagtccattctgttctgcatcagtagaacccatacctgtttgccattgtgagttacagatgacagaatggtcctcagtgtcttgaagcccattgcgatgtccaatagaacacaacagttccctattctccagagaccacccaagttggtgataaggaaatggagacctcctactattcactgacctctcagaagaataacctcagcaaatgccgcctctcccccaacagggtggcagtattttaaaaaaaatgtttttttttttttggtttgttaaagcagtttctttgtcttaaacatttaaatgccacttgaaagcaaaaacaaatgctggtgttacagagtaaactgctaatattttatctctgggggatgaaaataacaattattttgactttcttccttgtacattgctccttgatttttttatgcactgcatttaaattgaaaataaaacaaataaaaatcaaaaaanncgctctctgccacaaaaaa

SEQ ID NO: 593877 - DNA, 1073 bp, Homo sapiens
cacgcgtctgatacaggtcacggggacccttcaatctgcagtctccattgccaatggatgaccagtctgaaagttatgttgaatgcaaacgttacgtgtctctcgctccttcctcctttcgtttccaagacagtgggtgtggacctagtagccttgtgccacgcggtgtacatcattggggtgaagaagttggaacctgtagtgagtgtctaaatgaaacttggcttcttggatgtacgctgtggagtaaaggagtgcgctcgacgttgtctacctgtctgcaccagctatgtgccgaggggatgctttgactagtcgagtgttacgagtgttgattgcgacaaacttgaacgctacgtagctttgtgtggacgggcttggctctgggcctctctagggtgagaggaagccttgactcgattgacttgcaataaccatcgaaatagcgcccaattgcatccattggaacgttggggcgttttcaaggatatctccccgatatggagcatgcacacttatttcctaagcgtatgtacgcctatttggcagcgaacgcattagttaattgaaatcagaaaaaccgccggaacgccttagtctacggcacaaaactttggtatggcagggcgtaaacctatggggaaggaaagtcctatggaggacgattaaccaaagacgctatacaattaagtagaccccacacgaagtcccttcaggcgcgcacccaaggctttaggaacctatatcccataatacaaagcagttagaaagagccaactttgtggccgggtttcccagactcggcggcgtaaaaactcaatggacaatagggattggcgcacaccaattggggacccagcatatgttatcgaacagcggaaaagagaccatgggctgggcgacctggcaggctagaacacgtgtttgtcccccatactgtccaaacaaaggaccgggggaagggccgattttcccctttgtgataagcgtccaagggcgtattaaagatcgctggaaagaggaaatcaaaaaagcgttttaggacaggacgttggggattggacacttttaga

SEQ ID NO: 593878 - DNA, 164 bp, Homo sapiens
tatccccatgtagtgaatgcagaagaaatgacagactattactatattcgacacttgaatgaaataatgtgatctaggcactgataattgatagatagctgaaatacattaggtagagaggctgatgcaggaactttataattgctcggatctaagtgcctcgt

SEQ ID NO: 593879 - DNA, 105 bp, Homo sapiens
cgttattaaaaatgcaccttggccagttgtagtggctcacgtctataatcccagatactttgggcagctgaggctgaaggattgcttgagactcaggatttagag

SEQ ID NO: 593880 - DNA, 374 bp, Homo sapiens
aacgattagagtcctagcatactcagagtgcataactggagacagttggcggcttattatagaggagcagaacgtcagagcttactcctctacttgaaagaggtagatattacttactgtgccgagctacatagatgcctctgttcccgagatgttgatgcatcccgtcaaccgatgagcctggggcagaccttttgagacaaggtcatgagatggttccaggccatgctgcagcggatgcggacctggtggcacggggttctggcctgggtgaaggagaaggtggtggccctggtccatgcagtgcaggccctctggaaacagttccagagtttctgctgctctctgtcagagctcttcatgtcctctttcca

SEQ ID NO: 593881 - DNA, 591 bp, Homo sapiens
tgagcggtgctacctgtccgtgacgaccgattcggagagggccccctaatctctaatcgtgcccgcaccagcagcgctggcagtcagggcgcaggtgggggcaggacgggtgacttggcagacagggacggctgaccgggaccgagaagggcgcacgtcaccgtggcgccgtcctgcgcgtgtccgtatgccaccgtctatggtggcagaagagaccgacacagggacacggctgagaaggggacacgccaccgaatcaccggtgagaggatcaccagaagaagaccgatagagagggtagagcggccagggacccacgaagccgcgataggacgcagagtcacatgatagagagcacaacatggtgctgaacaacgagacagtaatacaagggaagcagtgcgtcatagaacgaggaaaggagaaaaacttacagtggtccagcagtttcaatcgagttgttatacacacacacaaacggacatagggaaaagagaagacgcacaacaacgagaaggatatgagagcaacgagacgatacaccgattgatgtggaagtgagattatggccaaaacacattgcataaagcg

SEQ ID NO: 593882 - DNA, 134 bp, Homo sapiens
gaactgatatttataacacattagtggcaaaagagagggtcttcgtaattgacgggaataagcacgctctaagggagaaggatctgcttgtactgtatactctccaatatgagaccttccctcctcgtcgattt

SEQ ID NO: 593883 - DNA, 501 bp, Homo sapiens
caagccacccgggcgattgtgacaagctggctgaagtcggtgcgctgtgcacaccgaaaccatcacccacagctacatgcactgctggcgtcacaaaaccccgctgatctaccgcgccaccgcgcagtggtttatcggtatggacaaagagccgaccagcggcgaaaccctgcgcaagcgcgcgatcaaggcgatcgaagacaccaagttcgttccggcctggggtcaggcgcgcctgcactcgatgatcgccaaccgtccggactggtgcatctcacgccagcgtaactggggcgtgccgattccgttcttcctgaacaaggaaagcggcgagctgcatccacgtactgtcgagctgatggaagtggtggcccagcgtgttgaacaagaaggcatcgaagcctggttcaagctggacgccgccgagctgctgggcgacgaagcgccgctgtacgacaagatcagcgacaccctcgacgtgtggttcgactccggtaccgc

SEQ ID NO: 593884 - DNA, 383 bp, Homo sapiens
agtggatgtggataaatagaaataaagctatgacaaattaattcagaaatctttccactcacgggtagatatcaagtggggggtcatacaggaagaagtctggaaacacgatttacagtaaattatgataatttgggatagagactgtgccattaagagttgttaaacagcatgattcagacagctctgtttttccagtgacgtgcctattcctttatggtatatgtgtacccaagtgatgctctcacatttatcttaagtccctattattaatatacatttaaagtctcccgaggtttggttgggttggctttggtcctttttgggagtgatttgaagcaaagttaattgtggaacctatttatagacatctttctatactt

SEQ ID NO: 593885 - DNA, 346 bp, Homo sapiens
  misc_feature (1)..(1): n is a, c, g, or t
nctcctccttgatgcaatgtgatactcttcaactatcctctgtgcatatagcatggttatgaacacctttggctggctgtccctatggtacatgttcacatgtaataggctcgcacccctcatgtctcaggctaatgcagctgttggtacacaactgataatcttggagcatatggtggctctggaaagagagtaatgccctgattgtcaataggtggttcggcatggcatttacagatgagatctccttacattgcataagggttaggactgtcatcaggtgctctatcgtcacatgtatattgacacatctgtctccacagtatttgagcaatctgtactagag

SEQ ID NO: 593886 - DNA, 203 bp, Homo sapiens
cactgcctagtactaaatacgacacggacgatacaagtgacactgcagaatggatcattaactcagttatgagatacctttgaacactcgctcctctcatacttggatacctgtggtcattctagagctaatacatgccgacgggcgctgacccccatacgcgagggggatgcgtgcatatatcagactcaaaaccaacccgg

SEQ ID NO: 593887 - DNA, 437 bp, Homo sapiens
gtagtttagagtaggatgacattagttcttttgtaaatgttggctagaatttagcagtgaagccattgggtcctgggtttttctttactgggagatttttttattatgcattcaatcttcttacttgttgttggtctgttcaggttttggattgctgcatggttcaatcttggtactttgtgtgtatctaggaatttaagcatttcctcgagattttcctatttattggcatacagttgctcacagtagccactattgagccttagagtttctacagaattagttgtaatgtctcctttttcatttcgattttactcatttgggtcttctctctttttttcttgggtagtctagttaaaggtttatcaattttattttttcaaaaacttttcataccattaatttttattgttttcttcattgcaatttttaaattt

SEQ ID NO: 593888 - DNA, 1702 bp, Homo sapiens
gtcgctgtcgctgcggcgagagcgcgattccagaagcggcatcgcggcggcgtgcagcaggcggcggctacaccgggcttgggcgacataagagtacatcatagcagctagctgtgcccatggactgcaaggccgataacaaagaggagcaacgtggagtacagagagagaagaagacggaaagacgacccacgcagaacgactggcaccgagaacagaagacacaggaaaacgagagccacaagagcagccccaaaacagcagtccgagaccacagaacaggcaccaaacaaggagacacccatgacaacaagagaacgaaacgaactcaccagagcagacaccaagcacccaaggacagagcccaaagagtacacgagacagacaggcccccagcggcaccccaagcagcgcaagaaagggaccaccaaaagacacccttgcaaccgtaaccactgcggacgagcccggaggacgtcgaaagaggacgagctaccacacagaaccgcgagccagcacggagcacctggggagtggaccccaaagggacacacgaagggcacaggaaggaacgcaggacccgcagggactaggaccacagacacggcaacgcccggacagagagacagacaagaccagagagaagaagaagggagacaaaccagaagaaacgtagcaagaaaagcagagaaagaccgagcaagcagacggcatgcaccagcacccaccaaagcacacaccacaccaacacgagagagcgagaaaacagaggaacactgcaaagacgcgacaaggacgcgcaagcgcaatggacatggagaaaacagagaaaatgagcgagcacagaagcagagacaacgagacaagagagcgagcacacaacgggcggacaacagagaacgaagagaggagccgccaccgagagacgccgagacgcgagcggcactgaaacacacacaagcagacacaacgcacgcgcgcgagacacggacgcgacgaaccgcagaccaaccgcgacgacaaggacacggcacaacgagagaacgggaacccagagacgagacgcccgagaacgaccaagcctccaggacgggtgaggaccagacactaggcagaggggacacaaccagaaggacgcaggacagagacgaaggacgcccgacgacgaccgggaacagtgcgacacgcaacagagagaggaggagaagaggacggacggacgccgaggcagacaggcgacgacggcagcgggcacaagggaccgaggagacgacgaggggacggagagagcggacgccgaagcgcgaacaccgacagaagacagcacgacgccagacgaccacgcaagacggagcgcgcagaggcgagcgcacagagaggggagagcgggaagaagagaagaacggtgcggcgtccggcgaggagcgcggcgagggacagcacagagcgcagaggagcgacagaggagagagagcaggcgagagcgagcacggagcagcgaggcagaggcgaggcaacgacgcaggacgagagtgaggacggcagcgagagaagcgaccggacgcgacgcggggagagagcgagagtcgcggagcggctgcgtctcgcgacgccgcgacgccaccaccggaggacggcagcaggacgcgcgaacgcgacagacgacagcgacgagggcaggaaggcagagcaagcggacccc

SEQ ID NO: 593889 - DNA, 843 bp, Homo sapiens
agggaattacacaaaaataaaagaattacggcttcttacagacaacaagtacgattatcttataggaaaaacaacaaatcactggctaaagtatcaagacaactacgagtacacatgacacacggctgtccaacagctacgtttttacatcactgctgctcaagccgtgtccctaatataccccttagacaactgtgttaactagatgatgagcaacataataacacttaacatcttccctactcaactaccatcctatacacacaacactccaaactcagcatgattacatcctactccaactttatgaccaacccgtgtctcctgcaactgtcgacacgatcgcgcacaaccctgtgggacttatacacagcccccaagcatcgagaatcacccggaataacactactccggacttatattacccaacaacactactttaccaaagggcatattacgatctagcacttcaacgggactcttacttatctcgcggctcaaaccatttctcaatgtggactcaacacactatcctccctctgcacaaaccgtgccgattacacctaacaccctgggctggctttacgctctcacaccacaaaggccacaaaagcgcattactcaacaggccttcctgcaccaacaactcatttcacaccctctcgcaccccatcatctcatttccaccattattaccacgaaacctgcgacaacaaccgcgaaccttacttgctttaacaccacacatcggctcacctaacacactctccctggcacaccgcggcacaccttatccttcacaactaacacataccacaacaacacagaaacataccacaaacc

SEQ ID NO: 593890 - DNA, 418 bp, Homo sapiens
  misc_feature (29)..(29): n is a, c, g, or t
  misc_feature (151)..(151): n is a, c, g, or t
  misc_feature (154)..(154): n is a, c, g, or t
  misc_feature (212)..(212): n is a, c, g, or t
  misc_feature (218)..(218): n is a, c, g, or t
tcttattaccttactgacccaatccctanaataggaataacacatttgatctttaatacaagtatgtgataggaacatggcttctataagcccaaacttggcaatttaaatttaaatttattaaaattaaataaaactggctgggtgccangtntcacgcctgtggtcccagcactttgggaggccgaggcggtgaatcacgaggtcaggantgcganaccatcctggccgacgtggtggaaccccgtctctgctagaaatacaaaagttagccgggtgtggtggcatgtgcctgtggtcccagctgctcgggaggctgaggcaggagaatcgcttgggcccgggaggcggaggttgcagtgagccgagatcgcgacactgcactccagcctgggtgacaagagaaagactatgtctc

SEQ ID NO: 593891 - DNA, 875 bp, Homo sapiens
gtgcacgtgctcgagatgacactttagtgattcatgggatgcgtatctatcattgctactatggtccatagcattcgttccttaagcgctcccaggtgtcggtagccgctgggctaggcctgcaatgagactgattaactcacctcgatgaccacttgtgagcgagtagagtgcccgacaacgcgtggagaggcgcgactacaacaactagtctatgtgacggtgacggctaaacactacaattgtgccgacacaacgggttgaaactacacgctctgttactgccgtagtgaaataaaattgactcagacaaaactatactcacggcagacatagtttgtgaacacaaatgcccggtgtccacgattcctccacagcgtgtcactgcgatagaggcagaagcgtagataggcgcgcctacagccagcacattcaggatatattggacaaaacaccatggagtgccagacgcttcgacacactcgctaatgcacacagtgccagacccccaaacaacttcaaacctgctcacaacgtagctagaagtacacaaggagatcgatggacaagcacaaacgccacagcaaggagatcgaacggcaccatacccaggtggatattcaacacacaactatggagcaagacgacagacactataacagcaaaccagcgtgaagacaacgaccccaccacgcaagccgctcggtgagcgataacacaaagagaaaaatagaaccgaagcagcttggacacacagcaacgagggggcgcaacatacacatagtacaccataaaaatcagaagagatcagagagacaccccaccgcacacgcagagctacacagagacgacaggcgacagcagaatggagcaag

SEQ ID NO: 593892 - DNA, 119 bp, Homo sapiens
cttatctccacaaacagacatgcaggagaagatattgacattgaatttatataaattcaatgtcaatatcttctctgtatgtgtgttggggtggttaataacctgtttgtgggaggtag

SEQ ID NO: 593893 - DNA, 89 bp, Homo sapiens
gactgaaaacaagacaagtttattttctcacagtcctggaagtcacaaatctgaaatggctcactcacaaggggttggcaggaccgcat

SEQ ID NO: 593894 - DNA, 152 bp, Homo sapiens
actgagcagacgctccaggatctgtcgccagctcctgttctgagggagagcagagaccatgtctgacatagaagaggttggttggaagagttaggaggaggaggagccaggaaggaagccagcctctttgaaggagccaggaggaggccacc

SEQ ID NO: 593895 - DNA, 427 bp, Homo sapiens
  misc_feature (359)..(359): n is a, c, g, or t
attaccgagtctcactaattatgacaagtcgcattagcaaaggcctgtctcttgagcatgggcaggcccctgtcccagacataggtacccccaatctcactttggacagagcctacgtggggggaattctcccgggcctgggcctgtcgagctctgactgccgaggacccttccaattgtgctcaaatctatagcattttgttgcttccaacaatttatgggtgtttgcgcagtgagtggaatctggtgggcctgacccctaacattgaccttgtgcatccctgagagagtgggcagagaatccaattctcatgaagcgcgaagtcggggtgtctcatggatgttgggctcagggctcnctgaaggacttcaagtttagagagtcaatgacacttgccaggacagcagagctggccccgccgtgagg

SEQ ID NO: 593896 - DNA, 369 bp, Homo sapiens
gcagtaagaaacacatgtgacattttacagaaatgaataatggatcagaggcatttgcccaacaacagtgaaaatacagcagagaaatgaaagagtgataggatgtaatgaaactcaggtagaatataaatgaagttatacagaagtagctggctgtggaactactgacattacacgttttgaagagactgaattcatagctggaggaacttggtcacggtgagatctgcaaccaacataaatgatgaaagtgattctgttgaagagcatgaagctgtctcagaggccgtggtgctgtcagcaagacctcacattcattaaaggaactctaggagatagttgagaacattgaaaagcaccagggaacca

SEQ ID NO: 593897 - DNA, 139 bp, Homo sapiens
gcggccgcctactactactactactactactgctcgaattcaagcttctaacgatgtacggggacatgctcataaggaaaggttaaaaaaaaaaaagttgtactgcaccagcaaatccatgatgatgatgatgtcgacc

SEQ ID NO: 593898 - DNA, 244 bp, Homo sapiens
gttcacgcccacaagactgcaggtggtggctcgggtgagggttccagcagtgaggctggagattgaactagaaggacctggaggtagattctgaaggcagagctaacaggacttcttgaacttcatcaatgcctcccctctacagtgacaggtatggtggctcacagctctaatctcaacacttagggaggccacggcgagaggactgcttgaggccaggagttcaatccatcctgggcaatat

SEQ ID NO: 593899 - DNA, 199 bp, Homo sapiens
catggattcggttgggcgcggccagtagaatggaaggtatagtgtctagagatctgtctgactatgttggatctacaataaaaagcccgtggacgacgtctgaaaatccagatgatctgagtctatggtctataaggagtcacagtcgattaatagcgccctgcaggaaggtggaggaaaagaacttaacagcggcgag

SEQ ID NO: 593900 - DNA, 327 bp, Homo sapiens
actgtcacgaatacgtcgcgaacattttatcgttagacagtaggagactatggggcgcaatatatgtgttttcgagatacacgatagattgcgtgatatgttggacctaataagattgtcgatgctggggattttatattcgtagtgtatagtgaattcccgtcattaaacacagggcgaacggtgtgccacacgtgcgtattcgatgtacaaagcctgagactagttcggactccccttcggcaaggtcgaagggggttcgcattggtctctgctaatgtaggagataaatcatattatggcccagggtcatgatagagcaggtgg

SEQ ID NO: 593901 - DNA, 127 bp, Homo sapiens
ctggaaggcgcagaaccaccagatgactttgagcgtgtacatgcggaggtctacactcatgcctgtgcagttggagagaatggcagccagcgccgcctacttcaggagcccataaatcaggatcttg

SEQ ID NO: 593902 - DNA, 231 bp, Homo sapiens
tggtacctgaatgggctctggggtactcttcatctccatacagtagagatgctgtagtggcccttctcggctgggcacataattgactggtcaatggtgctgcctactcatgatgccagcaaggtgaagtgccagtggccccgtggctcaacaccactgtgcgtgcctgccagccaacctgtggactagttggggatcctcttagaagtctgaccttgcatgtgcatgcaa

SEQ ID NO: 593903 - DNA, 714 bp, Homo sapiens
atttaccatctcacttctaggaatactagtatatcgctcacacctcatatcctccctactatgcctagaaggaataatactatcgctgtgcattatagctactctcataaccctcaacacccactccctcttagccaatatggtgcctatgtgccactactagtcttgtgccgcctgcgaaggcaggcggtgggcctagccctactagtctcaggtctccaagacatatggcctagactacgtacataacctaaactactccaagtgctaagaactaatcgtcccaacaattatattactaccactgacatgactttccaaaagacacgatagttggaatcaacagaacacccacagcctaatttattagcatcatccctctgctattgtttaacccgaaatcaagcaagcaacctattgtagcttgtccccaaccttttcctccgaccccctaaaagcccgcctcgctaatactaactacctgatcctacccctcagaatcatgggaggcaaggccacttatccagtgaagcaatagcacgaaaaagagtctacctctctatactaatctccctacaaatcgtcctcagattataacatgcacagccacagacactaatcatatttagatcttcttcgaaacaaacttatcccacgtggttataacaccggggggaccaggcagaagtgaagcggaaatattctcatttaacg

SEQ ID NO: 593904 - DNA, 431 bp, Homo sapiens
aattttagggactaggttttgctatgttgcccaggctggccttaaactcctggcctcaaggtgatccttctgtcttggcctcccgagtagctgggactagaggtgtgcaccgtcacacccagcttcaagtctcttattataaagttctggccacgcacagtggctcgcaactgtaatctcagcactttcggaggccaaggcggtcagatcacctgaggtcaggagtttgagaccagtctggccaacatggagaaactccgtctctactaaaaatacaagaattagctgggcatggtgcacacgcctttagtcccagctactcgggaggctgaggcaagagaattgcttgaacctgggaggcagaggttgcagtgaaccaagatcaagccatttgcactccagcctgggcaacacagttgacccgtctcaaa

SEQ ID NO: 593905 - DNA, 900 bp, Homo sapiens
ggttcataaccgctggttttgacagaagcacccaatgtgtcttggtggcccccaccccgaggaggaaaggggcgccgccgccccgggaagaaacacgggggtgggccgccgttttaacacccgggggaacacgggggtcccaaaaaaaaatggcaaaatgggcgcacagttgtgccccgactctaacagccccaaggcgcggcacaccccacgttgtgtggagaagtgtggcccgcaccccggcctttcaaaaagggtggtcgcaccaacactatagcacacgcgcgcccacacgttggtggcgcctgtggaggggggacccgggccccacaaggtcacaaaagagacgcgcgtgaggcacaagtactggggcgcacccaccgcccccacggcccatttgcactgtaaggcgcccggggggtcccgctggggacaaccaacaggttgaccgcccggagaggtaaatcccccacaggggggcgcccgcttgtggccaaacactgaggaaacacactggggggacagcggcgaatctgacaggaaaacgccgaccagttcttctccacaaaggcgcccccgggaaaaaaaaaatggcgcgccgccctcttgcgagaaaaaggacatttatatacagagaacggctcgtcgggtaggaatttccttaaaaagaaacgggtggttggcaaaaacgaggagggggattctcaaattatcccctccctttgggcgcgccacaaagtcacataggtgccgcccaattttccctgctcgcgttatgatgagccaagccgttaaactttctgggtatgaatggggtcaccctggggaaacacaatctgttccacaaggggaacccggaaaaattgttccccgacaaattgccccaaacctccccccaaa

SEQ ID NO: 593906 - DNA, 412 bp, Homo sapiens
  misc_feature (390)..(390): n is a, c, g, or t
tgaaacggggtctcactgtcacccaggctggagtacagtggcttgatcttggctcactgcaacctccgcctccctggctcaagtgatctttccacctcagcgtctccagtagctggggctacaggcatgtgccaccatgcctgtctaatttttgtattttttgtggagacagggttttgccatgttgcccgggctggtctcgaacagctgggacttaaggcaatctgcctgctttcagccccccaaagggccggggattacagggtgtgagccactgtttccccagcctccctaaggctctttaacatgtttaaacaggcagcactagtttgaggtaacctttttaaccccaaaatggcttttgggaccatatttatttgcgggattttntgactttttttcagatttttgg

SEQ ID NO: 593907 - DNA, 484 bp, Homo sapiens
gttgcccaggctgatcttgaattcctgggctcaagtgatcacctgccttggcttcccaaagtgttgggatgcaggcgtgagccactgcatccagtctccaaactgctttaattaacctgtttgatttttgtatcttcttgtaaatggtacagataatgatcttgtatgctactcaaaaattcttcatataaataaattcaaaaattgaaatgggtggcattcacgagcattttttgggagctttaaattatcaatttcataggtgtgtttcctttttttcctttaagcaagcaacctgatatctagcatagacctggccattaaataaggatcttaaatttgcagtggattaaatcttaggtttaaagagctgacaaaataatttggctgtggttaacagtctacctttaaattaatcgttttaaaactattaataaatttgctgtccaatattttgttgaaatctgaaaaaaaagggcgtggt

SEQ ID NO: 593908 - DNA, 132 bp, Homo sapiens
acaagatgatagatacaatcatgaaccaggatatactcgccatactgcaggcacaagtgcgctttggtggggatcaggtactgctcgcagtaagtacgaaggtggttcatagtacagccacagcagatgaca

SEQ ID NO: 593909 - DNA, 421 bp, Homo sapiens
gtgaatgtcagtgggtgatcagaataaattgttggagttattagaatgtacatttgagtaggtttcagtttgactagaaataattggcaagaaggcaagaactagtcttctagagcagggatcccatcccccaggtcatggactggtactggtccatggcctgttagaaaccaggccacacagcaggagatgagtggaaagcaagtgaaagttcatgggtatttacagcaattccccgtcgctcgcattaccacctgagctgtgtctcctgtgagatcagcagcagcattagattctcaaggagcacaaacccttttggaactgtgtgtgagggatctaagttgcgcatttcttatgagaatctaatacctgatgatctgttgttgtctcccaccacccccagatgggaccatctagttgc

SEQ ID NO: 593910 - DNA, 497 bp, Homo sapiens
  misc_feature (239)..(239): n is a, c, g, or t
ggggaggccgcacagatgcctggagttactgtaaaagacgtgtaccagcacggagttcgtcagaagcttctggcagccttccatcaaaaaagtcacgggaacgctgaaagtccccgaatgggtggataccgtgcaagctaggcacagagcacaaagagcgttgctccatatcgatggagatacataggttcttatcatcgcgacgctgcttccacagacgtcggtcaccttgtagcctnccggggtggcagctcgggggtctgtgctgcgcatgagcgcaacgaatctatgggggacgtgcatgagaaacggcgtcatgcccagaccatcttcatgccgaggctccaagagtgtggcccgctcgggtcctcaaagccgtggaggggctgaaatatggctggaaaaggaccatatgatggcggccgtaaacctacagcctgagagatcaaagacgattctgactacgaatagattacacggtggcagctgccacaata

SEQ ID NO: 593911 - DNA, 192 bp, Homo sapiens
gtgccgtacacaccacccccgggcttcctcccttctttagtctaccttgtgtgtgggccggctgccggggccggagccacccctctccgggacctgttgcgtgtggtgtaccacgggtcggcgtcccctggtggtctgctgacacacagacccccttggacttctacccgccggactggggtcccggcgctc

SEQ ID NO: 593912 - DNA, 223 bp, Homo sapiens
acagtggggaaagggggaaatagggagtgactgctaatggataaggagtttctttcgggggtgatgaaaatgttctgcaaacagcagtgatggttctgaacagattaaaaatcactgaactgtatactttaaaagggtaagttttatatgtggatcatatttcaattagaagaaaacattgtgcattagaaggatgtcaaaatggactttcatagctcacaat

SEQ ID NO: 593913 - DNA, 162 bp, Homo sapiens
cgggaggccctggaccagctccgagagctgtgtcaccagtggctacagcgtaaggcacgctcaaggagcagatcctggagctgctggtgctggagcaagttcctaggtgcactgcatgtgaagctccggacatgggtggaatcgcagaacccatgagaactg

SEQ ID NO: 593914 - DNA, 688 bp, Homo sapiens
agcggcttcttctcctggcgctcgcgtgcgagagggaactagcgagaacgaggaagcagctggaggtgacgccgggcagattacacctgtcagggccgagccgagcggatcgctgggcgctgtgcagaggaaaggcgggagtgcccggctcgctgtcgcagagccgagcctgtttctgcgccggaccagtcgaggactctggacagtagaggccccgggacgaccgagctgatggcgtcttcgagcccatcttcgtccgcaaactcctcgaacgcgggagcggaaaccaagtaacaagttaactggggcccacaaaaggttgattactgtgtgtgcggtgtggccctgtggtgtgcaccagcaaaagctggggctcaagatctggcggcttcgttgcaagaggaccaacagccctggacagagcaagagtcgaccttgtgagtgccttcacaggcagaggcaatcctccaagaaacctgctttcctgtgaacaacagcgaccgggatgcccgcttccggcgcacagagactgacttctctaatctgtttgctagagatctgcttccggctacgaacggtgaggagcacaccgtgcaattcctcctggacgtggtggacatactcctcacctatgtccgcaagcacattcgatcgctcaccaaggtgctggactatcatcacccacacc

SEQ ID NO: 593915 - DNA, 273 bp, Homo sapiens
aaatttgggaaaaatgtgaaaatagccctgttttaaaaaaaaaaggtcgggggccccctggcttcccttatggtgcaggggcaaaaattccaggcaggaggttctgtcatccctcctttaaatttgcccatgaaacgttttgtcaaaaacctgggtctcttttctgttcaggcctctggtggcccactggggatatataatggaaaaactctggtattttaggaaagccactggttcataattaacgtgattaaattagtttggccctatgga

SEQ ID NO: 593916 - DNA, 266 bp, Homo sapiens
  misc_feature (27)..(27): n is a, c, g, or t
  misc_feature (29)..(29): n is a, c, g, or t
gatcaggtgatcctgccttatccttgnanaagaagtgttatgcaagaggccaagaagaagctaaacaaacatgccatgatggattcccatctcagcttattaccatcgggacatgtcctttttgtccaatcacatttctacatggcagtacagtcttcatcaaacctaagcattaaaaaaaaagttttctctgggtctttgggtcttttgtttcggaaggctcctgtattacataaaactttgttaaataaatttgttatactttt

SEQ ID NO: 593917 - DNA, 802 bp, Homo sapiens
  misc_feature (390)..(390): n is a, c, g, or t
gagaactggacgcttgtgaacagagttagctgattgccagtgaacttcctccaagaagaaactacagaaattctgacaggttcctggtctgaccgaaacatatccagaaggcacccaggctatctataaatgccgccctggtatatagatctccttgggaaactataataactggtatgccaggcaagggagaactggcgttgctcttcaatccattaacggacaatgtcagaaacaggccctgtggaccatcctgggagatactcctttcggtacatttatacccgttacaggaggacaatgtgttccaatcatcggtgtaaccagctgtgtatcacatggtaatgcacggcggtatcaacattagctaggctgagaattgatctaccngtgaactgtgacactagatggcatggccccaatgatattcctcatatgtgaagtttgcgcaagtgtgttaccaggtgacagctaccatgagaactggataatagacttcgtccggtagtggcaggtggaaccagatcgggcaataccatgtttggacagagcagtcacggtctggtaatgctaactcaggctacaagacttgcacggagcatgaaggacattgcattgtccagaccgaggcggtctcaggacgctaacagagaagcccaaacgtgtcgtgtcagattgcagtgcagaagtccccaagactgttccataaagtggatctcctactatctcagaaagattactccataaggacgactgaacgatttccatatacatgtaacatgggttatgactaccgtgaaca

SEQ ID NO: 593918 - DNA, 1835 bp, Homo sapiens
  misc_feature (602)..(602): n is a, c, g, or t
  misc_feature (672)..(672): n is a, c, g, or t
cgcaggcgggcgggagggcgggcacggagaggcgggcgccgaggaggggcaggtagggctgggacgcaggggtaactggatcccccgacttcagcccaggccctggtctgaccaccctgggagcagggactttccacagtcagctggacgcacactcagcccagtaaaagaggggacccatcccgggagccccggggagggcacagctgcctcctcccgggctcccctgccacctggtgcctacctgccccctgctccctgccgggtccggtcctcaccccatcttcatctggccttgactctgcccttgaggggcctaggggtgcagccagcctgctccgagctcccctgcagatggaggaggccatcctggtcccctgcgtgctggggctcctgctgctgcccatcctggccatgttgatggcactgtgtgtgcactgccacagactgccaggctcctacgacagcacatcctcagatagtttgtatccaaggggcatccagttcaaacggcctcacacggttgccccctggccacctgcctacccacctgtcacctcctacccacccctgagccagccagacctgctccccatcccgtnagtagctgctcagcccctgcccctccaaagctcagcccctccccctccaaactccactctctaccccttnacttttttggattgggggcccctttcccttttgcaactgctgttgccccctgagccccacctcaggcatgacccctgacctttgactcccagaagatccccgcagccccttgggggctcccaccggacgccatcttcccggcgggattctgatggtgccaacagtgtggcgagctacgagaacgaggaaccagcctgtgaggatgcggatgaggatgaggacgactatcacaacccaggctacctggtggtgcttcctgacagcaccccggccactagcactgctgccccatcagctcctgcactcagcacccctggcatccgagacagtgccttctccatggagtccattgatgattacgtgaacgttccggagagcggggagagcgcagaagcgtctctggatggcagccgggagtatgtgaatgtgtcccaggaactgcatcctggagcggctaagactgagcctgccgccctgagttcccaggaggcagaggaagtggaggaagagggggctccagattacgagaatctgcaggagctgaactgagggcctgtggaggccgagtctgtcctggaaccaggcttgcctgggacggctgagctgggcagctggaagtggctctggggtcctcacatggcgtcctgcccttgctccagcctgacaacagcctgagaaatccccccgtaacttattatcactttggggttcggcctgtgtcccccgaacgctctgcaccttctgacgcagcctgagaatgacctgccctggccccagccctactctgtgtaatagaataaaggcctgcgtgtgtctgtgttgagcgtgcgtctgtgtgtgcctgtgtgcgagtctgagtcagagatttggagatgtctctgtgtgtttgtgtgtatctgtgggtctccatcctccatgggggctcagccaggtgctgtgacaccccccttctgaatgaagccttctgacctgggctggcactgctgggggtgaggacacattgccccatgagacagtcccagaacacggcagctgctggctgtgacaatggtttcaccatccttagaccaagggatgggacctgatgacctgggaggactctcttagttcttaccttttgtggttctcaataaaacagaacttaaaaaattgtctaagaaaaa

SEQ ID NO: 593919 - DNA, 2030 bp, Homo sapiens
  misc_feature (797)..(797): n is a, c, g, or t
  misc_feature (867)..(867): n is a, c, g, or t
cgcaggcgggcgggagggcgggcacggagaggcgggcgccgaggaggggcaggtagggctgggacgcaggggtaactggatcccccgacttcagcccaggccctggtctgaccaccctgggagcagggactttccacagtcagctggacgcacactcagcccagtaaaagaggggacccatcccgggagccccggggagggcacagctgcctcctcccgggctcccctgccacctggtgcctacctgccccctgctccctgccgggtccggtcctcaccccatcttcatctggccttgactctgcccttgaggggcctaggggtgcagccagcctgctccgagctcccctgcagatggaggaggccatcctggtcccctgcgtgctggggctcctgctgctgcccatcctggccatgttgatggcactgtgtgtgcactgccacagactgccaggtgagtgggaaactggtgggggtacccagggcccagggacaccgacgggatcctcatccactcccagcccctgtgtctgtcctggctctgtccctgcctccgtcctgatcccagcgcctctgagagtccctggatcccagcaccttctgccctaagcaccccctgttcctagctcaccagccctctctttcccaggctcctacgacagcacatcctcagatagtttgtatccaaggggcatccagttcaaacggcctcacacggttgccccctggccacctgcctacccacctgtcacctcctacccacccctgagccagccagacctgctccccatcccgtnagtagctgctcagcccctgcccctccaaagctcagcccctccccctccaaactccactctctaccccttnacttttttggattgggggcccctttcccttttgcaactgctgttgccccctgagccccacctcaggcatgacccctgacctttgactcccagaagatccccgcagccccttgggggctcccaccggacgccatcttcccggcgggattctgatggtgccaacagtgtggcgagctacgagaacgaggaaccagcctgtgaggatgcggatgaggatgaggacgactatcacaacccaggctacctggtggtgcttcctgacagcaccccggccactagcactgctgccccatcagctcctgcactcagcacccctggcatccgagacagtgccttctccatggagtccattgatgattacgtgaacgttccggagagcggggagagcgcagaagcgtctctggatggcagccgggagtatgtgaatgtgtcccaggaactgcatcctggagcggctaagactgagcctgccgccctgagttcccaggaggcagaggaagtggaggaagagggggctccagattacgagaatctgcaggagctgaactgagggcctgtggaggccgagtctgtcctggaaccaggcttgcctgggacggctgagctgggcagctggaagtggctctggggtcctcacatggcgtcctgcccttgctccagcctgacaacagcctgagaaatccccccgtaacttattatcactttggggttcggcctgtgtcccccgaacgctctgcaccttctgacgcagcctgagaatgacctgccctggccccagccctactctgtgtaatagaataaaggcctgcgtgtgtctgtgttgagcgtgcgtctgtgtgtgcctgtgtgcgagtctgagtcagagatttggagatgtctctgtgtgtttgtgtgtatctgtgggtctccatcctccatgggggctcagccaggtgctgtgacaccccccttctgaatgaagccttctgacctgggctggcactgctgggggtgaggacacattgccccatgagacagtcccagaacacggcagctgctggctgtgacaatggtttcaccatccttagaccaagggatgggacctgatgacctgggaggactctcttagttcttaccttttgtggttctcaataaaacagaacttaaaaaattgtctaagaaaaa

SEQ ID NO: 593920 - DNA, 235 bp, Homo sapiens
agcccaagtcaaagcctgacagcagccgcggccgaagtctggtgcccgggaagagtcgtgcagcgactccggcaccatgtgctcctcccaccctgataacttgagccgggctcagtcaggctccagcctgtccttggcctctgcggcgacgccagaacccgagagcgttcattccggggacacaccctctcagggagtggaatagatggaagcgtcgcgcatgggtaccgagctc

SEQ ID NO: 593921 - DNA, 1354 bp, Homo sapiens
cgcaggcgggcgggagggcgggcacggagaggcgggcgccgaggaggggcaggtagggctgggacgcaggggtaactggatcccccgacttcagcccaggccctggtctgaccaccctgggagcagggactttccacagtcagctggacgcacactcagcccagtaaaagaggggacccatcccgggagccccggggagggcacagctgcctcctcccgggctcccctgccacctggtgcctacctgccccctgctccctgccgggtccggtcctcaccccatcttcatctggccttgactctgcccttgaggggcctaggggtgcagccagcctgctccccatcccaagatccccgcagccccttgggggctcccacaaccagcctgtgaggatgcggatgaggatgaggacgactatcacaacccaggctacctggtggtgcttcctgacagcaccccggccactagcactgctgccccatcagctcctgcactcagcacccctggcatccgagacagtgccttctccatggagtccattgatgattacgtgaacgttccggagagcggggagagcgcagaagcgtctctggatggcagccgggagtatgtgaatgtgtcccaggaactgcatcctggagcggctaagactgagcctgccgccctgagttcccaggaggcagaggaagtggaggaagagggggctccagattacgagaatctgcaggagctgaactgagggcctgtggaggccgagtctgtcctggaaccaggcttgcctgggacggctgagctgggcagctggaagtggctctggggtcctcacatggcgtcctgcccttgctccagcctgacaacagcctgagaaatccccccgtaacttattatcactttggggttcggcctgtgtcccccgaacgctctgcaccttctgacgcagcctgagaatgacctgccctggccccagccctactctgtgtaatagaataaaggcctgcgtgtgtctgtgttgagcgtgcgtctgtgtgtgcctgtgtgcgagtctgagtcagagatttggagatgtctctgtgtgtttgtgtgtatctgtgggtctccatcctccatgggggctcagccaggtgctgtgacaccccccttctgaatgaagccttctgacctgggctggcactgctgggggtgaggacacattgccccatgagacagtcccagaacacggcagctgctggctgtgacaatggtttcaccatccttagaccaagggatgggacctgatgacctgggaggactctcttagttcttaccttttgtggttctcaataaaacagaacttaaaaaattgtctaagaaaaa

SEQ ID NO: 593922 - DNA, 1398 bp, Homo sapiens
  misc_feature (5)..(5): n is a, c, g, or t
  misc_feature (489)..(489): n is a, c, g, or t
  misc_feature (544)..(544): n is a, c, g, or t
  misc_feature (561)..(561): n is a, c, g, or t
  misc_feature (592)..(592): n is a, c, g, or t
gtctngcttgggcctagtgtgtcatgtcccctccacacacgccaccaaactcccactgctccgagccgcactacatccctgctccccagcctaggggctgtgctggggcctgaccctttgtgagctctcctcagtcccagtcaagtggacctcctccctccctctccacagcccttgcccttgtccaggccaccatcaccatcaccaacaccatccttgccagcctggagtcccctctcttcattctgtggggctaatgggggtggctgtgtgggaagcctctggggtctaccgttggggagctctgcatggctgaggttgggggttctctgggaacctgtggccaagggtctctggtcacagtgccgaggtgggcctggcttttccacagtggagtccattgatgattacgtgaacgttccggagagcggggagagcgcagaagcgtctctgggtgagtaaccggtgcttgtcggtgcctgcccctgnaccccgctgccccaccatgctctcagtgtgaccagatcccaccctggggctaccnacaccctctgccccctntgtctgggcgtccccttgctctctcgccctnctgacccctttgcgtggctgcccctccttctgatctgtccccacagatggcagccgggagtatgtgaatgtgtcccaggaactgcatcctggagcggctaagactgagcctgccgccctgagttcccaggaggcagaggaagtggaggaagagggggctccagattacgagaatctgcaggagctgaactgagggcctgtggaggccgagtctgtcctggaaccaggcttgcctgggacggctgagctgggcagctggaagtggctctggggtcctcacatggcgtcctgcccttgctccagcctgacaacagcctgagaaatccccccgtaacttattatcactttggggttcggcctgtgtcccccgaacgctctgcaccttctgacgcagcctgagaatgacctgccctggccccagccctactctgtgtaatagaataaaggcctgcgtgtgtctgtgttgagcgtgcgtctgtgtgtgcctgtgtgcgagtctgagtcagagatttggagatgtctctgtgtgtttgtgtgtatctgtgggtctccatcctccatgggggctcagccaggtgctgtgacaccccccttctgaatgaagccttctgacctgggctggcactgctgggggtgaggacacattgccccatgagacagtcccagaacacggcagctgctggctgtgacaatggtttcaccatccttagaccaagggatgggacctgatgacctgggaggactctcttagttcttaccttttgtggttctcaataaaacagaacttaaaaaattgtctaagaaaaa

SEQ ID NO: 593923 - DNA, 219 bp, Homo sapiens
gcctttaatcccgctacaacagggggggaaaattggccttttgattaaaaacgggcccctaggagactggaagtttaaaaaaggacaagccccttcagggaagagggaattgattttttttaaaagttttttttttaaaaagcccaaaaggttgtttttttaaaattttgaaaaggggtgggcccacaaagccccatttatgtttttaaatttttttta

SEQ ID NO: 593924 - DNA, 702 bp, Homo sapiens
  misc_feature (171)..(171): n is a, c, g, or t
tggggtccccaggagctgagggccccaggatcgacatgattctgaaggtgattgtcatgggtgcagggagcaggagctgatggggcagaagtgctagtggccggggtgctgtcaggaagcaccaccaggtagcctgggttgtgatagtcgtcctcatcctcatccgcatcntcacatggcgtcctgcccttgctccagcctgacaacagcctgagaaatccccccgtaacttattatcactttggggttcggcctgtgtcccccgaacgctctgcaccttctgacgcagcctgagaatgacctgccctggccccagccctactctgtgtaatagaataaaggcctgcgtgtgtctgtgttgagcgtgcgtctgtgtgtgcctgtgtgcgagtctgagtcagagatttggagatgtctctgtgtgtttgtgtgtatctgtgggtctccatcctccatgggggctcagccaggtgctgtgacaccccccttctgaatgaagccttctgacctgggctggcactgctgggggtgaggacacattgccccatgagacagtcccagaacacggcagctgctggctgtgacaatggtttcaccatccttagaccaagggatgggacctgatgacctgggaggactctcttagttcttaccttttgtggttctcaataaaacagaacttaaaaaattgtctaagaaaaa

SEQ ID NO: 593925 - DNA, 609 bp, Homo sapiens
gagaatgtgtaagtgctgggtgctgaacttggatattcagctgaggagatttccaagcagtgttgagagcgtagcctgacttctccttgctgcttatagtaaaatgtgagagacataaggaagaaactgttgagcacaaaggagccagaaagcgaagatgtggaaaattcttggcctaatcatattacaaaaactgcaaaagtgtcccctggacagaacagcaaggctgttcaagcgtttgccccagagctgaggtatgtgactcgtgggtccactcaaccctttcagcagaaatctacaatgaagatggggtaatctaggaagcgtctgtgggaaaactctctgattttatagcttgggcctctataacttgcaaaagagaccaacaaggctcttgagaatctgacaccagcagaaacactgccggcctggagtgaagggggcagagatgagataaagggaaggaagggtggccccgaaggtggggctgtctcgtatcagagcatgggtcattccagcaggcccagaagaaaaatctcaggccaagaggattccctcaggcttgaaaccaatgatttgcctgctgggcttggatgccggtttagcgat

SEQ ID NO: 593926 - DNA, 583 bp, Homo sapiens
gcggccgcctactactactactgctcgaattcaagcttctaacgatgtacggggacatggcgtcctgcccttgctccagcctgacaacagcctgagaaatccccccgtaacttattatcactttggggttcggcctgtgtcccccgaacgctctgcaccttctgacgcagcctgagaatgacctgccctggccccagccctactctgtgtaatagaataaaggcctgcgtgtgtctgtgttgagcgtgcgtctgtgtgtgcctgtgtgcgagtctgagtcagagatttggagatgtctctgtgtgtttgtgtgtatctgtgggtctccatcctccatgggggctcagccaggtgctgtgacaccccccttctgaatgaagccttctgacctgggctggcactgctgggggtgaggacacattgccccatgagacagtcccagaacacggcagctgctggctgtgacaatggtttcaccatccttagaccaagggatgggacctgatgacctgggaggactctcttagttcttaccttttgtggttctcaataaaacagaacttaaaaaattgtctaagaaaaa

SEQ ID NO: 593927 - DNA, 329 bp, Homo sapiens
atgtgcttggcctcgtcctcctatgacctcactggttcgcatctgggaccttcagagctggagctgatcggctgaagctgcaggggccacaacaatacgctggcttgccgtgcagcgagtgcttcgctcgcgagctactcgagcgcagaaccggcgatgtgatatggcctgtgtgtgtggtgaccatgagcatgtcattatagctgcggactgagtggctgatgctctcactgtgcataaccactgctggttctgactgaggcgatggtaagtgggcgaagctgtcgagtccactgctttcccagaacggttctgtactgtcccgatct

SEQ ID NO: 593928 - DNA, 1156 bp, Homo sapiens
cgcaggcgggcgggagggcgggcacggagaggcgggcgccgaggaggggcaggtagggctgggacgcaggggtaactggatcccccgacttcagcccaggccctggtctgaccaccctgggagcagggactttccacagtcagctggacgcacactcagcccagtaaaagaggggacccatcccgggagccccggggagggcacagctgcctcctcccgggctcccctgccacctggtgcctacctgccccctgctccctgccgggtccggtcctcaccccatcttcatctggccttgactctgcccttgaggggcctaggggtgcagccagcctgctccgagctcccctgcagatggaggaggccatcctggtcccctgcgtgctggggctcctgctgctgcccatcctggccatgttgatggcactgtgtgtgcactgccacagactgccaggctcctacgacagcacatcctcagatagtttgtatccaaggggcatccagttcaaacggcctcacacggttgccccctggccacctgcctacccacctgtcacctcctacccacccctgagccagccagacctgctccccatcccaagatccccgcagccccttgggggctcccaccggacgccatcttcccggcgggattctgatggtgccaacagtgtggcgagctacgagaacgaggaaccagcctgtgaggatgcggatgaggatgaggacgactatcacaacccaggctacctggtggtgcttcctgacagcaccccggccactagcactgctgaactgagggcctgtggaggccgagtctgtcctggaaccaggcttgcctgggacggctgagctgggcagctggaagtggctctggggtcctcacatggcgtcctgcccttgctccagcctgacaacagccaggtgctgtgacaccccccttctgaatgaagccttctgacctgggctggcactgctgggggtgaggacacattgccccatgagacagtcccagaacacggcagctgctggctgtgacaatggtttcaccatccttagaccaagggatgggacctgatgacctgggaggactctcttagttcttaccttttgtggttctcaataaaacagaacttaaaaaattgtctaagaaaaa

SEQ ID NO: 593929 - DNA, 576 bp, Homo sapiens
ggtcctatacaagtcgacagtattttttaactgcctttatatacaaattttaaatatgaatttgcaagaaacatctatcatatgtacattgcggtgttctgaatagatcacattagccacaacattcccttaaaccaaagcctaatccagggcaaagccctaactcttcaactctgtgaaggccaagagaggcaaggaagttggagaagaaaaatttaaagcttacagcggttagttcatgaggtttaaggaaagaagccatctacataacataaaagtgcaaggtgaagcagcaagtgttgatggtcaagctgcagcaagttacccagaatatctagctaagataattgatgaaagtgactacgctaaacaacagattttgaatgtagaggaaacagccttctattggaagaagatgccatctgcgactttaatagccagaaaggagaagttaatgctttgcttcagagcttcaaagtacaggctgattctcttgtaagggtcagctggtaatattgagttgaagccagtgctcacttaccgtgccaaaaatcctggggcacttaagaattatgt

SEQ ID NO: 593930 - DNA, 778 bp, Homo sapiens
  misc_feature (5)..(5): n is a, c, g, or t
  misc_feature (489)..(489): n is a, c, g, or t
  misc_feature (544)..(544): n is a, c, g, or t
  misc_feature (561)..(561): n is a, c, g, or t
  misc_feature (592)..(592): n is a, c, g, or t
gtctngcttgggcctagtgtgtcatgtcccctccacacacgccaccaaactcccactgctccgagccgcactacatccctgctccccagcctaggggctgtgctggggcctgaccctttgtgagctctcctcagtcccagtcaagtggacctcctccctccctctccacagcccttgcccttgtccaggccaccatcaccatcaccaacaccatccttgccagcctggagtcccctctcttcattctgtggggctaatgggggtggctgtgtgggaagcctctggggtctaccgttggggagctctgcatggctgaggttgggggttctctgggaacctgtggccaagggtctctggtcacagtgccgaggtgggcctggcttttccacagtggagtccattgatgattacgtgaacgttccggagagcggggagagcgcagaagcgtctctgggtgagtaaccggtgcttgtcggtgcctgcccctgnaccccgctgccccaccatgctctcagtgtgaccagatcccaccctggggctaccnacaccctctgccccctntgtctgggcgtccccttgctctctcgccctnctgacccctttgcgtggctgcccctccttctgatctgtccccacagatggcagccgggagtatgtgaatgtgtcccaggaactgcatcctggagcggctaagactgagcctggtgtgttcttgcggaggggcaggaactgttgtagctgctttgggtttgggggatagcttgcaagctggagacct

SEQ ID NO: 593931 - DNA, 938 bp, Homo sapiens
ctttggggccagaaggtcgtctgaggaggccggggaggctgcctaccctgtccctttgcctgctgctgggaccatgggggctggggccagcgctgaggagaagcactccagagagctggagaagaagctgaaagaggatgctgagaaggatgcccgcactgtgaaactgctgcttctgggtgccggtgaatccgggaagagcactattgtcaaacagatgaagattatccaccaggacgggtattcgctggaggaatgcctcgagttcattgccatcatctacggcaacactctgcagtccatcctggccatcgttcgggctatgaccacgctcaacattcagtatggagattcagcccggcaggatgatgcccggaagctcatgcacatggcagatactattgaggaaggcacaatgcccaaggagatgtcagacatcattcagcgcttgtggaaggactcgggtatccaagcttgctttgaccgagcctcagaataccagctcaatgactccgccggctactatctctcagacctagagcgtctggtgactccaggatatgtgcccactgagcaggacgtgttgcgttctcgtgtcaaaaccactggtattatcgagactcaattctccttcaaggacctcaacttcagaatgttcgatgtgggcgggcagcgttcccgaggcgcaaaaagtggatccactgctttgagggtgtgaacgtgccttcattttcatcgctgggctgagcgcttacgaaaatgggtgctggggggggcgaacgcaattgaaccgaatggggaaaagctggacctgttcaacaggttgggatcatcgtaattggcccaaggtattgggcttcctcacaagaaggaggtttcccgaaaaaaaggggcctaattgtccgtatatggagattttagagggggaatatagagcg

SEQ ID NO: 593932 - DNA, 118 bp, Homo sapiens
gatctccagaggccggtggcttgtggtgcttaggctcggcacgcacatttcagcgaaggggtatcgccacaagcccagcaccgcgcagtcctgggctttggcgattaccccttcgctg

SEQ ID NO: 593933 - DNA, 386 bp, Homo sapiens
  misc_feature (39)..(39): n is a, c, g, or t
  misc_feature (43)..(43): n is a, c, g, or t
  misc_feature (54)..(54): n is a, c, g, or t
  misc_feature (67)..(67): n is a, c, g, or t
  misc_feature (70)..(70): n is a, c, g, or t
  misc_feature (88)..(88): n is a, c, g, or t
  misc_feature (127)..(127): n is a, c, g, or t
  misc_feature (156)..(156): n is a, c, g, or t
  misc_feature (183)..(183): n is a, c, g, or t
  misc_feature (187)..(187): n is a, c, g, or t
  misc_feature (220)..(220): n is a, c, g, or t
  misc_feature (257)..(257): n is a, c, g, or t
  misc_feature (265)..(265): n is a, c, g, or t
  misc_feature (275)..(275): n is a, c, g, or t
  misc_feature (278)..(278): n is a, c, g, or t
  misc_feature (283)..(283): n is a, c, g, or t
  misc_feature (292)..(292): n is a, c, g, or t
  misc_feature (309)..(309): n is a, c, g, or t
  misc_feature (316)..(316): n is a, c, g, or t
  misc_feature (385)..(385): n is a, c, g, or t
tgactttcaccaatgggtttatttaaaaggaagcaaatnaaanaaaactatggngataacagcagangtntagttataattcatttcnctaatgctgattaatatattcatgaacaaatcaaatgtnttgccaaaagaagaatgccaccattaacnccccagcggctactggtttcagttgtncttntcaatcaggcaaaatgttctttcttaagccccnatttattttacttcctgacagtttcaaaaataattcntcttgggngttgtttccncanaaacncttcctggngcttgattgctttgccnatgtganatttgacttcaaactgccattttacctttataaacatttggaactttctaagcctgaggggaatgcccna

SEQ ID NO: 593934 - DNA, 319 bp, Homo sapiens
gatggaagccctgccccgggccagggccctggtccacccgcggggcctgcgccatatggtcgaccccaaggcgctgtggctgggcgcactggccgtctatggcgaagaggagatgcagcgtagctacggcaagctgatcccggtgccggccgagcgcgcccaggccacgcatgacgagcagatcgtccatctcgccggccggccgctgcgtttcatcgacagcccgggacacgccaagcaccaccacgccatctgggacgagaaaagccgcagctggttcaccggcgacaccttcggcctgtcctaccgcgccttcggc

SEQ ID NO: 593935 - DNA, 152 bp, Homo sapiens
  misc_feature (2)..(2): n is a, c, g, or t
tntatttaaatacatttatttgaaccttcctgggggaggcttgatttgatgggtggtgattaaagcctcccaaagccaatcctggcatggcttgggactcaaaacacaggatctgacgggagggcacaataccatctgaacgcccacaaaag

SEQ ID NO: 593936 - DNA, 597 bp, Homo sapiens
  misc_feature (50)..(50): n is a, c, g, or t
  misc_feature (121)..(121): n is a, c, g, or t
  misc_feature (137)..(137): n is a, c, g, or t
  misc_feature (343)..(343): n is a, c, g, or t
  misc_feature (497)..(497): n is a, c, g, or t
acgaatgtcccacgttcgtcgtaatcgtcgaggtcggactaggaagccgncgtcgggcatttcgcgcaccggattcgatcatcgagtaaggcatgtgtcacgtgcaggtcgccgccaccgncatcgagttcgatgtngaaggtcgacaccacaatggcctcgctggggccgacgatgttggccatggccgggttcacttccgagtttgatgtactcgaaattgacttccatgatcgcctgccaggcttccttcaagtcgatgaaggcctgctccagcaccatgcggtaccacccgcagttcggtgggggtgaattcacgcccttcgatacttggcgtgacggncgtcgcccaccgaaggaagttgtccaccagcttgaacaccagcttggcgtcgaggatgaacagcgcggtaccggcgtcaacgggcttgatcttgaccaggttgaaggctggtgggcacgtacagcgagtgcacgtactcaccgaacttcatcanctgcacgccgcccacggccacgtccgccgagcggagcagcagttgaacatgctgatgcgagtgtagcggcaaagggtacgttgatcatctccaggtacgc

SEQ ID NO: 593937 - DNA, 324 bp, Homo sapiens
aatcctgggggattttttggggggggggcccccccccttgggggggtttcccccggggcccccctttaaaggggttttttaacccccccagggggggtggggccttgttcccccccttttaaaccttttgggggcccaaatttggggccaattttgggggggtttttaaaagtttaggggcttttgtggggtttgggggcttttccaaccttttttttggggcctttgccccgggggggggaattcccttgcccttttttacccctggtttggggggggggaaggccctttttttttttaaactttttttatttgggcccctta

SEQ ID NO: 593938 - DNA, 122 bp, Homo sapiens
cgacgtaacacgaccctcctctgagtagcatcccttgtctagcattataagaaaatgaaggacaacgaggaacgggagcacagcagtgacctcacctctagaccctactccctaagacccta

SEQ ID NO: 593939 - DNA, 897 bp, Homo sapiens
ctcaggtgatccacctgccttgggctcccaaagtgctgagattacaggcgtgagccacgggctgactgttgtttcaacatgacttctctaagctataaataccagagtggccaaagagaagtggtcataattaaaccattattatatgtgtgtgaggtatccctagtctattattatagcaagggtggaacaacaggtgttctattctatgcgaagtttatgccaatgatcccgaacattagtgggaaatatagaggagtccctaatcagtgggtataattcaacaagagcggaatggtaaatccttggggagagttaaaaggacatttctctttaagtagggggtggtccacccccaagaggggcatttacattaatgccctgctatcataaattcccctttcatagccccaggtggaattacttccctcctctccacgggctaccgtgttgactcgacgttgggcacttgggtcaataacaactggaagcgtgaccttggaagcggggaccctttggggtgccttaacgggtcgcagggtgtgaccgttgacaaaaacataagcaaaaggctgtgaattttaacacaacactatgttcgttgcataaacagggggtggttgtcacattacgcgggaacgttaccataggacattcctggaagtacagctgggtgtggcgacaagtgccttaagtgttccgtgtggtagagtgtgggcttaagtgatgtggacacaacttgacttgggaggcggggatgctggctgggtcatggtgaccttaatgaaaggcggcggtctaaggcaccggtggcacacacgcatttgtcctgttgggtagacgccacctgtgtgggcccaacctcgaacagtgccgtatggtacttcccacgtataa

SEQ ID NO: 593940 - DNA, 274 bp, Homo sapiens
gcccagagctgaagtggggcagacctgttcctcgggatgatgggcacgctatccacagtctcgcagtggttttattggaggttgtgggctttttttaaaaaaaaaaaagtcctcaaatcaggaagaaacatcaaagactatgtcctaggggagggagtaatcctaacacccaggcgggccgccagttggcaccggcctctatcccagacggccctcgtcccagctctcggtccaacggtggattatgtgatttttctgatacgtccattcagcg

SEQ ID NO: 593941 - DNA, 282 bp, Homo sapiens
  misc_feature (37)..(37): n is a, c, g, or t
  misc_feature (45)..(45): n is a, c, g, or t
ccccccccccccagggtgggggttagggggggggggnaggggggnggccccccccccccctttgttgggggaaaaaattccccccttttaaaaagggggggggggggccccctggggggaaaaagcccccctttttttggggcctttcccccccccaatttttttttttggggggggtacccccggggggggtggggggggccttttttttttttgggccccggcccccttttttgggggggcctttttttggggtcttttttttttttttccccgccccca

SEQ ID NO: 593942 - DNA, 190 bp, Homo sapiens
gaatgagatcgtcgcaccgaagccgccgccaccaccgcgcctccgcctcggccgccgccgcagctgctcctggtccccgtccctttgccgccctcgtcaggcccagctctcctgcgccgccgctcccgccgcgccccgccatgccgctctactccgttactgtaaaatggggaaaggagaaatttgaagg

SEQ ID NO: 593943 - DNA, 245 bp, Homo sapiens
  misc_feature (190)..(190): n is a, c, g, or t
  misc_feature (211)..(211): n is a, c, g, or t
caatagcactcgttttagaagtcaatagcaaaacattccaaaaagtggaaagtgatctataatacccaagttctatgttcaactaccaggttaaacaaggaaaacattttctgtgtcattctgttttacaaccacgtataaacccacgaagaatcaacgatctggatatccttttccacacactctgctnattgacaactgggagatcctnctcagagtcgacctcgccaggcatgcacaagctt

SEQ ID NO: 593944 - DNA, 770 bp, Homo sapiens
tccgggtaataaaatttatccaaatgtgccttaaaataggcgcgggggtttgcccagggtgctctgtgatatataaggcccggacttttctgccagttttcctgtgaccaaggaccccaaaaagttggacacgccaggtgaattgttatacacaagctcatcgtctgtcatcttcacgtgaccaacagctacagccagacataacaccttctccacttgggacactggatggtgggacttacacctcatccacttgggccaccatgtttccgtggtgtcgtagaccagggaggggaactcttcctgccttatttaaccctggggccgaggattcgggaaaatctggattgatcagagactctgaggccaaaaacgcatcatactcctgggccagccttcttgaccagtttttaaatcactaggtgcgagtatactccaagacgcctcgatgtccatgtggggggatcatccacggtctaagcctcgtccacagttgctgcgaggccccccgaggacacacacagaagaaacttcaggggcggggaacgaggacctataagcctgacacgggcccgaaaagcgctgagtcctctcgggggatcacaagtcactcacaagccgatatgaaacctccaaccgcttccaggaaacttgggggcaatcgcgctggtcccgagccggactacccgacaccgctcgaacaggggtgcgccgaagaaacattgccggccagggtccacagcaatcaaaggggatgactggccccagtg

SEQ ID NO: 593945 - DNA, 182 bp, Homo sapiens
aggtacccccgtgggcgtatcaggaagttatgcccacgatacagttcctacagagtgactcagttggacccacgcatcgccaatgtcttcaccaatgccttccgcgacggccacgaccctcatccaacccttcatgttcctgcctagactatcgtgcaccagtcccatggaacccaaccccc

SEQ ID NO: 593946 - DNA, 379 bp, Homo sapiens
aaacattcagaccatagcacttaacctttattttaaaatgtcagccaggtgcagtggctcatgcttgtaatcctagcacttagggaggccaaggtgggaggattgcttgagctcaggaatttgagaccagcctgggtaacatagtgaaaccccatctctacaaaaaataaaccacattagttgggtttggtgatgggtgcctatagcagcagctacttgggaggctgaggctggaggatcacttgagcccagaaggttgaggcttcagtgagccatgattgagctactgcaatccagtctgggtgacagagtgagaccctgtctcaaaaagtcaattatttttgtcttcttgtgtcttctattggttgtagctgagttt

SEQ ID NO: 593947 - DNA, 1008 bp, Homo sapiens
ctgatactctcagcgacgtgccatatgcgctgacgaaatgtaatgtctcactgaccgggatcgatgattaaagttgagctagtcactctggatctggacctatctcggctattggctgcatcccatgaattcctcccccccacaatgttctatccggcatcgctcatatctcgaagtcttctctgggcgtcccctgatgacttacatttgtccgcgtatgggcaaggtcttcgggagtccgtttgatcgtttgtccgttgagctcaagttaacactgggtgtcacctggccatgtaccctcattcttgcaagtcgaacttcaacgaagcaaggcaccgctctcctagtgacatacgtgctgacgaaggatcgttcttatagagcgctgtcctgaccaacgttggtgttggtctgtctcgtgcggcacaggaccggcccattcatggtgggagccagaagtccgaatctcgctgatttggcgagttgtatcggcgtgctgcgatatgatggaggggctggatgcattcgatgacctgatgcagcacacgcacatccacgccctggtacctgcgggtggagagggccatcaccgaggcctccccagcgcactgaatgtccccgcgcagagcatgagggaaggcagcggaagacgccagcatgcaagggcctggggccactgggccagcgcctggcgatactggttgggggcaggatcattctgccgcttgtgtccacgcacccgccaccagccctctcagcttctaatcacagggcacctgctggggctcaggagatgttatgggatagagttacagcgccatgcacaatgtcagtggggtcgaccgcttgcctgtccactgccttcctgctcagcagcccctcttcctggaccactcagtggctgtctcatggctaatcctgtgggtgggggccctcgaaggacagcaggacggtttgttttaagtggaatccatacctggttcctgtaacccactggtccaaagcctc

SEQ ID NO: 593948 - DNA, 561 bp, Homo sapiens
gatgaggtcggtgcccgacccttattcccgggtccctgctactcctggccttgctgatcctctacgccctgttgagccggctcatctggctcccgagcctctggggcccaactcgaggccaagggtgcgagggctggaacgccagtgtggaggtagctgcgtctggcgccagaggcagagccggcgaagggggcccgcagttgtttttggaggagtgagccggatagccccacacacgcgccagtggtacataccgaaagagctagagctagcttcgtgggcctatgctagccctcactgccagcaccacctgcgcctttatctatgcatctgtactctagaacacttcagtaatcatttgattcctttgccagcaggctcccacatagccaatgagagaacagaagaaatgaccattcccccatggctgtccattgcgtgccctggttcttcttgagtgttctcttgtctgcgggtatggctgctcttagacccgtttctcgtgcctcccagtcctgtccttcactcagaggaacggttagagaagggcactcccttcat

SEQ ID NO: 593949 - DNA, 116 bp, Homo sapiens
aatcgaagtcctggcttttttcggtttttcacctgctctcctggtctctggttttttaaacccatttttctttatgaatatattcatggcctttggaataaatgttttgagaaaga

SEQ ID NO: 593950 - DNA, 834 bp, Homo sapiens
cgccatttttcattgtggacgcccaacccttttaatggctccacgtagtcaacaatatggctaaggggctaactatactggcaagatccggatttcatagagtatttaaatatgagctattatactcttggagatggtgtagtgtaggcccgtttaattaatgggactgttaaaattccgaataattttatgaaagcgccacttcttatatgaattatcaccacccgtggttttcccttctatcttttcatttgtaaaaagttactacgaaattaggagatcacgccctggttcccaatttgtcacagccacttattttaggaggagataatttccaactaccccactggttaaaatacccactgaataatgctgtaattatatctaccacgttaaccccaaatttttataattggccgttcatactataattttctgtccccgttttttgttccccacaaataaatattatggcattaaaatatggcactgttatattgtatactcttacccctacttttgtttttataattagttcttccccatataactcagtgtagtattaccccaacacgcccctcgggagtttatgatcttcctcctgcaacctgtttttccacggagcttatctggcaccttatttaccacctgtgataaagtggcaacaggaaaaataagaatgaaataattctttttccacattagaattgtttttaaggggccaagtgcccagcccgctataaaggttttgtatttttttagaaaatgggaaaaagatatttgttttacctttgctaaaattttcccaattttaagtaaaccttttttttccta

SEQ ID NO: 593951 - DNA, 113 bp, Homo sapiens
acactgtcttactacttacgacgacgactgtgggacttacggtaacggggccgacgtcactggcacctgatccacaccacccgttcccgacacaccatggggtctacttcacg

SEQ ID NO: 593952 - DNA, 568 bp, Homo sapiens
gtgaaaatagggaattatgtgaagacaaataacaataagtataacgaaagtaaaatctaacaagattccaatccttaaaaaaagaacgaaacaacacaagtacaaacaaagcaaacccagaaccaatgagtggaagcttcctgtttacctatcttcaacacctttcatctttctactttccaacaggtagctactaaccaaaatttaacgtatatcattcttgtgtcaacagagcaaggcttatggccagaaatgaatgaaattcataatgaaggtattctgaggaaatatgatcttactctcaaagtctcaacaataccctgggtgataacaactggctctcaaggaacaagatagctcccaagcaactccagtgcccaggaaagatggtgaagagatctttgcagacaatctatcagttactggggcagaaaaatcattgtgactagtcatcttcatacgatagcttaaaccaacagacagaatttatagtgtagcgaagggcagtctactgcagtagttacttggatccactcctgctgtttggtgaccctgggcaatcaagctt

SEQ ID NO: 593953 - DNA, 1094 bp, Homo sapiens
  misc_feature (704)..(704): n is a, c, g, or t
gctgcagctcttgtcattcggccatcctttgccagactccatgatggttctgcaggttgctgcggccccccggacagtggctctgacggcgtaactgatggtcgctgctcaggatctgtggtccaggcgcagggaccactccagcagaattaaccttcttaccatgggacgggctagtgaatgtctacgcgtattaattgtgggacacagtcgacttacctggacgacgatacatctactagccgcgagacggatgttgcggtgctgcattccgacagaagatctgttggtggcgaagttgcctcggtgccggtagacggagacgcatgaggtgcgtgccttgaatagagagaagtagcttggcatcaggccgggataatgggacagtcctctggtgaggtaagcaagcaggggctcacgtgccagtgagactcggaatgtgctatgaaactctaggcctacagaagcactgaggcagttgagtcgcccaatttggaaccctcttgactagtcaggccctgaattgatcacgacggcccgttaaggcgggctggcacacctgggtttgatcaccacccggttcgcaaactgaaacggggggggccccctgtatatgacaaggacaatctccaaacagaagccctttggcttaatggttactttggcccaaactggtttgaaacgcggcgaaatttttccataanccccccaaagggggcacggccaattatccaggacggcttaccccgcaatttgggttcttccccttggcacatttgggtcacccagggggaaagggaaaaaaaccaagggccttggagcgaggttaccggttatgttccccaaacccaataccccttggcattgcccggtacacactctggggcaagaacctatgtgacccccttattccccaaggaatttcaccttgggcgttgggaattcggcccttggggatcaaattggaacaccccccccacgaaggcaacggggcccacgacttggtccgttaaccacgcccctttgtcgacaaaatggttgggggacggccaacgacccccaatggccatttgggcaacttagggttcaccttg

SEQ ID NO: 593954 - DNA, 191 bp, Homo sapiens
  misc_feature (141)..(141): n is a, c, g, or t
agttgaggaatgcccattgttaacgcgggggctggggcgggccttcatcccgttccctgattttaaaaagggccgtacagcattgccatcaattatcaaatcgggaatggcattgagatgccaagttgaagaccttttggncttcgtgggcttacagcagcaaggtggggtgtctggtggctgaaaagttc

SEQ ID NO: 593955 - DNA, 806 bp, Homo sapiens
tatttccaactatattcctatagaaaattgctacttcatagggcacttcaacacatttgtggctccaaagtcaaatgaatttggtagtgcagtaagggtgagtcccaattctttatgagctgccacatttttaatttaattcaatcttcattgtttcttttccaaaactttcttcacatagggatactcaatatttcttgtttattttttaaactatcatttaaattaaatacataaaaaccgtgatattagcataacttagcttttgagggactaattgtgatccagcagatttattactaaaatatgccgtaaaaaaatatagagcagattctgttaaataccttaattgcaagtgcttggagtgagaaatataccacctggctgtataacatacacactttttggatagataacccacacttgcttaaaagtacacttggtcattaacaaatttacaatagaaaaaaaaaacataacatactgttgaaactaactttacatattattatcgaaacctactactgtctgtcgcgaccgtattgtattctgtaccatgtcatctatactgcgtgtgatatagaagaaattagttgttagtgtaaaaaagccagggcaatacttaactcttcagctctaaatccataattcaatgagattacttatttgcagtctgctatggataacatatgggtcctatcgattatattgcgtgtgttagtattattgctccttagattattaaaccgggcctggtagattctcggcatatactctcttacagtataaacgcgatgacgagaagg

SEQ ID NO: 593956 - DNA, 938 bp, Homo sapiens
  misc_feature (278)..(278): n is a, c, g, or t
  misc_feature (434)..(434): n is a, c, g, or t
  misc_feature (463)..(463): n is a, c, g, or t
  misc_feature (502)..(502): n is a, c, g, or t
  misc_feature (557)..(557): n is a, c, g, or t
  misc_feature (611)..(612): n is a, c, g, or t
  misc_feature (639)..(639): n is a, c, g, or t
  misc_feature (690)..(691): n is a, c, g, or t
  misc_feature (694)..(694): n is a, c, g, or t
  misc_feature (696)..(696): n is a, c, g, or t
  misc_feature (698)..(700): n is a, c, g, or t
  misc_feature (703)..(703): n is a, c, g, or t
  misc_feature (707)..(709): n is a, c, g, or t
  misc_feature (711)..(712): n is a, c, g, or t
  misc_feature (714)..(714): n is a, c, g, or t
  misc_feature (726)..(726): n is a, c, g, or t
  misc_feature (754)..(754): n is a, c, g, or t
  misc_feature (757)..(757): n is a, c, g, or t
  misc_feature (759)..(759): n is a, c, g, or t
  misc_feature (766)..(766): n is a, c, g, or t
  misc_feature (768)..(768): n is a, c, g, or t
  misc_feature (770)..(770): n is a, c, g, or t
  misc_feature (772)..(772): n is a, c, g, or t
  misc_feature (776)..(778): n is a, c, g, or t
  misc_feature (785)..(785): n is a, c, g, or t
  misc_feature (789)..(789): n is a, c, g, or t
  misc_feature (791)..(791): n is a, c, g, or t
  misc_feature (793)..(793): n is a, c, g, or t
  misc_feature (798)..(798): n is a, c, g, or t
  misc_feature (811)..(813): n is a, c, g, or t
  misc_feature (817)..(817): n is a, c, g, or t
  misc_feature (822)..(822): n is a, c, g, or t
  misc_feature (836)..(836): n is a, c, g, or t
  misc_feature (878)..(878): n is a, c, g, or t
  misc_feature (900)..(900): n is a, c, g, or t
ctgcctctggggggtccgctagtcgcggggcggcggtgtgcggctgcgggcgcgaggttcccagcaggatgccccggctctgcaggaagctgaagtgagaggcccggagagggcccagcccgcccggggcaggatgaccaaggcccggctgttccggctgtggctggtgctggggtcggtgttcatgatcctgctgatcatcgtgtactgggacagcgcaggcgccgcgcacttctacttgcacacgtccttctctaggccgcacacggggccgccgntgcccacgcccgggccggacagggacatgggagctcacggccggactccgatgtcgacgagtttctggacaagtttctcagtgctggcgtgaagcagagcgaccttcccagaaagggagacggagcagccggccttgcgccggggagcattggganggaagagccgtgagagggctacgactggntccccgggcgacgcccgggcgcagcccagaccagggccnggcagcaggcggagcggaggagcgtgctgcgggggcttcgtgcgccaacttccanccttgcctttccccaccaagggagcgcgcattcgacgacatccccaactcggannctgagccacctgatcgtggacgaccgngcacgggggccatctacgtgctacgtgcccaaggttgccctgcaccaacannaancncnnnaanaacnnncnnancttaatccctcntcacctcttttctcccaacctctacccncancncaacccncncnancacnnncacaacnccancncncaccntacccacaacaannncttnctccnctactttaatctcnccctccaccccaataatttcaatctcaataataacaccaatnacctcttctttctctacccctnctctctccctaacccctcctacctcatcaatatctatc

SEQ ID NO: 593957 - DNA, 350 bp, Homo sapiens
ttgaagagacctttataagacactatacagaatggaatactagtagagatactagtatctttaacagtagcatggaaatgtaaactataggtaacataacataccacaggtaaacactggctttggtagaatagtgcagtcattagaagtcaaaataaatgactttctttttaaagccaaagaccatagttttagttctaagccactaggtagatctttaggggaatagtccaaatttactgtttacccagcagttgctatgtgctttcttaaccctgttctgttccagttttgctggatttgtacatggccattctagaaataggagttgaggtaatccgtagaggggc

SEQ ID NO: 593958 - DNA, 839 bp, Homo sapiens
  misc_feature (347)..(347): n is a, c, g, or t
  misc_feature (455)..(455): n is a, c, g, or t
gccgtggaccagacgggtcactttgaacggcaggtggcacagtaggtacgctaggagtgaaattaggaacaagtggggagcgaataagcctattgtaatcataggagaacttcttgtattatcgagtgtcgcaagctggcgctaatgtgtgatgggtagtcgtagaacgaccaaagacatacagctaagctcgattctctgcttgaatcctagagtaccattacgttagactaggtgactgttggtagagaacatacgtgcagcgaattatggtgagacgcgaatgtacatgtgcacatcagttgaccacaaagttgatgccctctgtagtctcgaccttgactgcnacgcccataggattagacccggtatggtgagacaccatcgttcgtgctcggcacacttgcgatcacatgctagctagtgcgtttccagcttgacgtggacgatacganccgttggacgtgaaactcgtcctcgagtcgtcgcttagcaggattcgtgtgccatatagatagggactcttcgaaggacgatgatatggtatgccagcaggatgagtcaggattcagggtagtgatatgatatggatgagtagacactttagcgaatgactaggcttgattgaaggacgagcgcagataaagagcgtgatcgattgcttcggggctctgggagcccaaggatcacagtctcctgcgttccgaaaggtcttggtcaaaacaagttccgcaatgaacacttcttgaagggaaggcatgcgcttgacgcagaaagcgctcgagatgaactaccgctaggtgacggtttgttggagtccatgcgtatagatgcaggag

SEQ ID NO: 593959 - DNA, 885 bp, Homo sapiens
ctgtacccaacttttcctccgatcccctaacaacccccctcctaatactaactaactgactcctacccctcacaatcatggaccaagccaaagccacttatccagtgaaccactatcacgaaaaaaacctctatctctctatactaatctccctatccaaatctccttaattataacattcacagccacagaactaatcatatataatatattcttcgaaaaccacacttatccccaaccttggctatcatcacccgatgagggcaaacagaccacgaatccagcctgaacgcaggcacatacttcctattctacaccctagtaggctcccttcccctactcatcgcactgatttacactcacaatcaccctaggctcactaaatcatactactatctcactctcactgcccaagacactatggaaaactcctgagccacgcagagttgatatgactagacgtacacgatagcttgtctataccgtaaagataccctctttgcggactccacttatgactccctaaagcccatggtcgaagcccccatcgctgggtcaatagtagattgccggagtactctgaaaactaggcggctatggtataagtacgcctcaagtcattctcaagcgccctgacgaaaaggaggatagcgctaccccttacgtgtgtacttaagccctatgaggcctcctgtataacaagcgtccatctgcgcgtacgagagaagagacctagggatcggtcattggcgtactgcttccattgaggggccgtagccctcgtgagtagacagcgttctcgtgcgaagcccgtgaggttgacgggggcgagcattgtcgataatcggcgcggagtacacctcatgagcagtcggcgaggcgata

SEQ ID NO: 593960 - DNA, 212 bp, Homo sapiens
accatgttactctgctgcttaaaaatcttacaatgccttatttttaaattaaattcacactctatttatttatttattgagacagagtctccctctgtcacccagactggagtgcagtggcacaatctcagctcactggaacctctgcctcctaggttcaagtgatctcctgcctcagcctcccaagtagctgggattacagttgtgcacca

SEQ ID NO: 593961 - DNA, 105 bp, Homo sapiens
cgtgacgaggtaggtagatggagaccagtctgtatacgacggtgaaaccccatctctactaagaaatataaaaaaaattagccgggatcttggcctcgtgcctgt

SEQ ID NO: 593962 - DNA, 584 bp, Homo sapiens
  misc_feature (267)..(267): n is a, c, g, or t
aaaagaaattcttttttttgcccaggttggaagtcaatgggaatatttgggcccattgcaacctcaccttcgggttcaaacgattttcctccttggtttctagagaattggaattggattccaaggtaagggccctccgccgggttaattttgtattccagtaaagacgaagttcaccatttggtcaggctgtttccagcttcttaccttggtatcggcttgactcagcctcccaaagtgaaggcaagattatttaaaccacatacntgctaagtgtaagaacaaggtttgtaaccaagcttgtctggcccaaaaccagagttcttcacacttgcagtgacaaatttcagctgagaagctgtattccagcacagcttcacgtagtcttcttgaaatacacatgtccattgcatggtttacacacaagtctatttgcttgtctgcccacacactggactataatctccttgaatgtaggagactcatttctcaatgtctgggatatagatggcattcatgcagatggtaatgagggcagttgtagctatgcgtattttcttccttgcttgttatgtctcgtgccg

SEQ ID NO: 593963 - DNA, 608 bp, Homo sapiens
  misc_feature (588)..(588): n is a, c, g, or t
ccactacgtggtctgcgccgagcggaagcagctggtcggcagtctcagcctctccatgacgcaggtgaaggtgtggttccagaaccggaggacaaagtacaaacggcagaagctggaggaggaagggcctgagtccgagcagaagaagaagggctcccatcacatctaccggtggcgcattgccacgaagcaggccaatggggaggacatcgatgtcacctccaatgactagcggtgggcaaccacaaacccacgagggacagagtgctgcttgactgctggccaggcccctgcgtgggcaccaagctggactctggccactcccatggccaggcttctggggaggccatggaagtcaatggccctcacaggggcattgaagcccgagggcacgccaacttgaaacgaggagacaagcgaatgggctggctgaggccagggaccacgttggccgttctacctcggagagccatgctctgcctgggacgggcccgcccgccacagcagcatcaccagctgcatctcacgtagtctccaatgtcccttttgttttgagtgcatttctgttgtaatttattgtataggcantacgcagggtagtgatccca

SEQ ID NO: 593964 - DNA, 978 bp, Homo sapiens
gctgtcccgctatggccccagcaacttggagccggacagcgcctgtgaactgcctggagtgctgcctgcaaggtaccctgaagcctccactgagcactataaggctagctctctgcgtgccaggactaagaatagttggacaccgagtcgtgcccctgaagcttggagatcatcccctgcccttcacgcgcatcgccgtgggtgttcaatccccgacaagccaagcagagctccaccacaaccaagtgatccgcctgagcagtgcagtgcgtggtgcaaccatgactgcaaatggagagccagctcaaagggaccttgagagaactgaacctcttcgaaggagggcgcagccggagtgcttgctgggggatcgtctgttagctgtgcatgggtggtgacttcccaattcatccccaagtgcgcaatcaaaaccaagacttagatagacgtgaccatacttggttggagagcaccatgtagaggagtatacccttttcgatggtacttaacctaaagcgaaacttagtgagatagtcagagaccaagattcagggacctactttgtatgttgacctgcaacagcgatggaatggtttacccaccattcaaacaccatgggctctgcaagatctagggtcctgctagttgaaaccagattgaccaagttcgacttaatagtacgcggaacttggtcgcgttcggggagagctccagagacaatagccatgttgtgtgtgcatgcatggactagttgtactgaaggataagtgcttgctagttatgcacaattggccgaagtcacaaggagtcttgaggcctcagggatgttgtccagctctggctcatcagagccactggtccccttgcagatgcatccccattgaatgacttacacagaaatgggttcgtccagtttgccgtgaaaagtcgttggaaggtccccccgtctactggtcagccggttaccccgggccccgc

SEQ ID NO: 593965 - DNA, 138 bp, Homo sapiens
cgatggttacctgcaaccaaagtttccgaggggaaggatgttcttctacttgtcacaatttgccccagaatcttaccggctacatctggtacaaacgggcaaatgacgggacctctacctattacacttacactcacg

SEQ ID NO: 593966 - DNA, 208 bp, Homo sapiens
gaaaccagggtcccctttttttccccttttaatttaaaataatgcgggtcaaaccatttccggtaacggaagtgttaattttacgggacttttgggacccttttgggaatttaaggtatggtaaggtattttacaggggtcctgattttgccccaaccgggatattgaagctatccaggcttttgaaataaaatttaaaaccccccca

SEQ ID NO: 593967 - DNA, 273 bp, Homo sapiens
  misc_feature (81)..(81): n is a, c, g, or t
  misc_feature (116)..(116): n is a, c, g, or t
  misc_feature (225)..(225): n is a, c, g, or t
aagaatttcttgaacccggtagatggaggtttcagtgagccaaggttgcgcctttgcactccagcctgggcaaaaagagtnaaaccccatcttgaaaaaaaaaagaaaagtggctnatgtgacagaggaactgaattttaaattttatttaattgtaattaattttaatagttacatgtggccagtattagtatagttatagaggcttgaagaatgccaaatcanttttctagtgagtactacactgaatcaaaatattagttggaaagaagc

SEQ ID NO: 593968 - DNA, 443 bp, Homo sapiens
tggttcactgaagacccaggatccagatgatagctcccagaatgccatgcaggctgctccccgcgatggcccctgcaccagcacgctcctacagccggcggccccgtgccaccgacgcccccctccctgcgccccatgctcactcttcgtgtacccttcccgagaataagcctaccatgggtcagctacgtgtttccggctcctgggcttcgtgtgcacttctggcgacgagccgaacctcctgctgactctgccacgctcccttccccctgccccctccaaccccgcatgtcctccgcccaccctggccatagcacctgcccttgctgcacgctgtcgggcttgacttccaacaccccccgccccgcgcacccccgcgctcccgcccccatgcccactctacccagcagtcacaggcccatgaccggaggcttgtgaggcgc

SEQ ID NO: 593969 - DNA, 202 bp, Homo sapiens
cgccattacaactatctatgggaaagacggtgagatgagtgaggctattgtgttgtaagtgaattcttcgagtcactggcccatttgggcaaaaagccaggttagcgggggcaggcctcctagaggagaggagggtggatggaattaggggtgttagtcatgttagcttgtttcacggtgcgagatagttgtgacagtggcg

SEQ ID NO: 593970 - DNA, 142 bp, Homo sapiens
tatgtgcaacatacatcaagatagaaaaggggacttaacatatcacgttgtatcttacttgcagtgaatgcaagggtaacttttactctggtggacctcccccatcacccaggtacctactgctgggctcccgactacccaa

SEQ ID NO: 593971 - DNA, 276 bp, Homo sapiens
tatatataagattattattcagaatacaagtaacattcaagcatcttttacagaaaagaaattagagtaggcgaaagaaccagaaaatgtattgaaagcaaaaaaaaaaaattctatttgggcacttggactggtaagttccggggttggaaatcatagtcctaaaaatgtagaaatggtgtatatcagatcactcatctaaggctgtagtgacccagcccaagatgaccaacataccccacacctactaacatctctgtacccttagtatatctc

SEQ ID NO: 593972 - DNA, 186 bp, Homo sapiens
agaagatccccctgttatctaatgggaaacaaaggtctgcccacaggggaaggcagaaaatgcccgcggctcttaaactgaatgctaaaagctttattctcctgggttccccctggtattctttgctcattgtcagtccacccaactgtaactgagcaagctctgggctgaagtctgacgtcagaa

SEQ ID NO: 593973 - DNA, 252 bp, Homo sapiens
gatcccacgtatatgtacagtaagaaggcccatcagtatgtacaaaagaaagggcatggtattctggtggtgaactgctgtttataattatgatactccagggttcggagagggaaaaaaccaacttccaataaagctaaataattaatttggtttaaaactcttgtgttaacatatttacgggtggggtacccgaggctccgaattccgtaatccatgggtcattagcttgtttccctgggttgaaatttg

SEQ ID NO: 593974 - DNA, 332 bp, Homo sapiens
tgatgctgaggtgatctagaggatcccggaatgtgtggtgttatggtcaccctgtacacatcggggacacaatactccgtcctcaaagacaacccacgggctatcggccccagcgacatttgtggtgactccgtcgccgtcctcaccgggtccgtctacgaagaaatggccaacgacaagaacgacgactgcaagcacaacggcaaaaagggagtcacgatccagtcgtacaaaaactctgccgacgtcgccaccgccgtcgccggagggaaagctgacctctggttctccgactctcccgtcgtcgactatgcataacaccacacaattcg

SEQ ID NO: 593975 - DNA, 814 bp, Homo sapiens
  misc_feature (3)..(3): n is a, c, g, or t
  misc_feature (71)..(71): n is a, c, g, or t
  misc_feature (117)..(117): n is a, c, g, or t
  misc_feature (125)..(125): n is a, c, g, or t
  misc_feature (165)..(165): n is a, c, g, or t
  misc_feature (172)..(172): n is a, c, g, or t
  misc_feature (192)..(192): n is a, c, g, or t
  misc_feature (202)..(202): n is a, c, g, or t
  misc_feature (231)..(231): n is a, c, g, or t
  misc_feature (245)..(245): n is a, c, g, or t
  misc_feature (263)..(263): n is a, c, g, or t
  misc_feature (272)..(273): n is a, c, g, or t
  misc_feature (284)..(284): n is a, c, g, or t
  misc_feature (290)..(290): n is a, c, g, or t
  misc_feature (296)..(296): n is a, c, g, or t
  misc_feature (303)..(303): n is a, c, g, or t
  misc_feature (307)..(307): n is a, c, g, or t
  misc_feature (319)..(319): n is a, c, g, or t
  misc_feature (327)..(327): n is a, c, g, or t
  misc_feature (332)..(332): n is a, c, g, or t
  misc_feature (354)..(354): n is a, c, g, or t
  misc_feature (357)..(357): n is a, c, g, or t
  misc_feature (367)..(367): n is a, c, g, or t
  misc_feature (369)..(369): n is a, c, g, or t
  misc_feature (372)..(372): n is a, c, g, or t
  misc_feature (378)..(378): n is a, c, g, or t
  misc_feature (382)..(382): n is a, c, g, or t
  misc_feature (385)..(385): n is a, c, g, or t
  misc_feature (388)..(388): n is a, c, g, or t
  misc_feature (397)..(397): n is a, c, g, or t
  misc_feature (399)..(400): n is a, c, g, or t
  misc_feature (416)..(416): n is a, c, g, or t
  misc_feature (453)..(453): n is a, c, g, or t
  misc_feature (459)..(459): n is a, c, g, or t
  misc_feature (474)..(474): n is a, c, g, or t
  misc_feature (489)..(489): n is a, c, g, or t
  misc_feature (514)..(514): n is a, c, g, or t
  misc_feature (523)..(523): n is a, c, g, or t
  misc_feature (552)..(555): n is a, c, g, or t
  misc_feature (560)..(560): n is a, c, g, or t
  misc_feature (569)..(569): n is a, c, g, or t
  misc_feature (636)..(636): n is a, c, g, or t
  misc_feature (674)..(674): n is a, c, g, or t
  misc_feature (722)..(722): n is a, c, g, or t
  misc_feature (780)..(780): n is a, c, g, or t
ttntaagatactgattggttacttgttgaagaaaacatacaatacaaaatacagaaaaagtggggtccggnccctcccactcccccccttacccacccacccccaaatactcatcancatgattnggtcagaacagggctcagagccagaggttggggtgaccgngggtggnggggttgtgggcaatgggtncgtggctgtnacaataatgctgtgataatgctgtggttncccagcggggaggngggagcggggagggggcngcagcgtgnngagagcgagcngaaggnagagcngcctctncctncctaagcccctncccaaggnctgcnccaccgcccaaaccaaagaccnctncgaacaaagngnggntgtggntgcnctngcngggtccgcngnnccgcagagggaaaganagggtagctgctctgaccccactgtccccatatactngggttngggggcaagagcttntggctactcccagcnagggtaaatgggagagctgttgtanggggaggtngtgggaagagcagttgatcattttttttnnnntagtnacttaaganttaaaattgatttagtatttgttcagaaaggtgcaggtggaatgactcactccggcctatgatcaanattatatggagatatcttggtggacccctccccctgcncccccagtggtggcccgtgtcgtttagtgcgattggttagagtggatnccagttgggtcattcaggcggaggaggcgggggcagcgggcaggcaaggggggctcanttgctgcagcactggctccggctggctgggttgt

SEQ ID NO: 593976 - DNA, 508 bp, Homo sapiens
gtcaatcaaagcgtcagcacgtgtatcctgacaagccacaactgcctggatcctggggcccccatcactggatcccagatcccctcactccacgccactggattcctgtattggtttttggtttgttgttccgttttaacctcgacactgggtctcagactccttctgctgacatgccagatccctgcatttcaagcactatgccttccagacccaggcactggatcccagattcccaagtccttcacccaccagattctggctccataaaacaagtgcggtgggtcccctagtgtgcacagcaatgtggtatcctggcaaacttgcagactgctggagttccagattctgggatccccaaatcccgtctgcccagtccctcaattgttgaaaccgtcatctctagaaggcagatcctgatattccaaggcactgaatcccaagccctgaatccccggatttctgatctgaagtcttccaggcgccgggtcccaaatgttcaggcccc

SEQ ID NO: 593977 - DNA, 982 bp, Homo sapiens
aaaaatatcctccggtggcagtatcattggttatggtatggtatatctagggattctcagatgcttagtgctaggtaatccaggttaatacgtcattggactacctttgtgcatctttctatgaagccttaatgggaacctgatgggtatgtgtagcagcttccttgtgaattctgtcagagctgcaacagcccctgcactgacactcagttttctaaggaactcctcctactaccatcttggctcagtctccctcacttaagccctgggttgaaaaattacattgccagttcccaggaaacatgttcagtttgcagattaagcctggcactcacctatccagacaaccagagctccacctgcttagcttgtttcaaagatttctgaaagaaaactaggggagcactcgtgaaccacaggagccagctggtgatctgctttcttaccctaacctcttgaaaaatgagtcgtctactatatttcaaagagtctggacggtctctgactctgcaataacaataaccctggctgtaacttcaataaccacccgatgtcgttaggaagagcctaacttctgacatacacttcgacttctatttccttacaatactgatatactctccttgcttacttcagggttcctaacttagattggaagtggcagcaacctggcacctaatcatatacgaaacaggcggtagtccaggacaatctagccattccataacgactatatacatcagtcccaacagggagaccacacgcctgcacacaggagagaaacaccacgcaaaacagccacccggcgaggaagaccgcacaaacagcctcaacaacacccgacggcacacgcaaccagacaaacgcaccagccagcgacgacccaccagaccacaacgcaccgcaaccaccaaggcacacacaagcgcgaccaagacgacaccagcagcacgcatcgcacacaaacatgtcagacgcgaga

SEQ ID NO: 593978 - DNA, 380 bp, Homo sapiens
  misc_feature (328)..(328): n is a, c, g, or t
ctccagctccccagtttgtggtctgagtagacagtgcccacaatctccttaaagtcttcacaaacagagagaagttgatagatagtgggcacagagccgatgtcaatcagcaggtctcccttcacacggtctagacagaatatcttgaaaagatttttcacaaggtgcttaagaatctgcctttggacagagtgcctagaaccaaccttgtaatatttctctaggtaaacccaagggttaaaatggcttagataggtgtccttggaggtacaccctgattccattatgtctcacttctgtaccactggagcactgccctctttctctntcctacaaaagacagagagtgcccctgcaaaagttgtcaccgtgagtctcag

SEQ ID NO: 593979 - DNA, 467 bp, Homo sapiens
  misc_feature (119)..(119): n is a, c, g, or t
  misc_feature (196)..(196): n is a, c, g, or t
  misc_feature (400)..(400): n is a, c, g, or t
  misc_feature (402)..(402): n is a, c, g, or t
  misc_feature (434)..(434): n is a, c, g, or t
  misc_feature (442)..(442): n is a, c, g, or t
  misc_feature (450)..(450): n is a, c, g, or t
  misc_feature (454)..(455): n is a, c, g, or t
ttccactgatactcgccgtcctccaaggctgaagatgcccagccaaggagagcctaacaagccgatgtcctgctcctttggggtttttcccaaccccttgggggcccttttgcttgctngccaccacccctgccgcagaggatgctgctgccaaggcaacagcccagcctccaacggagactggggagagcagccnagctgaagagaacatagaagctgtagatgaaaccaaacctaaggaaagtgcccggcaggacgagggtaaagaagaggaacctgaggctgaccaagaacatgcctgaactctaagaaatggctttccacatccccaccctcccctctcctgagcctgtctctccctaccctcttctcagctccactctgaagtcccttcctgtcntnctcacgtctgtgagtctgtcctttcccacccnctagcccnctttctcnctgnntggcaaacattt

SEQ ID NO: 593980 - DNA, 209 bp, Homo sapiens
agcgagattctcgttggatgggcatcgcaggcacgctcgaatgttacgacaagggcgacggctcctgtagatgtgcgctactggccgcaggaggctggcgagtatgccgttcacggtgctgtgcacccaggggaagacttccgcctcagccccttcatggctgacatccgtaacgcgcccccaggacttccacccagacagggtgaagg

SEQ ID NO: 593981 - DNA, 773 bp, Homo sapiens
cacggtggctcacacctgtaatcccagccctttgggaggccaaggcgggtggatcacgaggtcaagagatcgagaccatcctggccaacatggtgaaaccctgcctctgctaaaaatacaaaaattagctaggtgtggtggtgggcgcctgtaatcccagctgctcaggagactgaggcaggagaattgcttgaacccaggaggcggaggctgcagtgagccgagatcacgccactgcactctagcctggcgacagagcgagattctgtctcaaaaaaaaaactaatcacaaggagttaaggtgtcagccggatgcagtggctcatgcctataatcccagcactttgggaggctgaggcaggaggatcgcttgagcccaggagttcaagaccaaactgggcaagcaaactaatcacaaaatattagctgaacgcgggtagcacatgcctatcttacacctccagttacttgggaggctgagcaaggaggatcatttgtgagccctgggcagtcgaggcctgcagtaagccatgattgcacccatacattccaacttggcgtgaccgtacgaagagggtgaaaccccgtctctacttacaattccaaaattaggccaggggttggtggcaggcggcctgtatgtaatcccaggtaatcgggaggtgagaacaggaaaacttgctgtgaacccgggaggtggacgttgcctgagccgagaatgggcccttgcacctcacagccgggaaacgagcagaatccacctactaaaacac

SEQ ID NO: 593982 - DNA, 468 bp, Homo sapiens
  misc_feature (45)..(45): n is a, c, g, or t
  misc_feature (108)..(108): n is a, c, g, or t
  misc_feature (111)..(111): n is a, c, g, or t
  misc_feature (118)..(118): n is a, c, g, or t
aaattgtatattttttggaaaagtttatatactctctttaggaantcattgtgaaaagatcaagaaatcaggatggccatttatttttttttttaaaaaaaaatatantcnccaccanttttcaattctttttccccaacatgtggggttttatatgtggggactattaacttgtcaccaagcaggactctatttcaaacaaaatttaaaactgtttgtggcctatatgtgtttaatcctggttaaagataaagcttcataatgctgtttttattcaacacattaaccagctgtaaaacacagacctttatcaagagtaggcaaagattttcaggattcatatacagatagactataaagtcatgtaatttgaaaagcagtgtttcattatgaaagagctctcaagttgcttgtaaagctaatctaattaaaaagatgtataaatgttgttgaaacattaaaaaaaaa

SEQ ID NO: 593983 - DNA, 326 bp, Homo sapiens
  misc_feature (23)..(23): n is a, c, g, or t
  misc_feature (25)..(25): n is a, c, g, or t
  misc_feature (259)..(259): n is a, c, g, or t
  misc_feature (261)..(261): n is a, c, g, or t
  misc_feature (293)..(293): n is a, c, g, or t
  misc_feature (301)..(301): n is a, c, g, or t
  misc_feature (309)..(309): n is a, c, g, or t
  misc_feature (313)..(314): n is a, c, g, or t
aatatatatataaataaaaatantnttttttttggttttgtattgttttgattttgtattaattggcctaagaagctgtagatgaaaccaaacctaaggaaagtgcccggcaggacgagggtaaagaagaggaacctgaggctgaccaagaacatgcctgaactctaagaaatggctttccacatccccaccctcccctctcctgagcctgtctctccctaccctcttctcagctccactctgaagtcccttcctgtcntnctcacgtctgtgagtctgtcctttcccacccnctagcccnctttctcnctgnntggcaaacattt

SEQ ID NO: 593984 - DNA, 414 bp, Homo sapiens
ttacgctgacatgctgtacatcaggtgaaaaatgtccattaagaggtgatatagacagacacacaatatcgatcattatcttcctcttgcacattatcctgaattttcggtgcatagcctattactttcgtaccatcgtgccgcgactgcaatatgggagagcaaggtccagttttcgcagtagatgaggtacaccaagcgatacatccctatatcgacaaggacatctatattcgtgagcaatgggtcatatgcaaattacgtttccggaactccgggtgctatcagttaatatgttgaatgcccggcgaactggaggcaggaagacacacacagagctcttcatcattacaagctattaaatcttgctaacaggtatcgttaggaggcagggacccactcgggggatcctac

SEQ ID NO: 593985 - DNA, 110 bp, Homo sapiens
gtcagctggtgatacttgtctcataagtcgtctttcttgtgtgtcaaagtcaattcctaaaccaggaaagaaggctgtgcaaaaatgctattgaaacttctaaaactagg

SEQ ID NO: 593986 - DNA, 754 bp, Homo sapiens
  misc_feature (162)..(163): n is a, c, g, or t
gaacgggtgctcagtgttcttcccctcccctcgcctggctcgcagtcctctccccgcagctcggacggaactatgtatcccggaagtccggggcctttgctgtgtgggataaacagtaatggctggaggctgcaactcccggaacaacagccacaacatcanngagcaggagcggcagcggcgacggcggcagcagctcccccaccccgatccccacagtcagccgcccctgtccctgggggcggcgctggagctgtgggctgtgctgtgcagctgactgtgcagctggcgcgcggctgtgactaaacagtgtcacactgcaggtattttattgcatggggttttgtcacgtgaatgtgagaccaacttgtctgctacttctgcatgcacctcctctgacatgtcctgtatatgttgtacgctgtgccacaggtattctttcagcgcggatgggtactggctctcccactggacgacctgcctgcatgatactgacaccctatggcaaacgcatttgaacacacggacatgaacgcaatctgcttacacgcagcctacactaccacaatgttcactccctttgctggcttccctcaatgtcctctcactcagatagcttgtgacccatcttgctctgacacactgacataccctggcgacacgtctgacgtcacagaacactgcaccaccttctgcaacctgtacggagccacgtgtaccaacgacagcgacctgtgcgcttgaccctgcttat

SEQ ID NO: 593987 - DNA, 316 bp, Homo sapiens
atcccccacttcaattgctatcattcctcttctgatattggagccatatgacactagtaccgagaaattagtgtcgatctgaggagaacaggtcattgttgtatagaatatctccgagtcctatcaaagctatcaatctttgagatataggagcatattcattgtaggcgtgaacttattgcgaagctagtgatcagctatcgctgtgtagagtctgtcctattacttcaatgcgattattcccttctgctttttggaccatatgcatagtaccgagaaactagtgcgaagtagtgatcaggtattgctgttagat

SEQ ID NO: 593988 - DNA, 277 bp, Homo sapiens
tcctttttctggagaacggggtctcgctatattgcccaggcaggtctcgaactcctgggctcaagctatcctcccgcctcttagcctccctgagagctgggattacaggcgtgaggactacctgagttcagcagttcaagacaggcctgaccaatatgcagtatgcctggctctactaaaaatacaaaaaatttaactgggcttgggggcgcatgcttataatccaccacatgggaggctgaggcaggaaaagcactttaacctggggaggcaaagg

SEQ ID NO: 593989 - DNA, 385 bp, Homo sapiens
tctttcatcctggttgctgtcaccactgctggcacagactaaccataggcagagccactggggccatgacagaaggagtgcggtggtgcgcagcgccggcggttcccgcctggttcatgaagacatcgatggcaccccctacttcctctttcctctcgaagtactatggggcgcccaccaggaggtcctgccacccatcattgttcaggtctgccaggccaatggagctgccaaaataggcgcccatctgcgagccctccagcacctgcctcctccgcaggtctccgactgacccctggctcagcaagaacaccgagcccatatgtcggtgccgtggggcacctgtcacaatggtgatgtcattgagggatggccagggggatct

SEQ ID NO: 593990 - DNA, 488 bp, Homo sapiens
  misc_feature (98)..(98): n is a, c, g, or t
  misc_feature (102)..(102): n is a, c, g, or t
  misc_feature (171)..(171): n is a, c, g, or t
  misc_feature (207)..(207): n is a, c, g, or t
  misc_feature (229)..(229): n is a, c, g, or t
  misc_feature (243)..(243): n is a, c, g, or t
  misc_feature (245)..(245): n is a, c, g, or t
  misc_feature (269)..(269): n is a, c, g, or t
  misc_feature (272)..(272): n is a, c, g, or t
  misc_feature (296)..(296): n is a, c, g, or t
  misc_feature (371)..(371): n is a, c, g, or t
cgccacatcgagctttatttgtaatagctatggcatttttatcgtagtatttcttcttttcatatttatctctagtgaagagtccactactaaatctntctntggtcttcaaaagttctctggaaaattggcttcataaagtagtcttgctttagtatttcccatatcttncatgcactgtatctgttctgctgtccattggtctangttaactgatttgggggggtcngtttttattttcantncaaaaaaaaacacccattctaaancanaaaagggtttattcagcggtttcnggtcccaccaggtcactgcaagggctgggaaagctcctgcctctaatgccaccgcaaagctgcactggcccccancagcctcagaacacaccggagctggggacttcccttccaaagcgggaatccaggggtgaggatggctaagcaagaaactggccatgctcacaacagcttcttgaccctctggaagct

SEQ ID NO: 593991 - DNA, 559 bp, Homo sapiens
agagttccgtatcaattcagctgtcgatatatagatctaatacttctgcttatcaccgagcacgggtggacgtgagcgagcagctttctctttctgaattcagtaatatctgatgggcaaataatctactacatacttctggaaacgattctagtatttgaagtagatagcccgagcatcaatatagaactgctcctccgttatactttgaaaggcaaatttttaaagacatattccctttcggcctgaacaaatgagaaggcagaattaagaaaagtgaggtaaaaacacatgtagcaataacattagagtatgcaaagcctttgcagattttcccaaaatgctaaagtagttcaaaatgaaaacaggggtaactgatatccatcttcagtttataagctcataagccagagcactgacctcaaagcagatgccaaaccactgttactggggaacacaatactaatgatgcctttaaagagagaaacccgtgcaacactagctcctgaaaaaacaccttcctttaaagagctatacacccagaatgctctcataagtc

SEQ ID NO: 593992 - DNA, 351 bp, Homo sapiens
  misc_feature (174)..(174): n is a, c, g, or t
ctgatgctatagtgttggtggcttctgtctccagcctttaacttttcattctaggaggagtataaggctactaggttatcttatctttctccctgggttcttcttcactttctgtgattcttgtataattggatatggccctgctaattttacaagtcaacaggagctcagaanatggtgcataaacaatgaacggtcatagtagcctaacgatgtcacacggtgaagcggtaggagtgagtcctaatatgttttaagactttctataaagcccaggggagaaaacatctctttttctagggcctttgacatacctcagtcatttttatacaacatacccacctatctgta

SEQ ID NO: 593993 - DNA, 699 bp, Homo sapiens
gctcttttgttttgttttgagacagggtcgcccaggactggaatgcagtagtgcgatcatagctcactgcagaccccaaccttcccaggctcgagcaatccttgcaccctcagcctcccaagtagctgggactacaggtgcacaccaacatgacctggcataattatacttacatatatatagtagagatgggagtactcacatgtgtatgcctaggctggtctcaaatttctgggctcaagtgatcctcctgccttggcctacctaaagtgctgagattatgggcgtgagaccagctgatgcacccaggacatgatcgttccatgtctagctcatagaacatcacacaccaagacacacagaacgtaggtagaaaaaggtggccgtacatcaagaaaggacatagcaaaaacagaaactagcgaacccaggagcacgccacaccaagagacgcaatgagggagcaacggggggcatgggacataaccgttggcgcgaaccagatcggccaaggcatgcagacaaaggagaatcaaaaggcatgagagacagcgggtcccccgtgaagaagctgcgcgggaagaggaacgcaagcgcagaccagggaaccaacaacagaccaccgcagcaacgaacagagagacaggcacaataaggaagcaacaaccaaacagagacaagcgtagacggagaagaaaa

SEQ ID NO: 593994 - DNA, 339 bp, Homo sapiens
cgccacgcccagttagtgttttgtatctttagtagagatggggtttcaccatgttggccaggctggtctcaaactcctgacctcgtgatccgccctccccagcctttgggagccaaggccaggaattccggaccagctgggcagcatggcaaaaccctgtctctataaaaaaaaaccaaaaaaaaaacaaacaaaaaaaacaccctctccccgaaaaaccaaagttagctgggcgtggtggcacatgtctgtggtcccagttacttggggctgaggtgggaggattgcttgagctagggaggttgaggctacaatgagcctgtctcaaagataaaataa

SEQ ID NO: 593995 - DNA, 294 bp, Homo sapiens
caccaggcaacccctgatatgctttatgtaactaatacattaatttgtatttcctagaattttatataattggaatcacacattgtatattctgttttatctggcttctttcactcagcaaaattattacgagtttcactgacgttgtagcatgtatcattagttcattccttttattactgagtagtattcaactgtagggatacaccagtgattttacccattcccttattgatgaacattttggttgtttctagattttggctattgcaaataaagctgctatgaaccaaa

SEQ ID NO: 593996 - DNA, 643 bp, Homo sapiens
  misc_feature (329)..(329): n is a, c, g, or t
gaatcgagctctgtacccgtcgcgaaggtgtgagtccacccagattatgaagctaatctggtccccctaggaacacctcccaaaaggctgaagtcatcgtcctcacttgagctctcactcgagcagctggacatgcattcagattctcattatgtgttccacgtagtgcagtcacactggtccatctggaaagaagggggttcctaactgcaaacaacacccccgtcatgaatgctctcagtcagcaagctccttcaggttgccaggctcccgcagaaacttgccatcattcactgcaggggccaccaaaccccagacaatcctatatnggccagaaatgctttagcagatagagtagccaaacaaatggccctacaacccgtgcaaggccagtttctttccctgtcctcgttctctcctctttactccccagaagaaaaggaggactgccaagcccaaaaccttcaaaaacaaggaccacggtatgtcaaggaagtgcgcttcgctgtcctcactctcaaacaatccctgtcctccaaagcctccacaactctttccatgtcgggtacaaacctgtcctgcaacgtctcctgcctatcctcatttgtcctcgtcgggtacaatgaggatacacgttcgcgag

SEQ ID NO: 593997 - DNA, 393 bp, Homo sapiens
gtaatacctggtagcatgattgtaacccgtgagtgctgagtgttccactgagcccgatgttaaccccgcagcccactgtaacgggctgctgtctgttcttctctcactccttattaacggtccccatctgtattggagtccctgtactttattgctccctcccagatcactccctgtggctagctcctattgtgattccctcagatctgccctaatcccggacatttgggtgggggaatcttgcctttccctttacagagccccagggatctcatctggggaactgtcattgcacagcagaggctgttccttcctgctagttaggagatatgactcattcattcactcactccaccctgcctctgcatcccttactgaagatcaaggcagcag

SEQ ID NO: 593998 - DNA, 361 bp, Homo sapiens
gcctttaagtggccccccccgcaagccgactggggttcgctacacccagaacgacatcgacacctgggccaatgtggtcgcccgctcgatccgtgccggaggcgggcgcaaaggcgacaaggtacatgtttcctacggctatggcctgttcaccggagggcttggtgcacactacggcgccgagcgcctgggctgtacagtcatccccatgtccggcggacagaccgagaagcaggtgcagctgattcgcgacttccagcgcgatatcatcatggtcaccccatcctacatgctcaacctggccaacgagatcaagcgccagtgcaccgacccgcacgagctaagctgcgcttggcatttt

SEQ ID NO: 593999 - DNA, 797 bp, Homo sapiens
  misc_feature (4)..(4): n is a, c, g, or t
  misc_feature (34)..(34): n is a, c, g, or t
gccncgctctgggcctctgctcaggctctgcgcnggacgacctcgaggcccttagttgactgggaccggaagtggcgtgtgctcggcctttctgtgttcctggcccgcgcgttcgggtgtgagctgcgccgaccgctctgagggttcgtggcccaccgctccttcgcggtccctgccgccaccgtccacgctcagcgttgtagagaagatggtgggtcggaacagcgccatcgccgccggtgtatgcggggcccttttcattgggtactgcatctacttcgaccgcaaaagacgaagtgaccccaacttcaagaacaggcttcgagaacgaagaaagaaacagaagcttgccaaggagagagctgggctttccaagttacctgaccttaaagatgctgaagctgttcagaagttcttccttgaagaaatacagcttggtgaagagttactagctcaaggtgaatatgagaagggcgtagaccatctgacaaatgcaattgctgtgtgtggacagccacagcagttactgcaggtcttacagcaaactcttccaccaccagtgttccagatgcttctgactaagctcccaaacaattagtcagagaattgtaagtgctcagagcttggctgaagatgatgtggaatgagaaacaaatgtcaacataataaaatctcagttaaaaaatatttcaaaacattcttggtacgttgagcagctctgggggcaataagggcaaatatgcttgttatgaaactacactgaaatctaccaaacgttacatgttacttagggagat

SEQ ID NO: 594000 - DNA, 2489 bp, Homo sapiens
ggttgcagtgagctgagatggcaccaccacactccagcctgggcgacagaaaaatggctccaaaggttaaatgaagcaggaaaaatacatagatgcagccttgcagcctctccagatgtttggggataatattccagatagaaatattgatcccttggattaggtaactagtcataatgaagaaaattagtcttaaaaccttacggaaatcttttaacttgaataaaagtaaagaagaaactgatttcatggtagtacaacaaccatcgctagccagtgactttggaaaagatgattccttatttggtagctgctatggtaaagatatggccagctgcgatatcaacggtgaagatgaaaaaggcggaaaaacagatcaaagcgagagcctgatgggtacgctaaagcggctttctgcaaaacagaagtcaaaaggcaaggcgggcacaccctctgggagctctgccgacgaggacaccttctcctcctcctcagcacccatagtctttaaagacttgagagctcagaggccgataaggtccacgtcgctccgcagccatcactacaggcccgcgccgtggcctctgcggcccacaaactccgaggagacctgcattaagatggaggtgagagtcaaggccttggttcactcttccagcccgagtccagccctgaatggcgttcggaaggatttccacgacctccagtctgagaccacgtgccaggagcaagccaattcactgaagagctcggcttctcataatggagacctgcatcttcacctgtatgaacatgtgcctgtcgttattggacttatgcctcaggactacattcagtatactgtgcctttagatgaggggatgtatcctttggaaggatcacggagctattgtctggacagctcttctcccatggaagtctctgcggttcctcctcaagtgggagggcgcgctttccccgaggatgagagtcaggtagaccaggacctagttgtcgccccagagatcttcgtggatcagtccgtgaatggcttgttgatcggcaccacgggagtcatgttgcagagcccgagagcgggtcacgatgatgtccctccactctcaccattgctacctccaatgcagaataatcaaatccaaaggaacttcagtggactcactggcacagaagcccacgtggctgaaagtatgcgctgcatttgaattttgatccgaactctgctcctggggttgcaagagtttatgactcagtgcaaagtaatggtcccatggttgtgacaagccttacagaggagctgaaaaaacttgcaaagcaaggatggtactggggaccaatcacacgttgggaggcagaggaagctagcaaacgtgccagatggtcttttcttgtcggacagtcttgacgaccgtaccctttagctttgacttcgctccatggtaacacttcacactgaattgagcactcaatggagtagctttatgaacagcgaatgtgagcatacgtcatagtgatctaatgagcatcatcaggctcgaatgacttgtattcaaggttcggtgccgatttgcaacttccggtaaattgccaacagtcgtcagcagtgcgctcgtcagtacgtgtcgttggtaacggcagttccgataactatcaaactgcttgcaccatgaagattattcaggaaggctctgaagttgaaacctgatctgacctggatttagccagttgaatccagttcaaccttcaattgcatcaaatctttgcgccaatacattcagtttatgggtaaaaggtcatcagttgtttaggtgggaagtgccagcaagtgtctgggttatttggttctttaaaaaagggaagtcttaggtttagaggtgtggattatgtttcatcaatgtgcagatatcacatgtgaattatcaaattctcctcaatgcccccgccgcccagtcctttgctgctatccactgtgatttttatgcattaaaagcacatttcatgtgtattcaacctaagtaaagttgaatgaaacttacagaatggaaattgctatgtctttttaaatggtccattttcaaaagacagtgttgaataaacatacctgtgtgataaaacacagaatttacatatacactgaagatgagtttttaatctcttactttaaaaagatttatttagaatcgtgaattgacataatcttgggtaatggaacggagatctgcaacatatcttttaacaacacttttttataaattatttctaaggttgtgctaattcttttggttgtgaaaagttgaatttttctgttgccttcgttttcatcttctagtttgtctattttaataaatggccttacattaaaaaattgtaaagaaatgtataccaccaatttagaaattgttgccttttctgtaattaaactcgggtacaaattggcaaacatgaaaacctatggaactagaattattattaaagaaatattagatgatcac

SEQ ID NO: 594001 - DNA, 225 bp, Homo sapiens
tttgggcccccgggggggcccttttaaatcccttttttgggggcttttaacccgggtttggggctaaaaagggggcccccccccctggggggggggtttttttttgtttccccaggggggttttttaaaaggcccccggttttttttttccccagtcttggtgggggggtttttgtttttttgggccccccccccctttggggattaaggttttttttcccccca

SEQ ID NO: 594002 - DNA, 762 bp, Homo sapiens
  misc_feature (39)..(39): n is a, c, g, or t
cgaagaaacaagcacaatatattataggtcgataccggntttaattcgtacgaggctctgttcctggcccgcggccgtcgggtgtgagctgcgccgaccgctctgagggttcgtggcccaccgctccttcgcggtccctgccgccaccgtccacgctcagcgttgtagagaagatggtgggtcggaacagcgccatcgccgccggtgtatgcggggcccttttcattgggtactgcatctacttcgaccgcaaaagacgaagtgaccccaacttcaagaacaggcttcgagaacgaagaaagaaacagaagcttgccaaggagagagctgggctttccaagttacctgaccttaaagatgctgaagctgttcagaagttcttccttgaagaaatacagcttggtgaagagttactagctcaaggtgaatatgagaagggcgtagaccatctgacaaatgcaattgctgtgtgtggacagccacagcagttactgcaggtcttacagcaaactcttccaccaccagtgttccagatgcttctgactaagctcccaaacaattagtcagagaattgtaagtgctcagagcttggctgaagatgatgtggaatgagaaacaaatgtcaacataataaaatctcagttaaaaaatatttcaaaacattcttggtacgttgagcagctctgggggcaataagggcaaatatgcttgttatgaaactacactgaaatctaccaaacgttacatgttacttagggagat

SEQ ID NO: 594003 - DNA, 991 bp, Homo sapiens
aaagcatcgggttagagacaacaaaacacatgcatctaaactgctagagcaatccagttgacttaaacatgtaacgaatggaattccacacacttaacacattcagctatatgacagaaagtaacatctactggactatggtattttgtgaatgatcttttaaataaacgaaaaccttacgctacataaacaaaaacaacaaatacaaacaacacaacaaaaaacaacacgggccggccccctcccttcacaactctcaccccacacggcgcccccaacccacacgccctcccacccctccatcattggaacaacaaggccccaccaacaaaccgagaacctccgcacatctaacactcccacgcagcagcgacgctcagcacccagcaccgccttccaacagatcacaccaccacatccgggaacagcacaccggcaaacacaccagggcaacaccctccccgaccaaaacgagaaaccccatcacatcaccacggccgcgatctcgcccaccaaaccaactggcaggaccaacaccccacaccccaacaacacacaagacctaaacgcacacgcccatcacgcaccgccctcaccatcacaatcacccgcttgctccaaaccgcccgcacacaaacacgcggcgtcgaacacacacaccagcaccgaactatctactcataccggcccacgaatactcacccaatattcggccgcccataccgagcggaaacacacagacaccctcctcgcagcagccagcgctctccacacccgcaccgcgaccaccactcctcctcgccaaacccaccctgctgtcgcgtcctcccgctcgcgcgcgaccacccgcggcacgacgtgcgctcagccgcacccacacccccctacaccaccagcccacaccacacacacgctgccgcgaccagcacaagcacacccaccaccacacacccactcccacccacaccccccaccaccgacgccaccgcaa

SEQ ID NO: 594004 - DNA, 807 bp, Homo sapiens
ggagctcactttgcatcagggagcacaaggaccaggccgtacagacactccgcctcccagcacttgatcagagattgtgtttatcctacagaaacagatgacatgtgttgggcatcactccccacggtcctgggtagaagagtccttcacttggcagggctttttcaaccaatgaataaggcaaattatatataagttaataatgccatttcgaaccgagacagatggcagctaaatgaagtttaattaaagaatgagtgctggggccctttttattgggtactgcatctacttcgaccacaaaagacgaagtgaccccaacttcaagaacaggctttgagatggaagaaagaaacagaagcttgccaaggagagagctgggctttccaagttacctgaccttaaagatgctgaagctgttcagaagttcttccttgaagaaatacagcttggtgaagagttactagctcaaggtgaatatgagaagggcgtagaccatctgacaaatgcaattgctgtgtgtggacagccacagcagttactgcaggtcttacagcaaactcttccaccactagtgttccagatgcttttgactaagctcccaacaattagagaattctaagtgctcagagcttggctgaagatgatgtggaatgagaaacaaatgtcaacataataaaatctcagttaaaaaatatttcaaaacattcttggtacgttgagcagctctgggggcaataagggcaaatatgcttgttatgaaactacactgaaatctaccaaacgttacatgttacttagggagat

SEQ ID NO: 594005 - DNA, 865 bp, Homo sapiens
  misc_feature (4)..(4): n is a, c, g, or t
  misc_feature (34)..(34): n is a, c, g, or t
gccncgctctgggcctctgctcaggctctgcgcnggacgacctcgaggcccttagttgactgggaccggaagtggcgtgtgctcggcctttctgtgttcctggcccgcgcgttcgggtgtgagctgcgccgaccgctctgagggttcgtggcccaccgctccttcgcggtccctgccgccaccgtccacgctcagcgttgtagagaagatggtgggtcggaacagcgccatcgccgccggtgtatgcggggcccttttcattgggtactgcatctacttcgaccgcaaaagacgaagtgaccccaacttcaagaacaggcttcgagaacgaagaaagaaacagaagcttgccaaggagagagctgggctttccaagttacctgaccttaaagatgctgaagctgttcagaagttcttccttgaagaaatacagcttggtgaagagttactagctcaagtatttataggaaggaatggctaatgtaaggtcccagagaaggttaatttacctaatcaaggtcacacggtgaatatgagaagggcgtagaccatctgacaaatgcaattgctgtgtgtggacagccacagcagttactgcaggtcttacagcaaactcttccaccaccagtgttccagatgcttctgactaagctcccaaacaattagtcagagaattgtaagtgctcagagcttggctgaagatgatgtggaatgagaaacaaatgtcaacataataaaatctcagttaaaaaatatttcaaaacattcttggtacgttgagcagctctgggggcaataagggcaaatatgcttgttatgaaactacactgaaatctaccaaacgttacatgttacttagggagat

SEQ ID NO: 594006 - DNA, 1084 bp, Homo sapiens
aagcaggagaatcacttgaacccgggaggcaagaggttgcagtgagctgagatcacaccactgtactccagcctgggccacaagagtgaaactccatctccaaaaaaaaaaaaaaaaaaaaaaaaaccttaaatttaaccatttttaaaaattaaagggaagtttggaaaaaaatttttcacaaatagaaatttcataaaattttaaaatttttttgaagaaaaaccaatataggactttcgtggaattttaagggtgtaggaacgtgaaattgaaaaattatcaattaggggggcgtgaccaggatagaatttggaccttggcgagaaagacagaattcaccaatacttgacgattcggttgtgatggacaaagtgatttcagttattgagaaagagaagggaaagggacagtgaggaaaaagttgattagatttctgtcagaattcccgtgtgagaaacccctttaaggttgtgccagtgtttcccttaggggggagttcccaaaaaaacgggagcaagaacacaacagaacagaattaacaaggaattattggcattcaacaattggcttgacacacgtgtctccaatttggatggacaacattattagtctggcatttcaaccctaggaaataataaggtggtataaaactcacacaggtttcccccccagggggttgtaataagccaagtgtgttaaaaaggccaaggaccagattttggaaaggcgtgggacaccaatcgcgcacaggggtccccccataggggtttaacacagggaaatttctcattacagaagcccttcggagccaaagggtgttgagcggcacatatcctcacaatggtgtgggataaggatgggcgaacacattttccaatccggaaatttacagcacgggaacactggggttggacgaaaaaattagatcaggagtggggagagacgtcgacacagcatccaacccatcaggagcagtgacagaagaataccaagcggacagaaccacagtgccgagaccggcattcaacgtgatgccgccgcttaactaagacaatggcgaggcaatcagacatcacaggtg

SEQ ID NO: 594007 - DNA, 570 bp, Homo sapiens
gcgaagcattctaccaggaagcgaggtgactgacaagccctgtggagccccgtggagcgtccctgcagaggactccggccagctgagtgacgcaatccaaagagcgctcccgggtaggaaatggccccggtggaacgccttgccagagcagcgcatagcaggctcccgagaaggattaacactggctgaacaccgggaaggaaatggcacttgaagtccagacatcttgaagcttgtcaagactagtctttggaacttgccccactccatgtgagtggaagcatggcctgatcacccacggtgtgcctgtattgacatctttgttctggttttgacttggcttgacttggtaagactagtcttcggaacttgccccactccatgtgagtggaagcgtggcctgatcagccacggtgtgcctgtatgggcacttttgttctggttaggagcttgggttgacttggtaagagtagtctttggaacttgtgccagtccatctgagtgggaccgtgtgctgatcagccacaggatgcctgcacggggactcttgttctgggttagggatgctgt

SEQ ID NO: 594008 - DNA, 300 bp, Homo sapiens
tgctatcacattacagcatacagacacctaagcttgacagcgactgtaggggtcagcgtgcgggcagaagagtcagcgggatggatccacttgggcatccagtaagggcgcagccagtcagaccggcctgggtaatggcgtacaaagactcgacggtagtcatatccttcttgggtttcaggagtatagaagggaaatttctgggctgcattcgccatcatggcatcatcaacctgatgttcaacgtattcctgtcaaatcttaaaccaggaattcttaactgaagttattccatcactg

SEQ ID NO: 594009 - DNA, 1678 bp, Homo sapiens
tggggacttgggttcgggtttattggcccctcagcagggcagcggggatgtcaagggcctaaggctgggggctggcccgggctcacgccagggggtgtctaaacaggtggtgtgtggcacgggcgccgccgttcggccgccctcccaggaaaatggcggcgactgcgggaagtggtcctcgaaagtctcagctccgacggaaagaagctgcggccccttagactcgggggcggattggggcccagggaagagggccagggcgcggggcgcggggccacgcgcgcgcgggcccagttgcggtctccgcgcccctgcgcgcaacgcgaactccaaaagcgtcctcgagagaggagagagagagaggcgcggcggccaaccagcgcgagagcgggggggtttctcgccagagaggggcccgtgtggcgcgcggagcgccgcgtgtgcctcgcgagacggcccccacaagagcggcccccagagacacacttgcggaaccccagtgcgaggaaaagatagtgggcgtgagagcgaatccctctgggtgcggcgccaccccacacaacggacacaacacacagagaggcgcgaccgaaaagtttccgaactccagcggcacgcgcgtgacaccctgccgcgcacaacgcccgtgccgacactccccacgcgtgcgcacgatggccccgcgacgagcggccccctccccagcggcagacaacacacgttcgacgaggcagctcatcccgaggaccgaccccagtcgtggagcacaacacagaaccgaccgcgacacacgcgggagtagcatcacaccatggtctcaacaaccaccacgtctttaggaacaacaacgcgccccccaagcaggcccacaacacccacacggcaggctacgaatacacggcgatcaccagccccacacattccccccacccagcaggatccccccacgctactcccctcccacctactggccccagcaagtacccctactacaccccacggttgactgcttatgaacgacggacccccctcccccgaagacgcgaccaacaccgcccccccccccagaccaacaacagacagcacaaccctccctactaagtgagcgagctcccctcacacagagacaattgcgcgggcggcaccactcctgcttctgtcggcacatcatctcctccaccacagtcccacccctggtgggagacaccaccaagggatcaccacaacaatgcgaaccggtcggaacctggacagacgccgctgccgcagctgttgagcccctcataccatcatgagccgaggcccatcacacacgacgggggagcgatcgcgcacgattatgtggagcgcacccaccaagctacaccgtgtggcgacaaccaccagcccacacacaccacaacttagccacacagaacaaccacgtgcacgcgccccacctggcgcgaaaccccgcattgtgcggcccccgatgcgtaccaaccaccaacacctacgcgacaccggacacaccggagccccacatacgcacaggaccgcgacacaccactggcgcaccacacaccgcagcacctccaaaccccacagcctccccgacggcacccctgcgttcccacaacacccaccaccaccacctcccgcggcatcaacgacctcatagcgccgcacaccctgcccc

SEQ ID NO: 594010 - DNA, 357 bp, Homo sapiens
  misc_feature (55)..(55): n is a, c, g, or t
ttttgccccctcccccatttctcaaacccaaaaggggccgcctttgggccttttntttttttcccggttccaaccctagggggtccttccaaacccgcccccaaaaagccagggccttgggggcccccgtgttcccccggttttggccagggtttttgggggccattttttccccctttcccaggaaaaccccccccagtttggtttttttttgccccccctccgccccgtgggccccccaaaaatggccttccccgggatttttccgggattcccatttttggggaccccccctggttttccccccttttcccgggtttggggggggggttttcccccccccccccatttttttta

SEQ ID NO: 594011 - DNA, 380 bp, Homo sapiens
catttttaaagcacacctcacatttttgtcccaactgtaaagtaaacattatgaaatttggtagttaactttctattcaatttgactgctgtttctcgcatttctacttgagaaggtcactgtgtttgatcaaattctgggagaaaaagatgagatgaggcttcttggagcaacttcttcttgtgtggtgcttcactgagcttgtggcacatgttagtttggaaaggagatttgccttgaaaatggggtctctgaaccttctgggagggataaggtagtacagtggagttggtcatgcaaggatggctcttccaggttccaggcaaatctcctttccaaactaacatgtgccacaagctcagtgaagcaccatacggaaa

SEQ ID NO: 594012 - DNA, 779 bp, Homo sapiens
gcttgtaggtgcaagaattacattaattaatttacagtatgttaaaacagcacttgaatgcctgggaataaattcgtacttgttcatggtatataaattagtctatatacatttgttggacttcggactttgataactacttttgttcgacggcttttggtatctaatgttcatgaagagatactgttttccttgtactgtctttgtctagttacagtattcaagggtaatactggcctcatagaatgagttaggacatattcgtatttgcttctgtcctctcaaacgaacatcgtcgacagttcggcataattgtcttccttcagtactttaatagaatttaccagtgaattcatctgggtctgatacttgctgtatggcacctgttcttaacttatggatacgactttctttactagcatgcaggcctattcagattatctaattcttactcatatacagttctagtcatattgtgtcttatcaagccattctatccaggctatcaaatttatgggcactagccatggttcatccgtatccctttgtcatcattttctcgtctcatggggatctgtcactgagatctctctccatttctgctaatatcgcaatttgacataatcttttctacttaactcgctcaccaggcttacttggatccaatccatcctctgccaaggagccaacctacggcggtaatgtgatctctttgaatccacctgccaaaccccatcgaacctgcaccgattaaccccctctactcactccaacctaca

SEQ ID NO: 594013 - DNA, 313 bp, Homo sapiens
ataattcccacaccttattgtagcatcctctgaagcagagaccataacactgaacacaggatggaaaatgactcgagtgactggactcctttgaccaccatgcccagttaagttttgtattttcagtagagacagggtttcatgttgggcaggctggtctcaaactcctgacctcaagtgatccacccgccttggccacccaaaatgctgggattacaggcgtgagccactgcacccggtctaatccatgtagctttatataactttacaaaacaatgccctaaattttttttttttaaatcgtatcacagtg

SEQ ID NO: 594014 - DNA, 111 bp, Homo sapiens
aagtgctgttgtgacaggtggtacaattcagctattaagcaccgagacagggcttcaatttagtttgtgaatcctttaattgttgtgcagctaattacctcatcactgggg

SEQ ID NO: 594015 - DNA, 460 bp, Homo sapiens
tcgacattcaaacttggtctcaggtgtggtgagcagcagttttccctccatgcccattggtccggcacagcgggcgatgccaggctccttgtacccactcttcacccagccagacagccagcgcagatgacagtcacagtacagggggttggcaccgattgccctgggggttcgaggtcaaagatccgggtggaagggttaaggtcagtcgctcaattaaccaattagactgacagccaattcagatgaacgtcaggtagacaagtacaggcatgctctgaatgtggtgtaatactttcacctaccacaagagggggtcgtcttgcctcaaatacagttaaagctgcaatatgtacatttttggccattctaattgaaagcaagtctaagaaccaggaaatataaaagcaatttctgcatagtgcacctttaagttccatcactttaacatggtcgacgc

SEQ ID NO: 594016 - DNA, 362 bp, Homo sapiens
  misc_feature (42)..(42): n is a, c, g, or t
  misc_feature (68)..(68): n is a, c, g, or t
  misc_feature (108)..(108): n is a, c, g, or t
  misc_feature (308)..(308): n is a, c, g, or t
  misc_feature (339)..(339): n is a, c, g, or t
catttcgttccctcaaaactactgaactattggctgggccangcacagtggctcacgcctgtacttanaatactgggaggccaaggtgggaggattgcttgagctcangagttcaagacaagcctgggcaacatagtgagacctcgtctctactaaaagtaaaaaaaactagctgggcatggtggcacgtgcctatagtcccagctacttgggaggcttaattggaaggatcgcttgagcacaggaggtgtgaaggctgcagtgagctgtgatggcagcactgcagtccatcctgggcaacagagcangaccatgtattaaaaaacaaacaattggccnggcgcagtggctcacatttgtaa

SEQ ID NO: 594017 - DNA, 328 bp, Homo sapiens
catacattaggctagtgtttggtaggacaaaatctttttaaagccttgagaaatgtcatcccgttggtccacttttaaatacaaatgtttgccctggtaattagcaatgaaccgctggcagtttcttcacctggggaaaaacggatctggcttttaattgatgaatccacttttacaaaaacttttgcaggggcagggttgattaggccgtttagcctgccagggggattataaaaccccgggccccgcaaggaaagggctcttttaaaaaaaaagcctttttggaccaccttacctttttaaaaaccccataaaattttgcccccca

SEQ ID NO: 594018 - DNA, 114 bp, Homo sapiens
tgactttctcctgcctccagcgtcccacgcagctgggactacaggcgcttgccaccatgcccggctaataccttttttttggttttttggtaaaaccgggttacccctggtgta

SEQ ID NO: 594019 - DNA, 916 bp, Homo sapiens
gagtgttcgcgggagcgccgacctacaccagtcaacccagatcccgaggtccagacgaggcccggtccagaatccccacggccttgccaggagcaagccgagaaggcagcggccggacggggcaactcgctgcactccggagcgagatcatctgtgcttcgtaccggagcccggggccctgtcgcgggacccctgcgcccggcggggctaggagcttgcccaaaccggcccgggcccatgggtagaccgccagtccacaagacgggagtgcggcccacccacggcatgagggggtcgcaagagacaagggcccacctcgggatgtcggccaaccggagtcaccccggagtgtcagggagcaaagcgagggacctgcagggagctctgccaatgaatcggcttggtcgaaccttaccattcggagcgaggtgccgctccaccgtgggtaacacgggacgcaacgctaggggcatgcgccatttcgacgagtcaatccggagttcttgaaaccaagggggtacagcccagccagaggtggtggtcccggggcgcttccaagggccgcccatacaggaggcccgaagcgtcagaggatatagccccggatagaacccctcgtgacgccggatatagcgcaatggggaggggcagccctcggcgtgccaagtatgggcagccctggccccaagggtggcgaggaccgacgtacataacggggcgcactggacaatgcggacgcccaacaccccaaagtgaatggaggcggtgacgcaggagtaagcctggactcagagccttccgggcagtggaaacgaactcagggagaggctcatgagttggaacgctcccaaggcgacgggcccgaacatggaggagcacgggctccacagagagaaacgcgcgcaggccgggcaaa

SEQ ID NO: 594020 - DNA, 302 bp, Homo sapiens
  misc_feature (123)..(123): n is a, c, g, or t
  misc_feature (155)..(155): n is a, c, g, or t
  misc_feature (288)..(288): n is a, c, g, or t
  misc_feature (295)..(295): n is a, c, g, or t
gcctgtcttgaggataaaagccatgttaactagggtgagatgatatttcattgtagtttgtgatttgcatttctctggatgatcaataatgattgcgcatgcatttatattacctatttaccnatttatatacacttcttttcagcaaatgtctngtttattaccctacttttagaatcagcattatttgattgttttttccttataatagttgcttgagacctccttatatatacgtggttactaaagttgccaggatgggctagtttacataacattttctaccanttctatnggtgtgt

SEQ ID NO: 594021 - DNA, 317 bp, Homo sapiens
ctcatgttgaactgtaatccccagtgctggaggtggggcctgctacgaggtgtttggatcatggggacgggtatttcatggcttggtgctgctttcttgatggtgaattattgcaagatacggtcatttaaaattgtgtggcacctccccctgcccccttcttgctcctgctttcaccatgtgacatgcctgatcccccttcaccttttgccatggtcataagcttcctgaggcctccctggaagctgagcagatgccagcaccatgcttcctgtacatcctgcagaaccataagccaattaaacctttttaataat

SEQ ID NO: 594022 - DNA, 284 bp, Homo sapiens
tatcccccaaaaaaagggcctttttaggggcctgatccaaaagcggggaggggttggcccattttgggccccagaggctagggtccctgtttatttgggaacggcaaaagctttttttgggggtctgcctctaatttggggggaggtggaacaaaaatccccccgggggtccaaaagaaaatcccatttttaattcttccgggggtttttggggaattttcggaggggttttttccgccagggtctcaataattaagggttttttctgggagatttttaaggga

SEQ ID NO: 594023 - DNA, 558 bp, Homo sapiens
acacgacgtcgtgtgaggagttcgaaggattccaatattgcctggggacaagccagcgagagattgtgcacgcgtcgttgatagatcggccctcggagctcatcttcgcgggtgatagttttggccgccccaacacgcagttttcaattcgtctgcagaatgtccctatcgggtctaataacatgccgcacttccgtcatctggagacagcgaacttcctctttgtagatggacacgtcaaggcttttaatgacggtcagcgcgataaatgcgagatgtggaatcgcgatgcatccgtctgtccgtaactcgaattccatctgttgcccgaatcggaattcggtcaaagctcattaataacggccagtgaaagcaagcctcaatctggggacgttagctgacgcctcgaaagtaactctcattattattaaccctggattcaagtagtacgtgcaccaggttgtacctcgtagaagagttggttgggggtcggaacgtccagagtttggcgcggccggttattgagtcgctgcttgacatgatcgatgtgctgctgag

SEQ ID NO: 594024 - DNA, 1289 bp, Homo sapiens
  misc_feature (1124)..(1124): n is a, c, g, or t
gagtgactcggaggcgctcgtctgaggggtggactacctaagccgcagcgtggtttactgtcgttggctttactgcctcttctgatcaatctatgctgcaagtctgtgctcgtccctatctaggagcatggtgctctaagcgttgtagtcctgggggctcatggttgtcccttgtccgcgcgttcccgttcgtctgtgcgtcaccggttccttcgcataggtcgtgtgcctcgtgggagggctcgccgaccagtgcgtcctcagtggtcctggcgcgtatgtcgtcgtggtctctgccgctggagagctggtcctccaggcgatgttccttgatcatcggagtcttatggctctgtgcacaaggtaaagggatgtggtgcgcctgtgggtgttgttggcgctgcgtcatatccgagtcgggaataccagggtactcgcctattaagatcgtatgagcagaattcgggttaccaggacagcgttcgtagataaagatctccatcacctttaagagggactcgcgaaataagtagggatacaatgagttgagctggaaagctaatttctttcgcccgtgtcgaatcgatgggttagtcgtcatgaacgcacaatagatgcttcgaggaaggaggtctttcacattacagtcaattagaacgcaaggatggcccttcactggcgtgagcacattacggaagggaagcgatggattgtttgccttggtcccaattttcgtcacaatcagaagggtttgctttcaacatgaaggtagtatggtacggccctagaaagttcttctaacatgttggcacgttccatccatgtcattgggatacaacaccgcaaagggcaagagggcacctcaaaggggtaaatcctcgctgggtatagaatccccgctccggggcgagaggcgtatggaccaaggtaacagaagggggcccaaagtgggaacactctcaaagtggggtctttccaagtaccctttgtgaattcgattggttagcggccaactacgaactcagggacaggctttggactgctttttcaaaggagccagaggaatggttaaccaaccaattttttggcttcgttcacgtaaaagcactcagaaacaaacagtngagtcaccaaaagtcacttcgaagtggccccacatgagatggtcccaagcttacctttggggtacagggaaagcacacggccagcaagttagggaaaacaagctggcctaaaaacattaggtgggaaaggcctaaggggtgaagcgcctggagggtttagccaag

SEQ ID NO: 594025 - DNA, 148 bp, Homo sapiens
  misc_feature (13)..(13): n is a, c, g, or t
  misc_feature (105)..(105): n is a, c, g, or t
  misc_feature (116)..(116): n is a, c, g, or t
actgtcactggtntttacagaacatacacagtgaatatcttctttgtacatcatttcgaatgtgttctgttgctatatctgtaggtcagatttccagaattgaanctcctggaacnaaaggataagaatcgggtagttacagcatgca

SEQ ID NO: 594026 - DNA, 1255 bp, Homo sapiens
gtcaaatctcgcactctgttcttccgtcgctccgccggtcgcgattatctctgccggtcgcaagtggacagaatgagatcgcccgcgcgtgtgtcagtttgacaagtggctcacggccatgtgtcaacacgtgtggattttgcctggcgggacgacgtcgtccccggagccagtgtttcgcttccatcgtgcgtgggcgtcgcccagatcagccaggccgatcagtggctgcgtgcgatgggcccatgaatggacttcctaccagtgggccgaggacgagccccgagaagcataggcgtgcgtcactcctgactcctggaataggtaccccagttgacgtcgatggcagtcggtcactcaacatgagactgaacatgtgatgaatgactcatggcaaccacaacacttcttacaagacagacgcttgcgccgatggcccccaggaggagccacgctcaggtagctagcatgagcagacggcccccaccggaacccccgaaggcccagacgacgaggacgacgactgactccagaattgagtgttatgatgcaccatttcaaacaacactccgggtccaatggtaccgcttggcccattccaaggggccgctgcttgtttccctctttaacgcactcatgggacggcagcgactttgggtcgatatgattcagttgcgaccttccgtgcgaggaacggggggttcaatccacgagtgaacgggtttgtcatccagttcgtaccctaagagggacttaaagacgccttcgcgcatcaaagtgccctaattccgctggacggatatggggaatccctgtggcattgagcaccgagtcgaaactcttgaaaccagaaaataaaccttccaatttgaaaggaattgcgtacaactttgaaggcacgaaaggagctaaacagcacttacgaagcgaaaggccacacaggagacatagaaagcctgggggaaaaacaccccgaggggcgccccgaaagagcatccaaaagagggaggagaagccacaggagagctcctacaggagttcgtcccccttgaaacatatcgagaggcagagcataaagatgacgacaacacccaaccaggaaaacgtaccgacaatactttctgggaacgaaagaagacgaaccaagagcagcgacccccgacagtagagccaacagcgtcaatatacacaacttgggtggtcgaagaggacacaggactccgagacggaccccagagggaccacagcatgtact

SEQ ID NO: 594027 - DNA, 563 bp, Homo sapiens
taatctccagaaggttcgcctcttacggtgcccgtgcttccatgagtagccgtgaccaggtgaaaaagtggagaggaaccagccggcacagggaggggtcatactccacaacattcccttacaccccagttgccaaacagaccccccacccccgtggatttctatcatcccttccatccctgaacggaattcgttggcactatcccaaatcgtgactattgtgactcatatttagatatccatcattggagccctagaatacaatcaccacagatgcaccacacaagagacaccccaagaaagaagagagagaacgaccatgtaaatgatatcatacaaaacattctccaccataatcctccaaaactcattagagactacctatccactcatcttttcccccactagaaaaatatcccctaatttcaccatccacacgcccaaaataaacaacgacatcttgagtcacaaaaagccatcatacattatataaaccaccatagcctaatacatcaccctacaaaaaaaataccatagcccaaaatcaaaccacatctcatctg

SEQ ID NO: 594028 - DNA, 273 bp, Homo sapiens
  misc_feature (36)..(36): n is a, c, g, or t
  misc_feature (79)..(79): n is a, c, g, or t
ggcacgagaggttcttagacagcaacattgactctncagtgccaaacgaagataggccatgggtagtggcatatttttnctgtggggccacattctttcgctctctttttctttgtatatatcagagagagaagtgtatcatacacttagaacaatgcagaagacacagagtttaaagaataatgacaaacatcccagcacccaccacattcctagtgcctaagaagccccctgggtgtccatatccctttgacacccagagttcactgccat

SEQ ID NO: 594029 - DNA, 429 bp, Homo sapiens
cagccgattcgttatgaggcgtgcgcctccgggttgccactgtacattccactagcattgccttcttatttaacttctttgagctgtttgactttgtaagatgcaaagaggttggatcaagtttcaatgactgtgctgcccctttcacatcaaagaactactgacgacgaaggccgcgcctgcctttcccatctgtctatctatctggctggcagggccgccccccccttgcatgttggttttgcccgaagtggggtggaagccccccggtggcccccccgtgccctctcgcgtgttccccccccggcccggggtgtcctgcaggcgccccccagtttattcagagtgccctttttttttttgttcaaatgattttaattattggaatgcacaatttttttaatatgcaaataaaaagtttaaaaactt

SEQ ID NO: 594030 - DNA, 431 bp, Homo sapiens
acgtttgaatacattctcccaagactgaggttgttcggttttaattcctgtagtccaatcacacaatttcttatggaaaaccttttgtgtttctggtatttaataacttgaagggatagcaaaatatcctgtgtattcaggaggccctcttcgcaagctggctaagctcagagcaccaaaaggtggtaagtgcccaaggacatttcattatctattaaaagcgtgcacaaccgtggataacctattaacactatttaacaacaaagtgtctatatgggtgtaacacctgaccttgttataatttggatgtctcaaatgtagagattatctaaaaatcgtaacttgaataccttgtaatttttctcttaaaaaagaagacttgtgtaagtctccgcatctacgccaatgcgcatgttgcttggaggtaaaaa

SEQ ID NO: 594031 - DNA, 3323 bp, Homo sapiens
ggcctctggccgcctggctccaacatcaagcaccgggctccgagtggccgggatcagcgccccgaggcagaggccggagggcgcgcgcactgctaggaagtgctggtcccccgcgccgctctgccagcttggtcccccggcagacgcccctgtacgatcgccgctcgccccgcgggcgaggctgcggtggacagcgcggggctccggctggctcgccttcccgcctgccgtgtcctgctgagcgaccctggagtacacatccagatgccagcccagctaccacaggggatccctctgggagactgaaagtacaggttctggggcccaggttgaagccgaccaaccctgagcctcaggccaggggaatggcagcccccttggaggcccaggaccaggcccctggggagggagaagggcttctgattgtgaaagtggaagattcctcctgggaacaggaatctgcccagcatgaggatggcagggattccgaagcctgccgccagcgcttccggcaattctgctacggggatgtgcatgggcctcatgaggccttcagccagctctgggagctctgctgccgctggctgcggcccgagctgcgtaccaaggagcagatcctggagctgctggtgctggagcagttcctgacagtgctgccaggggagatccagggctgggtgcgtgagcagcacccgggaagcggtgaggaggctgtcgccttggtggaggacctacagaagcagccagtgaaagcctggcgacaggatgtgccctcggaggaggcggaacccgaggctgcaggccggggatcccaggccacggggcctcccccgacggtgggggcacggaggcggccgtctgttccccaggagcagcacagccatagcgcccagcctcctgctcttcttaaagagggtcgtcccggagagacgacggacacctgctttgtctctggggtccatggacctgtggcattgggagacatcccattctatttctcccgggaagaatggggcaccctggaccctgctcagcgggatctcttctgggacataaagcgggagaactcccggaacaccaccctgggttttgggctcaaaggccaaagtgagaagtccctgctgcaggagatggtgccggtggtgccaggccagacaggcagcgacgtgactgtgtcctggagccccgaggaggctgaggcctgggagagcgagaaccggccgagggcggccctgggcccagtggtgggcgcgcgacgggggcggccacccactcgccggcgccagttccgggacctggcagccgagaagccgcacagctgcgggcagtgtggaaagcgcttccgctggggctcggacctggcgcggcaccagcgcacgcacacgggcgagaagccacacaagtgccctgagtgcgacaagagcttccgcagctcctcggacctggtgcgccaccaaggcgtgcacacgggcgagaagcccttctcctgttccgagtgcggcaagagcttcagccgcagcgcctacctggccgaccaccagcgcatacacacgggcgagaagcctttcggctgcagcgactgcggcaagagcttctcgctgcgctcctacctgctggaccatcggcgtgtgcacaccggtgagcggcccttcggctgcggagagtgcgacaagagcttcaagcagcgcgcgcacctcatcgcgcatcagagcctgcacgccaagatggcccagcccgtggggtgagcagctgacttggccggaaacccgggggaggcccagccacggcacatcctgctttgttcaccactgggactctccttccatctgtggccacctcccgggctgtccgagggaccccagggtacctcacactcggagctcgcctgccctgcttggctctgaggacctgcccagcgctcaaagggaacggaagccttcccctcccgcccccgatcttgtcctctttcccccttctgcgcctagcgttcctcttcccctctagtttcctggagccccaacacattcctggcagggacagcagggtggcaaggactcaggtctaggtcccttcccagaagcccccgagcctcatttgactgtgtggctctttggcccccaccctgtggggtgggtccatgggtcaggcctctgccctaccaacctgtgcctttcagtgggcgtggaggactggccttggccccccagggggctgctggactttgggagagacagcccacacctgtgggaccgcgggtcttagtcacggcggcaggggctttctggccccctcccactcccgtttccaggccatgaccactctgccctgtcctggccatacggactcggcctgcctttgccctcggcctacttgccctagcatgaggctctgagagccacctgcccaccaatctggtgaggataatggtggctccagcgacaggaggccaaccctggagaccaagaacagggcgcctggctgccatcttttcctccagaggtggggctgcaccagactcagcactagcactccatcagcactagcacctcactccatcagcactagcacctcactccatcggccccggcaccctgctccatcggcactggcgccctgctccatcggcactaatgctccactcggcgccccactccatcggccccgctccatcggcactaatgccccactcggcgccccactccatcagcactaatgctccactccattggcactaacgccccaactccagcggcactaatgccccactcggcgccccactccatcagcactaatgctccactccattggcactaacgccccaactccagcggcactaatgacccgctcctttgacattggtgccccactccatcagcactaacgccctgctccatcggcactggtgtcccactccattgtcactaacgtccggctccatcggcactaccaccccgctccatcatcactatgtccagctccgtcggcactaccaccccgctccatcatcactatgtccagctccgtcggcactaccaccctgctccatcatcactacgtccagctccaacggcactggtgccccattccatcggcactaacgccccgctccaccggcaccagtgcctcgctccattggcaccaacgcccagctccaccggtactggctccccgctccatcggcactaacgccccgcttcattggcactttgctgctgcctcctgagcactgccttccatgaacagggacagaccagaggccgtgcaaggactccccctcagacctccaaagggcaacagaagagtattaataaacgtgaaaactt

SEQ ID NO: 594032 - DNA, 695 bp, Homo sapiens
aaaaaaagaaataatatattcaatgtactaaaaagaaaaatattgccagtgaagaatatggctttaatattctttattaaatataagcaaagctattcctcagaaatgaaagaaagataaagtctttttcagatatgcaaaaactaagggaagactaggcttacagaagaaacgactcaaggagagttttagatctggaagtgaagaagacaataacctactcaccatgatgaaagacgaagatgaagattataagaaattcactggtagagctgatatgcaaaagagaaagagaagaggaatcgaaaccttatcactacagaaaaccactaagccacaaaaataagcaataaggaggattagagagaaacggaagtatacaaccggaaaaccatcaataaaacgacaagagttaagtcctcagcgtaccaataaataaccttgaatgtaaataaattatattccccaattgaaaagacgttgaagtgaatgaatgaataaaaaaaccatgcaaactatatgctggcaatataaaacactcacctcacctgtaaaagacacaccaaagactgaacagtgcagggcatggcacagcaattactcaggcaaaccagaaaccaacaagtgagccagaagtagctatgctgatgtcagataatacaggctatttaagtagcaaggtgatcgagacacag

SEQ ID NO: 594033 - DNA, 3322 bp, Homo sapiens
ggcctctggccgcctggctccaacatcaagcaccgggctccgagtggccgggatcagcgccccgaggcagaggccggagggcgcgcgcactgctaggaagtgctggtcccccgcgccgctctgccagcttggtcccccggcagacgcccctgtacgatcgccgctcgccccgcgggcgaggctgcggtggacagcgcggggctccggctggctcgccttcccgcctgccgtgtcctgctgagcgaccctggagtacacatccagatgccagcccagctaccacaggggatccctctgggagactgaaagtacaggttctggggcccaggttgaagccgaccaaccctgagcctcaggccaggggaatggcagcccccttggaggcccaggaccaggcccctggggagggagaagggcttctgattgtgaaagtggaagattcctcctgggaacaggaatctgcccagcatgaggatggcagggattccgaagcctgccgccagcgcttccggcaattctgctacggggatgtgcatgggcctcatgaggccttcagccagctctgggagctctgctgccgctggctgcggcccgagctgcgtaccaaggagcagatcctggagctgctggtgctggagcagttcctgacagtgctgccaggggagatccagggctgggtgcgtgagcagcacccgggaagcggtgaggaggctgtcgccttggtggaggacctacagaagcagccagtgaaagcctggcgacagggagtaaactctgtctcccccggtctggtctcgggctgatgagcatgttgtggttcctgcacaggatgtgccctcggaggaggcggaacccgaggctgcaggccggggatcccaggccacggggcctcccccgacggtgggggcacggaggcggccgtctgttccccaggagcagcacagccatagcgcccagcctcctgctcttcttaaagagggtcgtcccggagagacgacggacacctgctttgtctctggggtccatggacctgtggcattgggagacatcccattctatttctcccgggaagaatggggcaccctggaccctgctcagcgggatctcttctgggacataaagcgggagaactcccggaacaccaccctgggttttgggctcaaaggccaaagtgagaagtccctgctgcaggagatggtgccggtggtgccaggccagacaggcagcgacgtgactgtgtcctggagccccgaggaggctgaggcctgggagagcgagaaccggccgagggcggccctgggcccagtggtgggcgcgcgacgggggcggccacccactcgccggcgccagttccgggacctggcagccgagaagccgcacagctgcgggcagtgtggaaagcgcttccgctggggctcggacctggcgcggcaccagcgcacgcacacgggcgagaagccacacaagtgccctgagtgcgacaagagcttccgcagctcctcggacctggtgcgccaccaaggcgtgcacacgggcgagaagcccttctcctgttccgagtgcggcaagagcttcagccgcagcgcctacctggccgaccaccagcgcatacacacgggcgagaagcctttcggctgcagcgactgcggcaagagcttctcgctgcgctcctacctgctggaccatcggcgtgtgcacaccggtgagcggcccttcggctgcggagagtgcgacaagagcttcaagcagcgcgcgcacctcatcgcgcatcagagcctgcacgccaagatggcccagcccgtggggtgagcagctgacttggccggaaacccgggggaggcccagccacggcacatcctgctttgttcaccactgggactctccttccatctgtggccacctcccgggctgtccgagggaccccagggtacctcacactcggagctcgcctgccctgcttggctctgaggacctgcccagcgctcaaagggaacggaagccttcccctcccgcccccgatcttgtcctctttcccccttctgcgcctagcgttcctcttcccctctagtttcctggagccccaacacattcctggcagggacagcagggtggcaaggactcaggtctaggtcccttcccagaagcccccgagcctcatttgactgtgtggctctttggcccccaccctgtggggtgggtccatgggtcaggcctctgccctaccaacctgtgcctttcagtgggcgtggaggactggccttggccccccagggggctgctggactttgggagagacagcccacacctgtgggaccgcgggtcttagtcacggcggcaggggctttctggccccctcccactcccgtttccaggccatgaccactctgccctgtcctggccatacggactcggcctgcctttgccctcggcctacttgccctagcatgaggctctgagagccacctgcccaccaatctggtgaggataatggtggctccagcgacaggaggccaaccctggagaccaagaacagggcgcctggctgccatcttttcctccagaggtggggctgcaccagactcagcactagcactccatcagcactagcacctcactccatcagcactagcacctcactccatcggccccggcaccctgctccatcggcactggcgccctgccccactcggcgccccactccatcagcactaatgctccactccattggcactaacgccccaactccagcggcactaatgccccactcggcgccccactccatcagcactaatgctccactccattggcactaacgccccaactccagcggcactaatgacccgctcctttgacattggtgccccactccatcagcactaacgccctgctccatcggcactggtgtcccactccattgtcactaacgtccggctccatcggcactaccaccccgctccatcatcactatgtccagctccgtcggcactaccaccccgctccatcatcactatgtccagctccgtcggcactaccaccctgctccatcatcactacgtccagctccaacggcactggtgccccattccatcggcactaacgccccgctccaccggcaccagtgcctcgctccattggcaccaacgcccagctccaccggtactggctccccgctccatcggcactaacgccccgcttcattggcactttgctgctgcctcctgagcactgccttccatgaacagggacagaccagaggccgtgcaaggactccccctcagacctccaaagggcaacagaagagtattaataaacgtgaaaactt

SEQ ID NO: 594034 - DNA, 643 bp, Homo sapiens
  misc_feature (124)..(124): n is a, c, g, or t
  misc_feature (131)..(131): n is a, c, g, or t
  misc_feature (202)..(202): n is a, c, g, or t
  misc_feature (208)..(208): n is a, c, g, or t
  misc_feature (263)..(263): n is a, c, g, or t
  misc_feature (282)..(282): n is a, c, g, or t
  misc_feature (292)..(293): n is a, c, g, or t
  misc_feature (295)..(295): n is a, c, g, or t
  misc_feature (301)..(301): n is a, c, g, or t
  misc_feature (306)..(306): n is a, c, g, or t
  misc_feature (339)..(339): n is a, c, g, or t
ctcactcccaaaatcattagacaaacctctctcccaggtaccagctcctgaccctctactacaacaaattttcctcctgggtcagcaactccacgaccctcagtccaccactagacctttcccnccctggntcgccagctttctgaccctcgaactataacaacaatgctcctgcctcagtctgcagctccacgaccctganactagnacaagacgtctcctccctaagtctccagcttccggatcctcgaattgcaacaacnttgctcctgcctgggtctncagctccacnnanatcaanctagnacaagacctctcctccctgggtcgccagcttcntgaccctcgaactacaaccaaattgctcctacctggatcagcagctccacgaccctcagaccagaacaagacctctcctccctgggtcgccagcttccggaccctcgaactaccacaaaattgctccttcctgggtcagcagctccacgaccctcaaactagaacaagacctctcctccctgggtcgccagcttccaggaccctcgaattacaacaacgttgctccttcctgggtcaggcagctccacagaacgtcaaactagacaagacctctccctcctggtcgcagctgaggaccatcgtt

SEQ ID NO: 594035 - DNA, 416 bp, Homo sapiens
accgtgggacctttattccgagcatacacatacattttggtgaagcgacaactgatatggtttggttctgtgtccccacccaaatctcctcttgaactgtactcccataattcctacatgttgtgggagggacccattaagagatcatttgactcatggggggcagtttcccccatactgttcttgtggtagtgagtaagtctcacgagatctgatggttttatcaggggtttctgcttttgcatcttcctcattttctcttgccactgccatgtaagaagtgcctttcaccttctgctatgattctgaggcctccccagccatgtggaactgttaagtccaattaaatctctttttcttcccaatctagggtatgtctttatcagcagcatgaaaatggactaacacagatgttg

SEQ ID NO: 594036 - DNA, 427 bp, Homo sapiens
  misc_feature (124)..(124): n is a, c, g, or t
  misc_feature (131)..(131): n is a, c, g, or t
  misc_feature (202)..(202): n is a, c, g, or t
  misc_feature (208)..(208): n is a, c, g, or t
  misc_feature (263)..(263): n is a, c, g, or t
  misc_feature (282)..(282): n is a, c, g, or t
  misc_feature (292)..(293): n is a, c, g, or t
  misc_feature (295)..(295): n is a, c, g, or t
  misc_feature (301)..(301): n is a, c, g, or t
  misc_feature (306)..(306): n is a, c, g, or t
  misc_feature (339)..(339): n is a, c, g, or t
ctcactcccaaaatcattagacaaacctctctcccaggtaccagctcctgaccctctactacaacaaattttcctcctgggtcagcaactccacgaccctcagtccaccactagacctttcccnccctggntcgccagctttctgaccctcgaactataacaacaatgctcctgcctcagtctgcagctccacgaccctganactagnacaagacgtctcctccctaagtctccagcttccggatcctcgaattgcaacaacnttgctcctgcctgggtctncagctccacnnanatcaanctagnacaagacctctcctccctgggtcgccagcttcntgaccctcataaacaatccctactcatgaaatgtagcagtcaggaaaactgtagaggaaataaataaataaatgttttcctatcaaaa

SEQ ID NO: 594037 - DNA, 1385 bp, Homo sapiens
ggtggtcactactatggagtttcttccttaacactgattagatgatcttaactccctcagctaaaactggcattactgactcccagctatatttctccagacttgcattttttattatattattggaaacagggatctacacggatcgcccaggcgggagtgcaggggccgtgatcatcagatacacggcgtgaatattccctccgagggacatcaagcgagtcactcccacgctaccagcctactcgacataacagggacatagtaactactgtgacagacaccagtgcacgagcatacatttaacattaatggagaagagagagcagctccatcaaactagtgataacacacagggattcgggactacaaacataccgtgaaaacaccaatagagtgcaaccactaccataatcgatcaagaccaatcaccaaaaagagagaatagagagataacaaagacaaataaggacacaaacgagtatgcacagtgactcaataagaacatgagaaagcagttagacagaacgtgtcacgcaagtgatacgatcaccgatggatagtgacacacaagaggaggacacagacaagagaagaaaaaacacaaaaagcaaactatggcagtcacacaaagacagtataacatacaaactcaataagcaacagagacagcagtgataacgaacactacatggcggagaactacaataccacaaacaacaagatgtaataagacaacaaggacctacaaagcacaacagcggcagataatgtgaaataaacaacaaaacactaaagtgagaacaaagccaaagaaaacagcagaatcaaacaaaatatataacacaacaacatgacgtgtagacacataacacacacaaaacacaaaaaagatgacaacagagaataaggaagaagaggctagacaccgaaaacacacggcgaatataacgaaagacgcaacagataactaaccaacatacagaaacaaccgagagagcagaagtcaatacaaagtcacgcgcacagcatgagaaacaacaagagagagcgagaagcgcaataccaaaaagaatgcaaacagaaggctaacacaaacagtacacacaagaccaaatagaaacaacacacagtagaaagatgcacatagaaaacaaacaaagagaacaacagcacacaacatataacaagcaacaaaagcacccacgaacaacacaaaggaacacaccgcacaaaaagatatagaagaaacataatagcacaccacagtcaggcgaaacagttccacaactaacacacaagaacaaacaagccaagcaactataaaaaagagagcacaaccaccaacaacaaatcaaaaagaaactagtaggagagacagacaa

SEQ ID NO: 594038 - DNA, 128 bp, Homo sapiens
  misc_feature (82)..(82): n is a, c, g, or t
  misc_feature (97)..(97): n is a, c, g, or t
  misc_feature (105)..(105): n is a, c, g, or t
  misc_feature (109)..(109): n is a, c, g, or t
gcgcgagcacagagcctcgcctttgccgatccgccgcccatccacacctgccgccagctcaccgtgtatgatgatatcaccncgctcgccaccaacnacggctcnaacntgtgcaaggccgccttcaa

SEQ ID NO: 594039 - DNA, 410 bp, Homo sapiens
gggatgcgttagatgaggcgagatgagattgtactactgtcctccagtctgcctagatctgcacgactcagtgtgtagggatgacagatggcagccagactgctgtggacttaggaaatactcttcgttacagaaccttactgtggtgcctaacatattcccaagctactggactcatgagattattctgtcttaatcactagctgtgatagcactacagacagagctcacaagaccaatgattctgtcactgttacctacgttctttgacttaatagccaatcttatgacttcagagtacattgtacggcctagaccaggctgttaatggactgattgtcgaacagaaccgagtaatctgggtttactgggttctttacatgtgatgagctacggccgattgatgtatc

SEQ ID NO: 594040 - DNA, 282 bp, Homo sapiens
aacatgacgcagctcctcatccacggcgacgtggcagagcaggatgctattaaatgggaaagcagataggaccaagatgatataatactttggctttatctttaacatcctattttttttttttttttttggaaatggagtctggccctgtcgcccaggctggacctgcaggggcttgatcttggcctcacgtgcaagctcgtgcctccccgggttcacgttattctccgtgcctcagccgtgccaattacctggaactacgggcgcccaccaccagtgccg

SEQ ID NO: 594041 - DNA, 326 bp, Homo sapiens
  misc_feature (49)..(49): n is a, c, g, or t
caacccaacgcagattccaatcaggcaagccactgtgggactgcacgtnactcactttgtccagctagatcaggtacctttttagatcctgtgtcctcaattatactggactgtcaactgcctgaggtaaggaaattaatcttttacttcttcagccttcgccttctcaacttgttccagctacacttatcaacggagttgagttcttatcaggtcctcagacatataaatgatgcaaacctagtgccatttctggtctggcctaactctaaggtagaagagttagggaataaaagttaataaaagttttcagtacatttatctcc

SEQ ID NO: 594042 - DNA, 344 bp, Homo sapiens
actgacgctctgaagcaatgacctggtggaggcttggaagagacaagcagcaatgctagaaccgtctgttcatgcgtaaccagacacgccgtgcacgcgttagatacctttcttagaacactcgttttctgctcccttccctcgtcccttccctccccgacaggtcacataacagctgcatcattgaccgcacagcgccatctctccctgagaataaagccgatagccaccctcctccggctccgagcctgcttctgccacacctcgctctcagttctctccacatttccatagagaccgtgtggtttttgttcacccgggccccccgtcttcctccctgtccc

SEQ ID NO: 594043 - DNA, 134 bp, Homo sapiens
gtgatcaatatgtggggtgtatttaaagcattatgagtgaaatgtattttataagcatttaatattaatgctctgtagaatggaacgcagataacaaaccttataagtggggcctaaattaatctgaaccaata

SEQ ID NO: 594044 - DNA, 414 bp, Homo sapiens
caaataccttagtaccttacaggtagattctttctttctttctttctttcttttttttttttgggaggcgaatccgtcttccaccagaaatggagtgtcgcggggccaaattctgggttcattgaaagctctgcctccgggttccccacctttctcttgcctaagccttcctgaattagctggacactacagttcgcccgacaccacccccggttattttttggtattttaagtagagcacaggtttccccggtgtaagccaggatgttctggatctcttgacctcgtgatctgcctgcctcggccccccaaggtgctggaataacaggcgtgacccattgcccccggcccagtattgcttctaaccaggaaacccttatgcccgaaccatttgccccccgcccggtacccgag

SEQ ID NO: 594045 - DNA, 400 bp, Homo sapiens
aatagatgaaattaatacctatcttcattctgcccctggcttgtaatattatgattacctatttctcatataatagttatattttagttacagtttaatgattgaatctttgtggcatttcctttgtgataatatgagatctaaaaacttacttttcctccaaatgccacccctttcttttgtacattgggaaactgagccttaggctgtaattagtccagagtcactgggctggttagtgtcagagctgtttcttatgacttatagagtactgctgattttttttttacacggatagacctgggtttaactctgggatctgttactaactcgcctttcgtgtgttgtgccggacaggtcacttaacctctcaaagtctctaattaagtaaattagagaa

SEQ ID NO: 594046 - DNA, 377 bp, Homo sapiens
tttattttttgattctccttcaccccccaccccgggggtttcatcttttttgaacacatctttttttggcctctgtccccttttttcattttttagctcccctcccacctggggggcagtggggtggaaaaaccccaggccttagattttttttgctttccttcctggggccccgaggagggcagccaaagggggtggggtttcccccccccccgcccttgggaagaacgggggttttttcttttcccccccccctttttcccctgccccccgggttgggccccttttgggtggggccgtgggtccccgattggctcccccttagaatgttagaactcccacccaaatttttttttaatttaattttgggtttccca

SEQ ID NO: 594047 - DNA, 696 bp, Homo sapiens
  misc_feature (440)..(440): n is a, c, g, or t
  misc_feature (442)..(442): n is a, c, g, or t
  misc_feature (454)..(454): n is a, c, g, or t
ggcaggtggatcacttgaggtcgggagttcgagactagcctggccagcatggtgaaaccccgtctctactaaaaatacaacagccaggtgtgatggtgcacgctcgtagtcccggctactcaggaggctgaggcaggagaatcgcttgaacccggaaggcagaggttgcagtgagctgagattgtgccactgcacgccagcctgggcaagagagtaagactctctctcaaaaaaaaaaaaaaagagaattttaaaatctcccaatttataatttctcttaacctcttttaattgggattgttttttaaacacacagttattcaccttattagttattcccttattgttgtcttcattctatgtgttttgtgcgtacacagtggttacacttgcacattttagattattctagaaaggttcacttataccccctttgcctntntccttctcgccnatttttaatattctcaagtgcgcttacactttgtgccgagaaaaagagctacaaagagcgagacacacaatattcacatgagctttatatccgaggctgagtgtgtctcccactgtgcgcacacagagacacagaaagagcagcgcgagggccacaaaaaacactgtgagactcagagtcgaggaaaatcccggttatttgagacacatttttctcaccgtttttcaactttctctttaaaa

SEQ ID NO: 594048 - DNA, 241 bp, Homo sapiens
ggatccggttgcagtgagccgagatcgtgaccattgcactctagcctgggtgacaagagcgagactccatctgaagaaaaccaaaacccacagacgtctagcgccagatggtctggggcttagcatcacagcgtttgcctgctttgcatctcccagcatttgcgtgagcagctgttgtgggctatgagctcgtgtctctcttcctatctcttgccttttttttgggggggggggggaattc

SEQ ID NO: 594049 - DNA, 165 bp, Homo sapiens
tcactcaacagagactgtactacgcaaaattgtcgttcattcaagcggaaataatgatcaagcggcacgaggtaggagcagcagaacattcgggaggaactaaataaaaagaggaccccagaaggagatggacgcatgccatgctaatccggcacggcgagtcca

SEQ ID NO: 594050 - DNA, 295 bp, Homo sapiens
  misc_feature (19)..(19): n is a, c, g, or t
cttttaaaggttttttttnccatttttttttcccctttttgggtccccccccctgggtttctaaagggaaaaccatttgttgggcccatttaatggcccaattttttttttccccaggccccgtttaaagggggggcttccgggggttaaaaaatttttttgggggtggttcccctccctccccaagggcttaagggggggttacccttagggttgatttttaggggttcccccatttgggtacctttttttttttttgggggattaattacccctggtttttggggggcccgga

SEQ ID NO: 594051 - DNA, 139 bp, Homo sapiens
agagtgatggcagagtaagctcagtgtacagagtgtcagtgaatgtgtagagaagtgccaggtgcagagggatcagtgtccttgattcagcataagatcacactgtgtcagcgcgtggacatgggcagcaagtgctggg

SEQ ID NO: 594052 - DNA, 885 bp, Homo sapiens
ctttttaaccccgatttttccccccctctcgacgatgtggttgttcctgccccctgttgccaccatgcgtgttcccccccccgccaggaatgactatcatggggggtcgtagaacactatttgacgcccccttcattgggccgttttaaacaaccccccatttctccttgcgttttaattccccacaattttgtcgatcgctagccttctatatcattgtacacaagcctgtgcaacacctctcccaccttttgttgccccccaatctctgaggccttaaataacaagcatgctaacacacggcgcacacaattgttgtcctgcaataacattctcctcttatgcaccgccggttctcccccccattggtacattatttctgacacccgactgtgccctccaacaccgggactacttctattaggagcgagtctctcctacaatcttaaggggctggaggccccaccatgtattttctttgtatgcaccacgcacacatcgcacaccactttctctgtgtgcccaggcaaatgtgcacacttcgccgcaaatgtcttctctgccacactctccaaacgtcgtgtcatcacaaaattctttcacgctcgcgctcaaattcaatctcccgattgccactgaatcctcccggtacaacattatcggggcaaaaattatgaaacataatacacattcctccggctatatggacatattattaacaatagaatacggcacccttttctgctacaaataagcactcctattattcactctttgtatagacgaacttatgcgcgaacaacaagccctctggtctccgggtttcaatacggtttcttttttgttccccccccaagtgttaaaaaacacaccgcccacataaca

SEQ ID NO: 594053 - DNA, 354 bp, Homo sapiens
gttatttcttcggctacgactccgagaccattcgcctgttcaagggcaacagcccggacggtgtcggcaaaagcttcaaggacaaccgcgacccgaatggcgtctacgtcaaccgtgacctggtgaaagtcggcaaggacggcacccactatctgcaatacagctcgacgcagcccggccagaccgaactggtgcccaagctcggctacaccgaatacctgcccaagtgggacatggtgatcggtacgtcggtgaacctggacggtatcgatgcacaagttgccgaggttcaggccaaggtcgagaagcgcatggaaggcgtggtgctgagtattatcgggattgccgtggtag

SEQ ID NO: 594054 - DNA, 207 bp, Homo sapiens
actggggaccccaagcatgtgtgacacagtcttaagggtctatgtatgggtgtgccagtatttacatagtagctaaacaggtaatagaaggtgcttagaatgttcagaaagaccaatatttaaaagactttatagaaaacagttaccgtaggaaggtctctcagtttaaggcctttccagagtatccaagtcgactacactgaaatg

SEQ ID NO: 594055 - DNA, 127 bp, Homo sapiens
ctcggcagacagcgcagtagtgagggggcagtgagagtgcgcacagagtccttcacaaaccacagaacacacgtggccttcaacacaattcccctctcctcttccaaacaaaacatacattgatctc

SEQ ID NO: 594056 - DNA, 207 bp, Homo sapiens
ggacgtggagcggggccatgaagagcctgccttgatttaaagcaaggtaggataactactttggactttgaattaaaggagaaggacaattctcggcgaaagtgccttaaacttcctttttgcttaaaaagagtgtatatctttcccctcgtaagagagagagctggagcgtcggctttgacaaaactgacgaacagactgtgcaaa

SEQ ID NO: 594057 - DNA, 668 bp, Homo sapiens
gcactgtaattccagctgcttgggaggctgaggtgggagaatctcttgaacctggggggctgctgtgagccgagatagttccattacacttcagcctgggtgacagagtaagactctgtctcaaaaaaaaaaaaaaaaaaaaaaacaaatcctggacaattcaaaaaattttccgggaaaatttggtccagggcccaccaattgaaacctttggtcggggtagatacacttttcattaattatacttactccatcacctcttctcatatattttcagaaagtactagtagcaaagtgtttgcaggagttcactgggagaaccttatttaaaatgcagcttctgatccaggtgcaccgtggggtggggcccgtgagaagtctgcatttctcccaggctccgtggttgctgccagtggtgctgcctctgagttaccaggggggtggggaatgatattggagccgctccataatttatcccatctgcacaaaatgagtcacagagccctttaggtaatggacggggggactcaggctgattctgtaagcgggtgttttcagaccacagacgtttgcctgccaaaccttggagtaggtaatcatgaagggtcccttaaacttgctgtgcaggttgaaatgacgctcaaaagtaaaaggggtccgcaaccccg

SEQ ID NO: 594058 - DNA, 708 bp, Homo sapiens
gcggccctcatgggacagactgtacggcccaggctcctccgggcctggccagcgtggttatttataagccctggctgcctccagtgtgcctggatcagactggcttgtttgggtcaccggtgccaagttttttctttctttttctttttttccaataagaatctacgtctgagcatggacggaatcccagaatcaaatcactggatcaatacttggtcaccaaacacattcgagacctcaaaagctcaaaggctgtagggtaggtacccttgctacctactctacctacagacaaagacgctgagaaatcagataacttgtccaaggtcatggacagctgggactagacccatggcttgtcacactctaccagccttattcttaacctctctgcctgatgcctcttgacccacattcgactttgaaaaagttttcgcacttggttcatcggaaaaagccacacacagctgcccggaggactctgttaatcagtagctggttgcttctggcccagtgggcaacatcagaggcagaaagtacagtacagagagaaccgcaggccagcagttgcatctgaacccacgctcttcctcccagccctttcccttgtcttgactcacaacctagtgtcctcagtatcgcccagcacgtgaggcagccggttcactccagccttgaccagggccatcgcgggatcagagcctcctc

SEQ ID NO: 594059 - DNA, 323 bp, Homo sapiens
cggccgccacaggttctccagtccattcctaatacactgcccccgcacctactctaggcccctcgctcatatgcggaggacgagccgtgctctgcatctatctagccctcacggccctcctcaaaccgagactctccactcccgtgagcccttctgtgaggcctctgggcttccaggtactgctcttctgaccggcatggcttccttctctggcagcgtggaatgttcctcttcactattcagaatgtccaacatcactcttaggcctgggcgcagtggctcacacctgtaatccctagcacttagagaagcggtgacggccg

SEQ ID NO: 594060 - DNA, 347 bp, Homo sapiens
  misc_feature (203)..(203): n is a, c, g, or t
cacacagcccggttcgcaacatctttctggacgaagttgaagcgcccctggacacgtgagactggggctctgagcccacctggctccccctgcagccccgattcccaccctctgccgacgaccttccgagccgcggcttactcgccctgtccctcaagtacgtccccgccggctccgagggcgcaggactgcccccgagcggngagctgcacttctggttgaaggaggctcgggacctcctgccgctgctagcagtatccgtggacacttacgtacaatgcttcgagctgcctgatgacagccgacccagcctgcagcgtacaagagctgtgcgacgcagcctcagc

SEQ ID NO: 594061 - DNA, 616 bp, Homo sapiens
tgtatgcaagtgtctagtgctgtaatgggaatcgtcactagagaattgatgttggtcgacacatgccagggtggcaagggctagctgtgaagatatttaatcggcacaaagaaagtcaacaaagcaggaagtggcagttgttggtctgtgataaaaaactgattgacaagtatcagaaatttgaaaaggatcaaatcattgattctctaaaacgaggagtccaacagttaactcggcttcgacacccgtcgacttcttactgtccagcatcctttagaagaatccaggtaaatttttacaaaaacttacatagtagacttcctgaacaaatagttaaaaataatttgatatttgaaatctgtttcaagtattgtcagtgaaaaattcttatactctaagtgttgagttcttatgcattagttttctccctaaaatttatttgcattgtctacgtatatgtctctctttgaaatattaatactttctttactttggccatgattctgtacttcagtggctaccctgtgctcatgactacaatagtcaaaatagaacatacaagggtatagaatacagttcttgcctgaaagtagctgtccttgctaatttgctagaa

SEQ ID NO: 594062 - DNA, 804 bp, Homo sapiens
  misc_feature (310)..(310): n is a, c, g, or t
  misc_feature (565)..(565): n is a, c, g, or t
ataatatgggtgacagacttgcgtgcccttccttctaaaaggtgtctctttcaccctcccgatgttaatcttactcgcctcacttggtgtttgctccgcctcggctcgtggatatatacttatcgcacgatattttttatcttgctggctcaatcaaacagaggcgtatatctataaggaagtaccacccgggtgggcctcgctcccacttcatgtgtttgtatgacatgaattaatgcgacgctccctaactgcggcatagccacactatgtatagtgatggtactcccactgctgtttaaagttgcancccgcctgtcttatatatccggtcgcgctagcgttgttcaattgtattggtccactccccccttatggacttctctctctcacggttgattccgactatgagacttgttcgcgctctggctcaccacgctttgttctgtcggcagctctctccttcgggctactcccaccactcttgtcttcggtggtgtcaccactgcacggcgtctcactccccgtttgtgtcactcactctgtgctcttatgtgtggcggcngccacacatgttctctctcctcactgctctctctcatctgtcgtctcctctcctccgcactctgtatatgttcctcttctaccacttcccccacgcactctcatcatgttcgattttgaacaccccgccgccggaaactcttgctctatttgttctaataagtcgtgtttgtcttaattatattgaataggccaccctcattttgtatgtgacagtctctacaaacaattatcaaacac

SEQ ID NO: 594063 - DNA, 174 bp, Homo sapiens
tctagaggatcctgtgaaaatagccgagggggcggctgaagctgagttcaacccactggtgggtcgagcttgattcatggctatggctgaggtgtccaaggtattctggaggtggtgtggcctgctggtggatagggctggggcccagtggtttcccagtggctgcatactggc

SEQ ID NO: 594064 - DNA, 374 bp, Homo sapiens
  misc_feature (120)..(120): n is a, c, g, or t
  misc_feature (125)..(125): n is a, c, g, or t
  misc_feature (130)..(130): n is a, c, g, or t
  misc_feature (132)..(136): n is a, c, g, or t
  misc_feature (139)..(139): n is a, c, g, or t
  misc_feature (150)..(151): n is a, c, g, or t
  misc_feature (153)..(153): n is a, c, g, or t
cgtcgaccttctgctctcatggtatcatgattcttgcagagtgaggcaggggcagacattcttccataaatccagcttgtttccctgcatctgccctgggccagcactgggctagtcgtnggacntcctncnnnnnccncttcctctccnncncctcccaggaacggaagtgctctcagagagagctacgttaaacctgccaccaccccttattcatcaagacatttcagcttaattgttccttcgacaaatagttactgagtacccaccacatgctctatgttctggaaatacagttgtaagcagcacagaatgatctccactcttgggtagcttacattctgggggtgggatgagagaaagataataaccag

SEQ ID NO: 594065 - DNA, 168 bp, Homo sapiens
ccgcattctcccatcagcggatctatatattgacctctgtttggttataacaactgatcgcatcttgctcccatcaggcgtactcaggccggtgtggtcgtaagcgagaaactatctcttggtgcacatatacagtctgatgggacgaagatggctgatgggactgat

SEQ ID NO: 594066 - DNA, 699 bp, Homo sapiens
ggagagaactagtctcgagtttctttgtaggttttttaacaaatgaggcaatttattaacccagcatggttggtcctaatgcttcttgtgggcagcgtgccacctgtccggcgattctgtccaaatctcttggtccctgcaggtgtcagttggcggccgccatctgggtccttttccaccaatttatcagcgccctccaggggcttggaggacccggggggccacacttcttggagcctcggctgaagtggctgggcatgaagccgtattctctgacgtcccccaataaactctgggctcatggagccaaccccagggccaccccggaggttacaggttgccgcgcttgtgagaagcagcctcgcgttgttaaaccagttctcactcgatagggagcaagctcttgggtgctgtggccagctttgacgggtatccacccattcggggaacttccacagagcttccgcggaacttttggaggaaggtctgccagaagtctctgaacaaactccctggcgggtccacgtccttttaccagtaatctccgaggcatcgtgcggactaaactggagcattgcattctcttgatcaaccagatgatcaacggttcgttcttccacaaagaccccgttgtaaccttatgaggcccccggacccccgcacgccggaaccaccacaccacgacgagaacgtgggaga

SEQ ID NO: 594067 - DNA, 958 bp, Homo sapiens
gaggtttgtcgtgcgaccgttgctgcaggtggtccaggcttgggaccttgacgcgaggcggctgggtccgggcgctgaggcgggaaccccagtgaaagtggtgtttaccttccggataggtgttggaacacgaaagcgcgctcctgggaagtcagccccgcacaggtccacccatcctgaagggccctaagtgcccagggagcaacgaggagtaaacaacccgctcgaggaagtccgacattcccgcgctccccaagcagctgggaaagagttctggggctttccgctcacgatagaaggcttatcccgggggcacaggaggcttgagcagttgttaatgacgcatagttaaagtccagcgccattctcggggaaaaaccaggggaagatcctgcttggaagggtcgccaggctcatttcagacgctctcaagggctgtgagcttgttgccaagaggatgtcttcttaagccgtcttagtaataacctagagaggagttgcccagtcgataagctgaaaagggttgtcagcctcattaggggtgaccactttgacggatatcagcggatttgctccgacccttcgttaacgccctccaaggacatactgggggatttttggcccaaggcctgacccattgtttaactgatagacattatccaaagatttcagtttcaggctatttcacgtcgccctttatttattgggattttgtgacaaattctcccgtgaccctgggaccccgtgggggaccaatttcttgagatctcgccggctggggcacggctggcagcaaggtgttgtctcccccaaaggctgtgttggattccttggaccccccaaatgctcccgggcgggtttgggcgccatttccgggtgccgtatcaaagacatctggttgggaaccgggccattacgtgccccgggcctcggtttattggtggacactggggctttg

SEQ ID NO: 594068 - DNA, 400 bp, Homo sapiens
  misc_feature (5)..(5): n is a, c, g, or t
aactncttcctatttctacaccctagttatgctcccttcccctactcatcgtcactaatttatcactcacaacatccctagctcactaagcattctactactcactctcactgtcctcaagaactattaaacattctgagccatcaacttaatatgatctagcttacacaatagcctttttatagtaaagattcctctttcacggactccactgatgactccctaattcccatctcgaatccgctcatcgttgggtcatatagtatttgctcgtagttactcttaaaactaggcggctatggtataatacgcctcacactcattctcaaccccctgacaaaacacatagcctaccccttccttgtactatccctatgaggcataattataacaagctcca

SEQ ID NO: 594069 - DNA, 427 bp, Homo sapiens
cgagacgagatgagacatcaatgccacctctctggacagagagatgactgggtgatgacactacaggtcagcatgggaacacggcgtcccagatggacgacgggtcgtgtggctgtctcgtccagctcctcacgttaggctagcaggaacgcagacacattcatggtgcctttgctgagagagatgcctgaggctcttgaagtcacaaaggggaggagtgaagaaatcctgcatctcagtccctcacaagatagctgtctcaggctttgcaagctgtgagagaaactatcagagccctgggcgactgtcgctggacgcagcctgagagtagctccctccttttccacctgagctcttcctcctgcacatcacagtagcgaccacagctccgatgagcacaactgctaggacagccaggccagcaaga

SEQ ID NO: 594070 - DNA, 677 bp, Homo sapiens
gtcggtccccaaatacttccagtcactgatcttgacgaagcaaacaaaaacataaagtggggaaaggacacccttttcaaaaaatggtgctgggataattggctagccacatgtaggagaatgaaactggatccttatctctcatcttatacaaaaatcaactcaagatggattaagggcttaaacctaaaacctgaaactataaaaattctaaaagaaacattggaaaaacccttctagacaatggcttaggcaaggatttcatgaccaagaacccgaaagcaaatgtaataaaaacaaaggtaaatagctgggacctaattaaactaaagagcttttgcatggcaaaaggaacagtcagcagagtaaacagacaacccacagaatgggagaaaatcttcacaatctatacatctgacaaaggactaatatccagaatctacaacaaactcaaacaaatcagtaagaaaaaaacaaataatctaatcaaaaagtgagctaaggacatgaatagacaattctcaaaagaagatatacaaatagccaacaaacttatgaaaaaatgttcaacatcactaatgatcaggcaaatgcgaattggaaccataatgcgattacatcttaatcctgcaagaatggccataatacaagaatcaagaacagtagatgtggcgtgg

SEQ ID NO: 594071 - DNA, 173 bp, Homo sapiens
aggataagatccagacgtccttgtcagcttgtctctagtcttcaggactttgtgaataaatcaggtggagtaagtaatttacatgttcgtgtctcatttacttttggcaacaaacaaccgcacctttactgataataggagattaagagctaatttctactcttattattttt

SEQ ID NO: 594072 - DNA, 121 bp, Homo sapiens
attctgctaatatcatatacactaagatagttgtcccttgttatcagcacttaactcttacttgagatgtacaaagtagatcctactaatattgctcctttggaagtagaacaactgggcg

SEQ ID NO: 594073 - DNA, 630 bp, Homo sapiens
  misc_feature (29)..(29): n is a, c, g, or t
  misc_feature (95)..(95): n is a, c, g, or t
  misc_feature (109)..(110): n is a, c, g, or t
  misc_feature (113)..(113): n is a, c, g, or t
  misc_feature (116)..(117): n is a, c, g, or t
  misc_feature (126)..(126): n is a, c, g, or t
  misc_feature (135)..(135): n is a, c, g, or t
  misc_feature (154)..(154): n is a, c, g, or t
  misc_feature (183)..(183): n is a, c, g, or t
  misc_feature (192)..(192): n is a, c, g, or t
  misc_feature (199)..(199): n is a, c, g, or t
  misc_feature (211)..(211): n is a, c, g, or t
  misc_feature (215)..(215): n is a, c, g, or t
  misc_feature (220)..(220): n is a, c, g, or t
  misc_feature (224)..(224): n is a, c, g, or t
  misc_feature (233)..(233): n is a, c, g, or t
  misc_feature (235)..(235): n is a, c, g, or t
  misc_feature (242)..(242): n is a, c, g, or t
  misc_feature (251)..(251): n is a, c, g, or t
  misc_feature (260)..(261): n is a, c, g, or t
  misc_feature (263)..(264): n is a, c, g, or t
  misc_feature (269)..(270): n is a, c, g, or t
  misc_feature (290)..(290): n is a, c, g, or t
  misc_feature (298)..(299): n is a, c, g, or t
  misc_feature (314)..(314): n is a, c, g, or t
  misc_feature (317)..(317): n is a, c, g, or t
  misc_feature (323)..(324): n is a, c, g, or t
  misc_feature (334)..(334): n is a, c, g, or t
  misc_feature (359)..(359): n is a, c, g, or t
  misc_feature (381)..(381): n is a, c, g, or t
  misc_feature (383)..(383): n is a, c, g, or t
  misc_feature (395)..(395): n is a, c, g, or t
  misc_feature (417)..(417): n is a, c, g, or t
  misc_feature (428)..(428): n is a, c, g, or t
  misc_feature (437)..(438): n is a, c, g, or t
  misc_feature (440)..(440): n is a, c, g, or t
  misc_feature (445)..(446): n is a, c, g, or t
  misc_feature (468)..(468): n is a, c, g, or t
  misc_feature (471)..(471): n is a, c, g, or t
  misc_feature (482)..(482): n is a, c, g, or t
  misc_feature (485)..(485): n is a, c, g, or t
  misc_feature (491)..(492): n is a, c, g, or t
  misc_feature (495)..(495): n is a, c, g, or t
  misc_feature (522)..(523): n is a, c, g, or t
  misc_feature (575)..(575): n is a, c, g, or t
ttttcatggtgcggaacacaatatttatnttcatttgtttcttttatttcattttatttgtttgcggctgcggttttattatttttactgaaggnagagggacctttgnngcncgnntccctttcncggtaggcngccttaggcgttcgaaatngggggcatctaggcaagcggaagggaaanggggggggngcaaaancactcggggggngggngaggnggcnttgttaatngngccctanggggggggnttaacggcnngnncaagnncgttgcacttttaattaatngtgcttanngctttaattaaatgnggngggggnngtcggggggnggcgcgggcgggggggggggcgggngcggaaggggggcacggcagtngnggggcacacggnggatgttctcagtgtccacagngcaggggaaanggggggagnngnagggnngcccatctccacgggcagggcngancctcagaaacncancgcgannganggacttggcccgggtcacgcggggggnngcgtccgggctcgggagtagcatcctcaggagtagtgtagcgagcaaattcnggaaaggagtcctcaatcttgcgagttcccagcaaggactttctcagcgagcaga

SEQ ID NO: 594074 - DNA, 1600 bp, Homo sapiens
catatgaccatacaatgcactgaattgacaggttaatcactaagacactggcaaagagaagctgtctaaaagcttcaaaatgttccacttttttttccttcactggagactgctttgtttggctttcttccattgttgctttttgtagccactttactcttcagcaaactgctgtactttccactaactccagcaggttgctaacaacccaccctacgtgctcttctagctgcgcttacaggccaaccactctctgacacactggcaccaccctacacagacgctctacgcgaacttctatactagcgcacgctactgcgcagcacttagcgcgctccaagcatacctcctactgtctaccaccccgtgttaaactgctatctacgcgcacattacacacactgctttaaaaaaatatattctggtagacccctagtgcaaaatttatccttttcctattttatatttaacaacttcttccctacaactctctacacacacatctcaaataaatatatccttctgccccacaaaaaaaccacaaacaaaacacatacacaccaacactacatgcagaccgcagagacaccagactctcattcctgattaacgagaaggtctaaaatttcccacactactacagagaaggggaggaggacccaccaaaaaagaacgtatattaccgcgcagcggtatacacccccgcacaaggtccctactgataacccacttgtgtcactacacaccaaaacatgagcggtgggggcactccccccctataaaacatgcagccgctgggacaacgtcatccaggctattaatcttatacatcattaacaccgcccacaattacaggccgcgcacaaaaccatgttgcgcaacaacccgcccggtagccaacgagactgtagctgctacctcacaacaccagccgccggcatcctcagcgagcgtaaagacaacatacacgttgcgcgccgaccaacaccaaaaccacctcggttggggctcgcataaaacacccatgcttgtaggacggccagcagaacacctacttctcgacgccactacagcaccacgtgtggaaccatccagccactattatacaaccactttcatcagatgtaggctgctcggcacctatctgccgcatgacacacgcgacagtactacaagcactgttactgcggcgcgacaacccaacgaatactcgactcatcaaccagcccttataaaccctcgccagcgacaacaccttctttcaaaaccagcaagcgcccccatcacacttaacacgcggcgccatcaccaccagtcaagtgcatgatgacaaaaccaaactgtctgtcatctcagcacgaccgccgtgcacctaatcatacaccagtcgtcgggctgacctatgcacaacccccctacacaatacccggcgatgaacacacatacatcgatgcccatactgcgagcatgcagtattagtatgaacacaacagacggtcatttgcaggcgcccacgtctcgacgccgacgagcaagacgcctttgcagtgcacgcctgctctctcctgtggtgccagacgacagcacagtactatgaact

SEQ ID NO: 594075 - DNA, 272 bp, Homo sapiens
taaaagggggtgggatgggggtacccaatggagtatgttttatggttccccaaaaaatggaaaggaacccaggccctgagtatggagcagcctggagaccccccccccctgcaggggtgccctgagggcctggatttttggttttgatgccaatactagtccccccaagtagtttgctcccagtaacccaaaccccaagtaaactcccctttcccccgctatgggccctgatatgggtttataattttttgaaagttaccccctgaagccca

SEQ ID NO: 594076 - DNA, 741 bp, Homo sapiens
ggcgggttggcaagaacaagcgtccttacgatagaggcggtaaaaaggggagccgagatagtaaagtggtagatccattttctaagaaagattggtatgatgtgaaagcaccgtgctatgcttcaatataagaaactattgggaaaggacgctcgtcaccaggacccaaggagaccaaaattgcatctgatggtctcagagggtcgtgtgttccgaagtgagtcttgctgattcgcagaatgatgaagttgcatttaggaaatattcagagtctgattactgtaggatgttcaggggtacagaagagctgcgctgtagctaatcgttccatggcagtggcagtcttaccctgtgacaaacatgtgttccatgggtcaaaaaactggcagacaatgattgaagctcacgttgactgtctagactaccgatggttacttgcattcgatcgtgtgtctgtggttggttttactatacaaacgcagacaatcagagtacggaagacctcttatgctcagtaccaagcaggtccgccaaagtccggaagaagatgagtggaaatcatgagccgagaggtgcagacaaatgacttgaaagaagtggtcaataaattgattccagacagcacttggggcaagacatagaaagaggcttgccagtctatttatcctctccatgatgtcttcgtctagaagagttcaaatgctgaacgaaggccaagttggaacttgggaaagctcatgg

SEQ ID NO: 594077 - DNA, 504 bp, Homo sapiens
cccatgactgttctaactcttaagcggtgtgtcaagctgtcatgactgaataagcttcaatgcatgattctaaagtatgtacacttcgagaataaggtgcttcacacatggtggtcgctgaacagttgattcttccattcttgactagatgaacctgtgcggtggactgatacattttatcttactgaatatgaattgtttatgtatctgtactgtcaaatagcctttttgaaactcaggaaagacaaaggttcaattacaccacttttgtcaataagcaaaccaggtatttttttttttctcctgttgtctggatatggcaatagattttttaaattgctgtgagaacccatatatgaaaagagaggagttgaattgtgtgtgccttttatgtcttgagatttatatgtggaaaagacgacatctacttcaaactgtattttctttttcgtttttttttttttttgggaaaggggggaaaacggggtctggctctgtacccca

SEQ ID NO: 594078 - DNA, 209 bp, Homo sapiens
ggcatctctcatcatcagcatccccaccatgatgtggtatgtatgttacagttgatgacgccgtcattgacacattctatcacctaaagtccatagtggacactagggttctctcttggtgttgtacttgctgtgggtttggacaaatgtattatgacatgtattcactattatggtgtcatacagaataatttctgtgcccatttcaa

SEQ ID NO: 594079 - DNA, 170 bp, Homo sapiens
gctatattatctagcccagagaactacgataatgttcagtgagatttactggactcgagtggatttctgaatcgtctgagatttgagtgcttattagaacggggccctttggcacatcccgtgccgcccgtcaccctcctcaagtatacttcaaaggacacgaatgttca

SEQ ID NO: 594080 - DNA, 222 bp, Homo sapiens
ccctgttcaccatggaaactggcttcatagcagccattttttaaggcagcttattataacatattcttcctgtgataattcaggagctacaagtctgccccattcctgagagttagctacaaagaattaaccatatgaccccctcacatattttctttatggagaggactataaatgttacttagtaagaacttccagctctatttaactcggacaactcgt

SEQ ID NO: 594081 - DNA, 116 bp, Homo sapiens
cattgagagtgcccgcactccacgcacacttcacacttgcccactcagccatgcactcacactaggtgcacacaccgctacttgctccacacgacgtaacatcatatcgtgcactc

SEQ ID NO: 594082 - DNA, 571 bp, Homo sapiens
  misc_feature (571)..(571): n is a, c, g, or t
ccttttaaatacttacgcagtaatctaatcagaaaagatacagaagacaccgggcatagtggtgcacgcctgttagtgccagtcacttgcggggctgaggcagaaggttggcttgagccctggaggtgtaggttgcagtgagccgagctcgcgccactgcactccagcctgagtgacagactcttgtctccaaaaaaaaaaaaaaggaaaggaaaagaaggaaaagacttagaagagtttctgggggcttcaatagctaagttgggagggatagaaaagtaagtaatagggccgatattttggagcccatcacaattctcactttctggctgagttaccacaaagatagtttctcaataaaggtctattacgcagtaaaggtatctcttaggggggtgaactcctttaaaaagtcgcttacattaggtctccttcatatacattgggtaaactattacggcgaattacactggggcagggtgtttttaccccccaaagggttatttttccattggaagaaacctatagaacaaattattacctaggttccagggagaaagtggcgctttan

SEQ ID NO: 594083 - DNA, 454 bp, Homo sapiens
atggcccagttcacccagtttgatgaagaactctataaggtgattggcaagggcagcgaaaagagcgatgacagcacctattgaccaggagccatctaagaagcagaagaagcaacatgaaggcagcaaaaagaaagcaaaagaggtcaccctggagaaccagctgcagaacatggaggtcactgaggcctgaacactgcctcctcccagtttgccagacttacttgctgcctgctgggatcccaggtctgccctggaacagagaggccgagtaccactcctcaccctgtcccatctgactgcacagcatctgggtccatctgccgggtactgcgcgggtgttcccatcatctcgaatgggcccagggtctcctcactgatgactggtgaagccacgcaataaagcatctctggggagggcacaagacttccccagtctcctccccaggcttga

SEQ ID NO: 594084 - DNA, 1794 bp, Homo sapiens
gctcagaggttcttgagaaccagagcagccaggccgagctgaaagaggcggtggatgagccatcatcctagacggtatgttatggtagataaatgatgaggagagacggaggaggaggaggatggtcaacaatcaaccaccctctcagccatgtctccccagtcggaaatatccgaggtcacatcagtgctcgaggcgggcacgagtgagggccgtctctcagcgtggtctggttggtacatgatgcagatacgggcccctgacgtagcgggacgcctcagaggttgggcataggacataagacgaagaaccaaggaccggcaggacgcgacggacgcgacggtacggtctcgcaggcctgtgagtacgtgacgggcatcgatcctcgcagaagtggaaacgtatatgcgcaccacaacatgatacagttagacttgaagacactccacaacaccagaagcactctgagcatagccataggattgacttccgggactcagtgccgactctgtctgagtctggacgagctctagagttcagtgagactagagacgctatgtgtgaagcgctcgttgcgccgcgcgattgacgttatgggcctctaccggaacccccacgataaaggggacaacgcgcgaacgatacgcgatagagatagcatcaatcctcaagccttaggacatccgataggaccgcgatgcgaccgagatccaatttgggcacaaggttgtgcgttcaccccgggcgcaacgtgtacaattctcattgtctgggagagcggttgggcggtgaatacgaaccagcaggggaaggcaaggctttgggtaaagggcattgggtaacgtggatgcggcctgacagtgctttctcctcaaaaaagagaaatgtcttggccctatttgaggacttctacatctaaaccatggcttagggaaaggccacaaacggaatggaggggccttcacaagtgcctatttgagtctctatacaatggcactgtctttgtacctattcgcgggtaatgaaagccacaaccggaagtgttctagtggcgaccgccgggggctattgagggggttcattgcgcaattgcgaccgcgcacggaattgccagcgtgcacacaacggtatggcccaatatgaaaaactgggtcacttggacacatctgccgcaggtggcgcacattagagagtgttcacctgaagtttctaacagaggccgctcacatgtgaggggctgcgcccgttttcccccacttaagatgtaggagtcaggcgccccttggagggttagacaaacttacaacgcatagggaacggccttgattgggggttccgccttaaaacaccggcttctctccacatgatcttgggaccgctactggcacatttgggacgccaaagggaacagtgctgcgcacacttttgcgtgggggggccacacctggacgtataaaagtggtggcaacaagcgacttcaaggcaagcaaggcatctgtcattggggaaagagaaacccaccctagttgaggggagaggcacggtataatggacgtcccacacaggtggcgatgtgtgaaaacccacccccgcgagtagtagacatatgttactagcggacgcaacaacacatcgggggagggaggtagatacacccagcgaagacatatcccgccgatagaaagcagataagactcgcttgtatacaccagccaaggaaataaacacgcgtgcgagaaagacaagagatagttgttaatagcacgagaggttctctacaacgacagatagcac

SEQ ID NO: 594085 - DNA, 251 bp, Homo sapiens
cgcccgtcaaaaccaaactgcgctgataataaagtaggtatagcaagtcagctcacccctgatctgtactaactactctagacccctctttctgcatttatttgaacttccctcccatgttgctcagccccccccctagaaactcccccagtctcttactatacataggtctcacagctaggcttgacccctgctatgtgtattgcaaagtaattgccctcccctaatctaacccattctaacatataatg

SEQ ID NO: 594086 - DNA, 147 bp, Homo sapiens
gagaagaacgcggaacccaagtagctttgtggcttcgtgtccaaccctacgtgccctatcgcctgtgtgcctggagccagacccaccacgctacgcgtctacctcctgatagtagctcacagagtcccacgcaccgatatgcattcc

SEQ ID NO: 594087 - DNA, 158 bp, Homo sapiens
cgtccttcctgtgtctgtgcggacgtcgactgacatgtggtcccacgccagtgcttctccctcacctatgacctaaactgtgacaagctgtgtactgacttccaggaagacattgagttccatttctctctcgggtggaccatgctggtggaagggag

SEQ ID NO: 594088 - DNA, 201 bp, Homo sapiens
gggcggacaggtgtaggtgggttgtgtcaccggcggagaggtcggcagcgaccggatctgcacccaccacagaaggcttttctcccagtacctggtggtctgagcgtcgtaggggctgcaagtgcaggcgctagctgtcgcgtgggatgcgtgcgtggcgccgtagcgtcgaggccagaagccctacagaagacttcgcga

SEQ ID NO: 594089 - DNA, 174 bp, Homo sapiens
taagagagacagtaataatgtcaaggatagccggtgtgggcagaaataggtagtctgtgctttggaatgtcagctgtagagccaactctgattatctagcgattgatcatacaaatggatagaaacattagtcagtaatttcaggttcgtgccaaatcgttcacaacatctaaa

SEQ ID NO: 594090 - DNA, 498 bp, Homo sapiens
  misc_feature (482)..(482): n is a, c, g, or t
agaatctgtaatgagaacacaacagaaccggttgcccgaaagtgacaggggtagaagggaagactggaaccagtgaaaggagtgccttcaagctccatgccgcccctcccgggctggggcctgctgcctgctggctgtgctcagctgcttcatgctgatgcactggggagtctcctgccgttgcccacgccctgtcggtgcctcactgagcccttcctgagtgtcctgtcctatgcaggtagcactggtgggtgtgtgcagtgtggggtggaggctgaggcggggagggatcgcttgagcccagggaagtcgagggacacccgcagttgagctatgattgcaccactgcactccagcctgggcaagagtcaaacccctgtctcaaaaaaagacacagtctgtctgatgggaggctgcacagttcggggggcccttgggtttgtggtgccagtgcagaccctgttccctggaaaccgtgttcncgatgacctccaggtg

SEQ ID NO: 594091 - DNA, 1006 bp, Homo sapiens
gtactccatcttgtgcctcttgccatgcgtgcctgtggtggccctgtatggatagatacttttactgcatgtgaagactcatgcgcggaaataggcagtgttaggcttacatctaggcgcaacggaggtccactatgctccatgctcgtatcaagggccatgtgaggaccgtccatcaagggaaaagttgttgttgttaagtgctttgacatcagcatttccgtggttgaaagtggatataccaacggggcggggaggacagattcaaggctccgtagatactttattgatcctatcaatcgctatatccagcatctgggacccgcgtcagaaatttgtaatccaagcgctgtaactagtgagcccttagttgttcactccaatgtgctgggtgtcccgtgtcaggtgctccttggcccttctgcaacgatggggcgacccgtagtctgcatggagccgggtgttactcgcgtggacggcaattcggtagtactctgatatggccgtcccatttggtttcccttaagaaggtcccgggggtcgcgagggcgctggggttgcctcttctggaaagggaggtgcagctggctccgtcgtgaggcatcggccatggccttggcgtaagggtacaccgtctctctccttggtgctcttccttttaggatgtacaatgttcaacgtgaagtcactcacctagtgtattcaagggtctaaaactgttaggtgggctcgtaccatatacgaggtccgccccagtagctgctggaggcgttggatcaggcaatctggcaccttgataccggtttacattgatactggaggggtaggcggttgggcactctcgctgcgtgagaagtcttggggaggctgtaagagacggtgcgagagcccgctgggtcgtggaccattcttcgcttgtcactggttgtagttggggccgtttgggggggaccatatcacatggttccctttttgccgtgggcgggaattgtttggggggcacagt

SEQ ID NO: 594092 - DNA, 891 bp, Homo sapiens
tctttatctttttctcgtggtccctcccgtttacgttcactatccccagaattgtcttccacttgatggaaaggcttgtgctggctggccctgaagcctgtggtttagaagcagcagcagcagcagcttgctgctgtgtccctgtcccttgatagtttttgatgaacccccgttccgtgctcctctcttctcctcgtggagagttttcttgtgctagctctccaaactcaactggaatctcctctccggggaattttggtccccaattttgtactctctgtggccctcgtgctgtgtctcgtgtgtgtgtgataagacaatataatgtgccatatacagagattaatctccgtgattcatatctctgtgatctcgtgtgagtgtgctcctcttgtgtgttttaccacggtttctacaggggatctctagaaggagtgctctgacacgatttgaacaatctctcgtgatgtctcacgcagcaaaatttctccatctccaccattcataacgtttgttgtgatagagctctctcaccaaaaacaaactttctcctcttttcagataaaaggaaaccctctgtgtgttcctgttttcacccacaccacaatctaccacgctgtagacccccttgtctcttttttggggtcatggggtgtctaaacaactgactttcattcctccgtaagacgacaacccaccaaaagttcctccctctccctggaaccccccgcttcgacattcttacgttcccacatttaactccccggggctattgcttcccggtctgacggtggggcatgtcgttttatcttgcgaaacctgtggctccaggcttacaaacgccttacatctaaacccaggcttctcctatttgttcttgccttgttctac

SEQ ID NO: 594093 - DNA, 128 bp, Homo sapiens
atcacagcacttgtaaatttgtgaaaatgaattttctctttccttaaaaaagaaatttttaatccagtcacacttttcttcccgtacccctttagttttttgataaatgataaaaatgagccagttta

SEQ ID NO: 594094 - DNA, 698 bp, Homo sapiens
tatttggttaataaaatcaatacaaatctttaattaaagatctactcataccagggctgaaatcatctattatggtggctagtaagcctctcttctatagtggggtaatgtggtctgtgccactgtgttggccatctctcccaagtgaaaagaacactttttaaaaaaaattaatggctccaagttttcaggcccaggggaggctctcccattctcctccttcaacagtcccgtccaggaagggtgatctgtgtggataaattcatcatacttcacttgtgccatggggtatcgatatctgctatccctagaagagatcatccatttccttgtggggtgagcttctacccccagactcgtgagttttggaccgcaggtacggacgccatgactgtaacctttcttctaccttgtccaccatcaacatgggctaagaacgaatttctttcttaggggtactacctaggtttaatttggcatgtgcataagggtcacgaaacagtggagaagtccaggtctccattaccgtctatcccgtgggtctgcaggtgccgttgaccctcccctggcgtcgggttggcccccaggcacctcatggcccccatgcaggtcgggggcttttaatcttccccctttgctgtcttgccactaccgggggagaagccttccttgtactcataaattggcgctgggggaac

SEQ ID NO: 594095 - DNA, 103 bp, Homo sapiens
cttcgtggtcgcgtgtattcaccactgcggtgcttgctccctgtacaagttccgtcgagaggtgagcactgtgctgacctccaaatatcgttcagctggagct

SEQ ID NO: 594096 - DNA, 498 bp, Homo sapiens
  misc_feature (171)..(171): n is a, c, g, or t
  misc_feature (245)..(245): n is a, c, g, or t
  misc_feature (325)..(325): n is a, c, g, or t
  misc_feature (434)..(434): n is a, c, g, or t
  misc_feature (441)..(441): n is a, c, g, or t
atgcgtatgttcactgcagcactattcacaatagcaaatatgtggaatccatccaaatgtccatcatagactggacaaataaaatactgtacacatatatatacacaccatgaaatactatgcagccataaaaaagaacaagatcttgtcatttgcatggatatgcatggngctggaggccgttatccttagcaaactaaggcaggaacggaaaaccaaacagtgcatattctcacttataagtnggagctgaatggtgagaacacatggacacatagggggaacaacacgccactggggcctgttgaggaggggagggagagantcaggaagaatagctaatgggtgctgggcttaacatctaggtgatggggatgatctgtacagcaaaccaccacaccacacattttacctatgttaacaaaccttgcacntcctgcntatgttacccctttaaaagttgaggttaaaaatttgtttttttagtgggtttctacc

SEQ ID NO: 594097 - DNA, 291 bp, Homo sapiens
accgacaactgcaccactgtgtaaatatcccatctccaatcaaaatcacatattaattttagcatacaaagacaattcttgctgggcacagtggctcacgcctgtaatcccagcactttgggaggtcaaggcaggcagatcacctgaggtcaagagttcaagaccagcctgaccaacatggtgaaaccccctctctacaaaaatacaaaagttagccaggcatgatggtgggtgcctgtagtcccagctacttgagaggctgagccggaagaatcacttgaacccgggagg

SEQ ID NO: 594098 - DNA, 346 bp, Homo sapiens
ggggcgactcgggaggatcccggagggtgaccttcgggtaatcgagtacagaagaggctccgctagagggatatgaagcaccgccaggtcctttgagttctaagctgtggctcgtacgggtctgggcgagcagctccggttgatttacctggtagaggtttagggctaagcatagtggggtatctaatcccagttggggtcttagctatggtgtgtccagatatgttaaagccacttgcgtagtctatttggtgtcaacgggagtttcatacaactcaggtgagttttagcatttagtgggggagggggtgatctaaaacactctttacgccggcttctatggccg

SEQ ID NO: 594099 - DNA, 691 bp, Homo sapiens
gagagagaactatcgtgtcctgaacaggctccatcaggtgcagaggataactcgcgaggctgcagcaggaacggaggttcctcatgagagtgctggactcctacggggatgactacctgggccagacagttcaccattgtgctggaaggatgagggcagcagggacacggatgccatacacatacagagcaatgcagagaagaatgagcctccagaagaaagagacagtgtacccggcccagaaaggacatcctgaagaaccacagaaaccggaagaaccagaaccccgaggtgaaggggcccagaagggcggacaaggaaggacgagatgcacacgaggatgaaacggcaacagaacaaggacatgagctgagatccagacgacgggccacggaagacagagtcacaggaagaaggaaagaaaaaacgagaatttatggaaaggaaggaggtgaagagaaacctgagaatataacagaagagtatgagagagacaacaagagagtcacagcgaacaaacacatggctgaaccgctgaacgcagagaacagtgaaacaaggcgaccagggcacagtgaaccaagaaggcatggccacagagaagcactggaacaccagccacgtcaaaaaaagagaaaacaaggaaaaaagcagaggaacaccgagacaaaggagggcgagaagaacgaac

SEQ ID NO: 594100 - DNA, 762 bp, Homo sapiens
cccgagtgcggcactgcgcaaggacccccaacgtggccagcaaccaagttctctctggaacaagaaggggggacactcgtttgccaccaaaaaggaagcctgaccacccttctgcatccgtctgctcctcgggggccccccggtagtgtttttacacaaacacccacacgccccgtcttttcaacggcgaccccaccccgggaggttcctcccgcaagaccacccctcgtgtgtcagaggataaagtatgtcggggaatggcggcccccttgaaaaaaacgcttcagtggtgtccccccacgtcttcgagagtaataaaagagtttttcaggccatcttcttaataattcaccagcatccctcactctagcgctcgttctggtgacaccgttcttttaacaatcccaccacatattaccacgcgaagcttgtttctgccctcccccaagattgtgctcccccctaccgatcaacatagggcacaagagattattttctctctgacaataccccacttatttgttcttgaaattttcctgcccaccacatcgtttcttgaaaacaatcaagaacccacaactctaacttatcgctttctgttacaccccgtagaggtatattttctttttctatcaacattctgggatctctattcaaaaaccccaacaggagttctgactcttaatacccgcctttgaagcattcttatttcgaagactcacaaagaaaatagcccgtttaacctcccccccacaatataca

SEQ ID NO: 594101 - DNA, 724 bp, Homo sapiens
ctatgtacgaggctggtgtgactcggccgagggctgaaagctgagctatcccaggacctgggaggtgaccctgtggctgccgagtttctctctggatgcacaccatgtctatgaaccctaaggaagggtccccactttgctggtgagcctcggagtgctggtgtggcaccatccccaataccctcgtgtggcaggctcagatcctggcacactgacatttgccagccactcctgtggcacttgctgtgtgcctgacccaggactaggagctgcacctgggccccagtgatgtcccctagttttgcaaatgtggaaacttgagtctcagagacttagtggacatttggcctctgtgaatctcatgtggctgcttctcctgagtgcctgaaccatgtgcctgtgcacttgtcttgcttggtgtgctgtgtgcccatgccctgggatggacccagcatgtggtgtgctcagacctcccatcccatggctaacccaccgctgggtgatgaaacctgtgtgacacttgcactgaaaaatgtcactctctacaagtatgcaaggtgagtctggaccatctcccatcagacctggacaccctgcctggacaccacatgcccctaacactaccggccaggtcgctccatgctgtcacattgtggcacccagccatgtcacacttaatgcagtgtttccctggcttaccatattatcactcccaaggatgacc

SEQ ID NO: 594102 - DNA, 304 bp, Homo sapiens
  misc_feature (7)..(7): n is a, c, g, or t
  misc_feature (124)..(124): n is a, c, g, or t
  misc_feature (129)..(129): n is a, c, g, or t
  misc_feature (169)..(169): n is a, c, g, or t
cccgggnagggtttcaccatattggccaggctgatctcgaactcctgacctcatgatccgcccgcttcgggctcccaaagtgctgggattacagacatgagccaccacacccggccctattctnttttnagttggagaatttattcatatgtatatgcccatgcatgtntatacattatgttagcggtccccagccttttaggcatcaaggtctggtttcatggaagacaatttttccacagacccagacaggagggataatttcaggatggaactgttccaccttcagatcatcaggctttag

SEQ ID NO: 594103 - DNA, 562 bp, Homo sapiens
cctgtttggtcttgaactccatgggctcaagcactcctcccgccatgggcctcccaatgtgctgggattacaagcataagccaccaaacccagcccaaaataatcacttttatatgtactatagttattgggcttatactttttacttccactggaagaaaatggagagaacataaagcaatattttctactagaaacagccttttctcccaaattcttgaaatggagaaaacaaattactgtctcaattctataaatgactgaaaaaatacactccccataatatttttcaaactcatctccagctcaagaatcttagataagcacatagaaatcgatatggtaagagaccttagagtgaaggcaagggaagggggtatttcctggccatctcttccaatggggtaaccataaaagacaatacagaaaggttcctaaagcttctttatcggaagtctctcctattctaaagtcctgctgtggcttacaattactgagcttcgtatatcggttactctaggaactgcctcttagggactgagctacagttagttgccaatgc

SEQ ID NO: 594104 - DNA, 339 bp, Homo sapiens
cagtactgaggtcacatgtgcaggacatgcaggtccgtgacataggtccccatgtgctgtggtgattgactgcacctatcaacccatcacctaggtattaagcctcgcattcggtagctatttatcctgatgctctccctccccctgacccatccaccgcctccagtccccagcgtgtgttgttcccctccctgtgtcttctttctattcacattagttcaactcccacttgtaagtgagaacatgcagtctttggtttactgttcctgcattagtttgtagagaatactggcttccagctccatccatgtccctgcaaaggacctgatgtagctcctt

SEQ ID NO: 594105 - DNA, 286 bp, Homo sapiens
ccccaaagccgttaatactaaactcatggcgtcgccacctttcaggtatttatctgttatcttctagcttcttggtgaagtgactgctgcatcttctgcccatttcatacagttgcttgtttcttactactgagttgaagaatctttatattttctcccagcctatgctttcgcgtttccttactatttctcaaggcgcagaagtccttaacttttgatgacggcctaacgtattaacattttcgttcagggattcacatggcttcgtggtatcctaatgaaatct

SEQ ID NO: 594106 - DNA, 2283 bp, Homo sapiens
tttgtgatgggaggcttctgtgtctccatgtaccccagacaacaaaacacaacttggaagatcttccgggagtgttggaagcaaggtcagccagtgctggtttcgggggtacataacaacagctcaagtctgacctctggaagccagcacagccctttagcccaggcaactttggcagaccagcgatgctacgcaccttggctgacactgcaggcaacctgctgctactaactcttccgcactgctgcacacagcttccgggaaatttcctgggaactggctcttccgacgaattcatactggcaacactgatcctaccggctccagcacagcactgcggccaaggccccaacctgcgcctgacgtccaaaccacctcaaaggggcaccctgggccccttcccctgagcggcgcacacgcaactctcaccccgcaacgcaaccactgcaactgccccacaaccacaacgcgcctccccgcggcacacgcacctccccttcggaaccctggcgcacgcacaacccccattatccccttcccgtggcccccacagcgaccaccttaactcaccccaaaacacccggaactccaatcgcgaccaacgcggccgtccacaacttccttggcgacccccatcccctcacgcggctccttcaaacgcccttaacgcgcctttaagcccttaaacggagttcacaacgctggcaccccgctcggcatacttcgccttgcgggtgcacaccaccgccctaaaactggccaacgtggccttcacccccacacgcagtggcccccattaaacttgcgagccgcaccttcgtcgcgaacgactctactcacccccacccgcgtccccaacggccacacccacccgccacacctccacccgcgtcaaccaccggcaacaacgagcgctctcctcggtgccggcactacaatagccccgacatatcgcctgagcacgacaatcggatctcccgcgattgatcgtacggacgacaccgatgtatcactcatacggcgtcacgatcgatctgcgcccatctgcgcctttccccacctactggcacacctctctcgcgcccccgtctggccagctcgctcaccaccgaccgcttaggggccatactagcacaaaccattccggccggcgccatcggaggctatacatccttctgggcactttgctcccgcgccgcccgagcgcaaattttatcatatccgcaccccaccgcaatatagctctgctccacgcgacgtcgtcgtccgtcaccacgctcatagccagcctctcgcgccgccgtccttctccacaaacgccacttcagccaaccccctcccgtgcacgaacactactcgcacaaccgcgacgggcattcaacaccgccgtctccgccaacaccaacgcacaaacgcgccgagccgaccacctcccccgccgcacacccccgcggcaccacacggcacggcacacagccgacacactatcgagcccgcccacggacaaccacccgacccaccgcgaacgcgacatcgggaaccaccgcgcgcacccacacagcgaccacccagccaaggcaacaccgccggccgcagcttttcccccaccgtcccggccaaaccccggcggagcgcacatcgcacgccgcaagccgacgacccgcacacacacacgcgccgcccccatcgagccgcgcacgctggcccacctacccagacgaccacaacctaggccgcgagagaccccaacactcgacacgatctccccgctcaacgaacgcttggcacgccacacggagacccccccaacccaagcagccgcacactagcggcgccacgccgcaccacgcaccacaacacccccgcacaactccctcccacggcgaccacgacgcacgccagccccaccctgcggccgcacgctcacccgcggacaacacagccacacgcgacagccacctacgccggcgcaacacaagcgaaacacaaccgagaacaacaagaccaaatacgtcggcagcccccctagcccacacccgacaggcatcacccaagacgaccacccacgccccacccccacgagttccagaccacgccccaacggctagcaacaccccagccgcccatccagaccgctacccgcacgaagcgcgagcaaccgcacgacagaccgaccgagcacaaacaggcacgcgcgcaaccgagcccccgagggccgtccctacccccacagagcgcaacctccgcagccgccaccccgcgcgctcagcaccacggatcgct

SEQ ID NO: 594107 - DNA, 1728 bp, Homo sapiens
  misc_feature (1126)..(1126): n is a, c, g, or t
  misc_feature (1135)..(1136): n is a, c, g, or t
cttctctgctcggtatgctgttgattccttgtgctgagtgtgactatcgttgtggcgtctctggtggaggtattccaccccgagggtttgttctccttccgctcgttgtgtggttgttcgttcgctcgcagttgtgtttgctctgccagctaatgacagtgttgttctgccacactgtttttcttcggtgggacgcagatgtttctcccctggtggttgtggggaataattattgctgcttccccccccatgtttgtttctctcggcgtgtgttgagttggctccctttactgttcctcatcaccagaggggccgctgggtcgccttgttttgtagtagtgtagtgtctgccccaggttgtctcctgtggaccgccagagtttccatacgccctccctttgtgggtccaccgcgggcgccctctaaggttggtggtgcgctcagccccacaccgcgtggtccccgaaggaagatttttctctgtgtgcggagtatatatccggcgagtgtgcgcccccaccgtggtgggagtttttcatgttgtgcgcgcccgctccaccgtgtgtccaccaccagccaagcttggtgggagtagaaacgtccgtctggtttgtaccccaaaacccccgggtttgtctctgttgttgtctgaaagaatagttttgctgctccgcgccaccacgctctttgtgggcctgttcttttgataaaaccctcggcctgttgttcttctcttcggccttttcttctggaaggatacgccgcacacacgtcgtgtaacacctcggcccctcgttgcgacagcgtcgtggggagaagagtatgagaacgcctcgccccacgggccgtctggaaaaataattttttgggcgcgttttgggggagttacaccacacaggttctccacagtgtggaatactatgttctgtcgccaacagcgagaagggtgcgcacacagccgtttgtgtcctcccactagatcccaacgcgttctcatacaccacatcgcgccgcccccacagtccccactattctgtgtaaaagggagacattctcgcccgagctttttagggagcatttgaatattgagacgccacatttttaaagcacctttttgaggcggctnttttggggnngtgtatattctttatcaccacaccacacaccacagctctccaacatttgtgagaaaagagaacacccacgtgccccccttgtgagaatgtaccaccacagagatctcacagagaatggtgtctcaacacacactcgggtgtatatctctttgttgttacaccacattgagcgccactgagaagggtacacccacgagaacctgtgttgtggtgttctccacaaattggtgtctctgtcttatacacccaacactatattgtttctcacctgttgcacccaagccgagagcgcccaagggtttcccactcggagcccacaaggctcgaaggcttgtgccacttctaagcacttccacaacccacaaattgtttttcctcaaataaagcacttcctctttatttttttctaatttctaatcctcgggttctgcctcccacccctcgaagaataaaggaagaagttcttctggtaactaactgtctgtaaccgctgcccctctatcccgggcccttatatggaattttggaccccttcttttttctgggattcccctgccccccccccttcctaatagagatgaccttttaaagg

SEQ ID NO: 594108 - DNA, 170 bp, Homo sapiens
tggatgtaccgtacctacgagaagttatatatatcaggtgcaggaaccgaaagctctattcagcactgtgtctgactggcgactatgattgctaatgccctaattgtcatagatttaccactccaaaagcaataaaccagaaatgtgggaagtaggatacttctgcctag

SEQ ID NO: 594109 - DNA, 338 bp, Homo sapiens
tcccccagttctgcttcttgaaacgtgagtgtataatcagtacgagcgtccctgcagtgattaaacaccaagggcaaggctgcctccaccagttccatgaccgtgtgccggagttcagggtccacgggatcaaacctgtctcctcttatctctaccatgacaatgaccggacatttgaactgatgagaagggagagatagaagtgtgccggctagagattgaaaggaccagaagaggttgagggatcgtgagggaggtcggacgcgagagttcaaagtggtcgcttagcgcattcgagattgatggagatgttgctaagaagcaggaacaggagggta

SEQ ID NO: 594110 - DNA, 296 bp, Homo sapiens
gaaggaacttcttttcccttcagctggaaactgcctgggaaggttattagttattaggtgatggtagcggactagccgacggaggacaggcaggggagggggagagactttacagaaaaggaattctcggtcgagctctcctagagatgactgcttacacttactaaacccagcggtacacacagagaggaagctcggcgccatttgactggaaggcagactgtgaggtgcttccttccctcctctaaaccagatctgagcagccggagaaagccgccgcattttcgggtctaggg

SEQ ID NO: 594111 - DNA, 168 bp, Homo sapiens
tccgtaacgacgctccgtaacgtcgtaacagccctccgtaacacgctcgtaacgacgccagtgtggtggtggtggggagtgagagggacaggcagggcgtgattgattaaagctaacgagcagacagaaggcactggtgtgtcacatctcgtgcctggggagagggga

SEQ ID NO: 594112 - DNA, 162 bp, Homo sapiens
  misc_feature (5)..(5): n is a, c, g, or t
gaacncagctcttacccgtcctacatagtgttgtaacaggttgtttcttccagagaagagaacatttcaggagcagttgccctgcacagagaggtggatagattaatgtgtaaatatgccaaactttaaattcttagccaacatcgattcttttcagataga

SEQ ID NO: 594113 - DNA, 115 bp, Homo sapiens
gcagagatcatgccattgcactcccagcctgggatgacatatctacgactgtcttttgcttcctttgacttgattcggtccatatcccccaattctcatttattacttagcgtgc

SEQ ID NO: 594114 - DNA, 418 bp, Homo sapiens
  misc_feature (61)..(61): n is a, c, g, or t
taagagaaagaaagaaggaaggaaagaagggaatacaggctctggagtcagatgccagggncttaaatcccatttctactccttactggctgtttcatcttgaacaagttactgaaccccttgatgtgtcaatttctcatccataagacagaggtcagactgggcatggtggcccatgcctgtaatcccagcacttcgggagactgagacaggcgtatcacctgaggtcaggagtgcaagaccagcctggccaacatggcaaaaccccgtctctactaaaactacaaaaattagctgggcatggtggtgggggcctgtaattccggctagttgggaggctgaggcaggagaatcgcttgaactcgggaggcggaggttgcgtgagtcgagatcgaggtcgcaccattgcactttagcc

SEQ ID NO: 594115 - DNA, 139 bp, Homo sapiens
cttacaggggcagccagtccaaatgccaaaagacgaccagttcttgccctgattgtatgcaattcgacatttaggcacttttttttgattcgggcccaaccagcttttcctatgttcaaagaccttgctggcgtcaaaa

SEQ ID NO: 594116 - DNA, 1327 bp, Homo sapiens
agcggatatacaggctgcgcgtgccggggggaggtcagagaatacgctcttctcctttaccaaaatggcggatggtgcctgttttcgcttcaccagtctcctcacttctcttctgatgcactcggtctgtgtccttgatgcatggtcacttagaggatctgggcatcgagggcacagacagcctgggccaggacgtgcaccagtcaaggaaggtgctcgaccggaccgtgaccgtgtctggcgtgactggaccaggtagccgcgtgaccggttcttgcccagtattgcgggtgatactgtatgtgatgagtcaaacccattgacgttaccgctgtgcctacgtcatttgactaccacatgatgacgtgttgtgcgtgaacgggcagaaggtgtggcgcatggtgtttccggacagactaatacgtcaagacgttatgccagctcctaccagtgtgcggtaacaacggaagatgcgatgctcattcacaactcactcccaaagggcactgccgctctaacgcttcgcaattattcacgctgagtgatacacgctctgcctttgcgctttgcgaagagtgtgccccattggagagcgcacggggagtgggcaagccccgctgtgggtggaaatccacaggattcaacagaccaacgcaaggctcaaaaaggacggatcttcggtccactcgattggttcaagtcggattggttccacgagtgtagctagacacgcctcatttgtggagcgaggaacgaagcgcaaagaacaatagcaaagagaggcacatacctagatagccgcactgtttgtacaggagaacaaacgcgcttgagatctagaagcaaaagccaatcgctatggacattatgccagcacatcaaatggcccagcaattgacactgtaggggttggccttcaatcttatgcgggatcgacacatgctaccgtgagtgaagcttcgcaaagccgggagctcctggaggagacggcgttctatcagcaatctcacaatgtgtggtcgtttcgaactcgcggaaactggggccacatgtgtgtgacactggctggttgtgtcctatccttgaaaaagaacgtcattcggatgtataccgtgaggccaagcctaagtttgcggacccataacggaaaccctcggtcgaggcaaagctaaccaagagcgcgcttaccaaagatcacaccagttgtgttaccgacacgctggtgattgccaccattatacggaacacacgcccccaggagtggcggtctggaatgctataggttgggggcacacaagcaatttgtgacgccccgaaccgacacacc

SEQ ID NO: 594117 - DNA, 376 bp, Homo sapiens
cacctgtatgtcaccttcagctagtgatacactctagagcagtatatcaaagaatgagccagctgggcccggtggctcacacctgtaatcccagctactagggaagcaggggaatcacttgaactcaggaggaggaggatgcagtgagccaagatcgcaccactgcactccagactgggcggcaagagcgaaactctgtctcaaaaaaaaaaagaaggagcaacattatttattaagattaatcttgatggccaggatgtggtgcctcatgcccgtaatcatcccagcactttggaaggccgatgcaggcagatcacgaggtcaggagttcaagaccagcctggccagcacggtgaaaccctgactctgctaaaaa

SEQ ID NO: 594118 - DNA, 912 bp, Homo sapiens
gataccaagaacgttgcctataactcaagaagaaacgtgaggaagttggaacgatcagaacgagtatgaatcccgcagcctttggcaaggatgtcactttcaacttaaaaactcagagacacttgatgcagcacactgaagcaaagcacaggcttgacagaacgacaaagaagcagacagcccgcagacacaccgcgcacggacgacccggaaccttcacgtgggagacacacggttacttttcactgacacgactggagaactgctggcgtttactgatgaaccacttacctgcaaacgtcttggctgcctgccacagccactcaggctcgcgaacgattgcacaacgatcctacatacctgaatgactccagggcccacgctacggcacctaatttcacgccacacccatacccagtcatattccctcttgcgagacgcacaaccctgctccaactttccaactccttcttaacttaccagctgcgttccttaatcatcgagcgggataccttggcaacctatctctggagcgcccacacacttgacaccaacttctacacggcggcaacaagcatatcccctttatatccccatcttgttgtgacagctcaccagaactatcaggacattcaagctcccctggcaccaaaaacaaccccaccacgcggcccccacggacaaaacaccacccaacggaaatggctctcccctccatagagcccaacaacaacccaacaaccgactcgctaaacacacccaatcccactaataacttccccacgcgctcacttacacagcctttttgcacccaccaaaaccttacacggcacagaattaaagacataccataacaacctagtgcctaccctatatagtaaaccatcaccatcacttatccccccgcccaat

SEQ ID NO: 594119 - DNA, 345 bp, Homo sapiens
acccagagcttcatcaatgatcctcgttccaatgattcgaacttgcgcttaatccacataccagtcccagcggacggctcttactttgccggcgtcttcctccaccgacatccggctttcgctttccccgtcgagcgggtacacaagctgcccgttttcgcgggacgcgggcggtcccagccgcgacagcgcggcgcggacggattggccgatttccatgtacgcgggcaggccatgcccgggcgcggtaacctcgacccgagtgagcagtccggacggatcggacgcgaccggcgaaaccagggtttgcacctcgatgccatcgcagcgcagcgagcggatcga

SEQ ID NO: 594120 - DNA, 1164 bp, Homo sapiens
  misc_feature (84)..(84): n is a, c, g, or t
  misc_feature (93)..(93): n is a, c, g, or t
  misc_feature (96)..(96): n is a, c, g, or t
  misc_feature (99)..(99): n is a, c, g, or t
  misc_feature (107)..(107): n is a, c, g, or t
  misc_feature (117)..(119): n is a, c, g, or t
  misc_feature (121)..(121): n is a, c, g, or t
  misc_feature (130)..(130): n is a, c, g, or t
ggccaggctacacagccccaccgcctccacctccaccaccacctgcctacaactatgggagctacggcggttacaacccggccncctataccncancgncacccccnaccgcgacannncnaccctcagnccagctataaccagtatcagcagatatgcccagcagaggaaccagtactatcagaaccagggccagtggccgccatactacgggaactacgactacgggagctactccgggaacacagcagggtggcacaagtacacagtagccagtgtgacccagaggctcccggaggccccatgaccgagattcctccacgcagacgccatgactcggccacctcctctgcaccccgaccagatcccgtggtgcatggggatggaggtcatcccagggactgacctcccatccagacccacatgcctcccctcttgagggggcttccattccccatccaatagggccaggcatatagataactggattcaaacaggcaacaagtgaccttataagttttactggtaagtcaccacaacatccaccagcctatcacaacctccatgtaacgtggcctaccttcttcccttttaggacctagagtattcccacaacatcacattgatcatacaagtgagggctacagtgacttgaggggagaattcccctactgttcactctccgcaaaccctgctccaagggccctcagactgcccagaaccctcatgcagcaggtggtgacatcactcccaggaagcggcgacaaggaccactgctcacggatgacagaaaagactcaaaagtgaacacacaaacgagaaaaccggggacacacaagccggcgagggaccacccgacgagaaaagacaaagtgacaagggacataacagtacaggaccgaactacggcaccaggggaaaactcgaggacacccctaacggaaccagaacagcaaagcacggtacgcgcaagaaaaacgaacaaaaaaagagaagagagcagacacagacacacgaggccccagtaccaaaacggcagcaaacacaacgagaaaaccccacaccacaaaagaaaagacacaacagacaatcaccaacaacacagacacaaaacaccagccaccataagctgaacatcagagaagaggcacgacgacgacagca

SEQ ID NO: 594121 - DNA, 351 bp, Homo sapiens
ccggtacctgtagcgggtgtggtggtcatgctgtaatcctagcatttgggaggccaaggcgggtggatctcctgaggtcaggagttcaagacccacctggccaacatggtgaaaccccatctctactaaaaatacaaaaatcagctgggtgttgtggcgggcacctgcaatcccagctacttgggaggctgaggcaggagaatcgcttgaactcgggaggcagaggttgcagtgagctgagatcacatcactgcactctagcctgggtgacagagcaagactctgtctcaaaaaagaaaagaaaagaaaagactcattcttccgttcattcattcacatggccactcaata

SEQ ID NO: 594122 - DNA, 349 bp, Homo sapiens
actggggttggcgtacaccaccacagtctggctaatttatctttattttctgtaaagatagggtcttgctatgttgcccagtaatggtcctgaatggtctcaaactcctgggctcaagcaagtccacctacctcaccctcccaaagtatagggattacaggcgtgagccactgcacctggccttgaggagatattctctacctaggggttgttaataatcacacggactccacttatgactccctaaagccccatgtcgaaaaaaccatcgctcggtcacttactaattgccgcaatactcttcaaactaggccgctatggtataataagcctcacactcattctaaac

SEQ ID NO: 594123 - DNA, 305 bp, Homo sapiens
tttggacctgactgttaaaacttaactgttttggaaaataattaagatggggagagacagataggggttatattgtttgagcgcagatgctgagcctggaaggaacccaggttatgcactggagtttgtaaataaagtcagctgtcaccgttatcgtttgctttcactgtgaccatgcttcagtgtgcatccttgtaggttgagttctttttcagagttactccagatttactacaaatagattttaaggttaagaataactgctgggtaagaaaatgaacttgttggatagagaaaatgagttc

SEQ ID NO: 594124 - DNA, 335 bp, Homo sapiens
aagtaccacgcaggagggcgactgccacagatttccatcaggtaaactaaagactgaactgaacaatcaaatgctcagcaggagtgccaaggggctgggcttgggtcctgtttctactggtatctatgatgataactagcttcatcggccagacatttcctcacactccttgggacggacatttgtggagtaggcgtgagctcatgcctgcatacatgtgctcggctacacgtatgcatacacactcttccatgccctacttgaaaatccagactccttccccagaggtctggctggacatgatacagttgtgtctgttctgcatatgtgccacc

SEQ ID NO: 594125 - DNA, 421 bp, Homo sapiens
gggctcgaaagaaactgcacgatgttttaaaaaaaatgcagacaaacaaaaatggggggaattcccacctctttaaagccaaagtaaaagaaacggaaggccaggaaaaaaaaccccctgccgacaaaaaaacccattgaccgggaaaaggggagtaaaatttcttaagatcctgagggatttcctacccccgtcctcttcgagaccccagtggtgatgtggagaaaaagccccctgcaaaatggacacaagccccaagttgccctgtaaacctgggcactccgcgccaaagccaccggcctgtgggtttttgaagggaccccccccaatcggactgccaaattttccggtttgccccgggataaaaaaaaaaattatttgtatgaaaaatgaaaaaaaaacacccctcggggcatggcta

SEQ ID NO: 594126 - DNA, 672 bp, Homo sapiens
agcatcgacgatcgcacgtctaggaatactagtatatcgctcacacctcatatcctccctactatgcctagaaggaataatactatcgctgttcattatagctactctcataaccctcaagcacccactccctcgttagccaatgatgtgcctattgccagtagctagtcgttagccgcgctgcgacggcaggcggctgggccgtagcgcctactgagtctcagatctccaacgacagtatgggcctagacgtacagtacagtatacctacaacctaagtccgaatgcgtaaatagctaattcgtccgcaacgaagtatatacttgactacgcagctgacattggactttgccaagagagaagcacgatagagttctgagatcaacgagcaagccagcccagcaggcctacatatatgtagcatcgatgccctcatacgtagtgtgtatgataaagccgaaaagtcgaaacaacccatagcgctaagttttcagccctggatatcgcccacaaaaccccatgtatgatccccatcacgaaagacacaccacgataacagcaatggaagctacattatacaacaccaagcagacagtacacgagggagaaccaacggccggggccctaaaagcctggaagctaaaaaccatccaacgagctaccaaggaggga

SEQ ID NO: 594127 - DNA, 90 bp, Homo sapiens
acgcgcacacgtgcgggtacttcttcgaagagctagttttccaccgggtagcgcaggatcgtggtgaggaaaaggtcggcgagtggaatc

SEQ ID NO: 594128 - DNA, 243 bp, Homo sapiens
cgtagtgcgtcttgttccatagccgactgtttctcaagtgtatcccttagttcgcctattcccttaaaacatccatcttcagctcagtttttaccagttggacctgtttctcttgagctctggcattatctcatggcaactttcaaccagcccctagtatgttagtcagcacagcgtctctgatggaagcactagtcccatccaggcaaacagacaaaggaagcatggcaaaacctaggaggc

SEQ ID NO: 594129 - DNA, 172 bp, Homo sapiens
actagtctggcaatcggccatgcctgacctttactgccttattaactcgatatcatatattgcgttccacttctttatgatttattacccatttttgctctgtagatcagcgtatgtctcagtgctgtcccctgcttcacggagagaaaggctgtttcggtcgacagcatgt

SEQ ID NO: 594130 - DNA, 869 bp, Homo sapiens
  misc_feature (3)..(3): n is a, c, g, or t
  misc_feature (156)..(156): n is a, c, g, or t
  misc_feature (159)..(159): n is a, c, g, or t
  misc_feature (216)..(216): n is a, c, g, or t
  misc_feature (218)..(218): n is a, c, g, or t
  misc_feature (224)..(224): n is a, c, g, or t
  misc_feature (234)..(234): n is a, c, g, or t
  misc_feature (275)..(275): n is a, c, g, or t
  misc_feature (288)..(288): n is a, c, g, or t
  misc_feature (328)..(328): n is a, c, g, or t
  misc_feature (351)..(351): n is a, c, g, or t
  misc_feature (355)..(355): n is a, c, g, or t
  misc_feature (374)..(374): n is a, c, g, or t
  misc_feature (384)..(384): n is a, c, g, or t
  misc_feature (393)..(393): n is a, c, g, or t
  misc_feature (454)..(454): n is a, c, g, or t
  misc_feature (460)..(460): n is a, c, g, or t
  misc_feature (570)..(570): n is a, c, g, or t
  misc_feature (579)..(579): n is a, c, g, or t
  misc_feature (606)..(606): n is a, c, g, or t
  misc_feature (619)..(619): n is a, c, g, or t
  misc_feature (630)..(630): n is a, c, g, or t
  misc_feature (636)..(636): n is a, c, g, or t
  misc_feature (664)..(664): n is a, c, g, or t
  misc_feature (674)..(674): n is a, c, g, or t
  misc_feature (681)..(681): n is a, c, g, or t
  misc_feature (775)..(775): n is a, c, g, or t
  misc_feature (865)..(865): n is a, c, g, or t
tgnaatgaaaggtcccataccccccacccctgggggagactgacagaatcagtgctggacaagtgcatggcccccttcagtttggtgctgaacttccatacccctgtaagccatcactcaagataaaatgagcagttctggtcctcagggaaacanccncctgtggccaggcccaggtaatccaagcctccaaagctcttggggaccaggcctggngnccaccncggctgggcnaggttcatccctggccacctagctactctagaggggctggnccccaacccaggngacctctcacacacagtgataggctgggacagagctgcangcttgtggggtgcctgttggtcnaganagagctgcaggatcgggtncgggggcgtnttggctggngtgtcttctaatgctgagtcgtggtccgtggggcctatgggcacccccttagggtttgatnagaatncgtggtggagacattccaggtcagggctgcggcccaaagatgggcctacttgtcaatgaggcctccctccttgagcttgaagtagaagaacttctccagggcgctggctnaggacagtnctcgctgtccggggggttgtactcgcnacagttggcgatnacccgctgcangtcggncacaaagagcttccgggtcacgtagtancggcttcgcngccgctnagtcatggtcttcaggtcaatggggaagcggatgacctcgtagtagtcaggggcctccgacttcttcacaggctccatgaagggcaggcactgnggtgagacttgatttgggccagcaggtttttgagggttgtgtagagctggtcggggtcttcagctccttcccttctccttccccaatggnttca

SEQ ID NO: 594131 - DNA, 425 bp, Homo sapiens
  misc_feature (47)..(47): n is a, c, g, or t
  misc_feature (58)..(58): n is a, c, g, or t
  misc_feature (181)..(181): n is a, c, g, or t
  misc_feature (184)..(184): n is a, c, g, or t
  misc_feature (267)..(267): n is a, c, g, or t
acgtcagtgactggagctgagtgcctgagggtccagagccgaggccnagcgacctcantgggcccagtggggaggagcaggagcctagcttgggaacatgcgtatgacctctacagctacctcttctatggactggttattgcccaaacagccacactgtgggatcttcttaacttaattntanttaatactatttagtataattatttttgatttcacagtgtgtttgcgattgtttgctctgagagttccccctgtccctccccnttctctcacagtgtgtctggtgacaaccgagtggctgtcatcggcctgtgtaggcagtcatggcaccaaagccaccagactgacaaatgtgtatcagatgcttttgttcagggctgtgatcggcctggggaaataataaagatgttcttttaaacggc

SEQ ID NO: 594132 - DNA, 1274 bp, Homo sapiens
gcccatttcctcagctgaccgccaaggtgctcgggtccttccgaggaagctaaggctgcgttgggtgtgaggccctcagttcatccggcgactagcaccgggtccggaagcgccatgcccatagactcgcccgcgcctttggcctcgtgtctcctgagctcgccttgcattctacgtcgtgcccttcatttctgcaccgaacgaatgtaggagatgacatgatcacgagaggaataaggattgcaagggccctgcaattaacagacagccgggatgtacacttggtgggaagcccatataatagggtccgtgggtcttaggataatggcataagaaggtgcccactgggccactaaccggatcaagacccagttatggcgtagcccctccaattcgttgcaaaatggatacagtgagagcccccaggggacggggcacccctggagcaccaccatgcaaatgacgtggagatgccgtggcacacaccccgagcacaagggaagagaggatcccatagggcgcccacccacatacacacaactggtcctggcctgggactaccacgaagggcgagaaaagaagacaaatggacagggggataccagggggtgggtaaaggcccaagaaatggcaacacctggatacggtacatgtccaacagatgcggcgacaagcttgccttgggttgtgggacagtcaggaacaaactggggtgtgaccatataggggagaacagcatataggtagaggcgaccggttaaaatggaaaggcatagacgttttgacgaacgcagattagacgactcccacttgtgtgaacgaccccaaacgacccatacgaccctagagggggcgctccttggggaaaccaccggttgggggtccaacacgcatgacaaggacaatcacggacacagagaattacacaccaacacacgacaacagtagataacaacagaccaaatcaccggaccaacacgacccaaacacacatacaaagagtgttgtaaccagcagagaacgacacagccgaggcactccacgcgacgacaactaggacgaagcgcacaccacacccgccagtgcagcgaacagaaacagatccaccctagttgcaacaagccaacatagcaagcaccaacccaaccatattacacaccgacggaaaaatagtcggagaacaacagccagtcgaacatagaggagcggagacctcagcacccacccgaagcgacagcccaggacaaagaagagcaaggcacgccagcgaaacg

SEQ ID NO: 594133 - DNA, 177 bp, Homo sapiens
ccccccggctcccatggcgggaaggctttgccctggctgtttttttgggtcctgacctggcctttggctaccataccaaaaaaaaagggctgggtggggaggaacttcttcttctgctaccaaggctgtgggcctcatccttccctcagttgtgaaataaaccgctccttgccccga

SEQ ID NO: 594134 - DNA, 329 bp, Homo sapiens
ccagacctcttacttgttgcccggttcgatgccattgtctcacactcttgccttatcatgcctcatcgccccatccccattctaggctgagaccttttagccagagtcaaagcttctatcagcttttcttgcccccttcaaccagagtcccctcctgctcctctccgctagtccggcccctgacccctttccccagtacccacttcctgcctctctcattaacccttccgtagctgctcaccatgaccccatcagaatccagttaagagactcttccaaatttcccaacgttcctcaataccccatctctctaacccaccaaaagggcc

SEQ ID NO: 594135 - DNA, 105 bp, Homo sapiens
tggggtgcacgacttaattcacatttctcctttctctaagttcggcaataggtgaaaagatgtttacccagtgccgacaatagtcgtggtactttaaatttccca

SEQ ID NO: 594136 - DNA, 619 bp, Homo sapiens
cagatatgcatttatctcagtgagcagaggggtgactttgaatagaatgggagacaggcttgctctaagcagtcccagcttgacttttctctttagcttagtgattttgggggaccaagatattttcctttcaaatttctccccttttttttttgtaaaatcttttggagaaagcattttagaagaaattgagcctctggtcccatgttttgtctgatctctcatggctaggatgatttgttcctagacaggtaagcaccaagttattaggaaagttttgttagaaggttgtgaagtctcatgtcctatgaaaagaaaatagtggggcacaaggaatagacactgcggcccctacctgaacactcttggtcaatctatattggccgcattactctgaattccgaacattggcaaacaggcgtgaccgcgtggtactgctgtaaataggttgctgctatcatcttctgaagcttatcgactagctgacgttttcacggctatatgaaagtgcagcttagttttcaatgactctcaattagaaaaaatgggggaaaaagagggaaaaaatggaaaacattatcttgcttggagcccagaagaaattagtttgtcccttgtt

SEQ ID NO: 594137 - DNA, 611 bp, Homo sapiens
  misc_feature (261)..(261): n is a, c, g, or t
  misc_feature (451)..(451): n is a, c, g, or t
  misc_feature (457)..(457): n is a, c, g, or t
  misc_feature (469)..(470): n is a, c, g, or t
ccaagcggtgcctttcgaagtggacaagactttgcccccggcagattttgactcgcctttgggctgggcctcggagcagttaatgttatccccactatggtttagttatacacgatcagtaagcctcaagaggcacgcctgccatgagagcacatgtcttctggccaggagaagtggctcagccttggtatccctgtaatgtggacccagctccagggaacaaagtgtcggggatggaggggcccagcctggattgactgntacttcctgtttttgtttccattattccccagagagggacaagataggacatggcctggaccagggaggcaggcctccccctcagaatttgggtttcacgggccccaagtttcccccccagaactttggccaaaaatggctttttaggtgggctgtgcaggcaaagcaaagctcagggcgggttcccagngggccngagcaaggggcnngcccccaaacccccccccgttttgacgaaaggcttttccccctccagcaagtgttcccagcaaccagctccattctgggtgcttgccttccatttccgtgtagatggagatccctgtgtgtaataaaccccaagggggtga

SEQ ID NO: 594138 - DNA, 876 bp, Homo sapiens
gctcagtgaactgggagcctcgtgggtggggcaagatgctccgtgcgcctgaaatgcgactctggcgtgggggcattcgtgatggtgacccctgcatacagggccttctactctgtgctgccagttgtgtctaaaagaactcttggaatctgtagaacccggaatcgcagcgccctcgggtgctggagccacactgcatggccgcgtgtgcatgggaccacactcgaggccttggttattgtccactggaactaggcgattcgtgcacccagatgaccttacttgggacgccatcacttgaacagcacgtgctctgagttgaacgcgtgcgtggatggtcgtgctggtggctttgtgggcctcccgtgagcctcaggcctatgtgcgggtctgtgagcctctctcgccgcgaggctcgtgccccacgggagctcccgggatgcgatgcggggcggcccttcgtcagtgttgaactctgccttcttatttgcacgtgcgacaaggcccctccctttttggccttgaggtacttctaaccgctgttcacagccttcgaggtccactgttggacccacgtccgtttggtctacgattggcaggttgcgctgaaggagatgggttgcgattgcgagtagcagaattaccctgcgagagagaggtgtcatttgttcctattcgcccaaatagccggataagcgaccctaagcgaagtcgattcgctcgagacatagaagcgttagcgacaggcccatttcatcccaatagggttcttttatcgcgcccatcgcttgtgaacgcatgaggttgctcttccgtccattgttgtgttggaccttgtagatgctagccgttagcaaggggttctgaggacactgg

SEQ ID NO: 594139 - DNA, 870 bp, Homo sapiens
ggtctctgaggagagtctgtgggcttcaacatgatacagtagagtatgaagtgcttagagctgtgcgccctgttgcatggtcagttgtgctagtgtgatggtctcagatgtattagtgtgcgtggaggtccgacccagattgttattgagcgcagggaaggtcccaggctcttgtgagtgacagggagtaccaaggctatggatgaccatcatgacagctacttccattgtttctcttgactttgcatcattcgtcttattatccagtttgctgagatgttaaactcagaacacacaggggaagcacctagtccattgcaccagcacatagtagagcagtcgtgtcaacgagagttctgtgagatcgacatggttaactcttgccctcctcgccatggttcctagtcagggagttgaatgtgtagtaggccatatgtaagtggagccaggagatcagtctggggcactctctcattctcctcctgcctcccacccttgagttccctcatagagagagcaggacaagtgacttctaggggaaccgtattagtctgtcgctaagaccagatatgtttataccgaaacgaggtttcattgactcacagttctgcaggctgtacaggacgcatggctgtggaggcctccagtgcaaacttacagtagtgcgcagacgcgccaaggaggagcaggcgtcctcacatggtctggagcaggaggaacgtgacgagagcgtggaggcgccatctagttttaaccatacagggtctcgtgacaactcactcgactgtaacagtctgcaagggggaatgtgccacacatcatgacaagtccggccctctgatcagtcaacttcccacaggtccaccttga

SEQ ID NO: 594140 - DNA, 175 bp, Homo sapiens
attcgcggccgcgtcgacgccaagtgaggaggcacgtccctgtagtcccagctactcaggaggtgaagcagaaggaccacttgagcccatgaattggagactgctgtgtgctgccatcatgcctgtgtatagcttttgcgctacagcctaggcaacgtagcgagaaccattttat

SEQ ID NO: 594141 - DNA, 320 bp, Homo sapiens
tgaatggaggcggcagagataggtgaagggcatgcacattaaaaaccagtgaagaggcaagataatgaaaattaattcaagaaggcagtgatggtgaagttcattaacactagataatggagtggtgggcatgtaacaatgcatcaatggggtaaatgatgcacaggtggttaagtggctgaatacggtgatgttatggtgactggttgtaacatgggtcatatagccagacattgcgtggctaatggaggcaagcgcctacggtcaagtgccaaatcgctcttcccaagcttgctcaagaacggggtaaccgaagctcg

SEQ ID NO: 594142 - DNA, 445 bp, Homo sapiens
ggccctcattcccatgtcacgatcaccccatgtccacaaataaaatgacaaaaattagccaggcgcagtagctcacacctgtatcctagcactttgggaggccaaggtgggcgaatcacctgtaagtcaggagtccaagaccagcaaggccagcatggcgaaaccccgtctctactaaaaatacaaaaattaggcgggcttggtggcatgtgcctattgtcctagctactccagggtaggcagaggttatagtgagttgtgattgtgccattgtgctccagcctgggcaacggaggagaccctatctcaacaacaaaaaccctgatttgcagccaaatagtttcctcagcctatttcctgccagtaaatggttaggagcccagtggctttgttttgaacagtctttgtccattttagtccaagctagtggtgcttgtgttagttc

SEQ ID NO: 594143 - DNA, 186 bp, Homo sapiens
  misc_feature (67)..(67): n is a, c, g, or t
tgccccctcccaccaaggttgtgccccgccctcatccagcgacagcagcagcgatagctcctcgganagtgacagttcgactgatgactctgaggaggagcgacccagcggctggctgagctccaggagcagctcaaagccgtgcacgagcacttgcagccctctctcagccccagcagaacaaac

SEQ ID NO: 594144 - DNA, 376 bp, Homo sapiens
ccggaagattggactctaggtgtattataatctttctccattctctcatttttatccaagacaaatcatggtagaaccaatttgtttgcaaaaataagttttagtcttatatttggcctgattagttatataaaatgcaacaagaataattatttgtcatataagctctctttcaaattggcattcttagaactttttccataaggagtctcagatcagaccttctaaagccttgaacccatccatggatttatttgtgcctgcaaatacctgtatgaattggatgaattcctctcctatggaggtccaaagttaacttggggctcctgggcttgttagaaagtggcattctttacttaccacaggttaggactcc

SEQ ID NO: 594145 - DNA, 530 bp, Homo sapiens
agttcgacgaagactctctaggtgagagcggtagcgtagccacagtataacttcacatgttcattaaaaaggcaagagttgaccgctaaaacttcaaagaagaaagtactcataaaaaaaagtcttaccccagaatagcaaacaaatacatgaaaagattagaagaggtgatagaaagcaccagacattacagaaaataagaataataaaataaattcaactcaaaaggtccccatgcagcaaatactttgtaaagtatggcctgtatgtaaatagtgctaaatcaaggactttgtagcagaaaattggtcggtgcttttatctaaggcttgaatttgtaaagtgaaggcatgaaagtgaccaaacattaagtaactcttaaaatggcacacaggtatgaaagctatgggttattccttcctaactctcggaatttttcccatggccttagtagatcaactatgtcagacgtatgtgacaccagcaactctcaagatacttgtcttgcagatatgtcatcagtcatgtct

SEQ ID NO: 594146 - DNA, 481 bp, Homo sapiens
cgaggatcccgggtgcggcaggagaggttgtggaggggaggcgaggcaggcggatcatgaggtcaggagatggagaccatcctggctaacacggtgaaatcttgtctctattaaaaatacaaaaaattagctgggcgtggtggcgggcacctgtagtcccagctactcaggaggctgaggcaggagaatggcgtgaacccaggaggcggagcctgcagtgagccgagatctctccactgcactccagcctgggcaacagagcgagtctccatctcaaaaaaaagaaaaaaaaaagagaaaatacttatattcattccctagggctgccacaattaagtaccaaaagcggggtgacttgaaaccagagaaatggatggtccgggggctcggggggccagcagtctgaaacggacgtgccagcagggccacgctccctccggcacttgtcggggagtcctggcacaacctctgggtaccgagc

SEQ ID NO: 594147 - DNA, 437 bp, Homo sapiens
aacctgctgctgggccccgtgctgcgattggtggttgggcggtccggcgggtattctacaaccgccggctgagctacacctctccctgtgtctaaccccctcgtcttctcattgtgggcgaggacaactcgacggggccgccccgtcctcttcattgcatcggcagcgcggggggccgcagtctctgtttctcagcgcgtgttgccgccccgcgccgtgttggtgggcgccacacgactgtcgggcggccgtctttttctccgccgtcagtgtctgcggcggctctactcccccgtgtggcgctttttttggtgacgtctttttttgtggagcgagggtagcatccctcttctgtacgcggggtgcagaaaattccccacacgcccccctccttcctccccttttggggggaaaaaaagagttttttttgccccaca

SEQ ID NO: 594148 - DNA, 321 bp, Homo sapiens
  misc_feature (246)..(246): n is a, c, g, or t
ctgcttgtttttttttaagagacagggtctcactctgtcaccacacatgcagtggcgtgatcagagctccctgcaccctcaaacacttgggctcaagcgaacctcctgcctcaccccccacagaatagctgggactacttgcacgccaccatgcctggctaatttttaaaaaatgtttgggcctggcgtagtgactcatgcctataatcccagcactttggggaggctgaggcaggaggatgctgngagcccaggatcctacaggagtttgagaccagcctgggcaacataggagaccccatctttaccaaaaaaaaaaaa

SEQ ID NO: 594149 - DNA, 103 bp, Homo sapiens
ccctttttttggggggggaagtttttaaccccctttcctgggggaaatttaaaaaaggggtttttttcccggccggaacaaaaaattgggctgtcccgtttta

SEQ ID NO: 594150 - DNA, 230 bp, Homo sapiens
ggcgcctagcatctcccctagcacttccggccgcctcattgaataccagagcactaaatcttttttactagaaaatactggcggtcatatgaaagtctctattactgaagtagtgtcactgagggtgtgggcaaatggagcctttcacatactagtggggggcacttggtaatacagatataagccttaaactatgtaaacccttgttctaaggaagttgctaggggggg

SEQ ID NO: 594151 - DNA, 535 bp, Homo sapiens
tgagccactaagcatcattccaaagatcatgggaccttgctttcacgtctcacttattctccaaggctcccactggtactctttcctgaacaattcagcccacgggtcaccaccagttgaacgtaataatagtgcaatagagtttttccatccccgaaaccatggagcagagattctgctagttgaaggcgaggcatacccaatagttcttaatgttacactgaccttctgcctttgagacctgtaagccacagcactggtgaacaataattctactgcctgctgctccagatccgatgggtacagggtagccctctggtagaaatctgtctgttgcctcctgcaagagagtaaacctggattcctacagagtatgaaatggctgtttgaggccgaagggaggggttgatgaaagtcacatctttttccagcacatctggcttgactgggcctactgatgtcacgagctcatgaggacatcgtacacagcgtctcaaggggtaagaatgtttcagagcacaggccctaaagccaa

SEQ ID NO: 594152 - DNA, 861 bp, Homo sapiens
ttcggcacgagctgggagatattttagtggtggtggcaagggggtgctggaatgttttcttcattgctggtgaaatcttggaactactgccttgtagaggttgagtagactttcaaaggtctttcttctccttgctgttactcaaaggtcaagagatttgcttgggtggagcccaccagcttgacttctgggaagaagtgagtgatggttgtgcctgcaaagactatagcagtgcacctggctttgggctgactagcccctggtaataccacactgcctgtattaaacacaccatgaagcagatagaggagaaacaaattcatatttcccactggcagatgaaggcactttaccatcctgaaattatccctgttttcttttgttcgaaatatattacatttgatacagtttttcttcatggctgtgaaagatggacatacccattgcagggataggttgtcccaaggactggtgtggcattgataccttctgtggaggcaattgggcatgacctgtcactgtttctgaaaaaaattactccaattctgacatcctagagatggtatttcagagacaggatgtacttttttttgggtagtgttggctaaatgtaaggtttcaaatgtgttggattttaaaaaaatacaaacagcaacagcggaattgaccagattattttccttattattctcttttaaaagtaagatgagccctggcccttctgcccaccctctgagaatatgctccctccgcgtatatatttacatatatatatgtgtgtatatatatatatatatatatagagagagagagagagagagtgtgtccttattaaaccacatgcttattaaactacatagt

SEQ ID NO: 594153 - DNA, 209 bp, Homo sapiens
  misc_feature (189)..(189): n is a, c, g, or t
caacttgtattcagcaaggtgtactaccgttactaaaagtaagaagtaagtccagactgaattacctcagcagggggcggtggctcacgcctgtaatcccagcactttgggaggccgaggcggtcggatcacgaggtcaggagatcaagaccatcctggctaacatggtgaaaccccgtctctactacnaaaatacaaaaaattatgcc

SEQ ID NO: 594154 - DNA, 278 bp, Homo sapiens
gctgtttgcgggtctccgcgcgggacccgggcgcagcgggggtcgctgaggcgagggtgtcatgtcagacaacgaggacaattttgatggcgacggcttttatgatgttgaggaggatgaagggctagatgacttttgagaatgtccgcagagagaaggcacagagaatgtcgagatctctccctctctgggagcgagcgcaagggcacaccacgaaagcgtatcacacacaccatatatagtgcacagtgcgcgcgcgcccgcgtgctctgcacccg

SEQ ID NO: 594155 - DNA, 127 bp, Homo sapiens
cccgcccccccccccccccccccccccccgggggggggggggggcccctttttgcccaaaccccgggggggggggtttttcccccgggggggcccctttttaaaaaaaaaaggtttttttttttttc

SEQ ID NO: 594156 - DNA, 273 bp, Homo sapiens
ccccggtttttaaggggggggggggttatgcccccccgtttaaaacccccccttatttttccggtgggggggccgccaaatccccatattaggggggggggggttttttttcccaaaagccgggggggcttccgttcttccccccattggttgggtccggtttcttccgccccttttgggcccgggatttttttaaaaacccgggtttttttttgggggccaaattttttttcttgggggggccgcccccccaaaaaccgttttttcccctta

SEQ ID NO: 594157 - DNA, 836 bp, Homo sapiens
  misc_feature (17)..(17): n is a, c, g, or t
  misc_feature (76)..(76): n is a, c, g, or t
  misc_feature (80)..(80): n is a, c, g, or t
  misc_feature (172)..(172): n is a, c, g, or t
  misc_feature (192)..(192): n is a, c, g, or t
  misc_feature (201)..(201): n is a, c, g, or t
  misc_feature (206)..(206): n is a, c, g, or t
  misc_feature (214)..(217): n is a, c, g, or t
  misc_feature (244)..(244): n is a, c, g, or t
  misc_feature (281)..(281): n is a, c, g, or t
  misc_feature (306)..(306): n is a, c, g, or t
  misc_feature (379)..(379): n is a, c, g, or t
  misc_feature (383)..(383): n is a, c, g, or t
  misc_feature (389)..(389): n is a, c, g, or t
  misc_feature (393)..(393): n is a, c, g, or t
  misc_feature (396)..(396): n is a, c, g, or t
  misc_feature (401)..(401): n is a, c, g, or t
  misc_feature (451)..(451): n is a, c, g, or t
  misc_feature (461)..(461): n is a, c, g, or t
  misc_feature (470)..(470): n is a, c, g, or t
  misc_feature (474)..(474): n is a, c, g, or t
  misc_feature (604)..(604): n is a, c, g, or t
  misc_feature (758)..(758): n is a, c, g, or t
  misc_feature (811)..(811): n is a, c, g, or t
gacttgattgagaagtncctggatattagccgccccaagatgcaggaggtggtggcaaacctacagtatgacgatngcancggtatgaaccgagaggccactgcagacgacctcatcaaggttgtggaggagcttactcggatccattagccaagggcaggggccccctttnctgaccccccccaaaagctntcccctgcnccccnccccctcnnnnccaccatcctcttcttggccatgggangcctttccctaagccagctgcccccagagccacaaancccctatgtggaagtggggcgggcntcatagagacttgggaatgagctgaaggtgaaacattttccccctggatttttaccactcccacatgaccccncccncccccntagnccnccaanccttgattggtgttcccagttgtcccccttccggggaaggattttgcagntctttggctnaaaggaagntgtncgtgtgtgtgtgtgtatgtgtgtgtgtgtatgtgtatctcacactcatgcattgtcctctttttatttagattggcagtgtagggagttgtgggtagtggggaagagggttaggagggtttcattttctntgaagtgagaccttccttttacttttcttctattgcctctgagagcatcaggcctagaggcctgactgccaagccatgggtagcctgggtgtaaaacctggagatggtggatgatccccacgccacagcccttttgtctctgcaaactgccttnttcggaaaaaaaaaggtgggaggatgtgaattgttagtttttgagttttcccnaataaagtagaatataagaagaaaa

SEQ ID NO: 594158 - DNA, 352 bp, Homo sapiens
atagagacagtttttcctccagaatcagtatgtcagtgtgttcagcgtctcttcttcttcgatttctccgttttcaaagtttaacttcctggattctcttctcccccttgcctctggtttcagtagtcaactttcccaccagtcctaatccgtatttcacatcttttcgctggtcacctgctccttcctgactcacccctggtcaccttctttgacctgattcacccctggtcacctgctttgacctaagtcatcttgtagttacctgttcctaactgtccttcctgctatactagtcaccctgccactctggctcatatgcctgctcccttttaaatagcctgtcggaatt

SEQ ID NO: 594159 - DNA, 712 bp, Homo sapiens
  misc_feature (13)..(13): n is a, c, g, or t
  misc_feature (84)..(84): n is a, c, g, or t
  misc_feature (88)..(88): n is a, c, g, or t
  misc_feature (90)..(90): n is a, c, g, or t
  misc_feature (93)..(93): n is a, c, g, or t
  misc_feature (117)..(118): n is a, c, g, or t
  misc_feature (139)..(139): n is a, c, g, or t
  misc_feature (164)..(164): n is a, c, g, or t
  misc_feature (175)..(175): n is a, c, g, or t
  misc_feature (181)..(181): n is a, c, g, or t
  misc_feature (183)..(183): n is a, c, g, or t
  misc_feature (219)..(219): n is a, c, g, or t
  misc_feature (225)..(225): n is a, c, g, or t
  misc_feature (323)..(323): n is a, c, g, or t
  misc_feature (327)..(329): n is a, c, g, or t
  misc_feature (331)..(331): n is a, c, g, or t
  misc_feature (337)..(337): n is a, c, g, or t
  misc_feature (346)..(346): n is a, c, g, or t
  misc_feature (350)..(350): n is a, c, g, or t
  misc_feature (480)..(480): n is a, c, g, or t
  misc_feature (634)..(634): n is a, c, g, or t
  misc_feature (687)..(687): n is a, c, g, or t
gacagaaagaganatagataaaaaccggggcgggggaggtttgtaggaagggaccctgaaatggaagtggggagggggtggagnggcnantgntgttgttggaacatgggcggggtnnggatccggacggtgggaggcncgggcgcgttagagtctgtggaccntggggggaggntgctcncncgttagtcatactgttcacatatcccagacttttgnggaatnactaattacggcataagcgcatacttggcgggctgcggtaaacggcggcatgatatctttttttttggcttttaaatggtaagaaggcacgactatanactnnnantggctnaaaggaagntgtncgtgtgtgtgtgtgtatgtgtgtgtgtgtatgtgtatctcacactcatgcattgtcctctttttatttagattggcagtgtagggagttgtgggtagtggggaagagggttaggagggtttcattttctntgaagtgagaccttccttttacttttcttctattgcctctgagagcatcaggcctagaggcctgactgccaagccatgggtagcctgggtgtaaaacctggagatggtggatgatccccacgccacagcccttttgtctctgcaaactgccttnttcggaaaaaaaaaggtgggaggatgtgaattgttagtttttgagttttcccnaataaagtagaatataagaagaaaa

SEQ ID NO: 594160 - DNA, 716 bp, Homo sapiens
acacgcaacaactatcttgtcttctctcacacacactctcttgaacaacaacgcgcggcgagagagaaatatgattttctctcttctcatgcagggcggtgtgtgtgtctacagacaccacacgctgcttccctctctctctctcgcactctctgtgtcacacacacacgcgggcgcgcgcgctctctctctctcatcgacacacacgcgcacacacatttctctctcttctagaaagagatatttttgttctccgccacccgctggtcgctccacaccgcgcggtgcgcctcacataacaaaagaaggtggtataaaaggcggggtgtttcctccccacacgcggtgtccccactcaggatacccccccgcggggcgccctgttttttcaccgcgtgtctctctcttctctcgcggacacacacacatcactctgtgaaaattttctcctggtttatacccccctctctctcagacgaacaaggaggggccgcgcaatgagggcgcaaaatacagcatacacgtttttgatcatcgggggctccactggtgtttgtttgaatgaagcccaataatttttttgtgtggggtgttttgggcgcccacagaggggtccctgcttccacaccccccccccgagaggagagtttttttttttgggggacaccgtgaacaacacacacaaaaaacacaaaaaaaaaaaaaaaatggggtga

SEQ ID NO: 594161 - DNA, 404 bp, Homo sapiens
cggccctttaggatctttccctttgggggcgggccccaaaaatcccccgggggggttttaggggtgtttaggggcaaatttacccttccccccgggtggccaaagtttgggtttcaaacccccccttaaaccccggggccccggcaggtaaaaaccaaatttcccctggggcccaaaaaaggggttttttttaaattttttttcccctcccccaaaagggggcggggggggggggggggcccccccaatttaaaaaaaaccccaaggggggggttttcaatttttggaaaaaagtcccccaaggtttttaaaaagggccggggccccaaaaaaaaagggtttttttcaaaaccttttttaaaagtttaaaaaaagttttgggcccttggttttttccttcccca

SEQ ID NO: 594162 - DNA, 204 bp, Homo sapiens
gtcccctcggaatttttgggttttcccccccccccccccgaaagggggtccggggcccccccctcggggtccgggttttccccccggcgcctgcgttaatttgcgacccgggttttccctttgggtccccgggaccccgcccccccctatgccctgggggcggggttctttccccattttttttaaagcccgggtttgtgccca

SEQ ID NO: 594163 - DNA, 201 bp, Homo sapiens
tatgctaggaacaacatatgacgcactcatccccatggaactcatacgacaaacatatatggtcagacaagaacctactgctaaggctccagtgtgcttatgaatgcgaacaggatacccgcgattacgctaggagcaaaatcatgcacctcctatgaagaagacttgcgtaggcaatcagcctaggattacttatatgag

SEQ ID NO: 594164 - DNA, 1404 bp, Homo sapiens
  misc_feature (711)..(711): n is a, c, g, or t
tcatctactctaccatcttggcaggcacgctcatcacagcgctaagctcgcactgatggtttgacctgagtaggcctagcaacgtaaggcgatgctagctttatagtgtgccagttcataatccatatcaaataaactcgcatcgttccgaaccagtaagctagtccattctaacgtattcttccctcaacgcgacagactagactcgcatcctaatatatgctcttctaagtgagctagtcgcgtcttccaatcaatagtaggtcagcgcgagagaatcgtagagctataaaagcgcaaatggctaacctacattcaaagttacctcgattctattgaagtcaactcgatgacagttgggccttattaggcgaaatgagaaaagcataggatagttaggccgccctgtttcactggtctgagtacccctagaaggttcttacccaagggcaacaccatcgtgtaacaatgccggtccctggtgtcgtattcgttcgaacgagtgaatccacatggaatcttagagatcgttaagacactcttcgtcgctccagctacttcgtcatatctggttatggccatgcactagtccaggacagattggagggtggatttaagaccgaaaggcgcagatttacgtcaaaatatcttaagtgcattacgaactcttcaatattttacacccagcattttggggaatcgcaccgtatnattacgcggacgttcatgatccgttaacaatagggcccttaagcattataacgcaggtaccttttaagtatacatacgtgactttctaataattttaatacccttaaaagttacttagcacgggagtttcctgacattaatccaaactatataaacttcccaagattactccatttggaattggctcgtaaacctgaagattaatacgtgcggcaacgcgtgggaacaacaaaaggcttaagaccacattggaacttaaaagaacacccgttgatattgttcacaggatgccctaagccgcttcactttctttctctctgaagggaagtggccttggtggcgccggcgaataaatacgcgggcttgttttatggcccccaaaagtggggtccactttatttcgggaacagaaattcccgcgcaaaaaaacgaaagttagggccctccaattcggattcccccggagcacaaattaattggggcaacccaattgacgcaatcgcatatagagccccttcgtaacatgtcttatacccttaagagcgtataagtcatcttatggccggacccgtctcaagttcgacaaatttaagttccccgcattatgttttagccaaacggtttaagaacacttacagactgacgacggtctgagccaacatacaacaagaagcacaaggccattagattcac

SEQ ID NO: 594165 - DNA, 215 bp, Homo sapiens
gttcactttctacacaagaccagctatttgggagactgaggtgggaggatcacttgagccaggaggtcaaggctacagtgagccatgatcacaccactatctatactccagcctaggcaaaagagtgagaccctgcatgaaaaaaaaaaaagggcctcagacttttttttccatgtgtactgttatgtgtagaaattggaacgggttaccgagct

SEQ ID NO: 594166 - DNA, 201 bp, Homo sapiens
acctagtcgttgctgatgctatgagctgatgaattaaacctggagtgtatgtaccatgggcttcgtaaggaataacaatatatttacatgtttaaaccagtgtctcatagtatactgcagaaatcctaatgggcataaagaaactatagaccgactaaccccactgcaacctcacctgaccccttaggctgtcctttcatg

SEQ ID NO: 594167 - DNA, 491 bp, Homo sapiens
cgcacgtccaactatactatcctaatctatgccgtgagatatattcataacaacagaataacatgaaatgagattatcacaatagatacctctgattaactttacaaatgtcaagatgtcatgaggttgggaattagaatacataatttgaatgagagttgagatttaataagaaaagaaaaagaacaggggacaagtttaatttagggctcaaacaaccctggaaacaatgaagccaatggcaacaagggtgaaaaaggttaccgggttcctcccactttgaattcccaaagaaaccagtttaccacaggcccgggaagggacgaaaccagaactccagaagaatgcctattaaaataggcatcatggagtttcccggtggaattaaaggcagggaggagagttcaggaactctgggccccaagaattttggggctgtgttcatggttcaatatttaagtgtcaactttgattgggattgaacgtattga

SEQ ID NO: 594168 - DNA, 341 bp, Homo sapiens
ctagccagagttgtaagtggcactcactctgtgctttgttttctccttctccaaccctgtcagtccgagtaaaccatctaaaatttaaaacctccagataatctcttcttgctctatattcccccagatctactgcagaaaatacagttgttttggtttttgtttatttgttttttgttttggtttggctttggttttggtattttgattttttgtttttggtttggtttggtttggttttttgttttctccttctccaaccctgtcagtccgagtgaaccatctaaaatttaaaacctccagataatctcatcttgctcagtgtgacctagaaacacgtc

SEQ ID NO: 594169 - DNA, 429 bp, Homo sapiens
atttcgacggaggactctctctaggtactctaggaaatgacaaagtgcccttttcaaggatatacccaaacagctagcaccaggccactttgatctgtgatgtctacaactccaggccaaatcatcatacagatggtgtgtgtgtgtgtgtgtgtgtgtgtgtgtgtgtgtgtgtgtgtgtgtgtgtgtgtgtgtgttgtgtcattatttttgaatagagagaagagtgttatattgagtgtcgcgcttagtgggggctaagagtcacagcttcattttaatatcccaacgagggagagaggtgtgtacatgtgctcaagagagacaccatttatattgagtctcactcaattaaagagagagagagggtattaatctaacggggaaaaaaaagagtaccagtaaattcttgagtggtgtgagagtatg

SEQ ID NO: 594170 - DNA, 919 bp, Homo sapiens
gggaacgcacccgtcttgtcagcgcttgcgctgccccgcggggacaggcccggacgggcgccgcgcggccgctagcgcccgcccggtctcgcacccaagagaggtggagaagagcgagttactgtgagaaagaagaggcatcccatggatgatgatgaccatgaagatgaggaagatgagtgttgtctcgcacggggcatcgtcgcacggtgccctgttagttgatcgtccgtgcaaggtgcgcgcgaggtctaccccacctatgctttaagcccggcggtatgctgtgggtacctctcgcatgtgccctcggatatgtgcgtccaccggaggtggaccctccctgcgggtcgcgcgggcctatgtggcccagggaattgaaccggctggggcgcccagcccgcggggtgggcggtcttcagcccaaggatgttctaccattgcgccagggcagtgacacaatgtgtttgcgcgggaccagacttctgttgcgcagccggggctcaggagcttcgcaccgttctcccccgtggcccttttggcccccaggtcatagccaagccctatcctgtgtggtgcgacggtgtaccccctttggctgtccttccccgggggcgcaccatgatgaacgccatctgatcccggtcgacgttggacctgttggatgtgtgtgtccgtcgagatgattttactgaggggctgggggtgccccgtgaagctaggcgacgagctttccaacggaggcaggaggtttgatggccaatctttgcttgctcatgcaggcgcacggatgtgctcaccggctgtgcatcccggctcgggccagcctgaaggtctacgagccccacatccaggtgcttcggcagggcctttggggtggattgaccccattgggtcttaggtggggccgctcaacccg

SEQ ID NO: 594171 - DNA, 170 bp, Homo sapiens
cgggaatacccttctgggcagaacctgtgagcttcacgtgctcagcttccccgcggaaatgctcacaggatgctgcgtggacccccgggcgtgccacacgctctaagtggtaggtgctagtctgaacgtggtatggcccaccacgtagaccgtcactgtgccagtgtctt

SEQ ID NO: 594172 - DNA, 114 bp, Homo sapiens
  misc_feature (6)..(6): n is a, c, g, or t
ctaggntggaaagcgacgttcataggtttcaaggcctcaatccaatcagcgtctagctggctcgttctgtcctgtccatctgagatcccagaggctgcttctccttttgtttgg

SEQ ID NO: 594173 - DNA, 284 bp, Homo sapiens
  misc_feature (247)..(247): n is a, c, g, or t
tgaatgttatgtcgattacacggtattgatcgtctcgaactcgacttcgtctgattatgaaacattctggcaatgcttcgtctggtcgtctttgcgccggtcaagaatgtacctctagcggcgcatacgaatgccccggcgtcctcttaatcatggctcagttccgaaaaccaacaaatagaccgcggtctattcattattctagctgggtatcaggcgctcgggctgctttgaacactctaatttntcaaagtaaacgcttcggcgcccgcgggacactcagc

SEQ ID NO: 594174 - DNA, 169 bp, Homo sapiens
tcagaggatcccggaggcaggaactgggcagggcatgtgagctccttgcacaccttgctccagctcctcggggccccaggcctgcaggtcacgcggctgccctggtggatgatgtctggctatatgtgtcttggaggccgcaccccgcatgacctcttctcctctggcc

SEQ ID NO: 594175 - DNA, 471 bp, Homo sapiens
gaactgctgtgggactgactactaacgggactgttgcaaaacgaagacagacttgatgggtttttcaacttatgaggaatatttccaactcacaaaagtaaactgaagcctctctcttgtgaaggcacgctactcagtttgaagaaagagctcataatgcattatctagactataaaagcgcaatactgagagtcttccctagagataagtaacagggagtacacacccatgggacactggaataccgattagaaacaagaatccaaaactttttaaaggatacggtctgttcccggaaacaatgttcttccagtcaacagctcgggcattatgcatcccactgagcaaatatcaactgtctggttgtaaatgcatccagttcagcatgatctcaggagtcctgtaccacctagtggccacgtagcctgtcatttcatcatctgtgtgcctagccccaaagccactccaca

SEQ ID NO: 594176 - DNA, 279 bp, Homo sapiens
cataagagtgcgaatccagctattagaaagccctgtgttctttgactccactaaactgtcacgctgtaatccagtatgcactaaacaggagtttacggtgaccttgaaaacacagattactataattactataataaatcccttacattcctgtctctagcatggtttagggagtgccgaggctcaatgtagatggggtcaccttgtcagagcatctgttcatacagaaactgggtttcctgcagaccccaggtgctgcataggattcctcaaacccta

SEQ ID NO: 594177 - DNA, 397 bp, Homo sapiens
tttagggttttaatggtagtagaattattgatagagttagaggagtttattgagattgtggttattattttttttatttttgtaaggtaggagggttggaaggatagttttagtgttaatgagtttaaagagttgggtatttagtagttgttttatttgtttaaggatgtgggtttttttgatgagaagatgaagagtttggatgtgaattaggatttggagtttaagtttaatgagtattggagattgattggggagttggttaaggaaattaggaagaagaaagatttgaagattaggaagaagtaaagttgtttggttgagatggggtgggtagggtagagttgattagggttgagtagaattgtattttttttaaataaagttttttttttga

SEQ ID NO: 594178 - DNA, 186 bp, Homo sapiens
atgatgctgaggtacctagagttcccggcagaatacactcaagtgtagtttgcagagctcagtcagagggcatacctgtgaatataactccagaatctacaaaacggggaaagtttccagcccaacttgtaaacatcagtgcacatgtattgatggcgccgtgggcttgcattccttcttgtgtcc

SEQ ID NO: 594179 - DNA, 760 bp, Homo sapiens
atcactcagttaaggtggggcaggaacaaatcacaatggtggaatgtcatcagttaaggcaggagccggccaatttcccttcttttgtgattcttcacttgcttcaggccatctggatgtacacgtgcaggctatgggctcagaggcctgacagtcggccactagttaccaaagctgtgtgtgcaggctggagtctccagtggaagctattgattgattgattgactgattgacagggtcttggtctgtcacccaggctggagtgcagtgacgcgatcacggactcgctgcagcctcaacctcccatgctcaaggtgatccgcccacctcagcctctggagtagtttgggaccacagatgtgtgtcaccaggcttggtatgatatattatttattttatttttttagggacagaatctctctatgttgcccaggctgttctccaaatcgtgggttcaagcgatcctcctgcctcagtctcccaaagtgcatgggatgacaggtgtgggcaaccacaaccagccaaggatctggtataagcaaagataaatcacataacaaactccagcaagactgggagaaaaaagaaaaagagacagaccacagtaccatgtgtggacatacaggaatatataacgaactcacaagccacaaggatggctagttaaaccaatacatatggacattggcaggaggcgaatactggagggcacatatacaaccaatgagggattagcctactgaaatgagattaaaccaca

SEQ ID NO: 594180 - DNA, 382 bp, Homo sapiens
  misc_feature (242)..(242): n is a, c, g, or t
  misc_feature (279)..(279): n is a, c, g, or t
  misc_feature (342)..(342): n is a, c, g, or t
  misc_feature (349)..(349): n is a, c, g, or t
  misc_feature (377)..(377): n is a, c, g, or t
attcggcacagcaactctgggctcaagcaaccctcctgcctcagcctcccaagtagctaagactacaggtacatgccaccatgcctggctaatatttaaatttttgtagataaggggtcttgctatgttgcccaggctagtctcaaactcctggcttcaagtgttcctactgtcatgacctgccaacatgctggggttacaggcatgagccaccatgccccaaacaggtttgaacacaaatntttcgggatgaaattaggaggaaccttaatttttagntttttggatagtttacctagtttggcaaaagatttggggtgacttgtggagctgttttttaantgctggnttgtttggaacatcacaacccaaattanttagg

SEQ ID NO: 594181 - DNA, 116 bp, Homo sapiens
gtcgacatcgatatgacttttaggacaatacacctacttctcatgaagttctgggatgaacaacaggacactgtatgtgccaggcatatgcgggcgcgcgatcgctcgacatcgat

SEQ ID NO: 594182 - DNA, 519 bp, Homo sapiens
gggcacatgctggtgtaacccttaaccagaaagctaggtttcctcgctcctaccccccgaaagaaccttgggtccaagagtactccacgtgtgcaagactgaaaggacctggtgacattccggcatcagtcctgtgaccacttggaggtcacagaagcaggctcgtgtcctcctttagttctaccacactacatgactcgcaattggttctgaaattagaacgttcaccatcgtacttaaaatcttaggggcatgaagagtcagctagaacaaggaaaaagaaagtcgcaggtagtaggtaagtaggtgggcacgtgaaaagccaggctgctctgtccaacaccaggtgatacatgatgcttataactacaatgaactccagaaggccaacagacagcagcacctgctcaagttcacctcggtaacacctaacaagaccaaagaagagtacacttaaggttgaagacacaacacattgatcttgaaacaagaaaggtttgtgcctactcaacagcgttg

SEQ ID NO: 594183 - DNA, 842 bp, Homo sapiens
  misc_feature (498)..(498): n is a, c, g, or t
tgaaaacctggttgctaatacagcgaggtctacacagcctatcaacctgaaaagggatcctaggcaagcagcacagaccaaagcacagccttgatctaatcaaagacacgtatgcgttgggtgttaggttgatcggattatgagatcctatcaatgttcgcttgatattgtcacaccaacataggagcactttctacagatcctgatcaaatgtaataggtcacagtctgcgatttcgctgaagatcacacctcagtgtgactcaacaccaactgacctatattttaatgtatgcacataaacttaactcatcaagtagatataccatccagactttctcatagcagaaacaatgcaaaaacccctctccaggcacgaatatttttaaatgccactaatattcgatacgtgttgcacccaatttcactagaaggtatcagcatgtatgcgacatcgtcatgtttgaacgttagaaacacaatgtgcactcagaatttnccttctaaaagcatcaccttctacttggcagaagcaccatgcgcagaacatgtacaaactttacacccatgaagccacagcagcccaaccttcagcatctgaagtctagcccacctggatttccatttccagggccttctaattttgccccacgcatgtctgggattccaccacatatgccaacttcattactttccccttcaagttttggcgtttgtctcccatggggttctcggcaccctggtggtcatctcccaggccagccacagggatggaggggggctttcttacaagaatcaaggtttttggcccgcagaattttaccccgttgactttgggggccc

SEQ ID NO: 594184 - DNA, 117 bp, Homo sapiens
taactatggctgcacagcctgttttgtaataagttttattaaaagcagccatgctcatttgtttacttattgtctatggctgctttcctgctatgagggcagacctgagcaagccag

SEQ ID NO: 594185 - DNA, 1437 bp, Homo sapiens
  misc_feature (5)..(5): n is a, c, g, or t
  misc_feature (25)..(25): n is a, c, g, or t
  misc_feature (41)..(41): n is a, c, g, or t
  misc_feature (92)..(92): n is a, c, g, or t
  misc_feature (98)..(98): n is a, c, g, or t
  misc_feature (121)..(121): n is a, c, g, or t
  misc_feature (254)..(254): n is a, c, g, or t
  misc_feature (1436)..(1437): n is a, c, g, or t
ccggncgcggtggcgcgtgcctgtngtcccacctctgcctnccaagtagctgagactacaggcacacgccattacacatggctgattttttntaattntatttttgtagacctagggtctngctgtgttgcctaagttcttcctgggctcaagcaatcctctcaccttggcctcccaaagtgctgggattacaggcatgagccggtgtgcctggccataattcctttttaatataacttgtttacagcaacatncaaccttagaattttgagatgaatgactaaattattattatcttcctttttttcccttctgatataccaattttattaggtgatatctccgaaaaacccaattttgttaggtgatctcataaaaaaaaaaaacccagcattgactgaggttgttcaaagtaaagttattttatttttatttatttatttattttgagacagagtttcgctcttgttgtccaggctggagtgcaatggcgcaatctcagctcactgcaacctccacctcctgggttcaagcaattatcctttctcagcctcccgagtagctgggattacaggtgcatgccaccatgcccggctaatttttgtatttttaggtagatacggggtttcatcattttgggtcaggctggtcttgaactcctgacctggggtgatccgcctgcctcagcctcccaaagtgctgggattacaggcatgagccactgcgccggcaaagtaaagtaatttaaatagtgcctctttaacatgacacacagtaaagtaatttaaatagtacctctttaacatgacacacattataaggacttgttatatcccttctctttctggggaataatttttggaaaacttactgccttgtatttgggcatatatgacatgtgggttgggaccccaggatcatggtttccaactctcttgtccctgttgtttcaagcacataaactgaattcacagtcctatccaggacccttggagaagattttcctgcaggagcatttgagctaagagactggctggctggagggtaaattcatcagtactgctgagatcatcaccgtatatgcccctgaaggagtggagtacagtggttgagttggggcctctggagtcagagatacctgtatttatcccattttgttgacttccctgtctccagtaccctagaacagtgcctgccacatatcagacactcaggacatatttgtgaatgagtgaatcttagtgtactgggagattcttctaatcatcctgtggttaatatgaagatcattgtctgatttgtagtccctctccttactgaaacattagcggaggctttatttttatagtaaatggagtatttaggctttttttttattttattttgattttagtttttagtttttttgacattatttactttgcgggccgaaagcnn

SEQ ID NO: 594186 - DNA, 153 bp, Homo sapiens
  misc_feature (58)..(58): n is a, c, g, or t
aggtggaaagcgacagttcaggtggaggcatgagaaggcttgtgctagccctccaggntcccatactgtggagtttggaggggcaggtctggctttcctgggtcagcatagggcacccagtgtgtggggcacagtgtggacacccatgcacag

SEQ ID NO: 594187 - DNA, 697 bp, Homo sapiens
ttctttgcccatagcatggttcattgtccccagcgctaaggtgccttggcctataccttcagctgtgactgtgacatcatcattgaccgtggtctcttctgatctcagaagactggcagattctcagtgcatacggtcagtgatcttggagctccgactggacagttgaaggctcacatcaaggttcagttcatggtggtcagtggcgaccgattggtattgagacaaggcttgcatcaccattaaggtggcctgggtacagccatagccaccaaggtagtatctctgtacattgatcaaccgtgctacgctaggcgcatagtcacagtctattatccacagtaggcacaagagggcatagcatgtggcctactcgttgtagatactgctcaccagggtcctcccaccggttcttatctctggctgtggtcaagaatctgttaataataggccccttcagcttgaccatatggtccagagcatagccagcaatgtccacagtgtaggatctctgtaggttcatgtagttggcttcaagtaagtctcatgctttagtgatgctgcctggcagcctgctgacctgctcctcgcaaatatctttagcctcctgcagcaatatgagacacaaagcccgtgaggtccatgtctttctagttgctgttccgtaatccaccaatcatttcttggtgtatcccgg

SEQ ID NO: 594188 - DNA, 668 bp, Homo sapiens
ccagaacaactggtcttcgggcccgacgaacgacctcctatctttcccaggctctatacggattaatcactcagcttaataattcatccaagggtgcatcccattgaagtacctcgagatgaccgatcgctatgcctcggatcaatgacgtggaagaccaaatgttgcgtgacgacgcaggctgaacgccacgctcgcatgaacactgctcgaacagtctctcgcccttctacctttcggtgctggtcatccagcaggtggtccgacacatgcgcagcatctacaaccctcgaagtgcttgaatatcagcagacggaaatctctgcattctcgcttcctggagggtgtcccgcaacagttgccagtgtctgtcttgcagattggctacccaggtgttgcatcacgtacccctttctatcatcaacgggtacataaggagtcctggccttgtctgaggagacggatttacaccttcccatcttgctgaaaaggtcaaggccttcttgcgctgatccatctgcctttgtggctgcagcccctgtggctgctgccaccacagctgctccagctgcatgctgcagccccagtttaaggttgcaaccaaggaagacgctcggaggagtcggacgaggatatggatgtgtctctttacacacggaaagcaacca

SEQ ID NO: 594189 - DNA, 154 bp, Homo sapiens
tgctgccagtgaaacacgcccaaaacttagtggcacaaaactagacattgatgatactcttggatatagaattctctgctggatcatagaattcagacgggacatagtaaggatagtctgtctcttagcacaacgtctgggacctcagctaggg

SEQ ID NO: 594190 - DNA, 180 bp, Homo sapiens
agaggactcccggcacattgtgctggcatctggtgtgagcggaccactcccctcacattccagaggccatggactcacttttgtaacaaactcctacctaacactgatcaagtaaaaagcaaatgtgggagttttttttttttttttttttttttttttttttttttttttttttttttt

SEQ ID NO: 594191 - DNA, 273 bp, Homo sapiens
gtattttgagtggaattgcattgaatctatagatcaatttaaagaaaatcaacaattaacacttcttagtcttctaatccataagcatagtatatctgttcattatttggatagtctttaatttctctcaacaatgttttataaatttcagagtacaagtattacaattttctgttaaatttctccctaagtatttaatgttttggatactgttctttagaatttcaattgcaggtattcattgttagtatatacaaatacatttggtatttg

SEQ ID NO: 594192 - DNA, 708 bp, Homo sapiens
tataaaaaaacctggtttttatccagcccaaaccggggcaatctacctcgggggtttggccaaggtttaaaaaataaaaaccaaccaacaacaaaacaacagcgtggtagaagaaaaaggtgaagtataaagagggggtcgggcgtcgcggaaatcccgggggtttacattccagcgtttcggctcccgtggaggccggcgaggggaggggagtgcccctcccggccgtggtgggtgcgggggcggggcccctgcggggggagaggtctgccgcggggaagccagggccggtcttgggaagaggggaaaaaatgggcccattctgtccctccgcggagagaatcgaggaatgggcacacatgttgggcagttgggtgtggcagaaaaaggtgtgaggagaaagcgtggtgtatcagagtgaagagtggtgtgcatatttcacacgaggttgtggtgggaggacaagtctcgagaaattcacaaaaaagagaatatatactgtgggggttttccaggtgtgcacaccttgggggagggagagtgtctagattacccacgagaggcgtgaacagaggctgcggggtaaaggtctgcagaaccaccgagtgggaagaggctcgcaaatgaccacccggacaatgtgcataacgggtgactcaaataacaccggccgtggggggcccaaaagccccggggggaaaagtggaa

SEQ ID NO: 594193 - DNA, 188 bp, Homo sapiens
cgggcccctggccccttcccccccctttgccccccgtttgcagaccttgtccctttgccccggggtttcccttccccccccccagtttttggaaatttttttttttcctttgaagtcccctttttttttaaaatttttttttttgccccccaaccccaaaaaaattaaccggtggggggcggggccca

SEQ ID NO: 594194 - DNA, 102 bp, Homo sapiens
tcctccaacagatttaatcaataagtgcagggcacatctgtctgtcattatgttattatggatcctcatactgcacaatgcctgatgggagaagatgcgcca

SEQ ID NO: 594195 - DNA, 211 bp, Homo sapiens
  misc_feature (2)..(2): n is a, c, g, or t
angtgttgtgcttgagctacttgtgggcatctgggctgtgccactgactctctgacggcagctcgggacatggacacatctcgaggaagcagaagatgatgaagtcagtgttgacgacggctacgcatgtgtcccagcgggtcagctgcggagaacaaacccccagtcccaatgtcatggcgacagatcattcctgggacagccactatgc

SEQ ID NO: 594196 - DNA, 395 bp, Homo sapiens
  misc_feature (337)..(337): n is a, c, g, or t
cccgcgctgctctcataggccacgcccttctgatctggataccgtcctggacagagcctgccctcttttcctggctgcagccctcacgcactttctcccatgctgaatgcgggtgtgctgtcggtgccctgccctctgtcggccctgcttcctgccacgacgtgtcctcttccgattccttttctctcagacactgtaggtctctcctgccataatgctgttcccattccccacaacttgtcgtgacagcagaccacactgtgctcggcggatcactaagttccaatccagtgagcccatcgtccgcctagctcccccggacagacatgcttcctgntttgactctagaattccgccgcctccggtcccattgctccatccttctgtgttgggga

SEQ ID NO: 594197 - DNA, 210 bp, Homo sapiens
gtttaagccaagttatccaattatttatcaaagttttaacttggagaccctaaagaccattcgtcggttagcgccaacagctgatatcgcagcgctacggttattggggcggctataaggtctattggttaaaatggcgtggggtctttgattatgtccatgtcgatatgcgtattttaaagcataagccggaaatttttttggcgctca

SEQ ID NO: 594198 - DNA, 798 bp, Homo sapiens
  misc_feature (783)..(783): n is a, c, g, or t
  misc_feature (798)..(798): n is a, c, g, or t
gctgctggtatgtgtatctcgagagtaaaaactgtatacacagggaccttgctgcaagaaactgcctggtaggtgaaaataatgttctgaaaatcagtgactttggaatgtctcgtcaagaggatggtggagtgtattcatcttctggcttaaagcagattcccattaaatggacagcaccggaagctcttaattatgggagatacagttcagagagtgacgtgtggagctttggcatccttctctgggagaccttcagcttaggggtttgtccgtaccctggaatgacaaatcagcaagcaagagagcaagtagaaagaggataccggatgtcagctccccagcactgtccagaggatatttccaaaatcatgatgaagtgttgggattataaacctgaaaatcgccctaagttcagtgaacttcagaaagagctcactatcatcaagagaaaactcacatagtgacaggatggcgccaaactcagccttcaggactctgtcctccagcagagtaacattattgttctcattaacaatgaatttataccacattaccttcgacagtcttctaccattattttttattaactgggtgtcttaaaagtacgttccacttgtaaaaagtcaaaggcaaatttgttaaagaaataggcagtcctaccaagggctttcttagctaaccatagcaatcctaccatttcaggccattgcaaatagaaaagcacaggcttctaagtgtgtgaaggataaaagatctatcctatccctttcacaccttgtntctactttaggcacn

SEQ ID NO: 594199 - DNA, 367 bp, Homo sapiens
ttctagagttgatgtctgactaggagcatctcttcgtatttcaacgttcacttctcgatgatgaacaagacttcagaaatggccttgcggaattagatgccaacatagctagactccagaagtctataaggactggtcttctggagcaacatgaatccagcaagcaaaatatcatcaggtgcttcgtttttcacaaacactcgcaacttggctcatattgcaatgtgtatttttctcctcagtgcaaatgcatgttttcatgttcattcatgtgtgcacagtcaatcatcatggtcaccaagtcacatcacaatgtcattgttgcagcatcatattgcacacggggaatcctactagagatcgaacc

SEQ ID NO: 594200 - DNA, 369 bp, Homo sapiens
  misc_feature (74)..(74): n is a, c, g, or t
aattttttttcccccttgggggggcccaaaaaattttttcccgggattaggggggggggcccggaaagaaaaanccccggtttttccccccccgaagggggggtttgggggggattttttaacccctgggccgggggggggggcccgcttttttttttaaaaaaagggggttttttgccccaacctttcccttttttggggggggttttaccccccccagggggtttttgggggggggacccaaaggggggaatttttttggggcccccccctttttgggttggaatttggggtcttttttttttcccggcggggttccccccccttttttttttttgggttttccccccaacccctgggggtctttta

SEQ ID NO: 594201 - DNA, 316 bp, Homo sapiens
gaacatctccgaccttacctctactaaaaatgcaaaaattagccgggcatggtggtgtgtgcctatatcccagctactggtggaagctgaggcaggaaattgcttgaacctgggagacggaggttgcagtaagctgagatcgtgccactgcactccaatcagggcgactgagcgagactctgtctcaaaataaagtaaataaataaaaatgtctgcatgacccatatggttatgaagtttttttcctagactaaatgattgccgattatttatgggggctagaagatatttagctatcaatgtaaggcggagattg

SEQ ID NO: 594202 - DNA, 572 bp, Homo sapiens
  misc_feature (18)..(18): n is a, c, g, or t
ggagtatgcagcaatatnccacattactaaaaacatcaaagggcctgtaaaatagaactgtgaactctcaatagatagaggaaatatcaactatggtgcactcaaggacatttacattatgatgaccatggggtttatgaacatttataactatatttataatttccatattacatttctcatagtatggacaactttttgccactaactgaattctccaaatacacgtgaagtttcaaaaaagaagccgcaaatatgtagttctgaagatgttgaataatcattttacaaagcagttttctgaatggggattagttggtgattgtttgtaacaaatatgctaatgctttagaaatgtcagtatttttgtaattatttctacctccaaatatatatatattgtctttcactggataaatgtgtgtagatttttacatgtgccttatttgacaatgcttatgtctagtataagcatgtctcatttgaagttcttttttattatgttaaagaatgcagctgtatagattatatagctttcattttattgctatttgattctttgttcgtcccat

SEQ ID NO: 594203 - DNA, 262 bp, Homo sapiens
aaaaattttaacccccaaattccaatccccggttggagaatggccgttaaccttagccggggctttatttttcttcccaaactgccggagggcctccttaaaggtttttttttgggggaaaagctggtttcccttaaaccaagaagaaagggccgaagaaaagtgggcgcccttaaaaaccgagaaaaccgaaattaccacccgggactgctttttcttttcccgctggggaccgctaataaaaggggttttttttgctgga

SEQ ID NO: 594204 - DNA, 312 bp, Homo sapiens
gaactttgtgtagatgggatggagttttgctctttccccagtgctggagttatgtggtatgatttcagctctttgcattctccgcctctcctgggttccagcaattctcctgcctcagcctctcaagtagctgggattacaggtgcccgtcaccacaccaggcaaatttttgtctttgtagtagagttgcggtttccccatgttggccaggctggtcttgaactcctgacctcaggtgatctgcccgcctcggcctcccaaagtgctaggattataggtgtgagacaccatgcccagccacatatactatat

SEQ ID NO: 594205 - DNA, 315 bp, Homo sapiens
gttagaagctgcagaaacgcctgccagtgcagaacgctcctccagtgcaaactggtctggaaggcttggccatgtgtgccctggaaagttctaggaatctttttggtgttaggatagaacggcattcatgtattcagcaaaacacctaccaaaccatagttaacagagaaaactggttagagaataatgtaaaacaggagcgtttaacaaagttttccactagagaagcagtttggaagagtcaagtcaccctaagaggaaagctgggtatattcttgtaagagtagccttggaacctcctttctcttctctgtt

SEQ ID NO: 594206 - DNA, 400 bp, Homo sapiens
  misc_feature (22)..(22): n is a, c, g, or t
  misc_feature (24)..(26): n is a, c, g, or t
  misc_feature (245)..(245): n is a, c, g, or t
  misc_feature (300)..(301): n is a, c, g, or t
  misc_feature (397)..(397): n is a, c, g, or t
gaaaaaaaaaaaagaaaaaaanannnacacgcggcggcagaaaaacgaaaaccacgcaaacccctcactactcacaggtccatggcctttgattcactctgtattttggcctgaaacccatagtggtgctgcatttatatgaagcagtgaaggaagccctgactgatcttggagaggagtttcctgcaacacgccttttccccctggctgaaagacctcaccgaggattggacttgcgctgagtnttcgtaagaattggattgagatccggcgttcctccctgatcacgctgtgaacagnngggatgggccccaaccacacccaacgcccgcccccaccacccccccacaccccactcaccccccgccccaaagcccccccccccggagtagaaagnaac

SEQ ID NO: 594207 - DNA, 583 bp, Homo sapiens
  misc_feature (429)..(429): n is a, c, g, or t
aaaaaaaaaaaaaaaaaaaaatttgtgtgcgggccgcgccttcggcgccctctggaagaaacgttttttgaaaaccatatccggttgggcgcgcgcgcggggccccaagagggtttacagtggagaaatgtgtgggctcatatagccttggtgttctcctataggagagaatctccggggctaattgaacctatacggggcgcttgggagattctctctaccacaatatataaaacacacgcgccgcggggggagacaccaccagaggcgcgtgtctcttgggaaaaaatatctccaaagatggggaggtctcgagagaggggctcattatacgggggagattctatatctaaaacggggggagcgctcacaagcgcagagagcgcctctcgagatatatcttcaaatatctatagcgcccccccgggnctgtgggtggagaaccaacgacggctcaacacatacttcaagaacaaccaaaaaaacataacaccaaaacaactgcaagcaaacagcacaaaacataataagataacaacaccacaaaaccataacaacaaaatcaccccagaggaggacaggt

SEQ ID NO: 594208 - DNA, 92 bp, Homo sapiens
  misc_feature (87)..(87): n is a, c, g, or t
cactcagaacctgcatccacactacagccaaagaagagctgggcactgcagcctccgcacatcacccaaggaaccttacaaaatacnctttt

SEQ ID NO: 594209 - DNA, 181 bp, Homo sapiens
taatgttttttggtgcacaaggattttgtcacaaggagtccttggaagggggttggtgtaaatatcaggtctatcttgctttttttcatttgcttaaacactgtgagcgtttctggcggaacattgcgcccgtctctcagagtctactccatacccatctatgcctgtacccactataatg

SEQ ID NO: 594210 - DNA, 295 bp, Homo sapiens
ccagaagcagcaagactacaggtcacaatagggaggtttcaatacgggtatccagaggccacagaccaacgccaggagtccctgcttccagaagaattagaagatcagatgccaagatgggtggcagaagaatctaacagaggtagcacaaccataaacaaagaagcaagtcacacaagggacgtttggtagctgtggtgggtgtagccaaaggtgtaagagattcaggagctcccattcagctgatcccttttcaacagagcaggagcttgcctgagagcacgcaaaagcagtt

SEQ ID NO: 594211 - DNA, 374 bp, Homo sapiens
  misc_feature (216)..(216): n is a, c, g, or t
  misc_feature (244)..(244): n is a, c, g, or t
agatgtaccgtacacaacactagaggacgagacgagtcgtcttagtctaggttccttaagtcattgtattgccacaactaacctcctcggactcctggcctcactcatttacagccaaccacccaactatctataaagcctagccatggccatcccctctatgacgcgggcgcaggtgattataggcgtttcgcgtctaagacttaaaaagtgccnctagacccacgttgcttaccaacaaggngacaccatacacccctatatccccgatactagattatatatcgaacaccatcagccatactcagttcaaaccaatagccctggaccgtacgcctaaccgactaacattactgcaggccacctactcatgc

SEQ ID NO: 594212 - DNA, 968 bp, Homo sapiens
  misc_feature (8)..(8): n is a, c, g, or t
  misc_feature (72)..(72): n is a, c, g, or t
  misc_feature (260)..(260): n is a, c, g, or t
  misc_feature (558)..(558): n is a, c, g, or t
  misc_feature (582)..(582): n is a, c, g, or t
  misc_feature (586)..(586): n is a, c, g, or t
  misc_feature (686)..(686): n is a, c, g, or t
  misc_feature (726)..(726): n is a, c, g, or t
  misc_feature (728)..(728): n is a, c, g, or t
  misc_feature (787)..(787): n is a, c, g, or t
  misc_feature (854)..(854): n is a, c, g, or t
  misc_feature (875)..(875): n is a, c, g, or t
  misc_feature (889)..(889): n is a, c, g, or t
  misc_feature (891)..(891): n is a, c, g, or t
  misc_feature (901)..(901): n is a, c, g, or t
  misc_feature (908)..(908): n is a, c, g, or t
  misc_feature (955)..(955): n is a, c, g, or t
atatcttnaaatgcagaaattgaaatcctatcaggcagacagccccgctgccacaccctgggtcctgtgtantaaaagatcgacccctgacctactcggttatgtaatctatagattacagacattacgtatagaaaagcactgtgaaaatccctgtcctgttttgttctgatctaattacctgtgcatgcagcccccagtcacgtaccctctgcttcctcaatccatcaagaccctctcacgcggacccccttagagtngtaagcccttaagagggacaggaattgctcactcggagagcttggtttttggagacgtgagtatgcggatgcccccagctgaataaagcccttccttctacaactcggtgtctgaggggttctgtctgcagcccctcctgctgcagaagagcaagggagagagggatggagaaatagaaccagagggagagagagagacagcgatagagagagagagagagacagaaaaggggggaggagagagagaggggggaagagagagctccacagtatgagcgcgaggcggagggggaagtanagaaagggagagggtgagggagtngtgnagcgacaccgacagagccttggagagggaggctctgctcaggtagacagggcacctttcagcaggccggggtggggtggagggttcttgggccgggctanaacagggggtcagggcccccacccaggaaaaccaatggancnctgatacgtgttttttttcttggattggttggttgctttgggggtgcgtttcataaggnccttccttttgtttgcttctttctgtctccttagatgcggtgggccccgagatttgtagagtgtgcncgtgtgcctgtgcgtgagcgntggcgccgagcctntncacgggggcnactgggnatctctctcctgtcctccgactggagtgtacacgaagcggtggcatngggaacaggggga

SEQ ID NO: 594213 - DNA, 326 bp, Homo sapiens
  misc_feature (29)..(29): n is a, c, g, or t
  misc_feature (83)..(83): n is a, c, g, or t
  misc_feature (88)..(88): n is a, c, g, or t
  misc_feature (97)..(97): n is a, c, g, or t
  misc_feature (242)..(242): n is a, c, g, or t
  misc_feature (246)..(246): n is a, c, g, or t
  misc_feature (249)..(249): n is a, c, g, or t
  misc_feature (311)..(311): n is a, c, g, or t
ctgtgtgatcaatgaatggttcctcctgncctgaaatgatttcagcaaaatcacacaggcaggtgggcacgaggctggtgggnttggnagcctgagncctgggtacggaggggcccccatcctcctcttccatcttgggtgattttggcaccatccccagcaggccaaggtcagacattgccacaaacactaacctgctcatctactcagcagataaacatcagagtcagagcctgaagagncagncgntttcttcctcctttcatgacatcttaagtccttggcaaagagtgtggcccgaaaccagagcnccaggacagagcaaa

SEQ ID NO: 594214 - DNA, 198 bp, Homo sapiens
  misc_feature (183)..(183): n is a, c, g, or t
acggacgagtagttctctgatcagagcatatgaagcaacctctgttctcattactttatatatctcatctcataatacatacttactagaggatcagttccgatggtccctccgtacatcacagtgatatatttcgagactcttataaatggagtttgcctggatgatgttgaagttatgatnttactgggattcggg

SEQ ID NO: 594215 - DNA, 107 bp, Homo sapiens
ttctaaggtggggtgagctccccttacttcctggaggagtcaggttagtcttttaaactaggcattaaaaggaaagctggaattatttgtttccagatgtggttgag

SEQ ID NO: 594216 - DNA, 427 bp, Homo sapiens
  misc_feature (17)..(17): n is a, c, g, or t
  misc_feature (20)..(20): n is a, c, g, or t
aggagctaaaaaggaangtnttctgtattctgggcaagagaaatattgttaagtgttatgctactacccaagcatctacagttcactgtattcctatatttcgcagaatgattaaacgctttttgcagaatggaaaaactgtcttaattcatatgagctacggagaccctaatggccaaacatcttgaaaaggacaagttggagactcatatttcctgatttcaaaacatactacaaagctacagtcatcaaaacagtatggcatggcgttaacagtagccatagagaccaatggaatagaattgggggtccaaaacaaatgcatacatctatggccagttggtttttgacaaggaggccaagtttatttaatggagaaagaatagtctcttcaataaatgttgctgggaaacaggatttccttacc

SEQ ID NO: 594217 - DNA, 379 bp, Homo sapiens
agttgtggtttttgagatggatttagctcttgttgccccggctggatggcgcaatctcatctcactgcactccaccctgggtgagaaagcaagacactgtctctaaaagtaaataaatggggccaggcacggtggctcatgcctgtaattccagcactttgggaggccgaggtgggcagatcacttgaggttaggagttcaagaccagactggacaacatggtgaaaccccgtctctactaaaaatacaaaaaattagccgggtgtggtagcgagcacctgtagtcccagctacttgggaggctgaagcaggaagatcacttaagaccaggagtttcagactgcagtgagccattattgtgccactacatgccagcctg

SEQ ID NO: 594218 - DNA, 329 bp, Homo sapiens
  misc_feature (7)..(7): n is a, c, g, or t
  misc_feature (37)..(37): n is a, c, g, or t
  misc_feature (120)..(120): n is a, c, g, or t
  misc_feature (190)..(190): n is a, c, g, or t
  misc_feature (238)..(238): n is a, c, g, or t
  misc_feature (245)..(245): n is a, c, g, or t
  misc_feature (257)..(257): n is a, c, g, or t
  misc_feature (265)..(265): n is a, c, g, or t
  misc_feature (294)..(294): n is a, c, g, or t
gatgccnctagatgaggggttctggacatgtcacagnaacacccgttatccccatactagttattatcgatgccagggagcctggtcaagcggggcaatagcgggtgtccggactactanccagtgacatgagctggagtcgacctactcatggagctaattggaagccccaccggagcaatatcctccnttcaccttctctcaaaacttatgatcatcctgaagcggattcagctgnctatccnagtactcccttncccgagangcccagcccacgtagttatactcctagtnagccttgatctattcatccacacagaaaaaaaaaa

SEQ ID NO: 594219 - DNA, 175 bp, Homo sapiens
gtctataggatccccgatagcttaatagtgctaacaaactacaatgcaaaatgaggctattctgcagttcaaactgaaataccatcttattacaatttgatccccagtgtttgctctttttgaagtaaccgactctacatctctaaaaacgagtatggcgtgccacgcatggaaa

SEQ ID NO: 594220 - DNA, 467 bp, Homo sapiens
  misc_feature (7)..(7): n is a, c, g, or t
  misc_feature (40)..(40): n is a, c, g, or t
  misc_feature (97)..(97): n is a, c, g, or t
  misc_feature (119)..(119): n is a, c, g, or t
  misc_feature (453)..(453): n is a, c, g, or t
  misc_feature (455)..(455): n is a, c, g, or t
ccttggnaaatccttgggttggaaacccgaaccccctttnaaaattgccaaactttcccggccaaaaacttaggcttcccccggaaacgcaaagaancgccaaaaatgttggccaacanaagcaggaagattgattggaacgcgaagcttgaggctcccagctgcgggactactgcgccccacccaccctcatccggctgctcaagtgcaagcgtgacagcttccccaacttcctggcctgcaagcaggagcggcacgactgggactactgcgagcaccgcgactatgtgatgcgcatgaaggagtttgagcgggagcggaggctgctccagcggaagaagcggcgggagaagaaggcggcagatgtttgcaaaggccagggacccggggaagtggaccccaaggtggccctgttaggtgcaccccccaccctatggaccagtcaaataaaancntcaggcccctca

SEQ ID NO: 594221 - DNA, 733 bp, Homo sapiens
taaaaccccgtgtgctggggggggtgggggtgtaatactaagtggagaatgatatcatttaggggggaaggcgcttggtgaagtaggccttatttctctgggtcctttcgtacagggaggaatttgaagtagatagaaaccgaccgtggattacctccggtctgaactcagatcacgtaggactttaatcgttgaacaaacgaacctttaatagcggctgcaccatcgggatgctcctgactccaacatcgaggctcgtaacccctatggttgatatggactctagaataggatggcgctgttactccctagggtaactgggtcccgtgggctcaagttatgggactcaaatggagtatagtagtctcgcttggacgggtgaagtcttagcatgtacggctcggaggtggggttctgccccgaggtcgccccaaccgaaattttaaggcaggtagggaagttaaggaccgtgggggttcgtaaggatacggtggcattaataaattaaggcccatggagagtctccatcacaattgggagtggtaatgcccaggcactttaagggaggggccaaattcccgggttacacagttaaaaacaggttaaaccccgtgggcgttaatagaggcgccatatagggaacgtgattttcccctttgcagagaaggaaaggccggaaaagtttatagaggaagggcggcacaaaggggaacaagatgattttgacacagca

SEQ ID NO: 594222 - DNA, 894 bp, Homo sapiens
  misc_feature (247)..(247): n is a, c, g, or t
  misc_feature (264)..(264): n is a, c, g, or t
  misc_feature (312)..(312): n is a, c, g, or t
  misc_feature (333)..(333): n is a, c, g, or t
  misc_feature (339)..(339): n is a, c, g, or t
  misc_feature (347)..(348): n is a, c, g, or t
  misc_feature (362)..(362): n is a, c, g, or t
  misc_feature (387)..(387): n is a, c, g, or t
  misc_feature (397)..(397): n is a, c, g, or t
  misc_feature (408)..(408): n is a, c, g, or t
  misc_feature (411)..(411): n is a, c, g, or t
  misc_feature (426)..(426): n is a, c, g, or t
  misc_feature (451)..(451): n is a, c, g, or t
  misc_feature (456)..(456): n is a, c, g, or t
  misc_feature (459)..(459): n is a, c, g, or t
  misc_feature (467)..(467): n is a, c, g, or t
  misc_feature (474)..(475): n is a, c, g, or t
  misc_feature (506)..(506): n is a, c, g, or t
  misc_feature (740)..(740): n is a, c, g, or t
  misc_feature (759)..(759): n is a, c, g, or t
  misc_feature (814)..(814): n is a, c, g, or t
  misc_feature (859)..(859): n is a, c, g, or t
cgccgaggcccgggtcccccaggccgtctcgccgccggcatggcggaccctaaatacgcggaggcttccgcggcatagccaggagagtgagaccagatgtagtatgaaactagacgacctacctgtaggatgatcaagcggagttcgatgcggaggagctgacaagcacaagtgtggaacaatcattgtcaatcctaatgctgcctatgagaagttcaaggacaagagagtggggacaaagggactngatttctcagatcgtantggaaaaaccaagaggacaggatatgaatctggagaatatgagatgcntggagagggtctgggagtganggaganaccccagnnaaagtaccagcgcntactgcatgaggtccaagagctganaactgaagtngaaaaaatcangangacagtgaaggagtnagccacagaggagaagctgagcccngtgtngcnggctaaanagctggnngccctgaagcagcagctggttgcttcccacntggagaagctgctgggaccagatgctgcaatcaaccttaccgaccccgatggcgccctggctaagcgcctactactgcagctggaagcaacaaagaacagcaaagggggatcagggggaaaaaccactgggaccccccagatagcagccttgtcacttatgaactacattctcggcctgagcaggacaagttctctcaagctgccaaagtcgcagaacttgaaaagcgcctganagagctggagacagctgtncgttgtgatcaggatgctcagaatcccctttctgcaggtctacagggagcctgtntcatggagactgtagagctgttgcaagcaaaggtgagcgctctanaccttgcagttttggatcaagtggaggctcggcta

SEQ ID NO: 594223 - DNA, 298 bp, Homo sapiens
aaaaccaacccctcagatactggaaactttggttttcccatccaggaacacaccgatctgggcatcaaatctgacccaacccttggtacccacggcctggacttctatgtggcgctggctaggccaggtctcagcatcgcagacaagaaccgcaggacaggctgcattgggcccaaacacagaatcagcaaagaggaggccatccgctcgttccagccgaagcatgatgggatcatcccccctggcaaataaattcccgcttctatccaaaagagcaataaaaacttttcagtgaaaa

SEQ ID NO: 594224 - DNA, 121 bp, Homo sapiens
ggcccctgggggggggttccccccccttgttttttggggggggggcccccccccccccttgggtcccggggtttgggtttcccccctttgccccggtaaaccctttttttcgcgggttgta

SEQ ID NO: 594225 - DNA, 243 bp, Homo sapiens
gaggaggcatatattgatagagcatgtctggaatcttctactttgtaattgttggtcacatgataatccagtttacgaaatggagtttttgccagctgggcaagtgcagaatccaaagacgaccatcgtcatctgaaccagttcatagctcatgcgtgctctcgacctcgtgtatgagaacatgtggatgtcgaacaacatgtacttgaaaactgtggacaagtgcaccgagtggttagtgtc

SEQ ID NO: 594226 - DNA, 1739 bp, Homo sapiens
tagtagagacggggtttcaccgtgttagccaggatggtctcaaactcctgacctcaggtgatccacctacctcggcctcccaaagtgttgggattacaggcgtgagctactgcgcccagccaactatacatttttgaagccctcctgatcacttccttggttactctcatctttgtttgaagttcaatatattactttttttttttttttttttttttttggagacagagtctcactctgtcccccaggttggagtgcagtgagccatgattgtgccactgcacgccagcctgggcaacagagtgagcccctgtttcaggaaaagaaactgagagggtaggagtaaaggaatttcctaagctactgccatgtgtcaggcccactgctaggcaatttatatcatttagctcttgaatgatcctatagctttgccagtgtgtattatctcagcttacaggtgagggcattgatgcctgtcactatgtttaagccttggtcatgctggcacagcctgagcttcccaccgcgaaccagaacagcggtggggattggctgtggaccctgacccttacctgggctggtcagcttgagccagagtctcaaagtgaagctcatggtctggcttctccaggatcatcaagtgttgtctcttcaccagaagcaaatgcccatcaattgtgtccacctggactgtctggggggttagggtggcttggcagttgagcgctgggtcaagcctgcagtatcctcgaactcctacaagaagcctgtggtcaggcccagcctctgacacctccaccgtcagtcaggatggaagtcccctgggtgttgagcagacacagggaggcagggagatgagctggatctggctgggtccctgcttagtcacaggctctggcaacctctaatgaaacatcccttcccagttggctgttttccccaaatatagacacgtgctgtcactagaggggagcttcccagcccaacagcttctggaccatgctgggctgacttggggagagagccacccacgaacccctggtttgaaggccagactaggtggtcatatggaaggtgacagaccttccccctggtgggtgtactgtgtgcagggacaaagcctgtgctagcaccctgctgtcttgacagtaagtgtctttgggctgggcatggtggcttatgcctgtaatcccagcactttgggaggccgaggcggacagatcacccgaggtcgggagttccttctgccttggacacccaaaatgcagagattacaggtgtgagctaccacaccccaccaagggtctcttaagaagagctggccgggtgcggtggctcacgcctgtaatcctagcactttggtaggccgaggcgggcggatcacgaggtcaggagattgagaccatcctggctaacacggtgaaaacccatctctactaaaaatacaaaaaattagccgggtgtggtggcgggcgcctgtagtcccagctactcaggaggctgaggcaggagaatggcatgaacccgggaggcggaggttgcagtgagcagagatcgcaccactgcactccagcctgggcaacagagtgggactccgtctcaaaaaaaaaaaaaaaaaaaagagctatactgtgttgaaagagtcctgtataaaggaggatgtcttaaatttgccattttgactctgttttgaacaggtcaccaggaaaatgagacttggtagcctggcgaggtggctc

SEQ ID NO: 594227 - DNA, 350 bp, Homo sapiens
  misc_feature (247)..(247): n is a, c, g, or t
  misc_feature (262)..(262): n is a, c, g, or t
  misc_feature (265)..(265): n is a, c, g, or t
  misc_feature (270)..(270): n is a, c, g, or t
  misc_feature (280)..(280): n is a, c, g, or t
  misc_feature (287)..(287): n is a, c, g, or t
  misc_feature (293)..(293): n is a, c, g, or t
  misc_feature (304)..(304): n is a, c, g, or t
  misc_feature (311)..(311): n is a, c, g, or t
gaagaaccaaggtttaaattactgaccctagtgaaattttctggcccagcttataagggctgctgtgaaccactcataatcacccttctgccttaacagaagatttataaaacacaacaatcagctacaaacagggcaaagaaaatgtcgatgggaaatcataactgaaagttaattatacaaggttcaaatgctggctccgtgggctggaaatcatgatctgccacgtgcatgtccgtcactggtnggccagtggccctgncgnccagnctgctactgngctgtgngcccangccttggcgcnatttagnacactaccagagtctgtggtaacttaatttgcaagtaat

SEQ ID NO: 594228 - DNA, 357 bp, Homo sapiens
gggtcaggtcgtccaggccaccgaccccgatgccgccgcctcctgctcctttcggctgtccgccaccgccgctgcctccccggctttcccgccggctctcccccagctggcccggacctattccgggggcctccgaccccttccttcagtctccgctggcgtctgcatgcccctgagcctccgctgtgaggtctcccgctggttggacggctggcgcttggcgccttctaccctggttgccacacacctgtactgctgtctccttccgccagcccgcagttgtctggctccgttccccgggagacctgaccgcctgcgcgagctggacgcagggcactctggactcccctggctccg

SEQ ID NO: 594229 - DNA, 417 bp, Homo sapiens
gactcttttcacactcagctggatatccttgtgtaggtagggtactgtcatttacagtggccctgtcaggaattctgggcttggatcaaaaagccaggaaggacattttatgcctctgtcagttccacataggagtctgtaggctgcaaacatccttcctgtcctgatgagaattcatcatctttatgaacctgtctttgactcttccagcctggtcctctgttgatgctttctctcttgataccatgtttactcctttcctttgtccctctctctgccacttcctgtgcttggtaaacaactttgtacctgggattgagttgtctgaaagagagattgactctaccacttcattcactcagtgccctgggaggtctgccacatgccaggtaccagtatggggagcacagcacagca

SEQ ID NO: 594230 - DNA, 886 bp, Homo sapiens
  misc_feature (242)..(242): n is a, c, g, or t
  misc_feature (333)..(333): n is a, c, g, or t
  misc_feature (359)..(359): n is a, c, g, or t
  misc_feature (368)..(368): n is a, c, g, or t
ccaacagagggggaaacccctctccaattggataacccaatttgcccggcgttgtggcaaaagcccgtatgccccgctaactccggaggctaaggcgggaggaaatgcctgaactctcgggaagtggaggttgctcgtgaatcagagtcgcacccctgcaactctatgcccgggccaatacacgcccactgcccgctccacaagaaaagaaaaaaaaaagaaaaagagggttacagatcatngcacatggaaaatattcccagcagtaaccacttccattaatgtgatctacagcttttaaaaaggagcatctcagaataagatggtggtacnatttgcttattgagaaaggaaaaaanaaaacacangagtatattacaaagggaaaagaaggaatgtgatttctcatgattgaaagcttgatttagattgcatacagcttttgctacccaagaccaagaggctctggcaagacagggtggttttccgaatgccagactgaggtgccttatgaaggcagctgccgatggttccagatgtagagagataggtgatgcaggagggaaagctggattggaaaagggagagttttgtagacgggctacgctcattgtgcctttgaaagagcagagccggcagcctctagtcatcatttggatatacaggactagagcatgaatctgatgtagagctacagaatgaagagcaacagcagctgtttaaataccaagaaagtgtgtagaatgaaattggacaagccaagcatggtggtttcatgcctttagtcctagctacttcggaggctgaggtgggggaattacttgagctcagcagtttgagttcagcctgggccagatggtgagaccctgtatcttaaaaaaaaaaa

SEQ ID NO: 594231 - DNA, 806 bp, Homo sapiens
  misc_feature (162)..(162): n is a, c, g, or t
  misc_feature (253)..(253): n is a, c, g, or t
  misc_feature (279)..(279): n is a, c, g, or t
  misc_feature (288)..(288): n is a, c, g, or t
tgtttccctttgtctggagagtatattgttgaagaggatagctattagaaggattatggatgcggagcttgcggtgagcagagattgtgccactgcactctggcctgggcaacagagcgagactcggtctcaaaaaaaagaaaaagagggttacagatcatngcacatggaaaatattcccagcagtaaccacttccattaatgtgatctacagcttttaaaaaggagcatctcagaataagatggtggtacnatttgcttattgagaaaggaaaaaanaaaacacangagtatattacaaagggaaaagaaggaatgtgatttctcatgattgaaagcttgatttagattgcatacagcttttgctacccaagaccaagaggctctggcaagacagggtggttttccgaatgccagactgaggtgccttatgaaggcagctgccgatggttccagatgtagagagataggtgatgcaggagggaaagctggattggaaaagggagagttttgtagacgggctacgctcattgtgcctttgaaagagcagagccggcagcctctagtcatcatttggatatacaggactagagcatgaatctgatgtagagctacagaatgaagagcaacagcagctgtttaaataccaagaaagtgtgtagaatgaaattggacaagccaagcatggtggtttcatgcctttagtcctagctacttcggaggctgaggtgggggaattacttgagctcagcagtttgagttcagcctgggccagatggtgagaccctgtatcttaaaaaaaaaaa

SEQ ID NO: 594232 - DNA, 609 bp, Homo sapiens
ggtggccttgtgcaggaattgaagaagtgcaggaggatgccacacagagatgggagagggagcgaaaggagcaaaggccctaactttcccgttaattgatgtctccttccatctttagtccatctccagacgaatgtacatgttatcctccccgtttgaagatgaagacactgaggctcagcaaagatcaaacgcctttcccaagagcgtcacagctacgtgcctgtacggtagccatgtaagctagcaagaagacccttaccagacactgcatgcgtggtgccttgagtcttggacttcccagcctcctgaactggaccactggtgtcatggcacgagatgaaccatcaccttggatgacctgagttcctccttaatttgcattcactgaatatccgtgaatgggcgactccactcgtcttcctcttgtgtttatttatgtatctcatcaccgtattggggaacttagagatgattattctgatcctcagtggatcaccaggctccaagcgtccaactgtatttccttctgagtcacctcgctttcatggacgtctgctactcatctatcactgtcccccagatgctggcagctggtgctggagcatg

SEQ ID NO: 594233 - DNA, 240 bp, Homo sapiens
  misc_feature (184)..(184): n is a, c, g, or t
tggaatttaagaattgaatttaattgggaaaatccaacaatgaccttattttagtagaaatccattaaaggatttttaaattatcattagtcacctccacaaagacaataatactgcttgtgaaagaacgaggggaaaaaaaactgattatatttatctacaatttccctatatttgtaaaatntaatctatatatttttactaacttataatgagaaaaggaaatgatgcccgtcgacg

SEQ ID NO: 594234 - DNA, 585 bp, Homo sapiens
gagcggccccgaccccttttctatttctgaacaggcatgttccaggcagctcacccgactccttagattactatggaatcggtagggtcctgaccgctggggaagcaggaaagcgtatcctgggaagaaaggcttggcttggactccggagaagaatactacatcgagacctgctggggaatgttattttattttattattttctttggtcttggttgtactgcagggcaggaagaagaggttgtagtaggcccggtcgaacttgtggcagcctgaaggccccctacaggcggcagccgcgggcagccccgcagccggggacctggtgcagactaccgcggacgctgtcagggaagcgcaggcggccaataggaacccgggagacggtacgctgctgctagaggcggacagtagtcaggccagtcacaaaccgcagactagcccgcagcacccactccgcgggaggtcccccagagcattggaagtctcgacagtctggctgtggccatgggacgatacagtagtggagcctgcccccttgtaagccaagcttctgatgcccacttcatggcccagcagggaaat

SEQ ID NO: 594235 - DNA, 439 bp, Homo sapiens
gccattacaaggggaatccatttcctccctcactcctggcttccattgccttcccccaggccccagaccctgagttccagaatccctctgaccacatcctcttgtgctcaggagggcagaataactgcagcctttccctgtgccctgccaggcatggtcccgaggacccccatctcagaaccacatcatccagggcatgcaagctctggccttggacccacccccaatcagaagggactgatggccctgatcacacgaactccaccacatctgtgaccagacgttcatctccatgagcatcgcatgaccctgcaagactgtccaaatagagcaagaagtgacatgttactctatatggggacacagcatggactggacagaacactgacaggggatccagagtgtagccttgcacaagatcactgaggagatgtggtat

SEQ ID NO: 594236 - DNA, 124 bp, Homo sapiens
  misc_feature (36)..(36): n is a, c, g, or t
  misc_feature (38)..(38): n is a, c, g, or t
aacgaagccaacacagggcaagtttgcatgcttgcncnacggggcccccgcttccggttcacccccccgacccctgcttcccctccttccgagggccgccagaggctgggctgacccgaagagg

SEQ ID NO: 594237 - DNA, 305 bp, Homo sapiens
  misc_feature (74)..(74): n is a, c, g, or t
gttcgggcggcagagctccaccggtgagggcgacgaggccagtcctttattataagcccctactggtactatantatggggtgggggggcgctactacaaaaattttcttttctttttggttttgcttattgtgtacttagctatagataattgttgagtacaaagcctacggggcatataaatgggatagttaactgatcctgggtggtgatgtgctttttacggggggggggcgacatcttttaatccaacatctactactgggtcttgcgcttcctttttcttgttcttaaattctgggtgg

SEQ ID NO: 594238 - DNA, 212 bp, Homo sapiens
acgtgttctttagatgcttaccctaaaacagttccgttgaatttcaccctgacactaacaaacaatttatctacagaatagaggaagcagtcaaatatgcatttgtctcaggtgagcagaggtatgacttctggttctatccttggtcccgttcttctgaagataaatggtttgttatggtcagggtgaaattcaacggaactgtaaaaggg

SEQ ID NO: 594239 - DNA, 399 bp, Homo sapiens
  misc_feature (1)..(1): n is a, c, g, or t
  misc_feature (57)..(57): n is a, c, g, or t
  misc_feature (231)..(231): n is a, c, g, or t
  misc_feature (346)..(346): n is a, c, g, or t
naatctcggaacaaactgtgcatcacattccataatattcccttgtcaattatatanaaagtttaattaccaagcctgcttatatattgctccctctgcttctcatcctaatcattaagctcgagagcttctgtaaactaagaattactctatctaggctcagcagaaatacacagaatacttatatatgaaagcctgttgcaaagagtagttaataagtacacagaaatntttgactatatgagaacacatctctcactcagaaaggcacagtggagagtattatatttagatataatctagccacatgtgtgggatatagaagagtcattataattatatgtcncatctctcctccctgtggccaactttctctatctctcgtgccgtactcctaca

SEQ ID NO: 594240 - DNA, 88 bp, Homo sapiens
  misc_feature (40)..(40): n is a, c, g, or t
  misc_feature (64)..(64): n is a, c, g, or t
ggtgctgtttcccctttgccttccgccatgagtgtaagtntcctgaggtctcccagtcatactnctggttaagcctgcggaacggctc

SEQ ID NO: 594241 - DNA, 258 bp, Homo sapiens
tctagaggatcccggtttgaccaatcaggcaaaagcatgcaactttgaactgcatggaggacctgcacaaaacggctacaacgcggtcccagtctagaggcataagtattaaggggctaggtctactactcaataaggtactgtaacactaattgcagtgccccctggttgcatctaggtcttttcttctttgtattagagtttcatatttctcgttgacaaccttgtttcttcttttcatctgatgggacgaagatg

SEQ ID NO: 594242 - DNA, 680 bp, Homo sapiens
  misc_feature (449)..(449): n is a, c, g, or t
ctgatacgttcagcacctttcagacggacccggcctgacgcatccggtggaaggtgccatgcgaatgtcacgattcaggtcaagcttccggagctggggagatgcaggtgtgatctagaacagggctcacagcctcggaaacctgctctcgccgccggcccccgaagaaaatagacgcccattcaccggagagatggggactgaggccgatgatcatgcatgggagaccatgatgtcagggactggatggactggagtgtcaggcaggcccatgaggaccatgactggccccgatcaccaggacatctgaaaccaagaaaccaatggaacacaaaagaacccacaagaggcaacgaccaaggcagccccaatccggggggaacaggaggaccacaaggaagagaggaatcaggatggacaggagacacaacaagtacactggagagcanaattgaaggacatcatgaagaggaagggcattcacattcattactataggagcattaggacgcagataaacacaaaataccagggatgggcgcataacaatacatagaaaggacgacaagagagcaattgggaatcacaatcaaccaaacaagagggaccacgtgaaacacatgtgaaacgcaccatggaaaccccctgaggagataggaaacaggaggataacaaaacca

SEQ ID NO: 594243 - DNA, 287 bp, Homo sapiens
gttggttaaaggtgttgatgggaaaaacctggcgggaggaaatatgtttcactttgctgaggtgcaggtggaggaggctattatacttagtgcatataacagtgaagaatgttgggcagggcagagtggtcagctgaatggcagtgattccaggtctcagttaatgcccacaaagttctgaactttgaacatagataccctcactgcaatacatgtctctctttctctctctctctttctttctctttttttactatacttttggagaaaccgttttgggacgcagc

SEQ ID NO: 594244 - DNA, 207 bp, Homo sapiens
gtgtcatcttacttctgtgcttagtgcaatacttcatcaatccagcagtagcattacagtatttccagcacatcatgaacatatttattatcagtgtctaaattcttgcctaaagtcacaagacttccttgatactataaaacatagctatatattgggtttcggaaatacatcaagatgctaagctagaagtgattgctccccgct

SEQ ID NO: 594245 - DNA, 287 bp, Homo sapiens
ccccggtagaggccccgctgcctcctgcgacaggatgtgacgtaccgaccctgcattggaagttgggggccaccctcgattggaggcttggtgcctgtcatctgggtttcggaccaggtcctgcgggtcactggctatctggccgctggttctggatatggtaccgcagtccaggagcacgaggatgcctcggtctgccgagtcgtgactgtgctgcccctggcgccagttcttcagagtctcgtatacggccaggtcgatgcccgcatagggggggggatggagca

SEQ ID NO: 594246 - DNA, 264 bp, Homo sapiens
ttagacgatcccttattactggcattggatggggtgagtttggtcactgagttcctgtcctttctgcctgtgactagagataggcatgatgtaaaaacaccaggatctgctgcttagcaaccagtaaaataccgtatatctggataggcagtaacacagtacttcattcatttctctttcagtgtgatgaagagaaaaggcttttttgcttgagaaacagaaaagccccccttctctagaaaagccatatgtgatcattatgga

SEQ ID NO: 594247 - DNA, 201 bp, Homo sapiens
atcaacgtgtgttctggggtcgtgccacgtgctaactccagtctgtgtatgcaaaaatgtaaacttgtgccctgtgactgttgttcctttgttctgtagccttcgtggcagttccgtgggactggtggcctgtgtggtcgtgttactgggggcgtcctgtagtggaacctcgcgacatcaagggtttcgaaagccgctgtg

SEQ ID NO: 594248 - DNA, 151 bp, Homo sapiens
atgatcaatcactcgcaatgacaggccaggcaatccacctggttatgatagcttcttatcttctgctaaaaggtcagtacattctttggtgctcatgactgtaccagacacctatgagcaaccattagtaagattacactttaatcatggc

SEQ ID NO: 594249 - DNA, 481 bp, Homo sapiens
  misc_feature (250)..(250): n is a, c, g, or t
gttgatagtctacctgaaactaagccattctgagtcatatggatgtaccagaagtactctgttttaacacaaatgtatgcaggtacattttaaacacccagaactggaaaccagaaacaccatttttggtacactggcaaaggatcagctttctaccatggaatgcaaaagtcttgtggagatggaaacaccagatgcacatattccgtattctaagggcctttcatgttgacagagagaggggatcagngactgggggacttaactaacaggctagagattaatgcttcctatttgatgcggaattctatattctgaaattctagaagaaaatttgtgaggccacgccccctttgagaacaaaggcttttatgagaataggggagaatgaaacgattcgaagcaaaaaagcaaacaccaccaatcaacccccaggcaggaagctactataagggatcataaatccaggtgcccaggatgt

SEQ ID NO: 594250 - DNA, 247 bp, Homo sapiens
ggaccattacgctcaggatcgcgatgcccaatcaaggtgcggtggaccactcggtacaattcgcctggtattaccctcagggaggataccctggggtcgagtagcctcagttgacttcgggattctcagcacgactggcgagaacgcctcgggcgggaatactcggaagcgatcctagtctaatgtctctagagtggagatgctagccggtcaattacctgtcatcatattctatggcggaggattc

SEQ ID NO: 594251 - DNA, 212 bp, Homo sapiens
taccccccccccccctttttcattttttttggggggggtgggggtttttaggcttcctttttttttttgggggtggggggccccccctatggggttgtttgtaaccccacccctcaaagggcctgtccatccctaggacccctgggttgtcccggcccgttttttatttgggggggcccttttttaaaaataaccaagtgcttttcccccca

SEQ ID NO: 594252 - DNA, 304 bp, Homo sapiens
  misc_feature (104)..(104): n is a, c, g, or t
  misc_feature (121)..(121): n is a, c, g, or t
  misc_feature (126)..(126): n is a, c, g, or t
  misc_feature (233)..(233): n is a, c, g, or t
tgaagataagataaagcactttatgagtatttgttggataaataaaagtaaactaaatggaatttcaaagataattaaagaatggggtacaagtaacatttgangcaataatggctaaganttttnatgaattatgaaagaaaccaattagaaatattctacagcctacccataccctaggtatttcagtagtttgtttttgtttttgttttgagatgtagtctcgctctgtngctcactctggagttcagtggcccgatcttggctcactgcagcctccgtctcctaaggtcaagtggtcttt

SEQ ID NO: 594253 - DNA, 211 bp, Homo sapiens
ccgtagtactctcatactacgcttagattccatctctatgtgacaaagtgacatcaacttgggaagaggccgcacatgggcatggtcctgggaagggctcacaccgacgacatggacttgagaagggactgagggccccactggtagtcagtagctgtatgggcagcacgggatatgttcagggcgccacatacgggtaccgacgctcgaa

SEQ ID NO: 594254 - DNA, 921 bp, Homo sapiens
  misc_feature (364)..(364): n is a, c, g, or t
ggagagaactagtctcgattttttttcttattattgttatttttatttttaaacaagggtttattatccatttttccctttataaaaccaccacccaacaccggggaaattattgggagggggtcccaacctaagggccgggacttctgaaatctaactccccatatgtccctccattttggtgaactatagtgttggcggcgcgatcggttcatgtcaaacatcgggttgttcccctaattgggtatctgcgcaaaaagtgagcgacctaatggcacacagctctattggtcggccacacctcacagagaggtgtctcgacttcgcgccgcggtcttgtgcaatgacaccaaacatgttgtcncccccgacatcacaaggggccgcttttgacactctcacagaacagacggggcgctcggcaaatctatggtgtccgagccgcggccaaacatcgcttcgtcacgtgagccggcttcgtcgcgcaacgaacgttcctatctcgcgctggcgcaacggcacccacttacgcgggaactagtgagcaacacacaacacacagtactcgcgcacacctgccgccactctcacaccaggcgcacatctcgacgaggcgctaccaggtgccggcacctcgccagcaacaacgccgtactccccgtgcccagacaagcgggcacaacgacgaagcccaactcagcgccatcaacgtaaccaccaacaaaacagcgcccaagttacctaacacaccaggcgccccgacaccacccccgctccactacacaacgtctactgacccaaagggctaccacctctacacccacaagcaacggaccaccacacaacggcagcgatacacaaccggctcaagaaccaacttctgcgacctactaaccgcctccccaccgcagacaactaact

SEQ ID NO: 594255 - DNA, 107 bp, Homo sapiens
tactttcacagggacactattcacaatagaaaagacatagaatcaacctaaatgcccatcaatggtagactggattttttttaatgtgatacatatacaccatggaa

SEQ ID NO: 594256 - DNA, 342 bp, Homo sapiens
gctcactctagaggattccgtgatgttatccccaacacttcaggaggcaaggcaggcagatcatctgaggtcgggagatcgagacccacctgaccaacatggagaaaacccgtgtctactacaaaattagccaggcgtggtggcgcatgcctgtaatcccagctactcagaaaggctgaggcaggagaatcacctgaacccgggaggcagaggttgcagtgagctgagatcgcaccatttcactccagcctgggcaacaagagaaactccatcgcaaaaaaaaaaagggttgctttccttatagagaaaaattaggttaaccggttggtgcatggccggccc

SEQ ID NO: 594257 - DNA, 362 bp, Homo sapiens
  misc_feature (10)..(10): n is a, c, g, or t
  misc_feature (354)..(354): n is a, c, g, or t
agagaacttntcgaacacttcttgttgctaatgtaaattagtacaaccactatggagaacagtttggaggttcctcaaaaagctaaaaatagagctaccatatgatagtaaccctactgctaagaatatatccaaaagaaaggaaatcagtaaatcaaagctatatctgcactcccatgtttattgtagcactattcacaatagccaagatttggaggccacctaagtgttcaccaaacaaatgaatgggataaagaaaatgtgggtacgtatatggcaatgggagtacttgttccagccgttaaaaagattgagatccccagccccagttaggggttttattaggatggaaantccccttt

SEQ ID NO: 594258 - DNA, 840 bp, Homo sapiens
gggagcctgccagccctggtgtgcctttacatgcctgaagctggaagcctcagtgtgcctggagcagcctcaaatgcagaatgcctgagaacaccatgtgaatgtcatgcactgtgcttaagcttggataacacagtggtgtgtgtgcagactgtcttggaagccatgtggccccatatgcctgtgtgaccatgagcttcactcttggagctggaaatgggcactggtgaacttggatgtttggcttgtagttcttggctgtgtgacccatgctgtgggccttgtgatgccctcacaaattccttgaagtatggacgcgattcacttgagaccaattgacgatgtgcattagaggtgatgcgagcatagtggaacacttggaagacacccccatgtggacttagccatggtcgtggcttggcaggtgatacagactttaccctgaaaaaaaccgcttggttcaattcgcacgacgcggatatcccttcgggctcccaggacctgtggcacaacggacacagaacacactttttgtcttccaacatcgcgcatcgcacacgggcgaaacgggcaagtttcccataaatgagttgggtaaagtagcaagaattagaaccaattcaggactagttcgggaccactcgttagcgagttgctgtggcattggcatacccctggtgaatgtgctcttacaattcccaacaaaaacatagcaccaacaggtggggcaacgaagttgcacccatattataaagggcacccctttgggaaggacgtatacattccccagaggaattccaagatagggcccctggtgcaaccgaaccgtgcggctcgacc

SEQ ID NO: 594259 - DNA, 440 bp, Homo sapiens
caaaaaataaagacaaaatagggttggagaaaggagatttaggaaaagtgatcaggtggccaaagtgctgtcactaaacagggactggctctgagaattcaaacctttcaaaggggcaagacaaagaattatgcagagataccctgggtagtatactttagaggtggtagagaaagttgaaaacattaagaggaagcaaatcatgctgagtggtgacccagtgtggcacatcctaaatattgtttcttaactttgctcttcttaaaaccagccattggtactgaccatcatctcttcatcaatggcatcaagtccaatgtacactcctgggtcctgccaagcagtgtagcaattacttctccaaagagcctggttttaatcaacattttggatgggtctcactaatactttagatttaatgcacttttctaagattaaaa

SEQ ID NO: 594260 - DNA, 1195 bp, Homo sapiens
  misc_feature (216)..(216): n is a, c, g, or t
agcggaacgcctcaacgccgcgaacgcgccgggccaactgcacggaagggtctgtgcctcatgcgagaccatgggtaaccagtggttcagtagaaagttactagcaccagtggccactccgtaaaggacagcgtctagagagaaagccagtggtacttccatgcatcttacaaacgaacctgcagagaaacgagcagcagaactttagcatgtaantaaagctgagattatttcattccggcctcagaagagaccaagatttccagcaatggcgtttgacgtgaccctgcgctgtcgtctcgtgggatatgacctagtggcatggtcttcacgatctttttaccttggcaacgaaatgggcacacacgagatcaccagcgtgtagttcacgtggccttctcgtggaaaccgaccgcagtatgccaaagtggccatacatggggacgaacttgtgaaccatacataccacacacctgagaactacaggaacaagcaggtctgctgcgcaccgtggcgcagttaaacaatggcgtaaatacgaagtgggaactgggcgtgcacgtagcagggtacagacaccgtaaatggtgcccacaaaggttgggggccgaaagcaagtgggcactatttaccgaagccagtacgagtactaccacgaaggggaaccggcataaaaatttcagctaacaaaacgaatggttgagatagaacgcaaatcttcgttcgatagttcattggctcgaacagcgtgatcgcgcttttagctttgtgcgcgtagagatgtcgtgtctttggcgagattcgcagagaagacctagggattacgtagagcgggacgggattcaccgtaagcattttttgcggtcgtaattgggactgtaggggaacacctaaaaggaaaggttgccccaaattggcgacgccttaggttggggaatcgattgtaaattagcatccaaggtcgaataggatttgaggcgttaccatccagaaaactttaacccccacgggctaatggggccgttggtggtacacacacttgtggcgacttaccttggctcccacacatttcgaacagcactcaagtacgttaacacaattaaacataatcctcaatggtatttggcccaaaactaattttggtcccctgggtatgcgttaactaaactagttgaacttgtggactatatgcaaa

SEQ ID NO: 594261 - DNA, 278 bp, Homo sapiens
cctctttccatcgattaatgtcatgacagtatgactattgtgttatcaccgtgtcatcttcactgtgatcctagcatacgaacgtataggaatccacctgtctccatacagtaaagatgtcgtacaagacaattataattccttcctgtctacggcagtcggacctcctggctctctgctgtacatccgtgcatccatcatgtccatttcagagacgggaagatcttcttcaggaaagacacacaaaggtaacttgtgcagagccgtagggcgaataa

SEQ ID NO: 594262 - DNA, 1209 bp, Homo sapiens
tataaaggggggggaaaaaggaaggggggagagagagaggttggtggttaaaaaaaaaaaatataacatatattttttaaaagggacgcatcatttatattttttttataaaaaaaaaccaattaataaaatatccacattttgtgtagccgagaatggaggaaactaccagaaatgtatcatatatctcacacgggcacaggggtgtgtgggggcgccaacgcgcgcgggataactccacaaacactattgagaagaggagccagagggtgggcgaaaaataacctgtgagaggcgcagtggaatatacaaaaaaccacacctgtgggagaacacaagggaggagaaacccccggggcctctcacacacaacacaaatcacaaaaaattatgaccacagcgcgcgggggcgcggcacacgggcgcgctgtgaatagcccccacaacaataacgtggggagggagcaacaaaagacacggagagaacatgtgagcactgagacactgtgtggagaaacagtgaggcgagctgcacagagagaaaccacaaacatcagtggggcacgccaggggggcgatatccaccacacgcgcggggcgagaaacaacaaacgtgtagaaaaatctacacccagcaaaacaaaaaaaacaaaacaaaaaaaaacgagggggggggcgcgcacgaccccaaaaagaaaaaatcccccccaagaagagggagagcccccgaaacaaaataaacagcgaatcaacccacacaagccatagtactgcgtgacgcaccaaaaaaagggcggaccccacaaatcaaggaagaaggcacagaaaacaaaaacagcacaagacgacaagagcgccacgatgaatataacaacaacctcaggtcacgacgtgccacacaacacgggaactagcaagaggcgacaccactttggtagagaaagacaacacacatacaaccaacgatgggaggggaagcaaccaacaaatctaagcgggagcacaagcaaaaaccacgccgccgaacgaacattcaacaaccctcatcagaccggaggaaaaaacataacaaaatgaatcaagaacggacgtctgatcaaaggaggaacaacacaacgagaccgatcgatacacagcatgagctgcgagacaaaaaatcgatgcaccagcagagataaacacatgaacgaaacactctactacccgggg

SEQ ID NO: 594263 - DNA, 389 bp, Homo sapiens
cttggcgaggcagtctcatttgggattggagaccccttcgtgtgttttgggagggcctggtcggcttgttggggaggttatagctcatgagggagactcccgggaggtattctcctagctgagagttagaagggggcctgttttgtaagaggaaagggcgtccgtatattaactcaaatggactgaggaaggagggtgcttttggactggctctaatgctctccagtgctatgggcaaaagggaggtccatggtttttggacttcaagagtgagtttggttaactgagccttaaggatcccatttaccctttcgacttttccggatgtctggggccagcatgggatatggagacgccactggatgccaagggactgagaaacctgttga

SEQ ID NO: 594264 - DNA, 447 bp, Homo sapiens
tcttagaaagatgcttctgatgacattgaggatccacctcaataatccgatatcatcctcccatctcaagatcattaactgaaatgcatctttaaagtctgttaccatataatgtaacctattcgtgtttttattgttgttgtttgtttgtttatttttgtttttgagatgaagtcttgctctgctgcccaggctggagtacagtggcaagacctcggctcactgcaagctccgcctcccaggttcacgccattctcctgcctcagcctcccgagtagccgggaccacaggcacccaccactgcacccagctaattttttttttttttgtatttttagtaaagacggggtttcactgcgttagccaggatggtctcgatctcctgaccttgtgatccgcccgcctcagcctcccaaagtgctgggatgacaggcgtgagccacctcg

SEQ ID NO: 594265 - DNA, 297 bp, Homo sapiens
  misc_feature (286)..(287): n is a, c, g, or t
accacgccaccggagaaggactgcgcgtcgtgcagtgaaggcgggacagaggtgagagcggggtgagccgccgcgcccctcccggtgtgccttctcccaggaggtctcctgaacctccgcctttggctttccctgtgagccgctttggttctggccaaacacctggtatgaagagctgctctcgagccagctcgggccatcgcaggccggtagcacgagagcaggaaagacctcccggagtgtccctccaggctccccttctccggtggcgtggtggggatcctcnntagagtcgac

SEQ ID NO: 594266 - DNA, 342 bp, Homo sapiens
  misc_feature (17)..(17): n is a, c, g, or t
  misc_feature (182)..(182): n is a, c, g, or t
ttttttttaaaaccccncttaaattggggggggaaaattttttttggggggcttttaatggggaaaaaatttttttttttcgccccccccccggtttttttttaagggggaatttttttttcctttcttttttccccggggggggaaaagggggaaagcccgggttgttttttttggggganaattttttggggggttccggttccccgttggccccccccccccctttttcccttgtttttttttaaaaaggggggggttttccccttttttgggggtttaaaaggtttttttggggggggaccccctgcccccccccggggttccaattttaaaccctta

SEQ ID NO: 594267 - DNA, 291 bp, Homo sapiens
  misc_feature (280)..(281): n is a, c, g, or t
cgctgtcgtgactggaaaacaatggtggtggatcgtgtagcttggtcttactgtttcgtgtgtgacgcgcccctcccggtgtgccttctcccaggaggtctcctgaacctccgcctttggctttccctgtgagccgctttggttctggccaaacacctggtatgaagagctgctctcgagccagctcgggccatcgcaggccggtagcacgagagcaggaaagacctcccggagtgtccctccaggctccccttctccggtggcgtggtggggatcctcnntagagtcgac

SEQ ID NO: 594268 - DNA, 653 bp, Homo sapiens
cgtgcaaaaggtggcttcgtagagcagatttggttcagtagagccgtgtcaagtgccctattgcgagcgtggtaggcattgccagctgcgctccgtgctgtcctcgagttacgacaaaggacgatcgagctgcgttgctccgcacttgtccaagcagggaggaagaagcttaggcagggctctctgttccttcttgccttcagatgttctctcgccaggggctgggcttcaggagggagcatagaaggcaggtgagctaaccagttggctagagggaaacagggggcccaccagagctgtggagaggggacctctaagaactcctgcagggcacctgagctccatagcccatccgcccttagccgaagccaggagctgctcactacctcactcagggaatggccgattaggccaacgtcgttgccttgctgcactgagcttccccctcaccacaggccctttcctacaggcaaggtctggcctcaggtgggcacgcaggcgggaaaagcagcccttggccagaagtcaagcccagcacgtggagcctagagtgagggcctagaggtcatggctgcattgcccccatgctggcgccaacaacttctccatcctttctgcctctcaacataaactgctcgtaggcccagggtatt

SEQ ID NO: 594269 - DNA, 721 bp, Homo sapiens
ggacactgcagacttgtacaatgctcatacggtgttgtatagaaaatgttgaacgtcactactttgtcggaattttcgccatcttgatgaatagtgcccgagtaggtgatgagaatgcctctgcaacgaatgctcagtacgagcggtccatgcacgtgtcgtgactgtcctctactcaatacgtgctatgctactatgctatggtatgtcattattattcactgctgctgaagagggtctgatggccacgttgtgtgggtctgggagtgcgatggggcggcgcgaatgttgctctataacttttcttaatggtttttgtatgctagcccttcatagtgcactgagactatgtgactcggatggtcatttcagacggacacatttggactatttgccataagctaccatgagatcgtgatcttagacgggaattcatgcaaatgacggggtctaaacatggtcatagtgaccccgtccacgtcctccaaagctcacgaccttggagccccgtggagctggactgaggaggaggctgcacagcgggagagcagctggtccaagaccagccctgcagcccccactcagccggcagccagatggccccgaaggcctccagggatggccctagccacaggccctggctgaggtctctgggtcggtcagtgacatgtaggtaaggaagcactgaaaatagtgttcccagagcactttgcaactcccg

SEQ ID NO: 594270 - DNA, 309 bp, Homo sapiens
ctcaactgccagccctgatgatggtctcatctgcatgagtgagcaggccaggactgcccgtctccacctttgtgctggaccatttacaatcaaagcgcagcatcgagatacccaggaaagagccaggaacaggccaggaagctgctgccccaccactgaccccaccgctctccttccctccttccttcccgctgggctgggcacaggttgagctcaccgtcgtcccccttcatcccttggcccctccaaggctccaggactggaggccgactgggccgcagacatttcaccatcaccattatgctcagc

SEQ ID NO: 594271 - DNA, 479 bp, Homo sapiens
  misc_feature (187)..(187): n is a, c, g, or t
gtacagccgccgctccaagatgaatcccctgtggaacaccatggtcattggaggctatgctgacggagaaagcttcctcggttatgtggacatgcttggtgtagcttatgaagccccttcactggccactggttatggtgcatacttggctcagcctctgcttcgagaagttctagagaagcagccnagtgctgagtcagactgaggctcgggagcttgtggagcgctgcatgagagtgctgtactacagagatgcccgttcgtataaccggtttcaaattgccactgtgactgaaaagggtgtcgagatagaaggaccgctgtccgcacagaccaactgggacatcgctcacatgatcagtggctttgaatgaaatccagttgaatgtccagagtgttgaactttgctcttctaaacgtgactgtagctggctcaaaggccgacttttgtaaaataaatcagtcgtttgaagtgaaaa

SEQ ID NO: 594272 - DNA, 376 bp, Homo sapiens
  misc_feature (31)..(31): n is a, c, g, or t
  misc_feature (51)..(51): n is a, c, g, or t
  misc_feature (89)..(89): n is a, c, g, or t
  misc_feature (131)..(131): n is a, c, g, or t
  misc_feature (140)..(140): n is a, c, g, or t
  misc_feature (157)..(157): n is a, c, g, or t
  misc_feature (185)..(185): n is a, c, g, or t
  misc_feature (201)..(201): n is a, c, g, or t
  misc_feature (238)..(238): n is a, c, g, or t
  misc_feature (250)..(250): n is a, c, g, or t
  misc_feature (257)..(257): n is a, c, g, or t
  misc_feature (294)..(294): n is a, c, g, or t
  misc_feature (299)..(299): n is a, c, g, or t
  misc_feature (333)..(333): n is a, c, g, or t
  misc_feature (347)..(348): n is a, c, g, or t
gacgaggggattaatcaaaacctatgatganggattctttcttatagaganatttcaaatttttttctgtcacatgcctatggacacgngtatttgtgactaccgcaatctaagctcaaagtgtaagggtncttgaactnctgaggggatacacagnccgggtgcgggtctagagaatgggtggntttattccaggtcaancttatcttgagggtgcattcctttatggtgcccactnaaagtgggggtnggttatnaagggtctttgatctgatactttggtggcctcttatnttcgngggtatgcttttgatttggtgatgccaccgtgtngcttatattcatanngcctttttcctggtggcgacagttgggc

SEQ ID NO: 594273 - DNA, 1033 bp, Homo sapiens
gtcctgggagtagcaatgggaaaaaaacctcaatgattatcagacatcaatccagaatcatgagggcgtgcgtcacgttcgattaaatcctgagcaggccacccatgttgatcatggtggctcgtgatgatctaccgcattgaagattcctgctatacaacgagtcttttccttgcttccccaactactagactcgcactccggtgcaacgggtagacaacttcgaggctgtgggaaccccttgctcagtctgtggctactcagtatgctgcaagaaactgtgactcatagcaagtccctggccccgactcggggctcgcaagggtcgacgctgaatgctgcgctccaattgacacgtcccgtggtagtaggtaagcccgaaccttgctatctagtgttctggtcgtgctagagaagcatccaagagggaattatcctctgaaacggctgtgtcacgtgcaccactctgattgtgccgatgcaaggacacaagagctcgcctaatcctagccacctgtgacaagtttacttttcgtacgagaaaaccctcggaactgccctggccagcctcaattgaccacgccgatacaccacagatagaccaacctgtcgctggggttgacctgttgggaagacctgctcttgcaattgtcttgcctttgggtcctgtaaacctgtaacatctactcaaggttcttggtagagtcctgatcacccaggttgtacgtattaatgcgactaggttgtccgccttctgtcggtggtgaccctgcctcctcggtagtacggttcggtctccgcccgatcttgttccctgcgggcatcttccctgtgcttgtagcgttggcaccccagttcccctgaaggcctgggtcatgatccgactgtgagcttcccggggttggaagcgttgcccgtcgtgaatgtttgggaagggcccaagggttcttccaagaacgggaggatttgtggccccctttggttgaaccgggattggggcgctatttcgatggcagacctcgttttggccgtc

SEQ ID NO: 594274 - DNA, 138 bp, Homo sapiens
actagaccgacccctgtgcatgcatgtgagatctgtctcccgatcccctaaaaaagaaagaaagcactgagagaggaaagccaggacccactcagcgaacaacggacaggcaacacacaggtcgcacgccctggaggg

SEQ ID NO: 594275 - DNA, 122 bp, Homo sapiens
gggatttgaaagttgaattctcataatatatatatgtattacacattattatgaactagaagtatgttagaaatgattaagcagaaaaagaaaatttctattttaatgaacaaaatttttaa

SEQ ID NO: 594276 - DNA, 1181 bp, Homo sapiens
  misc_feature (1055)..(1055): n is a, c, g, or t
ggtttgccgccagaacacaggtgtcgtgaaaactatccccctaaatagtcctaaactggtaaaggacacagactcactatacaagcatatgtcgtcattggacacgatagatgtcggagacaaggtccaccatctactggtcgcaatcgtgactctataagagttgcgcgtgtgcattcgacgatagagaggaacccaattgcaagaagagtttcgcaggaaaggagagctgtcgtgaccgatggtgcaacagcggctccgttcaagtatggccgtgggctctatgagactaaaagctgaaagactgtaaggcgtgaaacgtgggtatctatccagtttgattatctcgcttgatggaagattcgaagaccatgcgaaagtagctagtgtgactagtcaatggatgccccatggacacgagagactttattcaaaaatcactgattacacggcacaatctcatggcctagacatgatgcatgatccctgatttgattctccttgcttgtgattgtgtgagttggaacacttttgcaacagccttggggtgaattctactcgaaacgaaataggcgccatgatcgcccggcagtagcacatgtccccgttcttggaacgtataacaacaacattgaggttggatgtaatactcaaccttacacttggttcctcttggtttgaaccataggaacatgtgactgtcgcaacctttgacgtgcgccagctgcccttagccaagtcgcccatggaaacgaaaggaattacttgtaggggcacccagttgtaggtttcaaacgcggacaaatgtatccgaagaaccaaacttgtaatccagctttacaagggaaaagacactatgtggatctgtaacgacaattcgcgccggagatgaaccaagatgaaggacaactgtaggttgcccaacattttacatggggctttcgcgaaactcgagttggaacaaacaaattagccttatgagacaggccgctaacaagtatggctgaaaccaatcgccccatatggcgtatacaacagcgggtgcaatccgaagnaactggttccaccccccagtacgacgcgaaatggaatcaagttggccaaagagcagagaaaacccaatcagcacttagacttacgaaggaggttacttcgagaacgttggcacttccctgaaacca

SEQ ID NO: 594277 - DNA, 503 bp, Homo sapiens
  misc_feature (24)..(24): n is a, c, g, or t
  misc_feature (38)..(38): n is a, c, g, or t
gcacaccaaggaagggagattgangcttgaaacatcgncccaccgtgtattatactaaactctgattcccgaatgtggaatataggagagcgtacctctcttgcgcgtctccttttttatcctacggtgcggggagattattaaaaaagcaatcgcgagatacccgatttcatgtaaattattcccattggacattcttctggttatatataccaacaactgcgtgtgtggcactttgagatttctttaaaaggataatgttataaaccctttaaagagcctttattgaaaggcttatgcaaatcaggattaaggatctttcttaaaaatgacctaccattaacgagaggcttcttggtatatttaaataaaaccttttaaaaaaacaaaaattgagttgctatagaatgcccaaatttacattttggtgggtaacaaatgaaactgcgccccccttaaaaaacccccgcaaaaaaaaaacagccatcttttgttttttttat

SEQ ID NO: 594278 - DNA, 230 bp, Homo sapiens
cgtcgctctagaggtcccggcacaccccgctacggaggcatcccagagcaactcagctttttcctcgtcatctgtcaggcttccaggtaagacttcatttgaagaaaaggtcctgcagtaaagatgttgagaagtgctgatatgcgctgcggttatatgaaagggtggaaggaggactggcacggtggctcactcctgtaaccccagctactccagaggccgtagcgggg

SEQ ID NO: 594279 - DNA, 218 bp, Homo sapiens
agaaacctatatcccgacaggacagaagtatgcattcctgctagtgactcccagaactccttctgcttctcagtactctatatccgacaccgctccaacatggcagtaaacgcaacgagaaatccaatctaggagctgctcctgcatctccctggctacgcatcgagtcgtgactaggaagcccgtgcggttcctacacgagtatgtccgaccaacaa

SEQ ID NO: 594280 - DNA, 305 bp, Homo sapiens
  misc_feature (120)..(120): n is a, c, g, or t
  misc_feature (182)..(182): n is a, c, g, or t
  misc_feature (190)..(190): n is a, c, g, or t
  misc_feature (196)..(196): n is a, c, g, or t
  misc_feature (202)..(202): n is a, c, g, or t
  misc_feature (204)..(205): n is a, c, g, or t
  misc_feature (209)..(209): n is a, c, g, or t
  misc_feature (212)..(212): n is a, c, g, or t
  misc_feature (214)..(214): n is a, c, g, or t
  misc_feature (218)..(219): n is a, c, g, or t
  misc_feature (221)..(221): n is a, c, g, or t
  misc_feature (230)..(231): n is a, c, g, or t
  misc_feature (243)..(243): n is a, c, g, or t
  misc_feature (250)..(250): n is a, c, g, or t
  misc_feature (269)..(270): n is a, c, g, or t
  misc_feature (273)..(273): n is a, c, g, or t
  misc_feature (276)..(276): n is a, c, g, or t
ggccgacttcccagcggcccgtgcggccgggcatgcccagtgcgggcgcagggcccggccctggaagcgccccggggagctggcccgcggtgggctaggggcaggccggagccgcggggnggagctgtggatccttcatgatgagagatttggggacacttctctctcctgtggtgtagttngataagtngggtgntcgaancnngatnggntngacnngntgtcaaaannccttttctccangggaccnttgcccaggagggaaatcnnaanganctccaatcctggggggtaattttggtacc

SEQ ID NO: 594281 - DNA, 486 bp, Homo sapiens
  misc_feature (71)..(71): n is a, c, g, or t
  misc_feature (307)..(307): n is a, c, g, or t
cacgaggccgaccggtcccgtcatgccgacccgcagtcccagcgtcgtgattagcgatgatgaaccaggtnatgacctagatttgttttgtatacctaatcattatgccgaggatttggaaaaagtgtttattcctcatggactgattatggacaggactgaaagacttgctcgagatgtcatgaaggagatgggaggccatcacattgtggccctctgtgtgctcaaggggggctataagttctttgctgacctgctggattacattaaagcactgaatagaaatagtgatagatccattcctatnactgtagattttatcagactgaagagctactgtaatgatcagtcaacgggggacaataaaagttattggtggagatgatctctcaactttaactggaaagaatgtcttgattgttgaagatataattgacactggtaaaacaatgcaaactttgctttccctggttaagcagtacagcc

SEQ ID NO: 594282 - DNA, 175 bp, Homo sapiens
cccccttagtacagaccatgacacctggaactcaagtcaccatggactatctctgctttgtgtagcatctccactatggtcaaaaggttatatcataatcaacactgtcatctcagggggtaagtatcttcactgagtaggagaagatcctgtgaaagttgaaggccagacaaac

SEQ ID NO: 594283 - DNA, 221 bp, Homo sapiens
gggatctgcggtagtttgtttgaaacagcaacgcttcggtcagggtatcttttaccagacactaaagcatatggagatagaatagaaagaatgcttcgcctcagtttgaacattgaccctgatgcaaaggtggaagaagagcccgaagaagaacctgaatttgacagcagaggacacttactagaagacacccgatctatacgaagatggagaaaggaatc

SEQ ID NO: 594284 - DNA, 138 bp, Homo sapiens
taatgcaggactactgctgtgtgggtggtgacccatcacgtactaggcgagatcaagtcggccctgttcggccatctcggccctgtctcgggctctgttctggctccaggtacgagtcgaatcgaatcatgcatactg

SEQ ID NO: 594285 - DNA, 139 bp, Homo sapiens
atccaggcggcctgagtgtaccagtgaggattatccaggtgccctgagagtaccagtgaggataatccaggggtccctgagtgtaccagtgagtataatccagggggccctttgagttgtaccagttgaggatacatcg

SEQ ID NO: 594286 - DNA, 194 bp, Homo sapiens
agctcggaccgcagtctgcgtccatcagcagacactaaagcatatggagatagaatagaaagaatgcttcgcctcagtttgaacattgaccctgatgcaaaggtggaagaagagcccgaagaagaacctgaatttgacagcagaggacacttactagaagacacccgatctatacgaagatggagaaaggaatc

SEQ ID NO: 594287 - DNA, 335 bp, Homo sapiens
tgatcagtcggtacctactctcggtgcctgtacctcaaacctgcaggtgctcagaaaatcctggcaatgccacctgtgccctgctgatcttggaggttaagacaacctccatactatttattgttgtcctcaccaacagttctcccagagactcctagttcaggttcccagcagattcagggaccatataaatgaaaactgggccctggagaggtgtggcatccaggtcagttctcaggaatcgataaatagatggaggttgtcttctcttctcagggcagcaactggctctcagcactaaaaacaaggcctcaaacccgcagtgcccgagagta

SEQ ID NO: 594288 - DNA, 129 bp, Homo sapiens
atgacagccgtcttaggcaacctaagaacaaatgtcaaagtacagatgcaggaccaaatgaattgcttggtattcattacttcatgtatatcaagcacagtagtaaaacaaaaacccatgtatttaact

SEQ ID NO: 594289 - DNA, 634 bp, Homo sapiens
gggcgcttcgggagccgcggcttatggtgcagacatggccaagtccaagaaccacaccacacacaaccagtcccgaaaatggcacagaaatggtatcaagaaaccccgatcacaaagatacgaatctcttaagggggtggaccccaagttcctgaggaacatgcgctttgccaagaagcacaacaaaaagggcctaaagaagatgcaggccaacaatgccaaggccatgagtgcacgtgccgaggctatcaaggccctcgtaaagcccaaggaggttaagcccaagatcccaaagggtgtcagccgcaagctcgatcgacttgcctacattgcccaccccaagcttgggaagcgtgctcgtgcccgtattgccaaggggctcaggctgtgccggccaaaggccaaggccaaggccaaggccaaggatcaaaccaaggcccaggctgcagccccagcttcagttccagctcaggctcccaaacgtacccaggcccctacaaaggcttcagagtagatatctctgccaacatgaggacagaaggactggtgcgaccccccccccccgcccctggggtaccatttgcatgggggtggggtcctcctgtgctatttgtacaaataaacctgaggcagg

SEQ ID NO: 594290 - DNA, 403 bp, Homo sapiens
  misc_feature (32)..(32): n is a, c, g, or t
  misc_feature (44)..(44): n is a, c, g, or t
  misc_feature (126)..(126): n is a, c, g, or t
  misc_feature (139)..(139): n is a, c, g, or t
  misc_feature (151)..(151): n is a, c, g, or t
  misc_feature (201)..(201): n is a, c, g, or t
  misc_feature (228)..(228): n is a, c, g, or t
  misc_feature (285)..(285): n is a, c, g, or t
  misc_feature (295)..(295): n is a, c, g, or t
  misc_feature (315)..(315): n is a, c, g, or t
catgagtgtggggcgcgctctcgcggtcctgntcggcggagtgnggcattcttcgggggtgcatcagagggagggcagagcctgaggatctaagcgaaggcgttcccgggtgtttcctgtgctgtntgtgaggagagancgaattcgcctnctgctctcaagcctctctggtcctggcttttggttggatgccggcgctgntgtctgtggcctcccgccttttggtgntaccccgagtcttgctgaccatgggctctggaagcccttcgagccagaccttggcgngctcggattncggctctggctacgttccgngctctggctctgtagactttggtacttggcccaacgagaaggtcgccaaggagatcgccagggccgcggtggaggcgcctatcagctg

SEQ ID NO: 594291 - DNA, 577 bp, Homo sapiens
  misc_feature (541)..(542): n is a, c, g, or t
  misc_feature (549)..(550): n is a, c, g, or t
gggcgcttcgggagccgcggcttatggtgcagacatggccaagtccaagaaccacaccacacacaaccagtcccgaaaatggcacagaaatggtatcaagaaaccccgatcacaaagatacgaatctcttaagggggtggaccccaagttcctgaggaacatgcgctttgccaagaagcacaacaaaaagggcctaaagaagatgcaggccaacaatgccaaggccatgagtgcacgtgccgaggctatcaaggccctcgtaaagcccaaggaggttaagcccaagatcccaaagggtgtcagccgcaagctcgatcgacttgcctacattgcccaccccaagcttgggaagcgtgctcgtgcccgtattgccaaggggctcaggctgtgccggccaaaggccaaggccaaggccaaggccaaggatcaaaccaaggcccaggctgcagccccagcttcagttccagctcaggctcccaaacgtacccaggcccctacaaaggcttcagagtagatatctctgccaacatgagacagaagnntggtgcnncccccactctaccctggtacattgact

SEQ ID NO: 594292 - DNA, 831 bp, Homo sapiens
gggcgcttcgggagccgcggcttatggtgcagacatggccaagtccaagaaccacaccacacacaaccagtcccgaaaatggcacagaaatggtatcaagaaaccccgatcacaaagatacgaatctcttaaagggcgcgtgacgtgcactgaatcacatggacagtgtcttgtcttggttccaggtgcacagtcaaggcctctcatgtagttttatgctctagacttaggcgttctgcctgagcacagcctaactggccctacccagaagcctgcaattcctttttctaccctaccagacccataataaagctttccttggtctccacagtctgaagtgtaaccctctggtcagggtgtaacctgcctcctgcagggcaggttggctatctcccttgcttgtgcctctggcacttaggggtaccggagtggccttgtctcgatgtgcgtgctagtggcacattccctacacatgaccagccttatgacctccatctgacccattgctgtgagttggggtcagcttctctgacctgtgtcagggggttctaaggattagctgagaaggcttggaaggtctaggggagagctgagcatgtccccagtctgtaccttccctttacttttgctctctgttccgtggacgtgaatcacaaactctgagcctcagtttccccatatcccaccttggcttataagtcctcttggaccaagacttcggtatcgcaattgacaccttcttctaacagagggcgcagggggtgtccctgacgggatgtcaccgcacacacacttggtcgaacccctgctgtaagcagttgaaagccccag

SEQ ID NO: 594293 - DNA, 223 bp, Homo sapiens
  misc_feature (223)..(223): n is a, c, g, or t
gggcgcttcgggagccgcggcttatggtgcagacatggccaagtccaagaaccacaccacacacaaccagttccgaaaattggacaaaaatggtattaaggaaccccgattacaaaggtacggatcttttaagggggtgggacccaaggttcctagggacatgcgttttggcaagaaggacacacacaaaggggcccacgagggttcagggccacacttcccn

SEQ ID NO: 594294 - DNA, 155 bp, Homo sapiens
  misc_feature (20)..(21): n is a, c, g, or t
gctgcaggcgacctcgaggnncccacagaacatgacccaccagtcccgaaaatggcacagaaatggtatcaagaaaccccgatcacaaagataccatttctgtgccattttcgggactggttgtgtgtggtgtggttcttggactgggtcatgtt

SEQ ID NO: 594295 - DNA, 1021 bp, Homo sapiens
gggagtatggttgcaaagctgaggcatgagaatcacttgaacccaggaggcagaggttgcattgaacggagatcatgccgctgcactccagcctgggcaaacaggaagtgagactcttgtctcagaaacaaaaacaaaaagagatgttttgggggaacagggcacgggggggctcatggcttggtaatcccaaaggtggctgggttttaccaggtttgtgatcgccaccggaccaagcctggagttcctctttctctcttttaacctttaatttttggaaaacacccctggtcaagcacttgggtgggggacgcattttcggtgggctacattacactggatccaaaaacgctggagtgggattcttttcaacaaggatcttggaattttgcgggtttcccttccacacagtaaattattgtctcctgggcctccttgagatggtggactacgtttcggaacaacggggggtgggacttctaaataagaatcctgggggtctggaaattggggcgggtcgtcggcaatagacaggttcaacccgttgtgggtcacatataacctatttacctggggggacatagagttggtcctgaacgccaatccggggagcattccattggggagcaaaggtactactgaagaaggcttttaaaacccattgttattttgcgctagttttggaaccacggtcaacgccactttcttgtgggccttagagaaggacctttgaaggaaattaattgagcggcgttgccttaaaaaacttatggggttgcacggggtttccttcccccatcattcttatcataacaacattgggcagttgttatcaactggaccattgggcacgtggttacagcagctgttggccttccgtggggcaaaatcttgcctcttcttacaccccacttccgacaatttttggcacttggttcgacatcgcgggggaccccgataattgaaacttttcgccacctgccgacaggaggcgcaaaagagaagtcgtatcgcaacaggg

SEQ ID NO: 594296 - DNA, 186 bp, Homo sapiens
ttgcatatttgctttgtctttagacatagctgccacagcatcttcatagtttgcgaacacgacatctgcaacaccagttactctgccatcaggaccaatatacaatgtagtacactcacagggttgagcggagcaacaaaattataaatgtcatactcagtagctctgtaaaggtaatccccgcaa

SEQ ID NO: 594297 - DNA, 664 bp, Homo sapiens
  misc_feature (647)..(647): n is a, c, g, or t
gggcgcttcgggagccgcggcttatggtgcagacatggccaagtccaagaaccacaccacacacaaccagtcccgaaaatggcacagaaatggtatcaagaaaccccgatcacaaagatacgaatctcttaagggggtggaccccaagttcctgaggaacatgcgctttgccaagaagcacaacaaaaagggcctaaagaagatgcaggccaacaatgccaaggccatgagtgcacgtgccgaggctatcaaggccctcgtaaagcccaaggaggttaagcccaagatcccaaagggtgtcagccgcaagctcgatcgacttgcctacattgcccaccccaagcttgggaagcgtgctcgtgcccgtattgccaaggggctcaggctgtgccggccaaaggccaaggccaaggccaaggccaaggatcaaaccaaggcccaggctgcagccccagcttcagttccagctcaggctcccaaacgtacccaggcccctacaaaggcttcagagtagatatctctgccaacatgaggacagaaggactggtgcgaccccccccccccgcccctggggtaccatttgcatgggggtggggtcctcctgtgctatttgtacaaataaacctgaggcagggtttgttagcctntgtttatgattttggga

SEQ ID NO: 594298 - DNA, 835 bp, Homo sapiens
gggcgcttcgggagccgcggcttatggtgcagacatggccaagtccaagaaccacaccacacacaaccagtcccgaaaatggcacagaaatggtatcaagaaaccccgatcacaaagatacgaatctcttaagggggtggaccccaagttcctgaggaacatgcgctttgccaagaagcacaacaaaaagggcctaaagaagatgcaggccaacaatgccaaggccatgagtgcacgtgccgaggctatcaaggccctcgtaaagcccaaggaggttaagcccaagatcccaaagggtgtcagccgcaagctcgatcgacttgcctacattgcccaccccaagcttgggaagcgtgctcgtgcccgtattgccaaggggctcaggctgtgccggccaaaggccaaggccaaggccaaggccaaggatcaaaccaaggcccaggctgcagccccagcttcagttccagctcaggctcccaaacgtacccaggcccctacaaaggcttcagagtagatatctctgccaacatgaggacagaaggactggtgcgaccccccccccccgcccctggggtaccatttgcatgggggtggggtcctcctgtgctatttgtacaaataaacctgaggcaggaacacaaaattatgagaacacaaaaaaaacaaaaaaaccccggggcctctctttgaccggggcgcccaaaacgctcgctcatggacatgggcactgtgccagtacgtgtcccttggcccgggttttttgtcccacgtggaaatcgccggcccccaagggaggccattaattcgaaaccggttactgctaaattccacatgc

SEQ ID NO: 594299 - DNA, 492 bp, Homo sapiens
ataatagtagaccccattttggtgctgattttggtgagaattaacgaaagggaatatagagagagctgcctcttggctagatatatgctttaggacagtacctaggacacagaagtgctacgtaaaaggtacctctatccctgatactcaaaacgtgggcccagccatatatggcatccgttggaagcttgctagaaatgcaggatcggctgggcacaatggctcaaagtgctgtaatcccagcactttgggaggctgagatgggaggattgcttgagcccaggagttcgagaccagcctgcgcaacatgatgagaccctgtttctacagaaaaataaaaaattaaccaggcatggtgatgtgtacttgtggtcctagctactcgggaggctgaggtgggagaaacacctgagcccgggaagtcgaggctgcagtgagccatgatcatgccactgcactccaacctgggtgacacagtaggacctggtctca

SEQ ID NO: 594300 - DNA, 215 bp, Homo sapiens
  misc_feature (5)..(5): n is a, c, g, or t
  misc_feature (18)..(18): n is a, c, g, or t
  misc_feature (24)..(24): n is a, c, g, or t
  misc_feature (32)..(32): n is a, c, g, or t
  misc_feature (52)..(52): n is a, c, g, or t
  misc_feature (70)..(70): n is a, c, g, or t
  misc_feature (77)..(77): n is a, c, g, or t
  misc_feature (83)..(83): n is a, c, g, or t
  misc_feature (111)..(111): n is a, c, g, or t
  misc_feature (117)..(117): n is a, c, g, or t
  misc_feature (119)..(119): n is a, c, g, or t
  misc_feature (125)..(126): n is a, c, g, or t
  misc_feature (146)..(146): n is a, c, g, or t
  misc_feature (167)..(167): n is a, c, g, or t
  misc_feature (176)..(176): n is a, c, g, or t
acatnggctgtatgagangaaaangacctcangaaagcaacgaacggaacgnaagaacagaatgacgaangtcccgnggactncaacggccaatgttggtgctggcaaaangtgagntngagatnngatcacagccgaagagtaanggtgctgcaatgatgttagcngcggccacngcggatttttcgcaagaacattaataaactaaaaacttc

SEQ ID NO: 594301 - DNA, 271 bp, Homo sapiens
acgatctcacgtatattaatcttggttgtggtagcctgtttctaatactttgttactgtgctgtgaagatacagatttgaacatgtagtgtacgtgctatgggttgtggactggtgtgtcgtatgtaacagctgaccaacgtgaagatactggtacttgatagcctcttaaggaaaatttgcttccaaattttaagctggaaagtcactggaataactttaaaaaagaattacaatacatgggtttttagaatttcgttacatattacggg

SEQ ID NO: 594302 - DNA, 580 bp, Homo sapiens
  misc_feature (544)..(546): n is a, c, g, or t
  misc_feature (553)..(553): n is a, c, g, or t
gggcgcttcgggagccgcggcttatggtgcagacatggccaagtccaagaaccacaccacacacaaccagtcccgaaaatggcacagaaatggtatcaagaaaccccgatcacaaagatacgaatctcttaagggggtggaccccaagttcctgaggaacatgcgctttgccaagaagcacaacaaaaagggcctaaagaagatgcaggccaacaatgccaaggccatgagtgcacgtgccgaggctatcaaggccctcgtaaagcccaaggaggttaagcccaagatcccaaagggtgtcagccgcaagctcgatcgacttgcctacattgcccaccccaagcttgggaagcgtgctcgtgcccgtattgccaaggggctcaggctgtgccggccaaaggccaaggccaaggccaaggccaaggatcaaaccaaggcccaggctgcagccccagcttcagttccagctcaggctcccaaacgtacccaggcccctacaaaggcttcagagtagatatctctgccaacatgaggacagaaggannnggtcatnttctgtggtaccagctcgattctatcg

SEQ ID NO: 594303 - DNA, 631 bp, Homo sapiens
  misc_feature (20)..(21): n is a, c, g, or t
gctgcaggcgacctcgaggnncccacagaacatgacccagtccaagaaccacaccacacacaaccagtcccgaaaatggcacagaaatggtatcaagaaaccccgatcacaaagatacgaatctcttaagggggtggaccccaagttcctgaggaacatgcgctttgccaagaagcacaacaaaaagggcctaaagaagatgcaggccaacaatgccaaggccatgagtgcacgtgccgaggctatcaaggccctcgtaaagcccaaggaggttaagcccaagatcccaaagggtgtcagccgcaagctcgatcgacttgcctacattgcccaccccaagcttgggaagcgtgctcgtgcccgtattgccaaggggctcaggctgtgccggccaaaggccaaggccaaggccaaggccaaggatcaaaccaaggcccaggctgcagccccagcttcagttccagctcaggctcccaaacgtacccaggcccctacaaaggcttcagagtagatatctctgccaacatgaggacagaaggactggtgcgaccccccccccccgcccctggggtaccatttgcatgggggtggggtcctcctgtgctatttgtacaaataaacctgaggcagg

SEQ ID NO: 594304 - DNA, 150 bp, Homo sapiens
tttttctgtcagactgaatgttttatttcaacagccggccatggattacaaaaaaaacagtggaggtgggcagggtacgccattttatcacacgcgtcagagaacgtagccttccgccccagaactcagagccccttctgtcgtcttctc

SEQ ID NO: 594305 - DNA, 521 bp, Homo sapiens
gggcgcttcgggagccgcggcttatggtgcagacatggccaagtccaagaaccacaccacacacaaccagtcccgaaaatggcacagaaatggtatcaagaaaccccgatcacaaagatacgaatctcttaagggggtggaccccaagttcctgaggaacatgcgctttgccaagaagcacaacaaaaagggcctaaagaagatgcaggccaacaatgccaaggccatgagtgcacgtgccgaggctatcaaggccctcgtaaagcccaaggaggttaagcccaagatcccaaagggtgtcagccgcaagctcgatcgacttgcctacattgcccaccccaagcttgggaagcgtgctcgtgcccgtattgccaaggggctcaggctgtgccggccaaaggccaaggcccagacaggggtctcagactcaagactggttcacgacggcatgtgcatcatcagaatgcgtgcagggtgacctaatcgtagatcggccgtggcactgattggtgttaccttgt

SEQ ID NO: 594306 - DNA, 111 bp, Homo sapiens
ggagagaactagtgctgtatcattgaccaaatcttctgcagtggctccttataaatactactagtgccaccttcttggcaaattattctatggcaggccttctgttacaag

SEQ ID NO: 594307 - DNA, 140 bp, Homo sapiens
agtgagtggtagaggcagaagtagaaaagagctctggctttcgattcaagcgattaagtgtcccgtttcactccttatcgtagtcgcttctgtgaacgtattacgttatccgtcaagagtccacgctcacaatgcagcca

SEQ ID NO: 594308 - DNA, 291 bp, Homo sapiens
atgttacctagcggaggaggagaccccatatctataacaacaactattactagatttattcggtcaccctgaagattatatatacttatcctaccaggcttcggaataatctcacatatagtaaacattactactccggaaaaaaagaaccatttggatacataggtatggtctgagctatgatatcaataggattacctagggcttatcgagtgagcacaccatatatatacagtaggaatagaccgtaaacacacgaacatatatcaaccccgatagcccgctagggga

SEQ ID NO: 594309 - DNA, 104 bp, Homo sapiens
  misc_feature (1)..(1): n is a, c, g, or t
nccggccatatgccatccagcatccatcacagtggtgcactcgtggcaatgtcccacgggtccgcagctcgcaattcgtcaatccatggtccatcagctgcttt

SEQ ID NO: 594310 - DNA, 84 bp, Homo sapiens
tcgaggcccctcttccttggggggggccttccggcacattggtccacaccccacttctcaccaacagggccggttcgagccggg

SEQ ID NO: 594311 - DNA, 207 bp, Homo sapiens
  misc_feature (11)..(11): n is a, c, g, or t
ctgagactcancggaactttctaaagatgaaactgggctgggcacagtggctcagcctgtaattccaacactttgagaggctaaggtgggaggatcgcttgaggccaggagtttaagaccagccccagcaaaacagcgagacttcgtcttgacaaaaataaattttttttttttttttttttttttttttttttttttttaaacccc

SEQ ID NO: 594312 - DNA, 798 bp, Homo sapiens
  misc_feature (41)..(41): n is a, c, g, or t
  misc_feature (71)..(71): n is a, c, g, or t
  misc_feature (77)..(77): n is a, c, g, or t
  misc_feature (112)..(112): n is a, c, g, or t
  misc_feature (159)..(159): n is a, c, g, or t
  misc_feature (190)..(190): n is a, c, g, or t
  misc_feature (216)..(216): n is a, c, g, or t
  misc_feature (223)..(223): n is a, c, g, or t
  misc_feature (230)..(230): n is a, c, g, or t
  misc_feature (232)..(232): n is a, c, g, or t
  misc_feature (237)..(237): n is a, c, g, or t
  misc_feature (258)..(258): n is a, c, g, or t
  misc_feature (300)..(300): n is a, c, g, or t
  misc_feature (320)..(320): n is a, c, g, or t
  misc_feature (329)..(329): n is a, c, g, or t
  misc_feature (359)..(359): n is a, c, g, or t
  misc_feature (400)..(400): n is a, c, g, or t
  misc_feature (446)..(446): n is a, c, g, or t
  misc_feature (466)..(466): n is a, c, g, or t
  misc_feature (505)..(505): n is a, c, g, or t
  misc_feature (595)..(595): n is a, c, g, or t
  misc_feature (606)..(606): n is a, c, g, or t
  misc_feature (620)..(620): n is a, c, g, or t
  misc_feature (623)..(623): n is a, c, g, or t
  misc_feature (626)..(626): n is a, c, g, or t
  misc_feature (630)..(630): n is a, c, g, or t
  misc_feature (635)..(635): n is a, c, g, or t
  misc_feature (645)..(645): n is a, c, g, or t
  misc_feature (658)..(659): n is a, c, g, or t
  misc_feature (714)..(714): n is a, c, g, or t
  misc_feature (716)..(716): n is a, c, g, or t
  misc_feature (722)..(722): n is a, c, g, or t
  misc_feature (734)..(734): n is a, c, g, or t
  misc_feature (769)..(769): n is a, c, g, or t
tgactgtattggaaggcaatatatctgttgcttcaactacncccagaaacctgcagacactaagataacanacatcnagagacgaacggcgctcctgcacctgcatgaagcnagatgcggagccacaatgcatgcgcgaaggacacggagcatcaatcnagaagaaaaatgatcaaagaacagctgagtnacagtttggggccatcccaggcaagngggctcntggtgcncnggtgnagccaggaacccatacaagcngggctggcctaggaagcccacgcagccagcctgtgttcagcnacagcttctgtgtacttatntaccatcancagccacagcccttgggagcgaagccctanacgcctccttcaagccccctgctggttggatacatcattanctcgcctcttccaaatctgaatgttagcctctgacagtgtgatcanctggggacaggcatggcagncacctggaggtcttgtaattcatagcgcatgttggcgcngtcccatgatgacagcagcgtggatccggtagcgcagccctcggagcggcttggccgtacatcgcacagatagttgggcaaatgagagtncatagagtggntatttcttgtagtnctngcntggnacttncttacagaanaagtatttctctnnagattccacattttgttattaggggaaatttgacaaataggttgggattctgtcncnaacaanagaaagtttgtntcttgagtggaatctctttgataacaaaaagattnagatcatgggagggcaacttgggttaagc

SEQ ID NO: 594313 - DNA, 106 bp, Homo sapiens
gcctcagctgcctagggcgtgactgtacgatggcatggctgtggcgacagggtctgggataagcttactcaaagatctaggaactaaaccgccagtaagcaatacc

SEQ ID NO: 594314 - DNA, 379 bp, Homo sapiens
acctcctaccccacgcaaggaagagaatacagtcatgggttcttagtttctctttctggttgggccagtaaagccccttcctcatccctcttttccacttatcactagagacagaaactaaaaaccacggcttcagaatgccaaaacctaaaacaaacaaaacagaacaacaacaacaaaataaggcaggctggacaagcttgcaacccttcaagatgattgttttcacggatttaaagaaatgggatagcactttggggggctgaagcaggcagatcacctgaggtcaggggttcgagaccagcctggcaaacatggtgaaatcccgtctccactaaaaatacaaaaattagccaggcgggtggcaaacacctgtaat

SEQ ID NO: 594315 - DNA, 983 bp, Homo sapiens
  misc_feature (493)..(493): n is a, c, g, or t
  misc_feature (495)..(497): n is a, c, g, or t
  misc_feature (500)..(500): n is a, c, g, or t
  misc_feature (508)..(508): n is a, c, g, or t
  misc_feature (536)..(536): n is a, c, g, or t
  misc_feature (539)..(539): n is a, c, g, or t
  misc_feature (543)..(544): n is a, c, g, or t
  misc_feature (547)..(547): n is a, c, g, or t
  misc_feature (552)..(552): n is a, c, g, or t
  misc_feature (562)..(562): n is a, c, g, or t
  misc_feature (569)..(569): n is a, c, g, or t
  misc_feature (587)..(588): n is a, c, g, or t
  misc_feature (592)..(592): n is a, c, g, or t
  misc_feature (595)..(595): n is a, c, g, or t
  misc_feature (597)..(597): n is a, c, g, or t
  misc_feature (609)..(609): n is a, c, g, or t
  misc_feature (639)..(640): n is a, c, g, or t
  misc_feature (656)..(657): n is a, c, g, or t
  misc_feature (717)..(717): n is a, c, g, or t
  misc_feature (841)..(841): n is a, c, g, or t
  misc_feature (849)..(849): n is a, c, g, or t
  misc_feature (859)..(859): n is a, c, g, or t
ctctgggccctgtgttttcccgagcaccttttctgactctggtctggattacatgtgtcggtatgtggcacttgtccccttttgcccttggtatatgcgacccttctattgtattgcgccctttgtgcccgcactttccggtccatgtcggggatgatggatcccccttcccctttgctcagttgcctcctggggccaggggcccctcaccacaaggggtctggatatacagtttcataaggcctggccctcccatgtttgcatgcctatgtacttctacgccaaacgtgtcagcccttcctcctgaagctctctgccgtgcctccctgttctgggaggacggtggtgcggtgtgactgaatttgggcctcttgtacagttaactctcccaggtggattttgtggaggtgagtaaaaggggcattgagactataaagcagtagacaatccccacataccatctgtagagttggaactgcattctttcaaagtntnnntangcatatanttgtagggctgtagacttacggtcctantantctnnttnccatngcttattctngagcacnaaagtgataatcaattannacanttnanacatcacctttnttgacttgttccaagcccttttacagctcnntggcattttcctcgcnnaggcctgtgaggtaactgggatcgcaccttttataccagagacctgaggcagatgaaatntatttccatctaggactagaaaaacttgggtctcttaccgcgagactgagaggcagaagtcagcccgaatgcctgtcagtttcatggaggggaaacgcaaaacctgcagttcctgagtaccttntacaggcncggcccagcntaggcccggggtggcaacaccacagcaagccggccccccctcttttggccttgtggataagggagagttgaccgttttcatcctgcctccgttattgtaacttggaggtttacacgggtgcgtt

SEQ ID NO: 594316 - DNA, 166 bp, Homo sapiens
ttgtttttttgtggctgcagtaacaaatttcgacagatttggtagcttaaaacaacagaaatttattgtcttacagttctggaggccagaagtctgaaatcaaggtgtcagcgaggttgacaccctccgaggtgccgatgaatagcgaggtgccgatgaatagcga

SEQ ID NO: 594317 - DNA, 91 bp, Homo sapiens
  misc_feature (51)..(51): n is a, c, g, or t
tggctagtgccacgaggtttacttgactgttgtttgaaaagctgataaganaaccatccagaaaaaagctcttcgttttacaaacatgaga

SEQ ID NO: 594318 - DNA, 871 bp, Homo sapiens
gtaggcagccatgcgcccagcctggaatggcatggtcttgaagccccacttccacaaggactggcagcggcgcgtggccacgtggttcaaccagccggcccggaagatccgcagacgtaaggcccggcaagccaaggcgcgcccgcatcgctccgcgccccgcgtcgggtcccatccgggcccatcgtgcgctgccccacggttcgtgtaccaacacgaaggtgcgctgcccggccgcggtttccaggcctggaagggagccttcaggggtggccgggcatttcacaagaagggtggccccgtgaccatcggccattttcgtgtggaatccgaggaaggcgggaacaagtccacgggagtcccttgcatggcccaacggtgcaggcgggctgaatgggagtaaccgcttccaaactcatcctcttccccaggaaagccctcgggccccccaaaaaatgcgacgaccagtttctggctgaagaactgaaactgagcccacccagctgaccggacccggtcatgccccggtccggaagcggtctatacggacggcagaaaagggctcgagttcatcacctgagggacagagaagaattttcaggaaggccttatcggcataaatctcccgtatattggccccggtggccaaacggccccgggcatcttatccggcataacgggggcaaaaaagagcccaggaatagtccgaagaaacagggctgtttgtacacgaaaaaaaataaaggcccctcctgtgggactatgggaactacaggacgggagaacacatgcctggactctcaccggttgtggtttttcgtgtggaaccaacttggctggagtcggcgtaccagctgtagatccccagcag

SEQ ID NO: 594319 - DNA, 342 bp, Homo sapiens
ccttggacttacctggagtggctggcgtgatggggtgatcgccggtgaccatatgacttgatgctgcgctgcgacacttgccacctggtcaggcacggctgccgggatggtcgatcatggacataggcccacaaagcagaggttgtccgtggtgaagttcacgtcatcacagtcgaaggcaaagcccttggggaactgctcctcgggcagggtaataatggcagaaaccaagcactgcgcttcgcccaggccaccgagctcaaggtaggcattctggaaggcctccttcatttcctcgtccagaggctgctccttgccctgtagcagggatggtggagcagc

SEQ ID NO: 594320 - DNA, 797 bp, Homo sapiens
gctccggggctgcggctgtaactgcagcagctgccggcgcaccggcgccgcctgcctgcccttctactccgccgctggctctatcccgtcgggcgtctcgggccgccgccgcctgctgctgctgctcggggccgccgcggccgctgcctcccagacgcgtggcctccagaccgggcctgtgcctcccgggaggctggcgggggcctcccgctgtggccacctctgcctgcggccgctggcgccctgcgtcctaccctgccctccgtgcctctctgctgccgcagtcgctggcgggggcgggccggccggtccggaggcgcacgttacggcacagagatgtccaaaaatagtttaatctggaagatcttcaccagcaccccgcctgagtatgaattggccccgtccaacgttagaagaggaagtgtgatgatgtctttctcattcgagtctcaaaggagctgaccctggtcatgcactatggaagatgtgcttaacttttctttccagactgcagaatccgcaacggtgagaatggaatacattttctcctaaacagagatgggaaaacgaaaggggtgatgccttcacttgcaacactggagtcacacgcagggactgtgcagacaagcccttatcacgaaccaccgcatgttacctgggcccagccgcatgtggcaactatatgacgattagacatgcacgaattgcctgccccaccgaaacacttgcaggccactcccccctgggtacactcaggccgcccgcccgccagcgccccccaagtcaccgcaaagacc

SEQ ID NO: 594321 - DNA, 780 bp, Homo sapiens
gctatcatatagtaaaacccagcccatgagccctaacaggggccctctcagccctcctaatgacctccggcctagaccatgtgatttcgacttaccacatcgcataacgctcctcatactaggcctacgtaaccaacacatctaaccatatacgcaatgatggcgcgatgtaagcagcgagaaagctagcgatagccgaaggacgagccacgacaggcaccgtgtccaaaaagggctgtcgatgacgggataatcctattgattacctcagaagattttgtttcttcgcaggattgtttctgagaccttttaccagctccagcctagcgccctaccccccaattagggagggcactgggcccccaacaggcatcaccccgcgtaagatcccctagaagtcccatgtcctaaacacatccgtattactcgcatcaggagtatcaatcagctgagctcaccatagtctaatagaaagacaaccgaaagcaaataattcaagcatctgcttattacaacttttactgggtcgtctgattttatcctcctacaagcctcagaggacttcgagtctcccttgcaacagtttgcgcgaggcatctacgggtcaacattttatgtagccacaggcttccacggacttcacgtcatggatgggctcaacttgcctcactatctgcttcatccgcaactaatatttcactttacatccaaacatcaggtttggcttcgaagccgcggctgatactggcatttgtagatgtggtggactatatctgtatg

SEQ ID NO: 594322 - DNA, 956 bp, Homo sapiens
  misc_feature (683)..(683): n is a, c, g, or t
ggcggtggcctgcgagaatcgaggcactcgcttggtgtacccatgtatcgaacatgatgttcacggcctggtaccgggggatgtcggtggtctacgggatcggcacctggtctggtgttgggctcacgtgcttaactatagccggaccaatggcgaagtcgtcagtagaccaaagggatggctcagcaggtgaatgtacccagtgaacctctctgaacgcccaaagggatttcatgtggaaacagttgtcacatataacgaagatttggttccaaatacagaaaagatcctcaactatgtggaaatcatggacctggttggccctggtacagaaccatgactgggctgctgaattctgaaaaccaggcacttggtccaccatttaaattggatagtggccctgattcccattgtgggttggtgacacaagtgtatgtcattaaattggctgtaaaactataatcagtattaatatgcaataaatatttctggaagacaaaaaaaaaaaaaccaaaaaaaaaaatttgtgggggctcgggccttggaggagttttaaacccatcgggtgtgggcacggggaccaagtggcaaaggcacagtggcaaacggggtccaaagagaaccccgggcaagcacagggggggctccccccaaaaaaacgccggggacacgggcgtttaacnacccaagggagtccggcggcacaaggggggacaacaacgggggccggggtccatcaacagcgccccgcggctgcggaagtgacaaacaacaaacgcaacagacaaagaacaaaccaaaaaacacagaaaacgaagcaagaagagacaagagaaaaaacataaagagccaacacaagcccacaaccacagacacagcagccaacacagcgaaaccaacaaaaaacacagcaccgcacacaagagcgcaagacaagagaccacagagccgaacag

SEQ ID NO: 594323 - DNA, 421 bp, Homo sapiens
  misc_feature (174)..(174): n is a, c, g, or t
agactttcaccacctactctgacaaccagcctggtgtactcattcaggtgtatgaaggtgaaagggccatgaccaaggacaacaacctgcttggaaagttcgagctcacaggcatccctccagcaccccgtgggtccctcagattgaggttacttttgacatcgatgccaatgnatccgtcaatgtttctgctgtagataagagcacaggaaaggagaacaagatcaccatcaccaatgacaagggcccgcttgagtaaggaagatattgagcgcatggtccaagaagcctgagaagtacaaggctgaggatgagaagcagagagataaggtttcctccaagaactcactggagtcctatgccttcaacatgaaagcaactgtggaagatgagaaacttcaaggcaagatcaatgatgagg

SEQ ID NO: 594324 - DNA, 182 bp, Homo sapiens
taccctagctgtgcttctgtaccctagctgtgcttctgtaccctagctgtgcttctgaccctagctgggactacagatgcacgccaccatgcctgtcaagactttttgtacttttagtagagacagggtttcgccatgttggccaggctagtctggagctcctgacctcggtgatccacccg

SEQ ID NO: 594325 - DNA, 468 bp, Homo sapiens
gaccaactgcacactgttagcagtcctcaattttcccctccaccttagctcctggcaacaatatctgctttctgatatctatagagtttgactactttagtaacttgatataagtagaattaagcagtattttgtccttctggtgagcgatgtatatcacttaacataatgtcctcaagggtcatctaaattgtcccatactgcaggattttcttatttctttttttttttgggggctgaataatatcccatggcttgtattgtcccacattttcttcattcttctgtcagtgaacgttaagttgtctctacatctggggtatggggaataacttcgatgaccatgggagtgctaatatctcttggccaacaggactttttaaaatattaaagtggctagggtgaagaatattaatttatcacaccatagtaagcatattatgtacaccttctgagttatcctccggg

SEQ ID NO: 594326 - DNA, 132 bp, Homo sapiens
cgcatcttattaatctggtggggtttttattctttttatgagacagattctgctctgtcgcccaggcttgagtgcagtggtgtgatctcggccactgcaacctccgcctcccgggtccatctgacccatctt

SEQ ID NO: 594327 - DNA, 258 bp, Homo sapiens
attagttccctcagggaggtgtgggggtaagggagggaagtcccctcaaaaaagggaaaaccccggaatgtgtgttaagcccaaaaatggcatttgcagttaattagcccatgtgagggttaaacaggtaggggaatgcaagctcaaggtttggaaaaaagacttttcagttatgtttttgggatcaaacaaacgaaaggtctctttgtagtttgggttaatggaacattaataaattttttgattcccttgctttta

SEQ ID NO: 594328 - DNA, 101 bp, Homo sapiens
aaaaaaaaatttgggaggggtggggttccctttggggggagggtttggggttttgaaaaatttttttttccccccctggtccattaaccgggtttttttga

SEQ ID NO: 594329 - DNA, 237 bp, Homo sapiens
  misc_feature (2)..(2): n is a, c, g, or t
  misc_feature (78)..(78): n is a, c, g, or t
gngacagggtctcactttgtcgcccaggctggatgtagtggcagaatcatggctcactgcagccttgactgcccaggnccaagccatcctcccacctcagcctcccaagtggctgggactacaggcttgcaccaccacaccaaggtgaagtgttgttttgtttgttttttgtagagacagttttgccatgttgcccaggcagtgatcctcctgcttcagcccccacaaggtgttggg

SEQ ID NO: 594330 - DNA, 399 bp, Homo sapiens
ggaagtataatctctaacagatggacaaagttaccagatgccttaaactctgtaacacttaaaggaagtgaaaacttagtagtatgataggttatttagatgtaaagatgttctggataccattatatgttccccctgtagcagaggctcagattgtaatatgtaaatggtcatgtcattcgctcacatcatgcatttaatttgaaatatggtctataggtaatgattcactaagcagcacagctgagaggcatgtcggttgtatacattgtggtcattgcaccataaagaaacattgtagcctcaatcgagtgagccagactagaagttcctagtgatggcttatgatagcaaatggactcatgtcaaatatttagatgtaattatgagtaagacata

SEQ ID NO: 594331 - DNA, 101 bp, Homo sapiens
gtagccacaaggacggcacactgctttggagtgattccgtgtttcctctcgtaccatgtgatccttgagtttggaaagatggctcagctccttggcagcag

SEQ ID NO: 594332 - DNA, 159 bp, Homo sapiens
  misc_feature (69)..(69): n is a, c, g, or t
atactcaatgcatctgcgttttcttcagcaaatccatacttatacaagattacctataaatctgtcccncaaacgtctaagacatattcagtaattaaaaataagtctgattaagatgctttacccggatacatgaatgaactccggggggatatgctt

SEQ ID NO: 594333 - DNA, 920 bp, Homo sapiens
  misc_feature (9)..(9): n is a, c, g, or t
  misc_feature (18)..(18): n is a, c, g, or t
  misc_feature (61)..(61): n is a, c, g, or t
  misc_feature (95)..(95): n is a, c, g, or t
  misc_feature (115)..(115): n is a, c, g, or t
  misc_feature (141)..(141): n is a, c, g, or t
  misc_feature (149)..(149): n is a, c, g, or t
  misc_feature (184)..(184): n is a, c, g, or t
  misc_feature (206)..(206): n is a, c, g, or t
  misc_feature (217)..(217): n is a, c, g, or t
  misc_feature (222)..(222): n is a, c, g, or t
  misc_feature (243)..(243): n is a, c, g, or t
  misc_feature (245)..(245): n is a, c, g, or t
  misc_feature (253)..(253): n is a, c, g, or t
  misc_feature (255)..(255): n is a, c, g, or t
  misc_feature (257)..(257): n is a, c, g, or t
  misc_feature (268)..(268): n is a, c, g, or t
  misc_feature (276)..(276): n is a, c, g, or t
  misc_feature (307)..(307): n is a, c, g, or t
  misc_feature (319)..(319): n is a, c, g, or t
  misc_feature (324)..(324): n is a, c, g, or t
  misc_feature (336)..(336): n is a, c, g, or t
  misc_feature (338)..(338): n is a, c, g, or t
  misc_feature (374)..(374): n is a, c, g, or t
  misc_feature (438)..(438): n is a, c, g, or t
  misc_feature (450)..(450): n is a, c, g, or t
  misc_feature (454)..(454): n is a, c, g, or t
  misc_feature (456)..(456): n is a, c, g, or t
  misc_feature (475)..(475): n is a, c, g, or t
  misc_feature (508)..(508): n is a, c, g, or t
  misc_feature (515)..(515): n is a, c, g, or t
  misc_feature (525)..(525): n is a, c, g, or t
  misc_feature (535)..(535): n is a, c, g, or t
  misc_feature (612)..(612): n is a, c, g, or t
  misc_feature (632)..(632): n is a, c, g, or t
  misc_feature (655)..(655): n is a, c, g, or t
  misc_feature (684)..(684): n is a, c, g, or t
  misc_feature (726)..(726): n is a, c, g, or t
  misc_feature (774)..(774): n is a, c, g, or t
  misc_feature (783)..(783): n is a, c, g, or t
  misc_feature (793)..(793): n is a, c, g, or t
  misc_feature (800)..(800): n is a, c, g, or t
  misc_feature (815)..(815): n is a, c, g, or t
  misc_feature (825)..(825): n is a, c, g, or t
  misc_feature (835)..(835): n is a, c, g, or t
  misc_feature (837)..(837): n is a, c, g, or t
  misc_feature (851)..(851): n is a, c, g, or t
  misc_feature (914)..(914): n is a, c, g, or t
tgagtggcngcgcctttntttgtgggggccttcaaggtagggtcgtggggggcagcggggnggaagagccgagaaactgtgtgaccggggcctcnggtggtgggcattgggggcncctcttgcagatgcccattggcatcnccggtgcngccattggtggcagcgggtaccgcgtcctttcttnttcaacatagggtaggtggcanccacgggtccnactcncttgaggctgggccctgggcncnccattttntntnccaggagcatntggttctntggcgggagccccacgcaggccctgaggatnttctcgatgcanccgcnctggcggaaaancncattgaccaccgggctgccgggcggcacttgtggcnccttgaagaggaagctgagcagggacagcccggggtggaaggtctgcggctcggggtccatttnagttcagaagcncacncnctggcacactcggtcagcngccctaggtccagcatgatgggtgcggccagcngccagtnctcacacgtnttgtgcagcnccagttttttggttccgcccagcatcagctccgaggtatactcatccagcgcgcgctttctgttacccacgttcggnacaaacttgatgaccacgcngtaggggctcttcgccgggcgtntagagcactgggttgctctgcaccatgtngtccaccacgttgctcttggacacctccttagagcggaactncaatggcgccgataggttctccccatcgttgttgcccaggtggttgtnactcacganggacaaggtnttgaggncggagccaattaggnagttcacaancacggacttnantttggtctggcctnatttgaagttatctccgcccacaaaaacccggtgctgccacgcgagcccaagaaccccgggcncagggt

SEQ ID NO: 594334 - DNA, 96 bp, Homo sapiens
gttttttgtttttgggtttttttttaaagacaaagaagtggccctttgccctttcctcccttttgagggcttgatccttttccaggaaaaaggggc

SEQ ID NO: 594335 - DNA, 430 bp, Homo sapiens
tacacacgactaaatagcacttgattattaaatacatccataacctaaacaagatatgttgatacatctatataatcctcatggctcagcacagggcctgacatacataggcatacagccaatataagatctccaaagcatgaccattcatgcatccataatccttttactatagtataaagatggctagacattcaggcccccatgtatatatcaacggaatataataatccccaataagctactaactatttaaaaggtgattaacagttctagtgtacaatttcaaaatcaaaatgacaccatatcaggtgtcacatccaaaagacaaatgccaaaccatatttgcctacacaccagtgccttaccccatatacttacatcaataatctgtccataatgaaagccatggtcaccaacagaaatacac

SEQ ID NO: 594336 - DNA, 156 bp, Homo sapiens
ccaggtcaggtcacaggatagcatcctcaccaataaaactgggtttgttgtactgatgacgctagtattaccagcaacgctctgacacatccccaccgaacgtgcgaatcgcctgcgtttaacatgcctgaaaatctggcctgctttttcccgtgg

SEQ ID NO: 594337 - DNA, 118 bp, Homo sapiens
ctccgtttattcactgccctgatctctacgcgttgcttctgctcttcgctctgtaggattctggattggtgccaatgataatctcaatgacacctcccttagctactcaggaggccgg

SEQ ID NO: 594338 - DNA, 827 bp, Homo sapiens
gtcctgggggagaagattaacatcctgtctgggagagactgtacaaagctgggtgacagggacccgctgggtgaactgactgtccctgagcaagataggctcccccagacgctcctgtgagtgcagaagtgtgcctcctacgtgtttgtgccctgatgtgccctggagcttcatgtgcctcactcacacctgtgtggccctgtggcaagtgcccttgcctacagatcccacttgtgtcctggatcccagtgctcttgtgttgggtttgttgcctgtgtgcttgtcctgtgctgtgcacggtggccggtaattttgtgtcaacacttactatgactatttccaatgggcatttgaccacaaaaagagtgatagacagtgacactatgtggaccgaatcttgtgagcctgcaggatgtcgtccggttcggagtcttcctctacacgttgggctgcgtcttgtgcctgcttgcctctactacctgtcccctctgaaacttggagcacttggctcttatctactttggaggcctgtctggctccttttctctagcacaggagtcctcatactagccacctgaaggcaagagtcgcccaacattcatgtgagccagccaggtgcgtcaagcgtcccaagaaaagttgcatagatgaaacttgtctatcctaagagcttggactccctgagaaatggggcttgggcacacttacggaaggggagcgaaggtgagcccatatcctgcttcggggtgggagggcattggacgctgaccattgatgctggtccagaccaggataccacgcacgggtcaggagatgtggtcgaatgc

SEQ ID NO: 594339 - DNA, 389 bp, Homo sapiens
tattaccaaccatttagacatcctttaggatagtacgtccattattcttgtaccattctgtaaccgggaaccattgcaaccatttaaaaaagtctgggttcccatgactcatctcattgcaacctttgcatccctggcctttgacccctggttctctgaaccctagtcacttctttctttttgagacgctctcgctctgtcacccagtctgaagtccagtggcgcgttcttggctcattgcaacctgtgcctcctgagttcaaccgattctcctacctcagcctccagagtagctggcactataggcgtgcaccaccatgcgcggctaatttgtgtatttatagtagagatagggtctcctcatgttgcacagtatggtctcgatctcc

SEQ ID NO: 594340 - DNA, 113 bp, Homo sapiens
ggtcagtgctgcattagacgtgaactatctgatgattcttccctccagaagatttggcattgtgtcttggaatgctcaatgtcaaatggggaccggattgccctgctagcaat

SEQ ID NO: 594341 - DNA, 306 bp, Homo sapiens
ctagatgaccatgttctcatccactctattctgactgtgaatcactttctcttcggcaccgatcagccccccatcctgctctcccactccagagccttcgctctcaggcagggctgggaaggggtggaaggggtggaacggcgggatctccacactctgctcagagctcacccgcacgtgcacaggggtctctgagacagaggcagtgaactggaccatatctgcacgctgctcctgaaggagctcaccaatttcctctagaattgcttgagctacataagtgactctcgagagcagagagaggct

SEQ ID NO: 594342 - DNA, 293 bp, Homo sapiens
agctataactagtgaacactatcacgcaaaagagtcaacctctctatactaatctaccctacaaatctcctataattataacattcacagacacagagactaatcatatttcatatcttcttcgaaaccacacttatccccaccctggctatgatcacccgatgagggaaggagaccagaacgccatgaccgcaggcacgtacttcctattctactccctccttaggctccctttccctcttcttcgcgctgtgattacactctcaaacaaccccagacctagttatgtgcgt

SEQ ID NO: 594343 - DNA, 871 bp, Homo sapiens
cttttgttgccccctaagtacaaaaaccttctccctccccctgtttatttggcgcccccccctaagtcccataatttggcaaattgtggcggacaccacaacaccagaatttttcttacaagggaaaccaccctttccgaaaatgtttttctccttagtgaacccaccataactgataagtactaatgcccccataagggccttcccccaaaacaacaatgtctcaagtgagtggaaatgcactactaagtctacccaactcttcaaacggcacatttatgtacactgtatacaccaaacacgcacgactcccctttttagtttatatcaagagcccacaagatcccccctttaaaatttagctttagctaaatctacaagaggagttgttgtcatcaccccgcaccaccaattctctccccccaccctccaaaagcacttttcacgcactttatgtatgactaaattccacagtatatgttttttccttatcaagagtattaaaaacgagccaccacttttattccggtaatacaacaatcccaccgtattaactgtgtttagaagagaaacacaacaaatatatggtagcaccttagaatccccatataggacatcttataaagattcttaatacaagataacataccacttctatagaatcttgtacaaaatcaggatatttctaccttataaacagaccctttgagttcactacctaccaccatgaacgcacccggtacttccactcatttcttgaagtgagaatggtccttgagtatgatgtgtcacccacaaccacctacaacacttgtttccttcccttcttcaacaaaaaaaaaccttttagaaacgaacacaacataacaca

SEQ ID NO: 594344 - DNA, 149 bp, Homo sapiens
gtcgagagaaattaggatagttaagagagctgcctataggctggagggagaggcttaggcagaatgccctattagctttgcaaggggccctgtcaggaagtcgctgggggctcgagagaggcttcttaggttcggtggcttggggaagt

SEQ ID NO: 594345 - DNA, 439 bp, Homo sapiens
  misc_feature (6)..(6): n is a, c, g, or t
  misc_feature (179)..(179): n is a, c, g, or t
cctacnaaaccacaaaaccccttgccaaatgtccattgaataaattgtaccccttgagacccctgaacccaagagttttagatatgtaagttagaaacagtagatacctaggtgtaagtcggtgccaaaagtaattgtggtttttgacattgaaaagtagtggccagctgggtgccagntgtcacgccctgtaatccccagcactttgggaggcccaaggtgggcggatcatctgaggtcgagttcgagaccagcctgaccaacatggagaaaccccctctctgctaaaaatacaaaattagctgggcgtggtggcagatgcctgtagtcccatctacacgggaggctgaggcaggagaatcacttgaaccagggaggcagcggttgcagtgagcggagatcgcaccactgcactccagcctgacaacagagcgcgact

SEQ ID NO: 594346 - DNA, 609 bp, Homo sapiens
tcccttatttttcgctatttttcttatttttattttttgtttttcttctcttcattcatctccctcatttatcgttgtattttatggtgctttttttgctattttatcatgtttgtttttatctattggtttttctcttcttctttatgtattcttttttattttctctattgggtgttcccctagtttataattttttttttgtgatctttactgtgtctctgtaagtgtgtattgtttcgtatctctgtagctctgttttgtttttcttcgttggtttttaatatgtgtttgtacttgtctttttaatgtttctctttctcccttgtatgtttgtgtttcatgtcctccgtcatattgcttatcttgtcgctccctcttgcaatcaacatgtgcatcttcaagtgatccacccttcccttgtgggcgaactcctgatgaacgcaacatcttccccgcagtgcccccagcctacaggggtggccatatttgggcagttctccagtcctgtgggctcggctatacttgggagcagatttccttggtctggatttgcctggggagatgggtcctgggcttggatctttccctaggcgggccctgcgacta

SEQ ID NO: 594347 - DNA, 116 bp, Homo sapiens
gctcgacataggatgcagatttaaactcaatatgtaaataatacagggagaaacatgatataacagcacatcactccatactcattatgggatgtctacattttatattgaaaacg

SEQ ID NO: 594348 - DNA, 316 bp, Homo sapiens
aggaccgatctgtgcctgagagccttcccacgattcatgacatatatgagcttcatccccagaatgaattctctgacgctgaacaagggctgagctcctttggaaagtagcgccacattcgttacactgactaggttcctccccactatgaattctcggatgtcagataaggttggagctcgaactgaaagcttttccacattcactacattcatagggttactctccactatgtattctcgtgatgagtaatcagctctgagctctgcctgaaagcgtttccaggttcactacgttcatagggtccctctcctgt

SEQ ID NO: 594349 - DNA, 854 bp, Homo sapiens
  misc_feature (118)..(118): n is a, c, g, or t
gcccccccaatttatctggatcttccgggaacacatgttaggaaaccgttccagatggacctacttttcctcagatgctgccttacagtattataactaattcaggtacaagtgagancttgtcttccaaggaggtatccttgtggtccgattgccaaaaacagctgcacctctgccccaggaagatcccataggaaagggtgaagggctgctacagggccttcaaccccaggcacctcctccataatgaaacttgggctttggagtttccatgtgatgccatcaagggctttttcagctcaaatatatgtctttcatgattcaggatggcaataagaaactttgagctggctgtagctacttacacgatctcattttatcctgagagtggcctgcatctcagtcacctctgtgtccttagcatttagcatgatgcctggaatacagttctgcttctcattttgtttgatgaacaaccctgagtccattagagatgactcctttggctcctggttttaaatttattttctgtacgtttatttatttatttatttatttatttttgagacagggtctcactctgttacccaggttagtgcagtggcacgatcttggctcactgtgacctctgcctcccaggctcaagtgatcctcccatctcagcctcccactgaatagctggaaccacaggcacacactcctcactttctaagctccagtcctaagtcatatcattctcattgccatacctcaaaagcacccaagtctcaggcacctggactttctacctagaaggtccaccccagtttgtttactgtcctgatgaacattcagctaagccacggcacgagcgg

SEQ ID NO: 594350 - DNA, 283 bp, Homo sapiens
tacagagctcccacttgctggctgcacattgaggcccgtctctactaaaatacaaaaattagctgggcggggtggcgggcgcctgtagtcccagctactcaggaggctgaggcaggagaatggcgtgaacccgggaggcagagcttgcagtgagctgagatcgcgccactgcactccagcctgggtgacagagcaagaatccgtgtcaaaaacaaacaaaaacctaacacatttggcagggcacggtggctcacgcctgtaatcccagcaatgtggcagccag

SEQ ID NO: 594351 - DNA, 121 bp, Homo sapiens
ataaactggctaggtgaaagtagtagcataaaaaggacggcttagcaacagaggcataatactagcttatggtaataagacggacaacacaagagaaaagaggaaccacagaaggacaaaa

SEQ ID NO: 594352 - DNA, 468 bp, Homo sapiens
  misc_feature (67)..(67): n is a, c, g, or t
  misc_feature (75)..(75): n is a, c, g, or t
tcaatcacaataagggtacaacagacttgaatacgacatagccaattagacaaacagcatcaatttncaaacaancggtaaccaaagtcacaaatcatcctagtaataaagtgaaatcagacccacaacgaatgaatgaacagccacgtcagttttttttgggagagggggctacaaggcctgagtgccatcagatgtaccaaaccaaattataaaacccatggccctccccaggggtcttcagggagtgggtccaggtagcattgatgagacctttatatctgctgtttgccagtgctttgcacacaggctctgcgccaatcacagggcaagtctcccctgctgtggaaagaccctgctgtttggcttaacacatctcacccctctgcaagcttttattgtcacagatgaagacatcaggaacaggagagcgagtccagcaagtacgcagaaatgggagagcactca

SEQ ID NO: 594353 - DNA, 993 bp, Homo sapiens
gtctgtggatgtgttttattttttatagtgtcgagtgatcgtgccttggttcagggactgtccgttgtgtaccccctgtttttaccctctttgcgcttcttcccccccgtgcgccccgtttttggtgagaccccgctaattttgttagccaccttatagagtttccttgcccggccccgcaaaaatgccgggatttgccccttccaccgggggttccccagagaagctcccttgtctgtaagtgggcttccccgcactgggccctgccttttacacatccccgggggcgtttttcccgcctgcccccgatattgtctccgaaactccgcgcgccaccagaagcgggtggttcttgcgcccccacgtgccagtgtccctggctcaaatggggtgccgccaccacagtacttggacggccccaaggctttggtcgtaaccttcgtcgtgcacagaagcccccccgggggggttaaaaattacttcgtcgcccccacgcgtgttttctattcgatacttcccccccgggacatcgtccttcaattctggcgaacaccctcgtctacaataatagcggcgagctcggcggcactaaagtgagacaaaccggcccccccttcggtgcgatcccacacggtgcctttcgttcaccacagccagaagaaaatatttccttttgaccccggcccgattggtggtgacaaactccccgcctccttccttccagcgacagaatccacgcccttcacgacgcgtcctctcatggggttagagtactgtgttcagcgagtagattctgccctttcccaacccctcgcgggcagcttccagcgtcattggttctcaggccgccttgcaatgtattcttcccgaagttgcgccacgaggccccccccgttgggggctgggttttccctcgctgtccatggaaaagggttgtctctcgttttttaacaaccccaaaattgcccccggggcccaacaaaccaaaaaaca

SEQ ID NO: 594354 - DNA, 575 bp, Homo sapiens
aaggccggacgcagtggctcacgcctgtaatcccagcactttgggaggccgaggcgggcggatcacttgaggtcaggagtttgagaccagcctgaccaacatggtgaaaccccatctgcaataaaaatacaaaaattttagccgggcttggtggcaggcgcctgtactcccagctacttgagaggaggctgaggcaggagaatggcgtgaacctgggaggcagagcttgcagtgagccgagatcgcaccactgcactccagcctgggcgacacagcgagactccgtctcaaaaaaaaaaatgttctaagatggccgggcgcagtggctcacgcctgtaatcccaacactgggaggctgaggcgggcgcatcatgagttcaggagttcaagaccatcctggccaacatagtgaaaccccacctctactaataatacaaaaattagctggacatggtgggacatacctgtaatctcagctactcaggaggctgaggcaggtagatacacttttcactgggaggcggtaggctgtggtgaagcaaatacggtcccacggaacttcagccggggcaaca

SEQ ID NO: 594355 - DNA, 102 bp, Homo sapiens
tgctgggattatgggcatgagccaccgtgcctggccaggaaacagtttttaatttaaaaaaaaaatttatcccaaaaacaatatctgctgggtaccgagctc

SEQ ID NO: 594356 - DNA, 918 bp, Homo sapiens
gccatcaagtataacctcaagcaagcaaacggattccatgaatccttctaatagtctatcctctatcaagcaagtatactctgcccggataatgaacctataaccaatactgaccaattcaataactcgatcgattaataatacattaagtggtctatgagcaatgaaaatctaggtagatagccccctttgcagcttctagaggtcctcacaaggtgtacccaaggacacccctctggaacattccgggcaaatggctttcttgactacaccgatgaacaaaaaggtagtccgccacatacctgcgaattcatataccataatgctctcaccacagaaaatgttaagccttgctccgtacagctctcgtcacatcttatccatcattagcaggcagtggaggtggaattcaaaccaaagcccagctacgcgggaacctcttagactatactcctcaataacccatcataggatgtaacttaatagtcagtgtctaccgtaacaagcctgaatataaggcatctcttaatttagctatctgatgttgatcctaattatgtagcggcatgcctactatctcaatggtgaaatttccatgtaacactgactcgtagtaatatctaagcgccggaaacaagtaaaaatgactaaaaagcttttaatttcgatgtcagccgtcctctaccattaggaggcgtgccccccgtgaaaacgggcttttgccgcaatagtggcgcagtaatctgacagaattcccaatataccagtggcgtggtttattcgcacattttagtgacatacctgcttgaacttgtatttactagctagttatgcacctaatgagtagccaattaaaggaatcacgtggcggtgggttaaaccgccttttccaataaactaaagttctctttccttaaa

SEQ ID NO: 594357 - DNA, 331 bp, Homo sapiens
cgcgctagtgtgctcatagcgagggacaggggatataactggaggttagggttactagtgagcagactacttggggtgactagtattggcatcagaaccaaatccaggcgctcagggcagccctgcaggtggggtgggtctccaggctgctccatactcagcgccggtgatgccgtcgtccattcggcggggatccatcgagaggatactccattgaggtacccccaatcccacgcccctgtttcagcgttcacagggtttcacaggaaactttctcaccacgcgtgtttaaaagataaaaagtaattcagccctcgtggacataggcttc

SEQ ID NO: 594358 - DNA, 163 bp, Homo sapiens
cgcccatttccagaaggcaagggtgttgaggacgtagggatagaaagtcgagaagagggccgggtgagtggctcacgcctgtgatcccagcactttgggaggccgagacaggcggatcaccttaggtctggacttcgagaccagcctggcctacatggcgaaa

SEQ ID NO: 594359 - DNA, 174 bp, Homo sapiens
ccacgtgcgcggcattggcgccggctgaccagtcacgtggacgtcgcctccgatcttggcagcggcggtgacggcgttcaggcttgcgcccttaagctgggcgttatcgtgttcggcaataaccagcgtcgtcatctcaaaccaccttcgcttcgttcttgagtttgtccacca

SEQ ID NO: 594360 - DNA, 466 bp, Homo sapiens
aacacggcagtgcacgctactttctcatgtcgattcttgaggtatacccccctagatggtccctggctcacctttgacctctacccccatgttgtgtgctttctcaatcagttgatgaaatgccaaatggtgccaacgacattgcatgtcctctcacacgctgcccgaggagaactaccagagtgcttcttttcctgactagctattcctggtgcagatttctgcacacagtgaccagaacaagatgaccaacactaacctggctgttgttttcggccctaacctgctgtgggccaaggatgcggccatcaccctcaaggccattaatcccatcaacaccttcaccaagttccttctggatcaccaaggggagctgttcccaagcccggaccccagcgggctctgaacctggcccctgccccaccagccccttctctggtagcccgggtttggactcttcctcctg

SEQ ID NO: 594361 - DNA, 316 bp, Homo sapiens
tcacagagaacccaccatggagctgtctgctgacgacaagaccaacggcaaggccgactggggtaaggtcggcgcgcacgctggcgagtatggtgcggaggccctgcagaggatgtgcctgtccttacccaccaccaagacctacttgccgcacttcgacctgagccactggttttcccagattaagggccacgggaagaaggtggtcgactcgctgaccaacgccgtggggcacgtggacgacatgcccaacgcgctgtcctccctgagcgacctgcacgcgcacaaacttctggtggacccggccaacttgaag

SEQ ID NO: 594362 - DNA, 150 bp, Homo sapiens
aaatccgaggcgttctgtatttatgtcgcccacagttgcttgttagtagtggccatagataacagcatctcctcatccgcatggcattggtcgttaaggtgcctaacctcctctgcagctttctcaaactcagcctgagacatcctggcc

SEQ ID NO: 594363 - DNA, 390 bp, Homo sapiens
cgctccacttggttgtcaaaaatacagcatattattaagaaatgtcaagctggccggggcacggctggctcacgcctgtaatcccagcacttagagaggccgaggatgggaggaccacttgaggccaggagttccagaccagtctggccaacatggcgaaaccccatctctactaaaaataaaaaataaaaaatagctgggtgtggtggcacacgcctgtaatctcagatacttgggaggctgaggcacaaaaattgcttaagccaggaaggcggaggttgcagtaacccaagagctcgccactgtactcccgcctaggtgacagagtgagactccgtctcaaaaaatgaaaattttggctgggcacggtggctcacacctgcaatccca

SEQ ID NO: 594364 - DNA, 212 bp, Homo sapiens
tctaaggaccgtgtatgtgcatgaccaggatgtattcgaggccactagagagcagtataaatactgtgtgctatgtggtaaagacatagagccttcatgtgtgcatttcgagatcagctgtgtgagtctgaatatgctaataacatcagaaccttgtgagattgtgccttgtgtcgcggaggaccagagtatgttgaggttccagggggtgc

SEQ ID NO: 594365 - DNA, 109 bp, Homo sapiens
gacaaaggaaaacaatgagagatctttaaaattaaaaatgtatgtgcttcaaaggacactatcaagaaagtgaaaagacaatccacagaatgggagcaaatattgcaaa

SEQ ID NO: 594366 - DNA, 430 bp, Homo sapiens
  misc_feature (378)..(378): n is a, c, g, or t
  misc_feature (388)..(388): n is a, c, g, or t
agttggggcactgaatgaactccgcacagaacaccggccttgcaccaaccagttgtgcgcttgcaacaggcacctggaggaatgccctctggactcgagcctctgttctgaccatagctgcagctctcgtgctccctttcagagcagcaccacttctctggttcctgtccacctgagacgcagacccatcctgccacccactagcccgagccccagcccagctcttgccttttggaaacgtgtcaggattggcctggaggatatctggaacagcctttcttcagtgttcacagagactcaaccagtagaaagaatccagaggtaatggccatgtctccctcaagagaagatgtctacattataaactcccttttcaanccccaacacnccactatatatttttaatatatagaaaaaaaaagctaaaaaa

SEQ ID NO: 594367 - DNA, 1040 bp, Homo sapiens
gactcgggaaaccttcagaggagtctccagaaaggacacggtggctgcttttctcagcgccgaagccggcatgtcgtcctcagaagcgcccgagtcagggcgctctgaggaaacatggctgacagatgaggatcaagggaaatatcgcggtcgataattggtcatggagggcccgtagatagatgtgaatgtggaggttgccgtggcaagcacttgtgtggacgagaacgggtcaattgtaggggaacaaggatacacattgtcgggaactgagggggaggggaatagctgggacgtggtaaaaattggggggggccctgaatgtggattaccaggtggtcacagttatttggggaaggtactgataaattgggctccttcgaaactgtggaaggtcgggaaaaggccgtgtggccaaagagatacggacttgggccacagaacaatttcctacattcccaaaattgtggctactcattctgataaaaccaagaaggagtgggatttacattatctgggtaccaggggcaaacttagcaaaaacctccaagaagaacggagttctattgaacctggcaattctccaagaatgaacacgggggggccagcctcggggcggtgctgcattctaacaaggcacagctccactgccgctggtaactccaggctacccgcccactcagctggagggggcccccaacaggagtaggggaccacccaaaggaatccaaggtcgttgggggcacgagaggcgggacgaagcaggcaaggcggcacatacagcaccagaaggctccaacacggggggatagatcgagcgaggtgactcataaggtagtaacgaggaggcctgcgccacatcgatacaagcaaatgagttcagcgacacacaacctaaccgaagcgctgcgtggtggcgtacacactacaacgccaggcggcagacagtacagagcaacaaagagaaccgacacaaagatcagagtcaacgacgagctggacatgaagagacgcgtaggagagtacgtaaggtaatatga

SEQ ID NO: 594368 - DNA, 366 bp, Homo sapiens
  misc_feature (23)..(23): n is a, c, g, or t
  misc_feature (25)..(25): n is a, c, g, or t
  misc_feature (27)..(27): n is a, c, g, or t
  misc_feature (35)..(35): n is a, c, g, or t
  misc_feature (37)..(37): n is a, c, g, or t
  misc_feature (46)..(46): n is a, c, g, or t
  misc_feature (48)..(48): n is a, c, g, or t
  misc_feature (53)..(53): n is a, c, g, or t
  misc_feature (57)..(57): n is a, c, g, or t
  misc_feature (60)..(60): n is a, c, g, or t
  misc_feature (63)..(64): n is a, c, g, or t
  misc_feature (67)..(67): n is a, c, g, or t
  misc_feature (71)..(71): n is a, c, g, or t
  misc_feature (73)..(74): n is a, c, g, or t
  misc_feature (79)..(79): n is a, c, g, or t
  misc_feature (85)..(85): n is a, c, g, or t
  misc_feature (92)..(92): n is a, c, g, or t
  misc_feature (97)..(98): n is a, c, g, or t
  misc_feature (109)..(109): n is a, c, g, or t
  misc_feature (126)..(126): n is a, c, g, or t
  misc_feature (131)..(131): n is a, c, g, or t
  misc_feature (136)..(136): n is a, c, g, or t
  misc_feature (139)..(139): n is a, c, g, or t
  misc_feature (142)..(142): n is a, c, g, or t
  misc_feature (153)..(153): n is a, c, g, or t
  misc_feature (156)..(156): n is a, c, g, or t
  misc_feature (159)..(159): n is a, c, g, or t
  misc_feature (164)..(165): n is a, c, g, or t
  misc_feature (173)..(173): n is a, c, g, or t
  misc_feature (176)..(176): n is a, c, g, or t
  misc_feature (184)..(184): n is a, c, g, or t
  misc_feature (186)..(186): n is a, c, g, or t
  misc_feature (193)..(193): n is a, c, g, or t
  misc_feature (195)..(195): n is a, c, g, or t
  misc_feature (199)..(199): n is a, c, g, or t
  misc_feature (202)..(202): n is a, c, g, or t
  misc_feature (206)..(206): n is a, c, g, or t
  misc_feature (209)..(209): n is a, c, g, or t
  misc_feature (219)..(219): n is a, c, g, or t
  misc_feature (223)..(223): n is a, c, g, or t
  misc_feature (227)..(227): n is a, c, g, or t
  misc_feature (229)..(229): n is a, c, g, or t
  misc_feature (234)..(234): n is a, c, g, or t
  misc_feature (236)..(237): n is a, c, g, or t
  misc_feature (241)..(241): n is a, c, g, or t
  misc_feature (243)..(243): n is a, c, g, or t
  misc_feature (246)..(246): n is a, c, g, or t
  misc_feature (261)..(261): n is a, c, g, or t
  misc_feature (281)..(281): n is a, c, g, or t
  misc_feature (285)..(285): n is a, c, g, or t
  misc_feature (291)..(291): n is a, c, g, or t
  misc_feature (293)..(293): n is a, c, g, or t
  misc_feature (298)..(298): n is a, c, g, or t
  misc_feature (329)..(329): n is a, c, g, or t
  misc_feature (337)..(338): n is a, c, g, or t
  misc_feature (348)..(348): n is a, c, g, or t
  misc_feature (352)..(352): n is a, c, g, or t
  misc_feature (354)..(354): n is a, c, g, or t
  misc_feature (356)..(356): n is a, c, g, or t
  misc_feature (362)..(362): n is a, c, g, or t
  misc_feature (364)..(364): n is a, c, g, or t
cgtcggtcgctagctcgctcggngngngtggtccngngtccatggngntcttngtgnggntgnnggntctngnnctggntctggncctgggncccgnngcgaccctggngggtcccgccaagtggncctancagcnggngcngcagcacagcnggntcnggggnngccagcgnggncccaaggngngtgcggngnaganggntatnggnactaataggnagtncttnancaacngnnagcngnggnaccaaaggaaaatcngtgggaaatcaacagtgatnagcnaggagngnggtgntggatatgaaaaggtccctggggagaagggntgtccagnngccctaccantctnananctttangnga

SEQ ID NO: 594369 - DNA, 487 bp, Homo sapiens
  misc_feature (338)..(339): n is a, c, g, or t
  misc_feature (395)..(395): n is a, c, g, or t
  misc_feature (401)..(401): n is a, c, g, or t
  misc_feature (407)..(407): n is a, c, g, or t
  misc_feature (410)..(410): n is a, c, g, or t
  misc_feature (418)..(418): n is a, c, g, or t
  misc_feature (424)..(425): n is a, c, g, or t
  misc_feature (427)..(427): n is a, c, g, or t
  misc_feature (429)..(429): n is a, c, g, or t
  misc_feature (431)..(431): n is a, c, g, or t
  misc_feature (440)..(440): n is a, c, g, or t
  misc_feature (454)..(454): n is a, c, g, or t
  misc_feature (471)..(471): n is a, c, g, or t
tgtaccactcagatgggagatgttgctaatgggggaggctatgcatgtgtgggagcagagtgtatctggcagcagtccccagcctttttggcagcagggaccagttttatggaagacaatttttccacagatagttgggggaatgggggtatgatctggggatgaaactgtgaaactattccacctcagatcaacaagcattagttagattctcataaggaacatgcaacctagatctcttgcatgcacagttaaaaatagggttcgcactcctatgagaatctaatgccaccactgatctgacggaaggcggggctcagttggtaatgctggctcannactgcgtggtccagtttctaacaggccaccaactggtactggtccatggcccgggngttggngacctntgngatacctntgcacnntntncncagtttttntgtgaacgtacaancgctttaaaataaggtntataattaaaaagaaa

SEQ ID NO: 594370 - DNA, 206 bp, Homo sapiens
tgtttatgttgatctagagtgatcccgcttaatgccaaggtgatctcccgtcagcagatctggaagctcatcaaagatgtgctgatcatcctgcaagcctgtgactgtgtccattcactgttgctcgatgccttgaaaaacaccttgtgactgccggaaagggcaggcacattggcatatggtaatgctggcatgggtacagacca

SEQ ID NO: 594371 - DNA, 179 bp, Homo sapiens
agagtgtactcacgacgtaggactgggagagataggagagtagacgcgtgattaggagggatcagacgaagaggggcgtgtggtattgggttatggaggtggttttatattgagtaatctgtgtgatgaaatggtatggccccgtaagatagtgctagcgtctgtatagacactcttgt

SEQ ID NO: 594372 - DNA, 485 bp, Homo sapiens
  misc_feature (474)..(474): n is a, c, g, or t
aaggcagaaataattaggctagggctcttagttttcattcctattgcccaagtattgtcaaactatggtattattttaatgttactttaaaaatccataatctgctagttttgcatgtacttatatgaaaacagtgcagtaagttgaaaactcagtatctatggaattgataaatgttgatctggtgtagtatattttatcgcattttcttatattaaaaaatgtctgcatgattacattttatttcctttgtaattaacatttaaaaatagtgcactaccatatgggcgcccacattcaatatcacccaacccagtgttcgtagaacaacacatttaaaacaaacatgtgtggtcaaacaaccataagaatcggtctcaaataaactctgaacatgtcatattttgatcaaaaatttttaactttataaattggacatcaccatgtatatctttaaaaaatgaacataaaatnctgattttttt

SEQ ID NO: 594373 - DNA, 253 bp, Homo sapiens
  misc_feature (40)..(40): n is a, c, g, or t
  misc_feature (101)..(101): n is a, c, g, or t
  misc_feature (113)..(113): n is a, c, g, or t
  misc_feature (136)..(136): n is a, c, g, or t
  misc_feature (153)..(153): n is a, c, g, or t
  misc_feature (186)..(186): n is a, c, g, or t
  misc_feature (208)..(208): n is a, c, g, or t
tgcctgcttgagtgaaactatgtgtgggttttccctgtancttgtagaaatgttggggtgttttcctctccatatgctcgtgcctgcgagccaactatttncagctgtatttnccttcatttttgatgaggtgganttaaattttgtttcacnttgtgttagtgaattccacagtagttttctgantgttgttaaaaatgacttaacnttattacacagatattcaataaaaatgttttatttcctgttaaaa

SEQ ID NO: 594374 - DNA, 2726 bp, Homo sapiens
  misc_feature (1083)..(1083): n is a, c, g, or t
  misc_feature (2509)..(2509): n is a, c, g, or t
  misc_feature (2556)..(2556): n is a, c, g, or t
  misc_feature (2606)..(2606): n is a, c, g, or t
  misc_feature (2677)..(2677): n is a, c, g, or t
gggttcctgcatcgggcctgagcagaactaggcgcgccgcggcccggcacgcgcaggcgtacagagctgcccgggggtgccagttcctctccgattcccggcttctgtcaccttcctcacggaccttggtcacggccgcaggtgaccccttagcccagctccagtgggcgggtggcagggtcatggaggacgctggcggcggcgaggagaccccggccccggaggccccgcacccccctcagctcgcgcctccggaggagcaggggttgctcttccaggaggaaaccatcgatcttggcggagatgagtttggatccgaagagaacgagaccgcatcggaaggctcgagtcctctcgcggacaagctgaacgaacacatgatggagagcgtcctcatctctgactcccccaacagcgagggcgacgcgggcgacctgggccgagtgcgggacgaagctgagcccggaggggaaggcgacccaggcccggagcccgcgggcaccccgagtcccagcggcgaggccgacggcgactgtgcccccgaggacgcggcacccagtagcggaggggccccgaggcaggacgcggcccgcgaggtcccaggcagcgaagccgcgcgcccggagcaggagcctcccgttgcggagccggtcccggtgtgcaccatcttcagccagcgcgcgcccccagcctccggggacggcttcgagccgcagatggtgaagtcgcccagcttcggtggcgccagcgaggcctcggccaggacaccgccccaggtcgtgcagcccagccccagcctcagcacgttcttcggagacacggccgccagccactccttggcctcggacttcttcgactccttcactacctccgccttcatttccgtcagcaatcccggcgcgggctccccggcccccgccagcccgcctcccctcgctgtgcccgggaccgaggggcgccccgaacccgtggccatgcgagggccccaggcagctgcgcccccggcgtcgccagagcctttcgcgcacatccaggcagtgtttgcagggagtgacgacccctttgccaccgccctgagcatgngcgagatggaccggaggaacgacgcctggcttcccggcgaggctacgcgtggagtcctgcgggccgtggccacccagcagcgcggcgccgtgttcgtggacaaggagaacctcaccatgccgggcctcaggttcgacaacatccagggagatgcagttaaagacttgatgcttcgctttctgggtgaaaaagctgcagcaaagagacaagtcctaaatgccgactcagtggaacaatcttttgttggattgaaacagctaatcagctgcagaaactggagggcagcagtggacctgtgcggacgtctcctcacagcccacggccagggctacggcaagagcgggctgctcaccagccacacgacagattcactgcagctctggtttgtcaggctggcactactagtgaagttgggccttttccagaatgctgagatggaatttgaacccttcggaaatcttgatcagccagatctttattacgagtactacccgcacgtgtaccctgggcgcaggggctccatggtccccttctcgatgcgcatcttgcacgcggagcttcagcagtacctggggaacccacaggagtcgctggatagactgcacaaggtgaagactgtctgcagcaagatcctggccaatttggagcaaggcttagcagaagacggcggcatgagcagcgtgactcaggagggcagacaagcctctatccggctgtggaggtcacgtctgggccgggtgatgtactccatggcaaactgtctgctcctgatgaaggattatgtgctggccgtggaggcgtatcattcggttatcaagtattacccagagcaagagccccagctgctcagcggcatcggccggatttccctccagattggagacataaaaacagctgaaaagtattttcaagacgttgagaaagtaacacagaaattagatggactacagggtaaaatcatggttttgatgaacagcgcgttccttcacctcgggcagaataactttgcagaagcccacaggttcttcacagagatcttaaggatggatccaagaaacgcagtggccaacaacaacgctgccgtgtgtctgctctacctgggcaagctcaaggactccctgcggcagctggaggccatggtccagcaggaccccaggcactacctgcacgagagcgtgctcttcaacctgaccaccatgtacgagctggagtcctcacggagcatgcagaagaaacaggccctgctggaggctgtcgccggcaaggagggggacagcttcaacacacagtgcctcaagctggcctagctgcctccaacacactacgtcagaaggacccgggtctttgaaactgtgtcttgaagctaatgtattaatgtgacatggaggaactcaataaaactcctgcttcactggtgtctgctgcntgttttcttggtcccaagccacggcccagcccaggactgccccgcanttggtcggcgttcagcacgcagtccctgcagctgggtcactgttcatgantgcaaggggcaggcgtgctgggaggacacagctcgtagacaggaaatctggagtcagcctcggggcctctnttctggaggccaatcctgctttgctcgttccttctggacatcctcagag

SEQ ID NO: 594375 - DNA, 1394 bp, Homo sapiens
  misc_feature (38)..(38): n is a, c, g, or t
  misc_feature (40)..(40): n is a, c, g, or t
ggggcagccgaagggggtgggggatggagggttacagngnattgctgtcttggtacctgcactccgcggagtcctgagttcttgtcctgcctccaagaagaacgagattatgccgacaaccagagggagatgcagttaaagacttgatgcttcgctttctgggtgaaaaagctgcagcaaagagacaagtcctaaatgccgactcagtggaacaatcttttgttggattgaaacagctaatcagctgcagaaactggagggcagcagtggacctgtgcggacgtctcctcacagcccacggccagggctacggcaagagcgggctgctcaccagccacacgacagattcactgcagctctggtttgtcaggctggcactactagtgaagttgggccttttccagaatgctgagatggaatttgaacccttcggaaatcttgatcagccagatctttattacgagtactacccgcacgtgtaccctgggcgcaggggctccatggtccccttctcgatgcgcatcttgcacgcggagcttcagcagtacctggggaacccacaggagtcgctggatagactgcacaaggtgaagactgtctgcagcaagatcctggccaatttggagcaaggcttagcagaagacggcggcatgagcagcgtgactcaggagggcagacaagcctctatccggctgtggaggtcacgtctgggccgggtgatgtactccatggcaaactgtctgctcctgatgaaggattatgtgctggccgtggaggcgtatcattcggttatcaagtattacccagagcaagagccccagctgctcagcggcatcggccggatttccctccagattggagacataaaaacagctgaaaagtattttcaagacgttgagaaagtaacacagaaattagatggactacagggtaaaatcatggttttgatgaacagcgcgttccttcacctcgggcagaataactttgcagaagcccacaggttcttcacagagatcttaaggatggatccaagaaacgcagtggccaacaacaacgctgccgtgtgtctgctctacctgggcaagctcaaggactccctgcggcagctggaggccatggtccagcaggaccccaggcactacctgcacgagagcgtgctcttcaacctgaccaccatgtacgagctggagtcctcacggagcatgcagaagaaacaggccctgctggaggctgtcgccggcaaggagggggacagcttcaacacacagtgcctcaagctggcctagctgcctccaacacactacgtcagaaggacccgggtctttgaaactgtgtcttgaagctaatgtattaatgtgacatggaggaactcaataaaactcctgcttcactgg

SEQ ID NO: 594376 - DNA, 885 bp, Homo sapiens
gaagtaggttctctttaagggacaccctagatgggctaatcggggcagatagaaaaggaggaagcctctgtagggccgtcaagtgcttggggttccgaaaatcttgaggactgaaagacaactaatgcctttcaggacgatcatcatggaggatcctcccgcctcggccttgggtctacaggcctgtattatcccacccctgtttttttttttttttttttagtagagacggggatttgttatgttgaccaggctggcctcaaccgcctgggctcaagcaatcctcccgccttggcctcgggactacaggcacgaaccaccccaccctcactaattgtttttatttttatattttgtttagtacagacggttttgctatgttggccaggctggcctctgccgccgtgggcttaagcaatccttccgcctcggccctgggactacagaagtgcaccatcctgcccatgcttgtttctttttttttagtagacaccgggttgcctatgttggccaggtggcctcaacctccggggcccacgcggactcctcacccctgggctcgcgactacagttgtgtgccatccgccctgttaatttgtgggggtcggccattttagtaaagaaaggggttccctatggtgggcgaatggggttgacctcgtcggttaaggtgttcccccccttggcaggaataagggaagaacccctgtatgtattattgggcgcactacatgcgcaacagcgcgttctgctagtaggaccagggccactaccccgtgagaagacctgtgtcttgcggaaaagggaaactaccgccacaatttgcaatttagttgagcaacgctcgcggaggatatacggggaaaagccctgaagtgattgtgc

SEQ ID NO: 594377 - DNA, 2397 bp, Homo sapiens
  misc_feature (1083)..(1083): n is a, c, g, or t
gggttcctgcatcgggcctgagcagaactaggcgcgccgcggcccggcacgcgcaggcgtacagagctgcccgggggtgccagttcctctccgattcccggcttctgtcaccttcctcacggaccttggtcacggccgcaggtgaccccttagcccagctccagtgggcgggtggcagggtcatggaggacgctggcggcggcgaggagaccccggccccggaggccccgcacccccctcagctcgcgcctccggaggagcaggggttgctcttccaggaggaaaccatcgatcttggcggagatgagtttggatccgaagagaacgagaccgcatcggaaggctcgagtcctctcgcggacaagctgaacgaacacatgatggagagcgtcctcatctctgactcccccaacagcgagggcgacgcgggcgacctgggccgagtgcgggacgaagctgagcccggaggggaaggcgacccaggcccggagcccgcgggcaccccgagtcccagcggcgaggccgacggcgactgtgcccccgaggacgcggcacccagtagcggaggggccccgaggcaggacgcggcccgcgaggtcccaggcagcgaagccgcgcgcccggagcaggagcctcccgttgcggagccggtcccggtgtgcaccatcttcagccagcgcgcgcccccagcctccggggacggcttcgagccgcagatggtgaagtcgcccagcttcggtggcgccagcgaggcctcggccaggacaccgccccaggtcgtgcagcccagccccagcctcagcacgttcttcggagacacggccgccagccactccttggcctcggacttcttcgactccttcactacctccgccttcatttccgtcagcaatcccggcgcgggctccccggcccccgccagcccgcctcccctcgctgtgcccgggaccgaggggcgccccgaacccgtggccatgcgagggccccaggcagctgcgcccccggcgtcgccagagcctttcgcgcacatccaggcagtgtttgcagggagtgacgacccctttgccaccgccctgagcatgngcgagatggaccggaggaacgacgcctggcttcccggcgaggctacgcgtggagtcctgcgggccgtggccacccagcagcgcggcgccgtgttcgtggacaaggagaacctcaccatgccgggcctcaggttcgacaacatccagggagatgcagttaaagacttgatgcttcgctttctgggtgaaaaagctgcagcaaagagacaagtcctaaatgccgactcagtggaacaatcttttgttggattgaaacagctaatcagctgcagaaactggagggcagcagtggacctgtgcggacgtctcctcacagcccacggccagggctacggcaagagcgggctgctcaccagccacacgacagattcactgcagctctggtttgtcaggctggcactactagtgaagttgggccttttccagaatgctgagatggaatttgaacccttcggaaatcttgatcagccagatctttattacgagtactacccgcacgtgtaccctgggcgcaggggctccatggtccccttctcgatgcgcatcttgcacgcggagcttcagcagtacctggggaacccacaggagtcgctggatagactgcacaaggtgaagactgtctgcagcaagatcctggccaatttggagcaaggcttagcagaagacggcggcatgagcagcgtgactcaggagggcagacaagcctctatccggctgtggaggtcacgtctgggccgggtgatgtactccatggcaaactgtctgctcctgatgaaggattatgtgctggccgtggaggcgtatcattcggttatcaagtattacccagagcaagagccccagctgctcagcggcatcggccggatttccctccagcgcgttccttcacctcgggcagaataactttgcagaagcccacaggttcttcacagagatcttaaggatggatccaagaaacgcagtggccaacaacaacgctgccgtgtgtctgctctacctgggcaagctcaaggactccctgcggcagctggaggccatggtccagcaggaccccaggcactacctgcacgagagcgtgctcttcaacctgaccaccatgtacgagctggagtcctcacggagcatgcagaagaaacaggccctgctggaggctgtcgccggcaaggagggggacagcttcaacacacagtgcctcaagctggcctagctgcctccaacacactacgtcagaaggacccgggtctttgaaactgtgtcttgaagctaatgtattaatgtgacatggaggaactcaataaaactcctgcttcactgg

SEQ ID NO: 594378 - DNA, 293 bp, Homo sapiens
tacccgggcttcagcaagaatctgtcaggtcagtttagtaacaatccccctttaccctgatgtttcctcgcattagtcattttccatcgacgggccccactctgctccggggctatatttataaatccccacttgtccacgttgtatttggaattgagcccagttctataccgaagtatcttttcccctattgtaatagttctgaataatctattttcactgctttaactattgtccagctctggttttcttggacagtttgggtgctacaactcggataagatcagactgat

SEQ ID NO: 594379 - DNA, 412 bp, Homo sapiens
acttacccttactggtaatgagctttcaatggctcgatcctctcacactgaaactctgtatagcatctcatagtccacaagcattcccaacattgagccttctgggggtagctgtctgtgtcatcccacaggaaggagctggagatccccattaggactgtccacccacactttaagccacaaagcctggagggattggggctctcacgtggtttggtcggctaagtcccgcctagaaggccagaaatttctggaaaacaggtaacagaccaaaaactaaagtgctatcagtacaatgaactatttatctactgcccgcgaatctctggcttgagactacctactggtgtccagttggagacagactaaaatgcactgaaggactattaggatagctgactcctaagttatc

SEQ ID NO: 594380 - DNA, 461 bp, Homo sapiens
tcgagccggtacctgaacattcgtgtcagcccacctgcctgcacttgtgtcatgccctatcgttggtatatcacagtcaagtcttacgaaaaggataataggccagcctgccacgcagatgaagataagctttgggcaaatatggtcctgccgttatgtagtaccccacaagaagtggagctacagatagtaaagatgatgatgacattgacctctttggatctgatgatgaggaggaaagtgaagaagcaaagaggctaagggaagaacgtcttgcacaatatgaatcaaagaaagccaaaaaacctgcacttgttgccaagtcttccatcttactagatgtgaaaccttgggatgatgagacagatatggcgaaattagaggagtgcgtcagaagcattcaagcagacggcttagtctggggctcatctaaactagttccagtgggacacgaatgttca

SEQ ID NO: 594381 - DNA, 2783 bp, Homo sapiens
  misc_feature (1083)..(1083): n is a, c, g, or t
gggttcctgcatcgggcctgagcagaactaggcgcgccgcggcccggcacgcgcaggcgtacagagctgcccgggggtgccagttcctctccgattcccggcttctgtcaccttcctcacggaccttggtcacggccgcaggtgaccccttagcccagctccagtgggcgggtggcagggtcatggaggacgctggcggcggcgaggagaccccggccccggaggccccgcacccccctcagctcgcgcctccggaggagcaggggttgctcttccaggaggaaaccatcgatcttggcggagatgagtttggatccgaagagaacgagaccgcatcggaaggctcgagtcctctcgcggacaagctgaacgaacacatgatggagagcgtcctcatctctgactcccccaacagcgagggcgacgcgggcgacctgggccgagtgcgggacgaagctgagcccggaggggaaggcgacccaggcccggagcccgcgggcaccccgagtcccagcggcgaggccgacggcgactgtgcccccgaggacgcggcacccagtagcggaggggccccgaggcaggacgcggcccgcgaggtcccaggcagcgaagccgcgcgcccggagcaggagcctcccgttgcggagccggtcccggtgtgcaccatcttcagccagcgcgcgcccccagcctccggggacggcttcgagccgcagatggtgaagtcgcccagcttcggtggcgccagcgaggcctcggccaggacaccgccccaggtcgtgcagcccagccccagcctcagcacgttcttcggagacacggccgccagccactccttggcctcggacttcttcgactccttcactacctccgccttcatttccgtcagcaatcccggcgcgggctccccggcccccgccagcccgcctcccctcgctgtgcccgggaccgaggggcgccccgaacccgtggccatgcgagggccccaggcagctgcgcccccggcgtcgccagagcctttcgcgcacatccaggcagtgtttgcagggagtgacgacccctttgccaccgccctgagcatgngcgagatggaccggaggaacgacgcctggcttcccggcgaggctacgcgtggagtcctgcgggccgtggccacccagcagcgcggcgccgtgttcgtggacaaggagaacctcaccatgccgggcctcaggttcgacaacatccagggagatgcagttaaagacttgatgcttcgctttctgggtgaaaaagctgcagcaaagagacaagtcctaaatgccgactcagtggaacaatcttttgttggattgaaacagctaatcagctgcagaaactggagggcagcagtggacctgtgcggacgtctcctcacagcccacggccagggctacggcaagagcgggctgctcaccagccacacgacagattcactgcagctctggtttgtcaggctggcactactagtgaagttgggccttttccagaatgctgagatggaatttgaacccttcggaaatcttgatcagccagatctttattacgagtactacccgcacgtgtaccctgggcgcaggggctccatggtccccttctcgatgcgcatcttgcacgcggagcttcagcagtacctggggaacccacaggagtcgctggatagactgcacaaggtgaagactgtctgcagcaagatcctggccaatttggagcaaggcttagcagaagacggcggcatgagcagcgtgactcaggagggcagacaagcctctatccggctgtggaggtcacgtctgggccgggtgatgtactccatggcaaactgtctgctcctgatgaaggattatgtgctggccgtggaggcgtatcattcggttatcaagtattacccagagcaagagccccagctgctcagcggcatcggccggatttccctccagattggagacataaaaacagctgaaaagtattttcaagacgttgagaaagtaacacagaaattagatggactacagggtaaaatcatggttttgatgaacagcgcgttccttcacctcgggcagaataactttgcagaagcccacaggttcttcacagagatcttaaggatggatccaagaaacgcagtggtaagatccccaagctgcaggatcctccatcctctgcctttcacagacgctagaaacatacacccacacacgtctcagcaggggcctgcgcgctctctctccagtccaccagctccaggcagtggctgtggcccttaggggaagtgacccaacagggccacctaggctctgcccagcagctctgcaccacccccaggcccctaacacggcccagcacgcagcctggaatgggcgggcgtctgtcctggttgtgtgggccaaccctgggcgtgtgctcctccctaggccaacaacaacgctgccgtgtgtctgctctacctgggcaagctcaaggactccctgcggcagctggaggccatggtccagcaggaccccaggcactacctgcacgagagcgtgctcttcaacctgaccaccatgtacgagctggagtcctcacggagcatgcagaagaaacaggccctgctggaggctgtcgccggcaaggagggggacagcttcaacacacagtgcctcaagctggcctagctgcctccaacacactacgtcagaaggacccgggtctttgaaactgtgtcttgaagctaatgtattaatgtgacatggaggaactcaataaaactcctgcttcactgg

SEQ ID NO: 594382 - DNA, 1115 bp, Homo sapiens
tctaccaatatagcacatccacctaccgcacccacacacacacactcactcatcccatctcacactctcactgctaaccctcacctctcaactctaaagcgctaaggttacgaggccctcgggtgtttatcggctgtcgtgggtcgcccgtaggtgtactgctgtagtggtacttcccagaaactgccagtagagggcagcctgggcatctaatgcttactctggttgttacacaaagcaaaatattggggtcactggcgagcccacccacactcaccagaatctccactgtagtccccctaacaaacagcccttcacttcctctcccactatcagcaatatctgtattttgatgccatatggcctcagatcagagtgtattaaatcatcacgccctaggcttatccctggtcgagccaggacacggggtagcttcagtagggtctagtacaccctactacatccttgaagcatagtagcttaatatttatttacttataactactcaccctagctacctagtacacagcaggggccactatcaaagccaaaggtacagggtagataacttcgtaggtaccagcatcagcttattctaccagcttctttactcccactacaccacacagcaaggtgcctggggcagcacttgagccacgatgtcccattctaggcctggaccagtggctgtacaagccaaggcactgcaaatggcacctgtgacctactggcattgcccgcagtcagactttcccaagagaaggccacaaggggtctatatctcaaggcccgggattcatccatgctagccatcctagcctagctagcaagacttgacaggcaatatacttgcactgggacaaacgttggacagagcacaagggcacaccacgtcactgtccatgagagacctatacgaacctacgggtacaccacctaccccagcgttaacccctgcatgccagcactcaacaccagcatcacgatcccatcatctcagcgcagtcacatcgtggccacattcgctggcagaatgaggaccaacaacgacaaacctcactctccacagctatctagccaagaacaacatgcgttccatccacaacataccgact

SEQ ID NO: 594383 - DNA, 113 bp, Homo sapiens
actaaggacacgggcccccttccgtcctcgggcttccggtcccctcctatttatggggtttgaccaactgcacccactccctaataaattcattctccttgggaaaaaaaaaa

SEQ ID NO: 594384 - DNA, 316 bp, Homo sapiens
ttcctttctcacctttccggtaccatttacccaagatcctgttccccttaattgaatgactcatttaccgagtttcatgtacactttgcaacgcaattcccatgtgtcatagaccatgaaatctccatttaccttttaaggtttactcgggtaaactcaatattttctgggtaataaccgtgtgtgatataagtaagcccaaggccagtatagagaaaaagctatagcgcaaaatcactgtgttttttaaagaacctttcctactcaggaatatattttacgctttttgtccactcgttatgtgttgtatgtgtca

SEQ ID NO: 594385 - DNA, 1233 bp, Homo sapiens
  misc_feature (34)..(34): n is a, c, g, or t
ggggggggaaaaaacaatttaccgcgtctatggntgccgatggcccctgggtttaatcggcaccgagggaaacagctaatcagctgcagaaactggagggcagcagtggacctgtgcggacgtctcctcacagcccacggccagggctacggcaagagcgggctgctcaccagccacacgacagattcactgcagctctggtttgtcaggctggcactactagtgaagttgggccttttccagaatgctgagatggaatttgaacccttcggaaatcttgatcagccagatctttattacgagtactacccgcacgtgtaccctgggcgcaggggctccatggtccccttctcgatgcgcatcttgcacgcggagcttcagcagtacctggggaacccacaggagtcgctggatagactgcacaaggtgaagactgtctgcagcaagatcctggccaatttggagcaaggcttagcagaagacggcggcatgagcagcgtgactcaggagggcagacaagcctctatccggctgtggaggtcacgtctgggccgggtgatgtactccatggcaaactgtctgctcctgatgaaggattatgtgctggccgtggaggcgtatcattcggttatcaagtattacccagagcaagagccccagctgctcagcggcatcggccggatttccctccagattggagacataaaaacagctgaaaagtattttcaagacgttgagaaagtaacacagaaattagatggactacagggtaaaatcatggttttgatgaacagcgcgttccttcacctcgggcagaataactttgcagaagcccacaggttcttcacagagatcttaaggatggatccaagaaacgcagtggccaacaacaacgctgccgtgtgtctgctctacctgggcaagctcaaggactccctgcggcagctggaggccatggtccagcaggaccccaggcactacctgcacgagagcgtgctcttcaacctgaccaccatgtacgagctggagtcctcacggagcatgcagaagaaacaggccctgctggaggctgtcgccggcaaggagggggacagcttcaacacacagtgcctcaagctggcctagctgcctccaacacactacgtcagaaggacccgggtctttgaaactgtgtcttgaagctaatgtattaatgtgacatggaggaactcaataaaactcctgcttcactgg

SEQ ID NO: 594386 - DNA, 687 bp, Homo sapiens
  misc_feature (176)..(176): n is a, c, g, or t
tataccatctcacttctaggaatactagtatatcgctcacacctcatgtcctccctactatgccgtaggaaggactatgtactatcgctgttcattatagctactctcataaccctcaacacccactccctcttagccaatcactggtgcctattgccatcactgagtctttgccngccgtgcgagagcagcgagtgggcctcgccctactgagtcgtcaatcgtcccacgcagtatggcctagactacgtacgatctgctacgcctactccattgctagaagtaatcgtcccaacaattatattactaccactgacatgacgtttccaaagacaagcagcatagttggacactcgagacagcagaccacccgacagccgtaattagttagcagtcatccctctacatattttctagatcctatatcaacagagcaatcctatttaggcttgttcccctagagcgttttcctccggaccccctaatcgatcccccgctccgtaatagtagtgtactctgatccgtacccctcgcaatcttggctggccagtgccgcttatccgagtgtccctctatcgcgtcatcaagggtctagctctctatgctaatctccctacaaatctccttactgatcacttccccgcacggaagtaccttttatatcgcgtcggccaatgttccacttgg

SEQ ID NO: 594387 - DNA, 2018 bp, Homo sapiens
  misc_feature (1083)..(1083): n is a, c, g, or t
gggttcctgcatcgggcctgagcagaactaggcgcgccgcggcccggcacgcgcaggcgtacagagctgcccgggggtgccagttcctctccgattcccggcttctgtcaccttcctcacggaccttggtcacggccgcaggtgaccccttagcccagctccagtgggcgggtggcagggtcatggaggacgctggcggcggcgaggagaccccggccccggaggccccgcacccccctcagctcgcgcctccggaggagcaggggttgctcttccaggaggaaaccatcgatcttggcggagatgagtttggatccgaagagaacgagaccgcatcggaaggctcgagtcctctcgcggacaagctgaacgaacacatgatggagagcgtcctcatctctgactcccccaacagcgagggcgacgcgggcgacctgggccgagtgcgggacgaagctgagcccggaggggaaggcgacccaggcccggagcccgcgggcaccccgagtcccagcggcgaggccgacggcgactgtgcccccgaggacgcggcacccagtagcggaggggccccgaggcaggacgcggcccgcgaggtcccaggcagcgaagccgcgcgcccggagcaggagcctcccgttgcggagccggtcccggtgtgcaccatcttcagccagcgcgcgcccccagcctccggggacggcttcgagccgcagatggtgaagtcgcccagcttcggtggcgccagcgaggcctcggccaggacaccgccccaggtcgtgcagcccagccccagcctcagcacgttcttcggagacacggccgccagccactccttggcctcggacttcttcgactccttcactacctccgccttcatttccgtcagcaatcccggcgcgggctccccggcccccgccagcccgcctcccctcgctgtgcccgggaccgaggggcgccccgaacccgtggccatgcgagggccccaggcagctgcgcccccggcgtcgccagagcctttcgcgcacatccaggcagtgtttgcagggagtgacgacccctttgccaccgccctgagcatgngcgagatggaccggaggaacgacgcctggcttcccggcgaggctacgcgtggagtcctgcgggccgtggccacccagcagcgcggcgccgtgttcgtggacaaggagaacctcaccatgccgggcctcaggttcgacaacatccagggagatgcagttaaagacttgatgcttcgctttctgggtgaaaaagctgcagcaaagagacaagtcctaaatgccgactcagtggaacaatcttttgttggattgaaacagctaatcagctgcagaaactggagggcagcagtggacctgtgcggacgtctcctcacagcccacggccagggctacggcaagagcgggctgctcaccagccacacgacagattcactgcagctctggtttgtcaggctggcactactagtgaagttgggccttttccagaatgctgagatggaatttgaacccttcggaaatcttgatcagccagatctttattacgagtactacccgcacgtgtaccctgggcgcaggggctccatggtccccttctcgatgcgcatcttgcacgcggagcttcagcagtacctggggaacccacaggagtcgctggatagactgcacaaggtgaagactgtctgcagcaagatcctggccaatttggagcaaggcttagcagaagacggcggcatgagcagcgtgactcaggagggcagacaagcctctatccggctgtggaggtcacgtctgggccgggtgatgtactccatggcaaactgtctgctcctgatgaaggattatgtgctggccgtggaggcgtatcattcggttatcaagtattacccagagcaagagccccagctgctcagcggcatcggccggatttccctccaggtacctgtgcacggtcagacatgagccagaaaggccttatgatagttctttgctcagatg

SEQ ID NO: 594388 - DNA, 122 bp, Homo sapiens
  misc_feature (11)..(11): n is a, c, g, or t
  misc_feature (17)..(17): n is a, c, g, or t
tcaatagagtnggagtngagcccagataagcactatatgtgtggaataggatataggtgctgtgaaatgtgatgtatataaatgtagatgtcagccagtgtgtatgtcacggaacgtgtctc

SEQ ID NO: 594389 - DNA, 1519 bp, Homo sapiens
  misc_feature (38)..(38): n is a, c, g, or t
  misc_feature (40)..(40): n is a, c, g, or t
ggggcagccgaagggggtgggggatggagggttacagngnattgctgtcttggtacctgcactccgcggagtcctgagttcttgtcctgcctccaagaagaacgagattatgccgacaaccagagtgtgaggagggcggacaagagttttattgagcacaaaacagctctcagcagagaggggaggcgagggtggtcccccaccgaaagtcaggtggtgtctctcccagtgtggctggctcaggggcttttttgggctcagaatggaggggtgcatgctgattgtgagtatgcaaaaaagaaggctaaaacaaagtcaccactcaaaggtgggcacgacagtggaaaaaaccagttggggaaggggagatgcagttaaagacttgatgcttcgctttctgggtgaaaaagctgcagcaaagagacaagtcctaaatgccgactcagtggaacaatcttttgttggattgaaacagctaatcctctggtttgtcaggctggcactactagtgaagttgggccttttccagaatgctgagatggaatttgaacccttcggaaatcttgatcagccagatctttattacgagtactacccgcacgtgtaccctgggcgcaggggctccatggtccccttctcgatgcgcatcttgcacgcggagcttcagcagtacctggggaacccacaggagtcgctggatagactgcacaaggtgaagactgtctgcagcaagatcctggccaatttggagcaaggcttagcagaagacggcggcatgagcagcgtgactcaggagggcagacaagcctctatccggctgtggaggtcacgtctgggccgggtgatgtactccatggcaaactgtctgctcctgatgaaggattatgtgctggccgtggaggcgtatcattcggttatcaagtattacccagagcaagagccccagctgctcagcggcatcggccggatttccctccagattggagacataaaaacagctgaaaagtattttcaagacgttgagaaagtaacacagaaattagatggactacagggtaaaatcatggttttgatgaacagcgcgttccttcacctcgggcagaataactttgcagaagcccacaggttcttcacagagatcttaaggatggatccaagaaacgcagtggccaacaacaacgctgccgtgtgtctgctctacctgggcaagctcaaggactccctgcggcagctggaggccatggtccagcaggaccccaggcactacctgcacgagagcgtgctcttcaacctgaccaccatgtacgagctggagtcctcacggagcatgcagaagaaacaggccctgctggaggctgtcgccggcaaggagggggacagcttcaacacacagtgcctcaagctggcctagctgcctccaacacactacgtcagaaggacccgggtctttgaaactgtgtcttgaagctaatgtattaatgtgacatggaggaactcaataaaactcctgcttcactgg

SEQ ID NO: 594390 - DNA, 2639 bp, Homo sapiens
  misc_feature (1083)..(1083): n is a, c, g, or t
gggttcctgcatcgggcctgagcagaactaggcgcgccgcggcccggcacgcgcaggcgtacagagctgcccgggggtgccagttcctctccgattcccggcttctgtcaccttcctcacggaccttggtcacggccgcaggtgaccccttagcccagctccagtgggcgggtggcagggtcatggaggacgctggcggcggcgaggagaccccggccccggaggccccgcacccccctcagctcgcgcctccggaggagcaggggttgctcttccaggaggaaaccatcgatcttggcggagatgagtttggatccgaagagaacgagaccgcatcggaaggctcgagtcctctcgcggacaagctgaacgaacacatgatggagagcgtcctcatctctgactcccccaacagcgagggcgacgcgggcgacctgggccgagtgcgggacgaagctgagcccggaggggaaggcgacccaggcccggagcccgcgggcaccccgagtcccagcggcgaggccgacggcgactgtgcccccgaggacgcggcacccagtagcggaggggccccgaggcaggacgcggcccgcgaggtcccaggcagcgaagccgcgcgcccggagcaggagcctcccgttgcggagccggtcccggtgtgcaccatcttcagccagcgcgcgcccccagcctccggggacggcttcgagccgcagatggtgaagtcgcccagcttcggtggcgccagcgaggcctcggccaggacaccgccccaggtcgtgcagcccagccccagcctcagcacgttcttcggagacacggccgccagccactccttggcctcggacttcttcgactccttcactacctccgccttcatttccgtcagcaatcccggcgcgggctccccggcccccgccagcccgcctcccctcgctgtgcccgggaccgaggggcgccccgaacccgtggccatgcgagggccccaggcagctgcgcccccggcgtcgccagagcctttcgcgcacatccaggcagtgtttgcagggagtgacgacccctttgccaccgccctgagcatgngcgagatggaccggaggaacgacgcctggcttcccggcgaggctacgcgtggagtcctgcgggccgtggccacccagcagcgcggcgccgtgttcgtggacaaggagaacctcaccatgccgggcctcaggttcgacaacatccagggagatgcagttaaagacttgatgcttcgctttctgggtgaaaaagctgcagcaaagagacaagtcctaaatgccgactcagtggaacaatcttttgttggattgaaacagctaatcagctgcagaaactggagggcagcagtggacctgtgcggacgtctcctcacagcccacggccagggctacggcaagagcgggctgctcaccagccacacgacagattcactgcagctctggtttgtcaggctggcactactagtgaagttgggccttttccagaatgctgagatggaatttgaacccttcggaaatcttgatcagccagatctttattacgagtactacccgcacgtgtaccctgggcgcaggggctccatggtccccttctcgatgcgcatcttgcacgcggagcttcagcagtacctggggaacccacaggagtcgctggatagactgcacaaggtgaagactgtctgcagcaagatcctggccaatttggagcaaggcttagcagaagacggcggcatgagcagcgtgactcaggagggcagacaagcctctatccggctgtggaggtcacgtctgggccgggtgatgtactccatggcaaactgtctgctcctgatgaagaaggtgtcctttgttctccctatcttcgtggagggtgtttttttcacctcatggttttgattttatgattgatgcttacaacacctgaagacaggcttccccacaagaccttcttaggacgtcaccccagagctctcagcctcctccttaaaataagggcatagatctgagatctctgaaatccctcccagctctgacattcacacagctctctcctctccttcaacacactggataaaggaaattacggttttcaagttctgtggtttgctcagagcaggtttttcttccgctgccactcctgagatagtcccactgaggtcaggtggcccgcacaggtgctttgttctggtcctcaccctcctcccacccgcccccttcccttctccagccccctctggcttctgcagcagggcttgcccacctctgagtgggagtgaaaagtaggccctcctgctcccctgccctggtggcctcttcaccacccaaggcttggccagcaaccaggtgaccccgaagcacccggcctgacccctctgcctcccaaaacaggccattctccctgtgctgcctgtggccagccctgacacccccacctggcggtctgggcggtccacagtaggcctccacttgctgagggcattgtcagcgtcacctgaaagtcaccagcttgccggaacattcttatgcaaagacatgaagaatcaattataaattcacaggactgacgtttcactaatcatggggctaaaactccccagggaaggtaagctcctgttc

SEQ ID NO: 594391 - DNA, 411 bp, Homo sapiens
  misc_feature (128)..(128): n is a, c, g, or t
  misc_feature (157)..(157): n is a, c, g, or t
cctcttccccactgtgtgatttggacaccttccttgacctctctgagcctctgaccttctgccggacagtgctgacttgcagagttgttgtaaggtttggagatcatggatgcaaaatgtctccaacnagcctagcacgtgctgaacatctggcttntcggcctctgcactgtggacatttgggcctggataagtctccgttgtaaggggcttccctgtgcttgcaaaatgtggagtagcacccctggtctccacccactagatgccagtagcatccttcagttgtgaccaccaaacatgtctccagacattgacagatgtccccagagacaaaattggccctggtcgagaactactggaataatcatagtttataataatagtttataataataatagattatttataat

SEQ ID NO: 594392 - DNA, 830 bp, Homo sapiens
cagacgtcggcatctacttcctcacctgcatcagcgccgcaccgtttcctggccatgtgctcccggtcaagtccctcaagctccgcaggcccctctacgcacacctgggctgtgccttcctgtgggtggtggtggctgtggccatgggcccgctgctggtgagcccacagaccgtgcagaccaaccacacggtggtctgcgctgcagctgtacccgggagaaggtctcccaccatgccctggtgtccctggcagtggccttcaagccttcccgttcatcaccacggtcacctgctacctgcgtgatcatccgcagacctgcggcaggacctgcgtgtggagaagcgcctcatgaccaaggcagtgcgcatgatcgccatagtgctggccatcttcctggtctgcttcgtgccctacacaggtcaaccgcatccgtctacgtgctagcaactaccgcagccatggggcctccatgcgccaccgccagcgcatcctggtccctggcgaaaccgcgatcacctcctgcctcaccagactcaacggggcaacatcgaccccatcaggtatgtcttcgttggctgaaaagttccgcacgccctgtgcaaagtggctctgtggcacaagggctcaagggcccgaccccccagctgtcgaaagggaagaaccaacggagagctcgcatgagtgcaagtcagagctgtgatcggggggcgccgccaggccgagcgcagacgtgaggactcaccagagccgcaagaggctctgcctttcccagcactcccagcaagaacgaatcgtagacatgccacattctctagacgctagctacca

SEQ ID NO: 594393 - DNA, 1907 bp, Homo sapiens
  misc_feature (1083)..(1083): n is a, c, g, or t
  misc_feature (1470)..(1470): n is a, c, g, or t
gggttcctgcatcgggcctgagcagaactaggcgcgccgcggcccggcacgcgcaggcgtacagagctgcccgggggtgccagttcctctccgattcccggcttctgtcaccttcctcacggaccttggtcacggccgcaggtgaccccttagcccagctccagtgggcgggtggcagggtcatggaggacgctggcggcggcgaggagaccccggccccggaggccccgcacccccctcagctcgcgcctccggaggagcaggggttgctcttccaggaggaaaccatcgatcttggcggagatgagtttggatccgaagagaacgagaccgcatcggaaggctcgagtcctctcgcggacaagctgaacgaacacatgatggagagcgtcctcatctctgactcccccaacagcgagggcgacgcgggcgacctgggccgagtgcgggacgaagctgagcccggaggggaaggcgacccaggcccggagcccgcgggcaccccgagtcccagcggcgaggccgacggcgactgtgcccccgaggacgcggcacccagtagcggaggggccccgaggcaggacgcggcccgcgaggtcccaggcagcgaagccgcgcgcccggagcaggagcctcccgttgcggagccggtcccggtgtgcaccatcttcagccagcgcgcgcccccagcctccggggacggcttcgagccgcagatggtgaagtcgcccagcttcggtggcgccagcgaggcctcggccaggacaccgccccaggtcgtgcagcccagccccagcctcagcacgttcttcggagacacggccgccagccactccttggcctcggacttcttcgactccttcactacctccgccttcatttccgtcagcaatcccggcgcgggctccccggcccccgccagcccgcctcccctcgctgtgcccgggaccgaggggcgccccgaacccgtggccatgcgagggccccaggcagctgcgcccccggcgtcgccagagcctttcgcgcacatccaggcagtgtttgcagggagtgacgacccctttgccaccgccctgagcatgngcgagatggaccggaggaacgacgcctggcttcccggcgaggctacgcgtggagtcctgcgggccgtggccacccagcagcgcggcgccgtgttcgtggacaaggagaacctcaccatgccgggcctcaggttcgacaacatccagggagatgcagttaaagacttgatgcttcgctttctgggtgaaaaagctgcagcaaagagacaagtcctaaatgccgactcagtggaacaatcttttgttggattgaaacagctaatcagctgcagaaactggagggcagcagtggacctgtgcggacgtctcctcacagcccacggccagggctacggcaagagcgggctgctcaccagccacacgacagattcactgcaggtgagaacanctttcaggtgctggagtttaacctggcttatcacagtctggggacatggacaggaccatggcctttcatgccaataacaaaaagtatgttttcatatcctgcttctttctctcctaattatattgtatatactatactggggcactggaattctcacttcggcccgtcaggacgcctgtgcgccccagaagcacgctcacaagtgcccacactcagtctcatggtggaaccggcatggctttgggtcagcaggtgggttcgcctcacgactggcagtagcaactggcctgtgcggggctctggggcgtgtctgggcccggtaggaaacagtgacaggagcagttggttctgtccaccccaaggacggagggtccatgtgccatttgctcctcgtggtatatcacttgctattaaaatacattaaactataaaaaaaa

SEQ ID NO: 594394 - DNA, 279 bp, Homo sapiens
ccgtctgtactaaaaatacaaaactagccgggcgtggtggcaggtgctggtaatcccagctactcttgtggctgaggcaggagaatcgcttgaacccaggaggcacaggttgcagtgagccgagatcacgccactgcacaccagcctgtgtgacagagagagaatgtctccaaaaaaaagtgttgttgttctcagtattcctttttgtaccatcctctttcctgtttcatgaaggcagtccgttttagacacatttctttgtctaatgttttattgatt

SEQ ID NO: 594395 - DNA, 1493 bp, Homo sapiens
cacgagggcggagggcgtgtgccgggagcacaatccgggccgaggctcctggtaagggagcagagcgggaagctgatcccccacggattcttagggggccgacttcccctgtgttgaagattcatcaaagactgattcgagtctgtgttcagcatgtgtgttttagattagaacagtgttgagaatttttatatggggcccagttttagcaggacatcatttaggatctttacaaacgagttcagggtacttcgttttatctgttgtctttgagccactgagtgaattagtaaatgtttgcaaatgtgattgcatcagtgaagaagaacatataccacgagttaaaataaatttcccgtgctgctgaaaaatcagtgccgccatcctctgaccctgctcctcccacgcgccctgcaggctgtctccctctggggtcgagagagcttcacagaccatttgggaaagagccaagcaaacacacttctgcaagccatttgcataagtagacataatccatacggaatgatgcactgttcggttgtagtttcattcgtcagtgacctgcatctgcccgcccagtcttgagttcagctccatccctccctgcagttccgcagcctccggttccccacctcagcttggctgagagtttcacgttcatccaagtgcttctttacagactcactcccagctggaggaggcagaggatcctggccaatttggagcaaggcttagcagaagacggcggcatgagcagcgtgactcaggagggcagacaagcctctatccggctgtggaggtcacgtctgggccgggtgatgtactccatggcaaactgtctgctcctgatgaaggattatgtgctggccgtggaggcgtatcattcggttatcaagtattacccagagcaagagccccagctgctcagcggcatcggccggatttccctccagattggagacataaaaacagctgaaaagtattttcaagacgttgagaaagtaacacagaaattagatggactacagggtaaaatcatggttttgatgaacagcgcgttccttcacctcgggcagaataactttgcagaagcccacaggttcttcacagagatcttaaggatggatccaagaaacgcagtggccaacaacaacgctgccgtgtgtctgctctacctgggcaagctcaaggactccctgcggcagctggaggccatggtccagcaggaccccaggcactacctgcacgagagcgtgctcttcaacctgaccaccatgtacgagctggagtcctcacggagcatgcagaagaaacaggccctgctggaggctgtcgccggcaaggagggggacagcttcaacacacagtgcctcaagctggcctagctgcctccaacacactacgtcagaaggacccgggtctttgaaactgtgtcttgaagctaatgtattaatgtgacatggaggaactcaataaaactcctgcttcactgg

SEQ ID NO: 594396 - DNA, 191 bp, Homo sapiens
gaggatccccgattggtctgttccctggctccagctgtgccctctgccacgtggctgcgttgcatgatttcctggcttgtgatgagcctgttctgggggcaccggccgccgcgcctgcctgagggccaggatcttccgctccagacgctcttggtcaaacgccagcacactgaggctatgcagggacccac

SEQ ID NO: 594397 - DNA, 238 bp, Homo sapiens
aggcggaccacatgatgtcacgctcgagcacatttttctttatccatggatcagttgatggacatttagatttttacctttggactatggtgaatagtgtcgctatgagcattcatttgcaagcttttgtttgaacctcagttttcaattcttgggggtgcatacttaggaggggcatggccgggacatacggaaacgctatgttgaacttacggaggagcgggggagcaaatcatgt

SEQ ID NO: 594398 - DNA, 422 bp, Homo sapiens
  misc_feature (58)..(58): n is a, c, g, or t
  misc_feature (60)..(60): n is a, c, g, or t
  misc_feature (75)..(75): n is a, c, g, or t
  misc_feature (84)..(84): n is a, c, g, or t
  misc_feature (238)..(238): n is a, c, g, or t
  misc_feature (303)..(303): n is a, c, g, or t
  misc_feature (342)..(342): n is a, c, g, or t
  misc_feature (357)..(357): n is a, c, g, or t
  misc_feature (372)..(372): n is a, c, g, or t
  misc_feature (377)..(377): n is a, c, g, or t
  misc_feature (384)..(384): n is a, c, g, or t
  misc_feature (408)..(408): n is a, c, g, or t
ttatttttccatttcaccaggcccattcaaataagaactaataggagtatggggattntnttgtgccattcccanatttgtccntgttgttcagaggaagtgtccccattaagaaaaagtggagtgggccaggtgcagtggctcatgcctgtaatcccagcattttgggaggctgaggcaggtggatcacgaggtcaggagatcgagagcatcctggctaacacggtgaaacccagtntttactaaaaaaatacaagaaattagcccaggcatggtggcaggcacctgtattcccagttattngggaggttgaggcaggagaatggcatgaccccgggaggnggagcttgcagtgancccagttcgcgccantgtantccagcntgggagacagagcaagagacaganccagattccatttc

SEQ ID NO: 594399 - DNA, 419 bp, Homo sapiens
ggcaccccggcaactgcttcggatggggcctggacgggctcctctggcactagtgacccagtcacagaggggagaaaacgatgggaaaaagccacacccacccaaacccttttacatacactcacatcaataggtcctgggccgaccaaagattagaaaaccccaccgctcatttttcctcaactactgaaatgagccagtgagaccacacaggacaggacgcccggtccccctccctaagccacgtttctaataatcttggtctagcaccacccgtaacaaagcggaactttcatatggacgtgcaaatcctgtgtgtccttggaatcctagtgttactgaagataggctgctgcttcctcctgtggatggcagacactgaggaggtggctggatgtcgttcaggtccatttccagga

SEQ ID NO: 594400 - DNA, 291 bp, Homo sapiens
cgtcattgaagtctcccttgatgataaataatctggtgccccgtgcaagctatattcatttctgtctcaagcacatgagaatggatacttaattgaaaatgaagtaaaattctgcctaattaagtaaggtgataaggttgtgaattggtctgtgtccttgaataaatgatttagtaacaggaaatgattggtattatctgtaaagagaattagccaagaggaaaggaattttatttgaagaatgtcgtagccaggtgatatagctgatatgagaaactcacatgcatcagt

SEQ ID NO: 594401 - DNA, 493 bp, Homo sapiens
tcgacctcatcacctgcccctcttggggcgattactgctttaaatacagtatggaaaaatccatgatgactcaagttagcaagcttggaagtataaaaatgatcttcaggaattctgaattaaagaaaacatcactgtagttggaaaatacttcacattactgttggccgagagctcacggtggattaaattggtaaaactcttgaattactgtgcttttgcaactcagaaagtggttcagaaactggacatttttcagggtaccgaagcatttattttctggatgtttacactatgaaaataacaatagaggccaggcactgtggctcgcgcctgtaatcccagcactttgggaggccaaggtgggcggatcacgaggtcaggagatccagaccatcctgtgaatggtgaaccctgtctctactaaaaatacaaaaaattagccgggcgtggtggcaggtgcctgtagtcccagctactcgggagactgagt

SEQ ID NO: 594402 - DNA, 376 bp, Homo sapiens
  misc_feature (85)..(85): n is a, c, g, or t
  misc_feature (236)..(236): n is a, c, g, or t
  misc_feature (359)..(359): n is a, c, g, or t
  misc_feature (363)..(363): n is a, c, g, or t
  misc_feature (371)..(371): n is a, c, g, or t
taaaaattccaagttaagaaccaaacttccccaatttatggtgaaaccctggttggaagaaatggtgaaatccattgatgctttncaaaaagtttatggagtcacaccctgtaatccccagcactttgggaggccaaggcaggcggatcatgaggtcaggagatcgagacccatccctggctaacatggtgaaaccccacatcctactaaaaatacaaaaaactagccgggcgtantggcgggcgcctgtagtcccagccactcgggaggctgaggcaggagaatggcgtgaacccgggaggcggagcttgcagtgagccgagatcgcgccactgcactccagccttggcgactgaagncggntccgtctntaatt

SEQ ID NO: 594403 - DNA, 131 bp, Homo sapiens
  misc_feature (131)..(131): n is a, c, g, or t
agtgaggtggaggatcgataccaggagtctggcttagtgcgctatccgatcggtgtcgcactaagtcggatcatatgtgactccgggagcgggcgacaccaggttgcctaaggagggttaagggctcgcgn

SEQ ID NO: 594404 - DNA, 197 bp, Homo sapiens
gagacaggtatcgagatcgttatgattcagaccgtgtatcgggatgggtatcgggatgggtatcgggatggcccacgccgtggctctggatcgactatggtggccgggatcgcgtctgatgaccgatggcagcagacgactactgatacgaggctatgacttcccggcataggcacgtgggcagtgtgggctacagt

SEQ ID NO: 594405 - DNA, 1283 bp, Homo sapiens
  misc_feature (1)..(1): n is a, c, g, or t
  misc_feature (719)..(719): n is a, c, g, or t
  misc_feature (861)..(861): n is a, c, g, or t
ngctaattaagccaaggagcattcgctttgttgatgggacccccgtcaccaagatgttctctctctcttgggaggatcccctccatctcgccaaccacctgttggtttgttgacgaaccgtcgccatgtaggtaggtcactacccccggtggcccgcttgattccctcattcctcttctcctggtgacttctttttgcgccctgatgggccgacgcgggggggccctcggtgattaacccagcagttgtgttgcctacccacacccagaggcgtgaactacatccgttattttgcacgcctatctctttatgggcccccttttttattatgggtggcaacccaacttatttagggaccactacgtgtttgggtctacccacaagtaatatgccccatggctctgggtacccccgcgttccccgggggattgtcccccgggggattattctttctcgtacccccaacagcgtgttcccgggtctattgggtgttcctcaatcacgtttctcggggggaatgactctgttagtagtacccctgtcctctctcccttgtacacctcgtgtttttttgggggctcttgttgccacactggcgcacacgagtcccaaagacacctgtgttgtcccccccctttgcccgtatctttgttaagcgcgtcctttgggcccccaaagttaccataccccacgcgttctctctctcagagatatatgtntaaagataagagggaacccttggggcacacaccaaaagaagcgtttaaagattttttcccccgcgcctaggggaacactcttccagaaaccacccccttggccacaagatataacctgttgggcccaagccaagacaccctntctcgggtctcacacctgttttggcgtacacaccacagaccaccctctcccctctgtgttccagcctctcagcgccagacctctgagggccctccggacacacgacacattgtcagagggttccctcggcttagatttagacgccccacacacgcccgctgggagatgttgcttaccgccttctctttgagaactttctaccagaaagacccagacttccctcggagaccctctttggcagacttctagactttgcagatcgtgtaattggcccccagatcattgtttttctcgcctcactttccaccacagatgttctagagatcattgtgagacctcgtgtcattctcccggggtggcccccgggctagatccccggtggttttgtgctccaaaattaaaagcctcagtgaccccattga

SEQ ID NO: 594406 - DNA, 352 bp, Homo sapiens
tacagtgcagtgagctacagcagcagagcgccgcgaagttggggagctccaggaccgagtggcacagctggaagaggagctgcgccctgcctggcagagcaattgctgagcagaggcagaactgtgtgcagagtgccgaggagacgcgggggagtgctggcagccctgcaagcaggagctggagctggtggttgtcagagctggagtgctcgcgtgggcgaggaggaggagtgcacgccgtcaaattgcaaaccgagaagaagaggctacagcagcacatacaggagctagaggcccaccttgaggctgaggagggtgcgctggagaagcttgagctggagggggccgcgcg

SEQ ID NO: 594407 - DNA, 807 bp, Homo sapiens
gttgcttaacatcgagattgcattcccccactttatggtgaaaatttattagttttggatcgacccccgtttctggtgtttctttagtgggggtttctaaacaggatcatacccgaaacttttttgggaagctgttgcttgagatattgggtctttttacccccgaagacctccagatacacttgtaataaagctgatagcatatagtcatacccgttgtacacctgggtgaaaagtatggccgtgggagactaagatgtattaacctacctgtgaatcatatgttgtaggaaaagctgttcccaagtctgaccggacttggattccaagcatgtccagtggatagtagatctgtggcgatatgagagggatccgtgcctttcccccttcattcctgatggaattgttatactagggtaacatttgtaatttttttctagttgtaatgtgtatgtctggtaaataggtattatattttggccctaccataccgtaaccatgtttgtcattttgaaatacttaatgcccagtaaccatgcatgctttggaaatttggaagatggttttattctttgagaagccaatatgtttgccttaaatgctttgattgttcatatccagaaattgattgaacgttctccaaccccgtttacggtacttggtaagagggagaccggtttgggagagacccttgcatcgctgtcccagtgtttcttgcttaagtgcttttaaactggagaggctaacctccaaatattttttttaactgccttctataataaatgggccccgtatgctcccttacca

SEQ ID NO: 594408 - DNA, 245 bp, Homo sapiens
catgcaccatcaactgacacataacaatgtgacaaaaatgcatcttcattcttcttctttatattgagtctcactcatgtcagcaaggctagatcatggcccactgcagcctcgacctcccaggctcaagcaatcctcctacctcagtctcctgaatagttaggactacagacacgtgtcaccgtgtccaactcactttttttttttttttcactcatccctgacaaacatttgtgggctggggg

SEQ ID NO: 594409 - DNA, 112 bp, Homo sapiens
  misc_feature (81)..(81): n is a, c, g, or t
gggaagcggtgttgtgtctgcagctctggcagaggactgttccactagacacgctgaagggactgggggtgggttttcctntcggaccagtgctgagaggagctgttttcgt

SEQ ID NO: 594410 - DNA, 283 bp, Homo sapiens
ctaattggttcttcgatgacgcctcgtgtgcccaggcagtgccctgctgctgggggctccctaaccgaacaaaggccagaggagccacctccccttccctccaaggtcatcagggcacagggagtccacagggaggagcatgagcatcgctgcctggccagtggcctccttggagaactttgttcggcagagcaacggcacaggaggtgagggaggatggagccagggctttcgtgaattccatcccaataaaaacgtaacccgtcatcgaagaaccaattag

SEQ ID NO: 594411 - DNA, 821 bp, Homo sapiens
ctaattgtgtgaggctcttgtgttttagtgggaacaccagagtttgcctatagtttaggcacttaataggaagaagctctgtacagaaatctgaaagttgtttgcttttgttttccccttggtaatcaaaattttactatcttttattatttctggcttttcaaccaaacatgttgctaatccctatttttctttaagtgacacacattctcctgtctctggcttcttcaggctgaaatgacatagtctttctcacccttacttcactcttgagaggtagggctcctttataattacatggttgctctcagactttctgtgaaagtttgggagctgtgtgttgtctggggttgttggttgtttaaaaaaaaaatctggttggctttttttttgtgtagactctgtggtgtcgccgtgatagtgtacgtgtgtgtcacgtgaaattacctggagtgaggattacttgtaattaaaatatttataaaaagaaacaactttattcacagagtccagctttgggactagtctgtatcttgtttaaagtctaacaacatgataataggaagtaaaaacagaaaggaacaagaaattaccactgggaaaatctttttagttagattgtaagcttccctggggcctccatgccaggactgcaaagtgatccaagcctacctgtcttcccacctgtggtgtcccccgtgtgggaagttggtgtatttccccttccaccttcaatttgttagcagtagcaaaccctaaaaatcaaatcaccatcaggtgcagttcaaaggtacaaaaggttcctggacatgaatcccatt

SEQ ID NO: 594412 - DNA, 183 bp, Homo sapiens
ttgaaccaggatgctcaggacggactaagcttggctatgtgaaatgtgtgctgctacacgtctcaggatgggcagttaggtgtctctgacgtacgggatgagagtggctaccgggcactggttcatggaagaggatgcgatgcggagatgcttgctaccttcctttggtcggaagtatgtagt

SEQ ID NO: 594413 - DNA, 159 bp, Homo sapiens
tctcggagctacaactatacacacacgcacacacacacatgcatatacacaacacacacaacacacgtgtgtatcgatatacatatgtgtgtgtgtgttgtgtatatatatatgaaggaagagaaaagatttactgaagcctgaagaatagtgagtgtt

SEQ ID NO: 594414 - DNA, 119 bp, Homo sapiens
cgggctccttcaccccagtggcaaagacccccacccttgatttctttctccctccatcctttggggttctggccttcccaactggtttttgctcttttggctcctcttgggctgacgca

SEQ ID NO: 594415 - DNA, 136 bp, Homo sapiens
agagaccctgtcctactcttagaatctagggctctacctcttcttcttctcctcctcctcctccttctcatcactctcctcatcgtcttcgtcatctagtctcactcttgaggcgaaaggaccctgtgatgcattc

SEQ ID NO: 594416 - DNA, 542 bp, Homo sapiens
  misc_feature (38)..(38): n is a, c, g, or t
  misc_feature (185)..(185): n is a, c, g, or t
  misc_feature (211)..(211): n is a, c, g, or t
  misc_feature (261)..(261): n is a, c, g, or t
  misc_feature (264)..(264): n is a, c, g, or t
  misc_feature (268)..(268): n is a, c, g, or t
  misc_feature (312)..(312): n is a, c, g, or t
  misc_feature (321)..(321): n is a, c, g, or t
  misc_feature (334)..(334): n is a, c, g, or t
  misc_feature (360)..(360): n is a, c, g, or t
  misc_feature (420)..(420): n is a, c, g, or t
  misc_feature (436)..(436): n is a, c, g, or t
  misc_feature (476)..(476): n is a, c, g, or t
ttttttttccaatgtttgtagcaggattttattttganacactgactgaggtttctctcattctcctaccacctcacacagtcaggtaccctcaccatcctcaggaaaaaaagaaaaaaaaaaaaaaaaaaatatatatatatatatatatgtgtgtgtgtgtgtgtgtgtgtgtaaatgtaaanatgtgtgtgtgtgtgtgtaaaaaaangtatatatgtgtgtgtgtatatatatatatatatacatatcttatatgcncancccnctaggaaaaaaggttgttcaaggagcacaaatattaaaattttngcctttganttccaaaacacancctttaaagtcgtggtaaaaataacnatcttgaaaaacaacattctttaacagccaaactttctgaaacaggaaataataatggcnccatatatttagcatncattgtgtgccaggcacagctctgagtcccttatattganacctcaggaaaaccctgatataggtaatgctgttgtctccattatatggttgaagggaaccgaggc

SEQ ID NO: 594417 - DNA, 285 bp, Homo sapiens
  misc_feature (136)..(136): n is a, c, g, or t
  misc_feature (146)..(146): n is a, c, g, or t
  misc_feature (165)..(165): n is a, c, g, or t
  misc_feature (224)..(224): n is a, c, g, or t
  misc_feature (227)..(227): n is a, c, g, or t
  misc_feature (276)..(276): n is a, c, g, or t
ggcctgttttggttaaggtttttttttttattccagaaaaaaggcccagggataaccttttggagttcctaaaaaaactggcttttttccctactatacataaagggaaagttttttttttttatgggacccctcngctggactcntgtattaaaataggaatgngaatgctatatactctttttatatccaaagtttccagcccttattttttttttatgccntgnttgttttttacataaataaaatgtttttttgattgaataaagccaaatnctccggtga

SEQ ID NO: 594418 - DNA, 979 bp, Homo sapiens
tgagtctaaataaagttgcatttaaataaataaaatatcaaatgttttaatattttttaaaagtatgtgtgaacatcccttgacaaattgttttcatccagagaaatttgctgtactgagattatattataacaaagtcttagacaaaatttggttcccatgattttgtccttctcatttggaatgattgcagatcctggccaatttggagcaaggcttagcagaagacggcggcatgagcagcgtgactcaggagggcagacaagcctctatccggctgtggaggtcacgtctgggccgggtgatgtactccatggcaaactgtctgctcctgatgaaggattatgtgctggccgtggaggcgtatcattcggttatcaagtattacccagagcaagagccccagctgctcagcggcatcggccggatttccctccagattggagacataaaaacagctgaaaagtattttcaagacgttgagaaagtaacacagaaattagatggactacagggtaaaatcatggttttgatgaacagcgcgttccttcacctcgggcagaataactttgcagaagcccacaggttcttcacagagatcttaaggatggatccaagaaacgcagtggccaacaacaacgctgccgtgtgtctgctctacctgggcaagctcaaggactccctgcggcagctggaggccatggtccagcaggaccccaggcactacctgcacgagagcgtgctcttcaacctgaccaccatgtacgagctggagtcctcacggagcatgcagaagaaacaggccctgctggaggctgtcgccggcaaggagggggacagcttcaacacacagtgcctcaagctggcctagctgcctccaacacactacgtcagaaggacccgggtctttgaaactgtgtcttgaagctaatgtattaatgtgacatggaggaactcaataaaactcctgcttcactgg

SEQ ID NO: 594419 - DNA, 1041 bp, Homo sapiens
cagcttgctccttttctcaggttctggcttggaaacggggcccccggtcggaccattgggcctgtgtctgggctgatgctgagcagccaccctcctggttctctgatgccgagggtctcttcccaaagccacctctggtcccaatgcgagtgctgtattttctgcctcagtgcagcctgcagcatattcagcattccaggccgaaatccagtggtgttaacaagagggatcttttaaagttaaattagaattcacaggacccagtaattgagggctagaaagagcctcgaatttatttgtgcacttacaggctgctcttaccttgtagcctctatccggctgtggaggtcacgtctgggccgggtgatgtactccatggcaaactgtctgctcctgatgaaggattatgtgctggccgtggaggcgtatcattcggttatcaagtattacccagagcaagagccccagctgctcagcggcatcggccggatttccctccagattggagacataaaaacagctgaaaagtattttcaagacgttgagaaagtaacacagaaattagatggactacagggtaaaatcatggttttgatgaacagcgcgttccttcacctcgggcagaataactttgcagaagcccacaggttcttcacagagatcttaaggatggatccaagaaacgcagtggccaacaacaacgctgccgtgtgtctgctctacctgggcaagctcaaggactccctgcggcagctggaggccatggtccagcaggaccccaggcactacctgcacgagagcgtgctcttcaacctgaccaccatgtacgagctggagtcctcacggagcatgcagaagaaacaggccctgctggaggctgtcgccggcaaggagggggacagcttcaacacacagtgcctcaagctggcctagctgcctccaacacactacgtcagaaggacccgggtctttgaaactgtgtcttgaagctaatgtattaatgtgacatggaggaactcaataaaactcctgcttcactgg

SEQ ID NO: 594420 - DNA, 247 bp, Homo sapiens
cggctgcgtgctcgtgcctggagggcagccgcccagcagatgtaccagagcctggccgagctgggtaccctgccccccgatgactggtgagctgggcctggtgccctcccctcttctccctgtgtggcacagcccccacgctcctgcaccctcactgtgctacgtgggtgcagagtgaatgcccacctgagaggcagacctgtggcacgcgggagtgccatgtgccccctgtgcgcagagcactttc

SEQ ID NO: 594421 - DNA, 768 bp, Homo sapiens
ctgaaattagactgcagaagtccttgctggttgcagaatggttgtaaatctagtttcacggcctgtaaacacgtgtggctgctgaaaagaaatggtgaagattgagctaaaatagacttgtccctggaagattatgtgctggccgtggaggcgtatcattcggttatcaagtattacccagagcaagagccccagctgctcagcggcatcggccggatttccctccagattggagacataaaaacagctgaaaagtattttcaagacgttgagaaagtaacacagaaattagatggactacagggtaaaatcatggttttgatgaacagcgcgttccttcacctcgggcagaataactttgcagaagcccacaggttcttcacagagatcttaaggatggatccaagaaacgcagtggccaacaacaacgctgccgtgtgtctgctctacctgggcaagctcaaggactccctgcggcagctggaggccatggtccagcaggaccccaggcactacctgcacgagagcgtgctcttcaacctgaccaccatgtacgagctggagtcctcacggagcatgcagaagaaacaggccctgctggaggctgtcgccggcaaggagggggacagcttcaacacacagtgcctcaagctggcctagctgcctccaacacactacgtcagaaggacccgggtctttgaaactgtgtcttgaagctaatgtattaatgtgacatggaggaactcaataaaactcctgcttcactgg

SEQ ID NO: 594422 - DNA, 424 bp, Homo sapiens
gctcacgaacatgggctatgccgcaaggccatgacggcggccatgacaacatggacatcgatcaagttgatgagttaatgcaggacattgctgaccagcaacgaacttgcagcaggagatttcaacagacaatttcgacaacctgtagcggttcggagtatgagtttgacgagagctgagctcatggctggccttagaagaactagaacaggaggaactagaccagaatttgctggaactcagtggcacccgaaacagtacctctaccaaaagttccctctatagccctaccatcaaaacccgccaagaagaacgaagaggaggccgacgacatgaaggaatcggagaactgggctggatccatgtaatggggtccagcgcaggactgggcccagacagactgaggtggcctgcgcagcgagca

SEQ ID NO: 594423 - DNA, 886 bp, Homo sapiens
  misc_feature (252)..(252): n is a, c, g, or t
caaatgtaatgaggggaaaaaaaaagttggggggaataataaataatggataggggagagtgtaatttaaaataaagggtgggatatttggtggataggaaaaagaagaggacttgtggagcgaattgtagaaagagattgtagaggaaaaaccttttagaggtgctcagagcttaatactcgggggcacaaatccgggcgcacacccctcgagaagagattgatatagagaggggattgaaccgaaatttntctcgagatatcccccacaggttagccccacgagaatgacccccgaacgctagggtgatattgaacttttggcaccacgccccccagaataaaagggacaaacaagattttttaaacagttttagagaaaagaagaaaaatagcgcccccccgtttggacccccttactgtctcacccctcccccacatgtccccgcgtttgctcccaagaattctttataaacacgtggggtctcacccctttcgaagtttagaagaggccccgcccggcccaccacgccgtggcgccatatgccccacacccgccagtagtgacacccgccgctcttctccacccaccccctgacgcccaacccatgagaatttgccaaacagggagaggaataaaaagatactcccaacctgtcgccaggcccctgctttttttctcttaaaagtacctttaaaaaggaaatttgtttgtatttttttatttaccttttataatttttgtacatattgttagggtcacccctttttaatgatctcggatgcacccaacccgccttcggagcgttctctgtcccacctcatgacatttacattgtggtgggaccctgttccattataatctccaaggagaaaaaaaaccctt

SEQ ID NO: 594424 - DNA, 1068 bp, Homo sapiens
cggtgggtttcctgacatgcgtgataagagtgggtttgagtttggtttggcttgttttttacagttgaattctatattatttggtcaaaatattactttgcaatttgcaaatgtggtggcacctaccattttactagccacaagtaactcataagttgacgtaggccctgctcatattataccaatattttaagtattttatgtttcatcttattagttattcattttattttatctaatgctctgccagaattcattccaaaaggtaaaaattactaaactataagactcttaaataaggcgtgtatattagcaacttagtttctgacatatagaacattaacattccactgtatcttaaatgtcttttgcctttttattaaaaaatgattaaatggttactgaagttttcctctgcctgacatataaatgtcttcatattctaacatgatattagggaactaaatatatgagtatagacttaatatttcttttgtcaactaaactgactaaattttgtcaaagcagattggagacataaaaacagctgaaaagtattttcaagacgttgagaaagtaacacagaaattagatggactacagggtaaaatcatggttttgatgaacagcgcgttccttcacctcgggcagaataactttgcagaagcccacaggttcttcacagagatcttaaggatggatccaagaaacgcagtggccaacaacaacgctgccgtgtgtctgctctacctgggcaagctcaaggactccctgcggcagctggaggccatggtccagcaggaccccaggcactacctgcacgagagcgtgctcttcaacctgaccaccatgtacgagctggagtcctcacggagcatgcagaagaaacaggccctgctggaggctgtcgccggcaaggagggggacagcttcaacacacagtgcctcaagctggcctagctgcctccaacacactacgtcagaaggacccgggtctttgaaactgtgtcttgaagctaatgtattaatgtgacatggaggaactcaataaaactcctgcttcactgg

SEQ ID NO: 594425 - DNA, 235 bp, Homo sapiens
tatgctgttactgttaggaagaaagctggggactagatgcctctcagtgtaattgcctgcacttaattattctcacactccacagtggactgattttcccctgcattttccacatgcgttccaatgcggggtctcaatgtgtacctcccatgccccaattcctccatgcctaatctctgtgcctgcatgttatgatttaatactgcaaattaaactataaatactagaatttcta

SEQ ID NO: 594426 - DNA, 929 bp, Homo sapiens
cgggtacagtggctcatgcgttaacctcagcactttgggaagctgaggcacgtagatcacttgaggttaggagtttgaggccagcctgccaacatggtgaaaccccatctctactaaaaatacaaaaaattagccaggcgtggtggcagtcgcctgtaatcccagctacttgggaggctgaggcaggagagttgcttgaatccaggaggcggaggttgcggtgagccgagatcgtgccactgcactacagcctgggcaacgagagcaaaactccatctaaaaaataaaaataaataaaaactagagtggctttaatgtgcgagcctgaatgcaaaacgcagctcaccgcctctacctggagatcaggaaccccgggccacacagggccatacgctgggtctctgtgggatccaaagcccctgtgggttgtgttgggggacagcagctcctgggctttccccgctaactgccaccgttgcttgtgttacagcgcgttccttcacctcgggcagaataactttgcagaagcccacaggttcttcacagagatcttaaggatggatccaagaaacgcagtggccaacaacaacgctgccgtgtgtctgctctacctgggcaagctcaaggactccctgcggcagctggaggccatggtccagcaggaccccaggcactacctgcacgagagcgtgctcttcaacctgaccaccatgtacgagctggagtcctcacggagcatgcagaagaaacaggccctgctggaggctgtcgccggcaaggagggggacagcttcaacacacagtgcctcaagctggcctagctgcctccaacacactacgtcagaaggacccgggtctttgaaactgtgtcttgaagctaatgtattaatgtgacatggaggaactcaataaaactcctgcttcactgg

SEQ ID NO: 594427 - DNA, 1039 bp, Homo sapiens
  misc_feature (15)..(15): n is a, c, g, or t
  misc_feature (223)..(223): n is a, c, g, or t
  misc_feature (265)..(265): n is a, c, g, or t
  misc_feature (269)..(269): n is a, c, g, or t
  misc_feature (276)..(276): n is a, c, g, or t
  misc_feature (283)..(283): n is a, c, g, or t
  misc_feature (289)..(289): n is a, c, g, or t
  misc_feature (304)..(304): n is a, c, g, or t
  misc_feature (306)..(306): n is a, c, g, or t
  misc_feature (330)..(330): n is a, c, g, or t
  misc_feature (343)..(343): n is a, c, g, or t
  misc_feature (361)..(361): n is a, c, g, or t
  misc_feature (363)..(363): n is a, c, g, or t
  misc_feature (371)..(371): n is a, c, g, or t
  misc_feature (376)..(376): n is a, c, g, or t
  misc_feature (400)..(400): n is a, c, g, or t
  misc_feature (432)..(432): n is a, c, g, or t
  misc_feature (445)..(445): n is a, c, g, or t
  misc_feature (448)..(448): n is a, c, g, or t
  misc_feature (463)..(463): n is a, c, g, or t
  misc_feature (476)..(477): n is a, c, g, or t
  misc_feature (482)..(482): n is a, c, g, or t
  misc_feature (487)..(487): n is a, c, g, or t
  misc_feature (492)..(493): n is a, c, g, or t
  misc_feature (497)..(497): n is a, c, g, or t
  misc_feature (555)..(555): n is a, c, g, or t
  misc_feature (569)..(569): n is a, c, g, or t
  misc_feature (624)..(624): n is a, c, g, or t
  misc_feature (681)..(681): n is a, c, g, or t
  misc_feature (834)..(834): n is a, c, g, or t
  misc_feature (1032)..(1032): n is a, c, g, or t
ttaaatataaaatanaatcacataatttcaaaattaaaaaatgtacaaaagagaaagtaagtgacaaaaaaccttccctctcctgtcctcaacctactggttcccctcccaaaaataaatctagtgttacccatttaattctagaataagagcataacataaagcaattaatgtttttatattctactacctttctgaaacacaaatgaggaaagtgacgctnataacacatttctgatgagcttgccttttatcacctgaagantatnacatatnagtatanaaaaanatacaattatttttnanctgcatactattgtattgtaaggntgtatcagaattnatttaaccagtcctttananaaaaaaanatctntagtatctcatctcttgcaattanaaaaaacccatccccaatccagacctcaagangaacagcagtaanggnaataaagcccaaacntggaccaggccannccccnccccncccannccangcccctccccactaggccagacccccacctcacccagggcccagctcattcgcatgcntgaatgtgattggncagcccctcctggctgggtggctggagttgtaggggctttggcttctcatctttnatgcccaccctttgtttccactccagcctcccaaacaggctgttgcagaatacaganccctggtacaaaatggccattcttcattatcattgcacccccaaatcacttgaaatgctaacttgagctgctgctgtcacgatgaccatcctcctctatagagagcatgaggcaggcagacacaaatgcacagaagcagctgtcctgaaacanacccagccccaggacaggggtaggagcaactcctactcccaataagcaacagacacaagggaacgacacacagggattggccactctgattaggggtcccgtgaccttgagacttccatagggctggagatgagacggaacttgactgaaaactgagggctgggggagtacagggggctgggacatagggatatcccncaggatt

SEQ ID NO: 594428 - DNA, 822 bp, Homo sapiens
ccacgcgtccgggaccatgcggaaataacagtcagacgtgtggtggctttgtgaggtcacactcagccggataccagagggaagcagaacaaagtagtgtgggcccttcagagagaggaggacagagtggagcggaaagaggcatgataggtcggagtagctgcacgaggcgcttgctaggggagtggagacggagcgatccaggccgttactggctgagaagtgagggcaagggggaggtggcccatagtagggaactctctggcagccaacatatgcgtgacttgccgaagcatgcacacgagaaaaggctgcatacgccatggtaaaaggacgtggacacagtggttgctggggatgaagatcgcaccactgtggactgacagtgctcaaagagccagcagccgggacacatgttccgggcaatgattaaaagacagtctccgagattccaagaagaggacgtggtagaatcagatgctccaaggggagcggaccacacattccaggaagcgtcaggggagcaaatagtcgggctattctggcaggcatgaagacagtgtacgcagtactgtgattgatccggactggcaacacccctgagtagatgagaacagaatcaggtctagtggccacacttcaaggtacccagggcccggcgccgaggagcagagaagccggggcagctaatatagggattactaccgacaagccgtggccttaagcccggagagggcccaatggcacttgtcagtccggagctggatggaaaaacctgcagactggcctggcagagtgcgtgtgctgccaattgctgatggc

SEQ ID NO: 594429 - DNA, 487 bp, Homo sapiens
ccgacgctctctctgtggggtagctgtgcctcctcgactgtggtggagcagctcagcagtgtaataagcttactcgcctgaccttgtgtgtctctctctcatcctttctcttggctaaccttcatttggtgccaaaacccaggaaggggataggctctggctgggcgtccttagaggattctctctctctctctcctatcatcccttacccagccaagctccccttcccgaacctgctaaagaccctaaggatctcccaaaattctcccattgttggccacctcatccaccatcaaagcctctgagaggggtgagtaagagagactattgcctattacctggaacccttgagcatctcttcactcccaaaagacccagcgctgggacatgggcttcctctggcctccaggcatatggttacctctgtttcctggacgcctgactccgcagctaactcctctattccatgtgctaaggcgtggatacc

SEQ ID NO: 594430 - DNA, 255 bp, Homo sapiens
ttcccagggattctaggatggcctgtggaaacccaaggcaattcatgctcagatgtgcctcatacccaacaagtctagaattcttattacaaaattcacaagagaatgttgctttatcttaggatagctttcaaagacttaggacttgaaggtggagagtttggaaaccctctccacctatcctcctcagccaagaattctcccccctctggggcagaggctacacatggcttccttttttgagaaaaaaaaaaa

SEQ ID NO: 594431 - DNA, 457 bp, Homo sapiens
acagttatttatcttagatggagacgcttctgacggagtatactacgggctagttgagatataatgatcagatatatattctagaacactaggacagatgtgtctcaaatcatctgtggtgaaggacatttttctattttatttctaaaccatcagagactgatccagataatcaaattataaagacaaaatacaagtccatgtttctacatataagattcaacagcatacaattgctgtaaaattgttacgtaagtttttcagtgtgtactctcagtttccatactcatcatagaccaggggtaagtgtaacaccagcactggtttgcacgacctactcctttaccgtacgcactgttcaaagacatcacgtcttagctgcagatggagacttgattggaacgcggattgaatgtgggcagagatcagtagcgcggctatttctctgatccaggct

SEQ ID NO: 594432 - DNA, 296 bp, Homo sapiens
tccactagtgtaggcatattaagaatattatgatgcaacatgaagactattgcgagcaggaacggagatccttgagaaggaagaaaaacacacttgtggtttctctttgcatgactggtgaagaccttttcactcatggtcagttctcagaactcctttgaaaaggactacagagtgcaatttggccagatcagcggtaccgagtaggtagctccaacacagttgttagaggggagaaacgcttatcgtagcaaaaatactatgaaatcatggcgaatttgaaggcccacgataaa

SEQ ID NO: 594433 - DNA, 178 bp, Homo sapiens
cccccccccccccccccccccccctggggggttcccccttgggggaaaaggggggggggtttttttcccccgtttggccccccggggggggggggggggggtttttttggggggggggggcccccccccccctttttttgggcggggatttccccctatgggggttttttccccccca

SEQ ID NO: 594434 - DNA, 704 bp, Homo sapiens
gcataagagcgagagtgtgtgcagggacactttgcatgaagaaaacgtctttaaagttgggtaatagaggacagaggaggcccgagaagattgggtcatacgacgcagccctgcggaggggggaaagaccttggaaaataaggggccttttgggaggggacagagcggatagtatggggtaataagccttgtaagtaatgccctgaaacgaaacggggttctatgaagcctttgaccttaaattaattggtgcactggggatagggatgaaccggtaaaggcttagggtgtatcgtctccaaacgatataagggatcatcatggagtccgttactataggtatcgggtggcaatgtgcgaacgtgtactcgaaagaggtgtcaaagagatgttagaggaggagagataaaggaggtgtcagattttggtcatagggacgcaatgaaggaaagtgcgcatacaggtacactggggggcgatatatactgcgtgttacagacccgacggtcagagggatcagtgcttttagttatagagagtgggcctgcagcctctgaggcacctgcgggtctaagcatagaaggtcaacccccacactccccatcctccaacccgctggtctcatgcccaaagaagagttgaaggcatgggagccaacgttttattgaagaagccacagagggtgaagttcaataaacacaagt

SEQ ID NO: 594435 - DNA, 222 bp, Homo sapiens
tgcctgcgtagcccagctgtcttcgttgagtggtcttcccgactctccgcagacttgatgaatagcggcaggtgtaactccgggtctgcactagcagccccaatcgtctgtggacacctcagatgtagttactcttgcacttcatgggacaaagagacatccctaatagtcaaataatctaggtctttaggcagatggagagctacaatcttgctgaaatcc

SEQ ID NO: 594436 - DNA, 355 bp, Homo sapiens
cctggcctgctccggatgatggaaaccgcttatggttcaaccgcagccgatgggcattggtcactccgcgacgcctatgatgtgttggagctggcccaagtcctgcacctcgccacgctcgacctggcgctacagcccgccgatgtcgttgcggccctgaccgcgctcaccgcatccctgccgacgcatagcgtgcgcagcgaagaacagatcgcgcgccagcaattttcgacaccggccgcgattggctatattgccgcgctcgccgctcgcattaccgccgcggataccgtcctggaaccctccgccggcaccgggctcctcgcggtattcgccgcccgcgttggcgccaagc

SEQ ID NO: 594437 - DNA, 291 bp, Homo sapiens
acatgaagtggatggcaggattgaagacgaatagcaatgagggaaatgtggcattccataaagccgagattccttcatcgcgaatggtcggatgaaaagcatctaagcaagaaatcagggactgttgacaagcatgatcacaatcccccaactagagaagacgacatgaattctgtggaaatgtacccagaacacaaaccatacgggttctataaagatttccttcttgcagccggttgcaagggctcacgcctgtagtcccagcactttgggagtgcgaagcgggtggat

SEQ ID NO: 594438 - DNA, 129 bp, Homo sapiens
aggatcccccggagtattacgttacaaatatgggacattattcctgaagcctggtatgataagaatataacttcagggatgaccgaataatcagtaatagcgtttggtagtagaatggggctctcctcc

SEQ ID NO: 594439 - DNA, 329 bp, Homo sapiens
  misc_feature (184)..(184): n is a, c, g, or t
acagcttcctttgtgcttgggacacagcacaagttccctgtcttcatgggcgagtatatacccagggctgagctgcaggatcaggttagggcgagcgcaccttccagcccagcttcagttcagcctgtgctgcctgctggacttggcccctgccacctcctgctcaggtgtccgctatccaccnaagggctccctagggtctgggcaagggacctgcttctattagcccttctccatggctgccatgctctccaaaccactttttgcagctttctctagttcaagttcccagactctataaataaaacctgcagccatgactttcaaaa

SEQ ID NO: 594440 - DNA, 537 bp, Homo sapiens
atagctggggaggggcatggtacttcgaggaagtgaagtacaagcgtggtcttggttgataggccaggttgtctaggagccattccaggtagagaggcaggagctacagtataattagtaggctgagaagtttgggcagtgtaagtttgtgcaggataattggtcgcctggtactgctgtggcggctgagcaggcagttgttgaggctgaccagaaaaggcaggagctggtgcctgggaagttggttgctggccatatccctggaactgctgaggttgtcggggtccagtctgctgactatagcttgctgaatactgaataccatactgttgaggctgctgaggtggagcctgcggttgctgtgcaccaatagccggtctgttgctggtactgtcggtacatctgaccttcaatctgacctgcttgagtctgagctcctgtatatggtggctgctgtggctcacacgcctggtgggtgagctgctgaggaggaggaagcaatgctgtcgggtgtacctgaacgatcttctgcaggag

SEQ ID NO: 594441 - DNA, 1210 bp, Homo sapiens
catccaggctggttgaggaagaggttggagtcggtgcccaggaggcgtcgtggttaacagacttagctggataggccttggtaggatagcttgaggaatggctacgccagcatgaagagtgagagcaggcgatgagaagtcgattgaggagttcgagcgcaaaataagtagtgaatgaaaagaatggaaggttgagtgagatctccaactgaaggaggtaaagctacatggctggagatgcgcagatcagtgaatatgaatgaggtggcacgataagcgtgtgtcatgatctgaggatgacgatccgtggtaaacgctgcagatggcacgactgagtgctgagttctcagacggccatttgtgccgaatgctttgagagtagaggacctttgtacaagagctgtgacgaagcaggcttgagtgtcacggatagtggcgtccggcggggacgtgactcgcagcagggaatgagggatcatgaggaagagagtcaaggtgccttgcgcgagcatgcctgaaggaggctgaggacgtcgggctgagggagcggagagggcagaaagctaagatggagaaacggcatcgacagactgaagaagcacgaagctggaaagctgcagaagactgggagtaccaagggccatcagcgaggagctggatccaggcgtcgtcaacgatatgacttcgatatacgggtctttggttcagcttctccccaatgattcccttcgggggagccggatggttcaaacctgctccggagaaacggcagtagaggcaagtctccaggttgccgcgtgttacaccctcgtaagaatactgcccttaaacggggcggcccacaggggcgtctcgcaatgggaacagaagacactcgggcccgggtgacaaaccctgggtgtcgcgctcgaccacacagcacacaagcacaacaactgtcgggggcagcctccaggagaccccaaagaacaggttggcggggcgcccaaagtaaaaacaggagccagagctgcaagcaccaccggcaacctgtcgtgctcccacaacaggggggagcacgcgaacacggcgagtgcttgaaaacgcgcagagcgacacgcgcgagctagtacggcacagtaactggtgagagcgtgacagcagtgaatcgacgcagcggagcactagactcgacgtctgcgcgccgacagcacggggcagagccggcagc

SEQ ID NO: 594442 - DNA, 997 bp, Homo sapiens
gtgacgcgcgcgtgggtccgacgtgatggcgccacccgcgcggtgtccccaggatgttaccgcgggcaacaaggaggcgtcagcaaaccctcgttgggaggcctcccgcgccccaacccaggggccccgaagacaaaaccgggggagttccggggataattggtccccacaccccgtcttgaatgcgcgccacaatgacgagggggaaaacacacatcaggcacagcgaaaagtattcggtcccgcagcgccccaaacagcaaggggtttctccctcgtgaggacaacacctcctatcacacgcgcctggggtgcgtggtcccccaagacgacacctcgcttcgggaaaaccttgtgttgggaaaaacaaccgtgcccccgcttttcttttatgtggatccggcgatccccggcttttaaaggatctgtttgcatcgtagctagacaggcttgtcattccggtgcagatgagacatctcggaaatcataatccatacggaacgtggatctttgtttatcgctttcaaaagcgacctggatggtttactcacttgctcctcaaatgcactcgtttgaaatgtgaggataaagacccacagaagtagaagatctacttgcgggcgtctctatcattcgatagtaattgccgaaaccacttcttcatattgcgggtaattaataagagccagtagtttaaaatggcagtgaccccttcttcatgagttgtttgcttgattctgtactctggagaacacaaacatcttatgtctcaggcacccacaaatcgagaaagtgaatacattgctactagtcgagttcataccatgtggggggataccatcgagattatcaaagtggcttccccacgcatcaggtatatgcacgtctgttggaggttgttatatacacacattatacgaattaaattgttttgttaatacatttaaaaaaggcgccccttttttaaacccaacaaaaatttgttccaaccaaaaca

SEQ ID NO: 594443 - DNA, 339 bp, Homo sapiens
ccccttggcaatgtttttgcccagattgcatactttaagatttcccagcgctggaacttccccagcccttttttccgcctgcacttcaagattccacagacccatggggtctgtggccatttttatgctggacccagtgacatgacccctgtggcccaaatgcccccgtatgttaaacccccatggacatgtgtcccagccccagtgttatgctctgtggctggctccccttttcttagttccggggtgcaatgggggagggagggagggaaagcttcctcctaaatccagcatctttttgtttctgatgttccataaaaaaatagttgcccaggctta

SEQ ID NO: 594444 - DNA, 442 bp, Homo sapiens
  misc_feature (423)..(423): n is a, c, g, or t
gatcaggagtatcaatcacctgatgcgagataatacggatgtgtttaggagtgggacttcttaaatcacatccgtgttactcgcatcaggagtgtcgatctcacactgagctcaccatagtctcatcagaaaacaaccgagttccacacattaaattcaatgcacgtgcgtcattacaagtgtttactgggttctctattgtttacccgtcctacaaggcgcatcagtagtgacttctgagttgcgtcctctttcaacacacttctccgtactgcgtgatctttaactggcgtcaacatatttattgctagctcacaggtccttacaccagtggacttcagcgttatatattggcctgaactgtttaactcgactattcttgggctttaattccggtcaagataatatatcttgacatttgtnatcacaatactatcatgta

SEQ ID NO: 594445 - DNA, 462 bp, Homo sapiens
cgtggagccttaaccctaggctgggagtttgagaccagcctggccaaaatggcgaaaccctatctctactaaaaagacaaaaattagctgggcatgatggctgggtgcctgtggtcccggctactcgggaggctgaggcgggagaatcgcttgagcctgggaagtggaggttgcggtgagccgggatcgcgccactgcactccagcctcagcctgggcaagaaggcaagaagagcagaactccatcttaaaaaaaaaaaaaaaagggaaagggaaagggaaaaggaaccaaggaaattgcttgaggcttgaagggaagagaacttgcaaccacttcttgtgaccgggtgggaatagctgtctccaacgggaatggggatagcaatcctgatatggatagagattgattgtatttgggacctagacaggtacgcaaggggttaccaatttgacgggagccggg

SEQ ID NO: 594446 - DNA, 164 bp, Homo sapiens
tcgatgagaattaaaaggaaaatgtgatatggagtgctagttcttttgcggcactgaaactttatatataacatccaccacgtgataacagcaagataacagctgggccaggaacggtggctcatgcctggaatcccagcactttgggagatccagacaggcag

SEQ ID NO: 594447 - DNA, 174 bp, Homo sapiens
atgaggatggtagcatttactactcacttatgctttacttaccactgtcttctactgcctgaatttacccaaccgtcataggtgttgatatattttcacactttctacgtatttgcacccaagaaagtctgtaaaagggacaccccataattagttccacactacagcatgaga

SEQ ID NO: 594448 - DNA, 1023 bp, Homo sapiens
atttgtgtggggtgtttgcttctccccacctatacattcttctctggtgggtgtcactctctccttatatgggggggggagggggactctgtgtgcgccgctgtggtgcgcacagtctcggtggacacacgattgggtggtctatactcactgtgggtaggtatattgctcccctcccagctcgggggtgaggaggagattgttcgtctcctcttagtttgtggtggggagggaggagagcccccttctcctctcttagagagagtattggtgtgtctccccctctttctttcttgggagccgtctctcacaccctgtctgctcttcttagaagagagaggcgcgccccccccccctgcgaggagagaacacctctccctccccgtgtgtccacacaggccgcactatatatctcgctccgcgctcccactctcttctctctgtgaaagagagagttttttttagaggcgccctctgggccaagagttggccacctcgccacaccacagggggtgggagagctctcccccgccctctcttgcgcctctcgtgagagatcctcgggagaaatatgtgaagggatcctcttttgtgtttggggacaccccacgggtcttcttgtcgccacaaatttatatatatttgtagaaagagggcggaaaaacgagatatagaagaagaagaggccgcgccccgccacccctctccccgggggcccacggcgggttttctttgttgcgcccccccgctgtgtcccccccgccccctcccgcgcgggggaatatttctccctccgcgcgcggcgcgcgcgagagaggctccctctctcttctccccgccctcttttccgcggagggtgggaaaggggggggggttttttttccccccggtttcccggcccccccccccccccctcggtgtgtttttttgggtcctcggggccccgcccgcaggggcccccccccgaggtttcattaaaagaaaccaagtgttttccccctttttttttcccccccccccaca

SEQ ID NO: 594449 - DNA, 254 bp, Homo sapiens
ctccagccgtgttggtagcagcaggtaacagcgatgagtggtcagttgcccgagttcggaatgatgaaaagcatgggcctgcaggatgagccaaagcgaccagcagtacaatctgtgtaatagcaagtgcataggccagaaggctgggctaagtctggtagatttgagctaaagccaagatagccatagcgaatggtgcaccagcaaggaagtgatcagcactggggtcatgtaggcgggtgggtcccaggacg

SEQ ID NO: 594450 - DNA, 191 bp, Homo sapiens
ccgtattaatgctagagaccgagtgtctcagctatatcaggacaacacgggtgtcgacgtctggttcaaagagttggagtatcaacactgatggtgcagttcatttccaggagattcctcattctggtgattcagatgggtcgtgggagcccataaaaaacgccattaatcaatgccatcggtcaacccac

SEQ ID NO: 594451 - DNA, 224 bp, Homo sapiens
  misc_feature (112)..(112): n is a, c, g, or t
cattttgccaaaagctatcccacaaatctctaaatggggcagggaagaacaggagtacacacaaatataaacataaattttaaactctggggacatcttcaaaaaactctgnccaggtaaggctcaaatcaagcagataaaataaaagacatcagtactttttaaacttgtactactatagatgcatgccacaagaagccaccattcatatggagataatctcc

SEQ ID NO: 594452 - DNA, 760 bp, Homo sapiens
gtcaacccaacacagtgcatgctcataaggaaaggttaaacaacaatagtaaaatggaactcggcaaatcttaccccgcctgttgaccaaaaacatcacctctacgtcatcaccagtattagaggcaccgcctgctcagtgacacatgtttaacggccgcggtacccataaccgtgcaaaggtagcataaatcacttgttccttaattagggacctgtatgaatgggtccacgagggttcaggctgtctcttacttttaaccagtgaaattgacctgcccgtgaagaggcgggcatgacgacagcaagacgagaagaccctatggagcttaaatctgatataatgcaaactagtacctaacaatacacgcacgaggtccataaagctacctaaacgcatgcgattaaggataatttccggttgggggcagaccgtcgagagcgagaacccaaccgtcctgagcgagtacatgctaagacattactagcagtcgaaagcagaagctactaatactcaattgatccaattagacttgagcaacggaacaagttaccctagggattaacacgcgcaagtcctattctagagtccatgatcaacgaatagggtttacgatcctcgatagttggatcagtgacatcccgaatggtgcagccgctattgacaggttcgtttgttcaagcgatttaaagtcctacgtgatctgagttcagacccggagtaatccagggtcgggtactatctacttcaaatttcctcc

SEQ ID NO: 594453 - DNA, 146 bp, Homo sapiens
tacagatagcgatggcaaagatcacatttagaattagacagaaagaacacagcatccctgcctcgtcttttgtatagaatgtaagaagagggaaagtagtcttatttcatatatcaaaattctgacttaaatgaataaaatttagt

SEQ ID NO: 594454 - DNA, 376 bp, Homo sapiens
ggggggggggggcaccggggaattttttaaaggggcttttttaaaaggggggggagggtgtgggggtccaacccaacccccggtttaattttcaccccttttccaaccccccttgggtttttagggccttgttttccggcccctttcccctgaaaaccccccccaaaggtggaggccaactcccccggcccccccctgtttttcccggggcccctttcccccgggtttaggggaaaattccccaaaaacaaaaaagttttttccccccgggggggggggggggaaaaaaacccttaccctttttttttggggttaaaaaattggggggttttttatttttttggttggggggaaaaaaccggggggaaaggcccca

SEQ ID NO: 594455 - DNA, 329 bp, Homo sapiens
tcactcatccatgctcaactaaactctttaaatttaatttggctgaagtttttcttttaacagtggccatgaccaaaaacatagataataagtatattcaaggatgtgaagaaattggaaccctcacacattactggtgtgtaaaattacactggaatgtaaaattatacagtcgttttgaaaaacagcttagcagttcctgaaatggttaaacatggagttaccacatgacccagtaattctactcctcactgtatacctgagaagtgaaaacatatattcacacaaaatcttgcacacaaatgttccatggcagtattatttataat

SEQ ID NO: 594456 - DNA, 272 bp, Homo sapiens
  misc_feature (242)..(243): n is a, c, g, or t
tagtaagattacacatgcaagcatccccgtgccagttagttcaccctctaaatcaccacgatcaagagggacagagcatcaagcacttctgcaatgcagctcggaaacgcttagcctagccgacccccacggaaacagcagtgattaacctttagcaataaacgaaagtttaactaagctatactaaccccagggtctggtcaatttacgtgccagccaccgcggttcacacgcattaaccnncaagtcaatcaggaagcccggcgttaaaa

SEQ ID NO: 594457 - DNA, 279 bp, Homo sapiens
  misc_feature (2)..(2): n is a, c, g, or t
gntcaggaatatgggggaagtatgtaggagttgaagattagtcctgcgtagtcggtgtactcgtaggttcagtaccattggtggcaattgatttgatggacagggagggatcgttgacctctgtctgtaatgtaaagggatgcgatagggatggagagggcggatgaggactagtgatgatggggggcagtgatagttcaggacggtttctaatttcctgagcgtctgaagatgttaggtataagtatagtttgtgtgtgtgagtgtaacggaaaaggg

SEQ ID NO: 594458 - DNA, 178 bp, Homo sapiens
gacttccatcctacgagcgccaattgatttgatggttaagggagggatcgattgacctcgattttgttatgtaaaggatgcgtagggatgggagggcgatgaggactaggatgatggcgggcaggatagttcagacggatatctattatcctgagacgtctgcagatgttagatatta

SEQ ID NO: 594459 - DNA, 615 bp, Homo sapiens
cctcacggatgtaccctcaatgaaaatgagaattaatcaggaagttattagtcataccacagacggaacattccaggaagagggtagacatgcacatctcccatctaaaactcttagggccatatgtgttttagaatttaggagtttttcgtttggaaagttaatacagtacacatatcatatattatgacgtatatcccagcaggatctgagaaagccctttattaaacatcatttgtattgcagaatgcgttaatattcgcactaaaagggtttatgtaaatgactgaaaaagagaatgaaaagacaatccacagactgggagaaaatctttgcaaagcatatatctgacaaagaatttatatacagaatatataaagactatcagaactcaatattagaacaaataaccagattaagaaaatgtgcaaaagacttgaacagacactctaccaaagaagatatatggataagtacagaatgtatttaacattgttagtcattaagaaaatctacattaaaaccacgagatatgccacatatctattaaaatgactaactttataaaaagaatgacgatatcaagtgtcggtgaggatatggagtaacaggagg

SEQ ID NO: 594460 - DNA, 846 bp, Homo sapiens
agcgggttctgccataggcggcttagagggaggcgcttattcgcctatacctactgtagcttctccacgtatggaccctaaaggctactgctgctactacggggctagacagattactgtctcagctctaggactgtgcgttcttccacgtagaacgctcttctgagggaggtacacttcacaagaaacagtggcaatggaaacaacacagtgctgtagtcatcctgtaatatgctccttgtcatcaatgtatacattcctgctagagtgccatatccacttgctttaagctcaagtcgcatcttactagtgaagtattctgcgcaatgagatggaaatacacatgtatgattatcttccaactactgtgaatgtgtgctcagaactggtgacagctagtattctgtgtgcattgtgtcattctgtgttagtagacgaaagatcatcaaacgtagaaatttgaagtatgcttcctggaaggaattctctgatttcatgaagtggtccatgcctgccttccgttatatttcctggataacttgcacttgtcttctagtgtcctgtcctatcttcaaccagccatggctgttatcttctcaaatgttagcattataacaagagctcttctatacaggatagtgctgaagacggcgtctaaacggggatccacgagacgcgtacccgtaccgtgactttatattctgtctattgtcgggccttgactggccggggaactaatacttctagcagacacaaatgtagtgctggacgtggaatttcatcaacgatgccctttttcagacgcttccaattcatgccttcgtattcagaaagtgaatggtaccc

SEQ ID NO: 594461 - DNA, 145 bp, Homo sapiens
actcagtctgtccagtcacaccttgtacgcaggtagaaggagctgaaatagtaatttacttgcataagtctagaagagagtacaaataaaatcaaagagaggagcatacctaacatatgaataattagtttctatcagataaaaa

SEQ ID NO: 594462 - DNA, 192 bp, Homo sapiens
agcagatgaggaaggggcccagtcctaaacgacggtataaaaaccagaagtttggttttggtggaagaagaaaggctcaaagtggacatcgggagactatatgatgtatctagcttccggccaagaagctcatggcagaggctcaagaggctggcaagaaagggtcaataagagactcgcaaacgaacagga

SEQ ID NO: 594463 - DNA, 563 bp, Homo sapiens
  misc_feature (365)..(365): n is a, c, g, or t
gtgaacacatggacgtagggagggaacaacacacactgggccctgtcgcggggtgggaaccggggacaggagagtatcaggaaaaatagctaatgcacacagagtgtaatacctaggtaatgggttgatagatgcagcaaaccaccatgacacacatttatctatgtaataaagctgcacattctgcatgtataccctggaacttaaaaaaatatattgaagggtcatggttacttgtattgtgtgccaaatatgcatagtatattgtccatattacaaattgcatattatgtacaccattgcgtatgtcttaattttttcattttcgtacatttaattttctagaccaaaacttaaagttcgcntcttaaaggtggatagaataggggccctgtggtttcctttggtgttccattggtggggcgtaccttttctttgagacacccttccttttaagaaaagccaaggtaagcgaagaggaatccatttggaaaggccaacaggaggtggttggggcgttaataggggtaaagctggatttaaacaattatttttccccccac

SEQ ID NO: 594464 - DNA, 179 bp, Homo sapiens
  misc_feature (80)..(80): n is a, c, g, or t
  misc_feature (97)..(97): n is a, c, g, or t
  misc_feature (162)..(162): n is a, c, g, or t
  misc_feature (171)..(171): n is a, c, g, or t
gatgcctgtaaggtgttagcacagctgtccacatgggaagtgttcaatagatgttggctatttctcaacatcggttaatngcatctttcagttctanggatttccattttgtggttcctttttgtgtacaggtggtatagttctttctgccaaaatttccanatcttatgnttttaata

SEQ ID NO: 594465 - DNA, 732 bp, Homo sapiens
  misc_feature (594)..(594): n is a, c, g, or t
  misc_feature (596)..(596): n is a, c, g, or t
  misc_feature (604)..(604): n is a, c, g, or t
  misc_feature (618)..(618): n is a, c, g, or t
  misc_feature (620)..(620): n is a, c, g, or t
  misc_feature (642)..(642): n is a, c, g, or t
  misc_feature (664)..(664): n is a, c, g, or t
  misc_feature (680)..(680): n is a, c, g, or t
cgggcgtgctggctcacgcctgtaatcccaacactttcggaggctgagcccagcagatcacttgaggtcaggagttggagaccagcctggccaacatggtgaaaccccatctctactaaaaatacaaaaatacaaaaattagccgggtgtggtggtgggcacctgtggtcccagctactcaggaggatgaggcaggagaatcgcttgagcctgggaggcggaggttgcagtgagccgaggtggcaccactgcactccagcctgggctacggagtgagactctgtctcaaaaaaaattaattaattaattaaaaagtacaataaaattattattgactatcgtggtttgcactttcacattgcaggcttcaaaaagcatgggtttatttgggcacggtggctcacgcctgtaatcacagcacttttgggaggccaaggcgggaggatcacttgaggtcaggagttggagaccagcctggccaacatgacaaaaccctgtctctaccaaaaaatacaaaaattagcggggcatggtggcacacttctgtaatcccagctacttgggaggctgaggcaggagaatcgcttgaaccananagttgaangctgcagtgagccnanatagcacccactgcacttttanccctgagccaccaaaaagtganaacccttgtcttcaantaaattccctttttttaaattaaattaaattaagcccttgaagttccaaaac

SEQ ID NO: 594466 - DNA, 1030 bp, Homo sapiens
tcgctggagggagcctggctgctgttcattggtgctgtggcgtgcaggcctcggcaggtggcagccccatgcccaggtgcctgcgtatgctacaatgagcccaaggtgacgacaacgctgcccccagcaggactgcaggctgtgcccgtcgggcatccctgctgccagccagcgcatcttcctgcacggcgaaccgcatctcgcatgtgccagtgccagcttccgtgcctgccgcaacctcaccatcctgtggctgcactcgaatgtgctggccctgaattagatgcggatgccttcacatggcctgcgcctcctgagagcagctggacctcaggctgatatatgcaaccagctccggtctgtggaccctagacaaattccacggactgggccgcctacaaaagctgcaactgagacgctgggctgcaggagctgggccacggggccttgttccgcagggcctggcttgcccctgaaatacctctacacatgcaggacaacgcagctggcgaggcaactggcatgattgacacccttcccgcgaagcgtgggcaacccataacaacacactcttcccttgaaagggcaaacctggcatactccaggtcgtgccctgaagacgccgccttaccgtgggctgcacagccattcgaccgtcatcactactggacccagaaccgtgttgggcccatggtacaccggaatgccttcctgtgaaacctttgggcgactcatcgacacattctaatctcgtttggccaacgactataatcaagagcttgcacatttgagtgcctggccccgcgtgcggtggcagtgaaggaacttgacggccacggcaacccctgttttctagcgtgccgggcagcctcatatagtactggtcgagattcgaagaaatccacgaagatgcataacgatccagaagctggtagaagatatgtaaactgcatcacatcactctaggtcgcaggctactacagcaatgaagagaatataaacaatgatccagatcagaacaagaaaagaa

SEQ ID NO: 594467 - DNA, 344 bp, Homo sapiens
cttctgtggacagcagattcttttccttctcacaaggggctcatttaaaatttggaggctgggtgctgtggctcacgcctgcaatcccagcactttgggagactgaggcgggcggatcatgaggtcaggagatcgcgaccatcctggctaacagtgaaaccctgtctccactaaaaatacaaaaaattagccgggcgtggtggcgggcgcctgtagtcccagctactctgaagactgaggcaggagaatggcgtgaacccaggaggcggagcttgcagtgagctgagatcgcgccactgcactccagcctgggcaacagagtgagactctgtctcaaaaaaaaa

SEQ ID NO: 594468 - DNA, 287 bp, Homo sapiens
ctagggcggctggtgggtggaggtaaggggcacgctgacttggtgcatcaccaccaggaaacttccgcggctcagcctgcaggagtgccaagacccaacgttcgggctgatgcaatcgggtgagtgcttaaaggcaagagggcacggccagcgtccactggggcccacgcagatcagtccctaaacagctcccactgtccttcagcctctgtcccagcccctcagatttgacatccctttcaggaacatgtgctttgttttatcacacccccagcccggccgggccg

SEQ ID NO: 594469 - DNA, 180 bp, Homo sapiens
gttatggctggtccggaagacctcacagacaccccacacctgactgacccgggcaaccccaggtaggcagcgatgacaaccaaggagaaaggcgtcggatgaagctgacagtgattgacacaccagggttcggggaccacatcaacaacgagaactgctggcagccaaccgtggactagt

SEQ ID NO: 594470 - DNA, 284 bp, Homo sapiens
agccaactagcgtgttaaagaaaaccctcaaataacactgatcaatagaggtaagcaaaatcataaccatttaagagttaacaaccgccaagccaaggaaggccacattttagggtaaatttataaccaggaaggtgccggttgaggagtagggggtttgggacccatacacacgagttaggggggtgttaattagagccacgatcacacagtggcagagagagagagggtatacccctagtgggggtttatacagagccccccccatgccacaccaccaccca

SEQ ID NO: 594471 - DNA, 338 bp, Homo sapiens
atgggtttgggctgctctgcctccgtggcactgctgcttgcgtggtggtctccgcagcttgaaaccaactataagcatcttttccatctcggagaaggctgatttggcctgaagaagccctgtgtgcactggccctagcaaacccacctatagccagcttgggagcaaaccaccaagggcctagctccgaaacggcacaaaacgcgctcctaggagctgcattcttgaaaggggatcagaggcatctctgcagagccaggtctcaagtatgacacagtgggttgaaaggatccagtgttatgacagttgtggtgtaggtcctaataacggtggcttgg

SEQ ID NO: 594472 - DNA, 176 bp, Homo sapiens
actaagatctcgctgctcctctcagtgtaagaagctggagtattcacagcgaatgaagataagtgagtctcttggtcaggccttatggtaaaaagagggcagcagtatttcttctccccagacctcgaagccagtggggttccaggattggtgaaccctggcgcccacctcaaccc

SEQ ID NO: 594473 - DNA, 112 bp, Homo sapiens
agaaaattaacaccaaagtttttccaggaagaaaatacagagaaattaaagttgaagtactataatttaatgattcagctggatcaacatggagggatcctatttgtctatt

SEQ ID NO: 594474 - DNA, 1535 bp, Homo sapiens
gctctatgtagctaacagtgaagatttacctcgcttctgctcagaggccttgctgtggagctccactgccatgtacccagtagggtttgacatttccattcagcccatgcaaacatggcatcatgtcattgggccagcagcactgtgttctcgtgcacacctgcagcgcatgtcatcacatcttatcagcatgccaacagtcattttggggtcatcattcatccgtaatgggcacgactacacagatgatcattacagacacatgcctgataccacggcggccccctaaccccagatgaccacgtcttcgccgaccgcaactactcaagccacacgacagacacatcaacccgaagccagcacgtagaggacaagatcatgaatcgtgcgagcggaagaccacacgcctgcaacgtgataagtaccggcaacacaagacagcgaagtgccatcgcaaggcgctccaaataggcgcggcggaccgagcatagcgacaccgtgactaaccgcagagcacagccaacaacacactgactggccgcgccccaccaccgccccagccccgacggctgccaactcaccccctcgcgaccacactcggcctcacctcctgccgacaaagagagagacacccacctaccacctgaaccacgaacccacacatacaagctacccaatcccaactagatagccccatggcctagaacaagctgccgcaccgagacaagaacgcatgcaagcagcacatgacacacagcccaccatgcaccaccaacgacgagaccccatcgcacaccgaacgaacgacaactaaacacaccacacccctcgaacacgcacccaccaccacaccaacacaacaccacaaccagcgccgccctccacgccagaccaacacacatacccaacacaacaccacacacaccgagcgagccgaacacacccctacacacgtgagcgccagcgaagaacccaccagacgcaagcacacacgacgacacaggggcacaacccagcaggggaagcaaccacaaccgacacaccgcacacaagcgcgccaaccacacggcacggacctaacctatcccagcacacaggtgacaccaacacgcctacgatcattgcgaccgcgcaaaccgacacatcacatgtacaacaaccacacagccagaccaatagtagagcgcacaaacgacaagaggcgggctacagcaagtgactcgaggacaggacacaaacagcagcgaacattgcgcagcaagcctagcacgacaccgacagggataagtacaactacacgagacctcagagacagagacaaaccaacgaagcagaatcaagccgacaaaccgaaagaagccaactcacctaaatgaggcgcagcaggacaagcaaacgaagcgacaagacgacacggacgaacacaaacgcacacgacgagacaacctaagaacaacactaagcgactaccacgaagagaacgtacggcagaaccaacagcagcagatgacacaataccgagagcgaagaaatag

SEQ ID NO: 594475 - DNA, 296 bp, Homo sapiens
ttggacacgctccagtcagtagataggtcagctcgaggggtgcagaaagcctgtgggcccaggagataggagatgcctgtttgtaggcgtaagatctaccttgcgtactatggacatctaccgggcatcagaccctctaccctggcccttgttatacctactccaccatggcagcctcatatatgtaggccagtatgtgtgcatgctactagacacttacactcgctgcgagacagctggaagggctcgtcgtcttacccagtgtctttactcttactcactcaagctacctctcc

SEQ ID NO: 594476 - DNA, 109 bp, Homo sapiens
ctgggcgtatgccttttctaagactcacaaactaactaatactaacatctcagagctcaggaaatagagacgtctgaactatcctcgccgcatcatcctagtcctcatc

SEQ ID NO: 594477 - DNA, 88 bp, Homo sapiens
cccctgcccccgggcccccccccccgccttccctttttccctgtcttccttaaagtttccctcctgaatagaagttccctttgcctta

SEQ ID NO: 594478 - DNA, 276 bp, Homo sapiens
ttttttttaaaattcaggcccgtggggcccccctggggggcccccccttttgggggccccccgcctacgggggcaagttgtttttcagcctgttgggggggggcatcagggggccccccgtgccccacatggtggcccccgggtgtggctgccggtgacccctgccccgggggggctcctgccccgggggtccgggggggcccccgcttgggcccctttccttttttttttgggcccccagctttgcccccataaaggcccgccagcccccggcca

SEQ ID NO: 594479 - DNA, 488 bp, Homo sapiens
gagacgttcttcgccgagagtcgtcggggtttcctgcttcaacagtgcttggacggaacccggcgctcgttccccaccccggccggcacgcccatagccagccctccgtcacctcttcaacgcaaccctcggactgaccccaaggacacccgaacgcacgcatccagacgaccgacgcagcgcacacgccgccgaacgacgaactctcccattagtcgccgcgcatgacgaccgctgtccacctcgcaggtgcgccagaactaccaccaggactcagaggccgccatcaagccgccagatcaacctggagctctacgcctcctacgtatacctgtccatgtcttactacttagaccgcgatgatgtggcttatgaagaaacttggccaaatacctttcttcaccaatctacatgaggagagggaaaatgctgagaaactgatgaagatgcagaaacaaagaggtggacgaactcttaccttcaggata

SEQ ID NO: 594480 - DNA, 186 bp, Homo sapiens
ttttttttaaaaaagggggggggggggggttcgggggacccaaaaaaaaaagggggggggccctttaaaaattttgggggggtttttttgttgggggggccaaaacccccgggtttttttttttggggtttttggggttttcccatttttcccccttttgttttttttttattaaattttttttta

SEQ ID NO: 594481 - DNA, 851 bp, Homo sapiens
agctgctgctgcctgggccgacccgtcgggtcttccaagctgtcgtccctatggggctgtgttccttgtcccgggagtccggcctcccaggctgacctggaagagaaaagagcaaatgttggaagaatgcgctgcggcagagtgacagacaaaaaaagagcgttgcattctcggggaatttcaggatggtccaatctgttgcacgaaaaggagcaattgacaacaggggaacaaaaatggcacacaccccaagtttgctacattcgggggcccccaaccaagaaggggtgccctttaggggttggacacaggtcccaataaagcgcattaacacgttgagcttaggacgcgaatttcttgctgtggcccaataaacgcttgtttaattaattcttggcaatccaaagggtgggggcttacacagtaccaatttttaaaatttttcgttatccttcattttggagttaaacttggagggattccaggactttgtgtaaattaatatatttggcccctttaagtggtgcaattgctataaaaaaagggttggattttcacagggcttataggagaaatgggctacggactttttccattaaaatacttgattttccctaagcattttggctctttcttgcgaggtaagggggggagtagattagctaagtattctaaggaggctcaacaacattggactaaaatacgttgaattatacataacattgctttgtaaaatttcttgataatactctaggattaaaattcgcagtttgtttatatccttataaatgatttatagctaattgggctgatcgggtaattctgtttattcatataagatttgtaactag

SEQ ID NO: 594482 - DNA, 139 bp, Homo sapiens
tagtgctgctggttctatgatgctgtgaagtgcacggtcagcctcgtgtgagggtgggactgtctactgagtagcctcctctgtgctgaccacctcctctgtgctgtgctgtccacctcctctgtgctgtccgcctcgt

SEQ ID NO: 594483 - DNA, 719 bp, Homo sapiens
  misc_feature (17)..(17): n is a, c, g, or t
  misc_feature (123)..(123): n is a, c, g, or t
  misc_feature (151)..(151): n is a, c, g, or t
  misc_feature (162)..(162): n is a, c, g, or t
  misc_feature (223)..(223): n is a, c, g, or t
  misc_feature (225)..(225): n is a, c, g, or t
  misc_feature (231)..(231): n is a, c, g, or t
  misc_feature (256)..(256): n is a, c, g, or t
  misc_feature (267)..(268): n is a, c, g, or t
  misc_feature (295)..(296): n is a, c, g, or t
  misc_feature (302)..(302): n is a, c, g, or t
  misc_feature (312)..(312): n is a, c, g, or t
  misc_feature (323)..(323): n is a, c, g, or t
  misc_feature (325)..(325): n is a, c, g, or t
  misc_feature (334)..(335): n is a, c, g, or t
  misc_feature (338)..(338): n is a, c, g, or t
  misc_feature (343)..(343): n is a, c, g, or t
  misc_feature (346)..(346): n is a, c, g, or t
  misc_feature (348)..(348): n is a, c, g, or t
  misc_feature (350)..(351): n is a, c, g, or t
  misc_feature (354)..(354): n is a, c, g, or t
  misc_feature (356)..(356): n is a, c, g, or t
  misc_feature (364)..(364): n is a, c, g, or t
  misc_feature (367)..(367): n is a, c, g, or t
  misc_feature (401)..(401): n is a, c, g, or t
  misc_feature (408)..(409): n is a, c, g, or t
  misc_feature (411)..(411): n is a, c, g, or t
  misc_feature (416)..(416): n is a, c, g, or t
  misc_feature (502)..(502): n is a, c, g, or t
  misc_feature (528)..(528): n is a, c, g, or t
  misc_feature (544)..(544): n is a, c, g, or t
  misc_feature (574)..(574): n is a, c, g, or t
  misc_feature (576)..(576): n is a, c, g, or t
  misc_feature (580)..(580): n is a, c, g, or t
  misc_feature (591)..(591): n is a, c, g, or t
  misc_feature (619)..(619): n is a, c, g, or t
  misc_feature (702)..(702): n is a, c, g, or t
attgtttcccacaacanccatggttatgtaaaaaaaaccgccattgtcaattaagatgttaaaaaattatttccataagagtattaaattctaatctatgattcacttaacttcctactttanaattacaaggaaaagaaatctcacaagnagccaaaaaanacatcccaagcagtaatcacagaagatgaagcaccttacaggacccctccaccctcaaacncncatgtncagaaaagaattaaagccttaatanactactgaatnntaactatttacatcattctaaaaaaannaaaaanagaattacanaacaaaaaatncnccttttaannacnaaagnaanangnngtntncttacggngtntgagaggcaaaaaaataaatccatagtaactaangggcggnngnttttntccctgaatttttaaaccccaacaaagcattattttgcaaaaggtcctttagcccaaagtcagtgtctctgttttgatctctttgnaaaagaactctctgttcatccattcnctttccctgggaccgnaaaataaggcggaaaaagtcttcaacgggnantggnggaccctttgnggtagcaggggggggagcacatcttggntcatctaatctgcgatccttgccattttacaaggatgtcaaagaaatcttcatcagcctctttgttgtcattagtcatcaggnggctaagtaccgactgg

SEQ ID NO: 594484 - DNA, 470 bp, Homo sapiens
cttttattattttacagtgtactcctatttatttaacaagttaactataaaacagcctcaggcaggtccttcaggagatattccagaagagggcattgttatcatagatgacagctccattcatgttactgaccctgaagaccttcaagtgggacaagatatggaggtggaagacagtggtattgatgatcctgaccacgggtaggcttaggtttatgtgtgtgtatgtgtcttagtttctaacaaacaaattaaacaagtacaaaaactcaaaatagacaaaatgcttagagcataaggatatcaagaatatttctgtgcagttgcaccatgagtgcttaagctacatgtcatcacacaagagtaacacaacttcacaacattaaaaacgcttcaacttaacaagctctacgcagctacggtccatttattactcgacaactaaacttatttttctcaacaacaaaaca

SEQ ID NO: 594485 - DNA, 502 bp, Homo sapiens
  misc_feature (7)..(7): n is a, c, g, or t
  misc_feature (13)..(13): n is a, c, g, or t
  misc_feature (109)..(109): n is a, c, g, or t
  misc_feature (140)..(140): n is a, c, g, or t
  misc_feature (225)..(225): n is a, c, g, or t
aggcacnggcacnccttactgacctctgggacccttacggggggacccttgatgtaggaatgtgggaggcctttgtcgtggctcagacatactcgctcaaggatcctangggggaacccttacctgtgtccgtgtggtangacttagagtcctcacacttactcacatacaggcctcataatgagaagccttgatgtgataatttagaaatcttcatctatttcnatctatatgaatgtagaacatcttgcttctgctcagaactgctccttcttagaaggcctacttaacatggatgcagaataatttcagaaaccccttaaataattccttaacatctctataaacgctagaatataatgctgaattatatcctttattaagcatcatctccatttcaccatatcctaactgaaaccctatatatttcttgtgtgttcctatttgtaaatactgtaattgtattacatgactaaattatattaatactataattccccgg

SEQ ID NO: 594486 - DNA, 829 bp, Homo sapiens
ggctgcgcacccggagtgcggctcccctcggtctcctcgccatggacgcggacgactcccgggccccaagggctccttgcggaagttcctggagacacctctccggggccggcaaggccatcgggtgctgaccagcggggggatgctcaaggtatgaacgctgccgtccgtgccgtgttgcgcatgggtatctacagtgggggccaaggtgtacttcatctacgagggctaccagggcatggtggacaggaggctcaaacatcgcagaggccgactgggagaggtgtctccagcatcctgcaagtgcgcggcgacgatcattggcagtgcgcggttgccaggacttccgcacgctggggactggccgctagaaatgggctagctttgccaaaccgtgctaggcatgcgctggcacattcaacccaacccttgtgttgtagaatcgagctggggaaccggcgacgacactccaacgagcaggccaacacttctttcaccgggaaccggatgtgggcgatgggcgcctagcatgcgagcgacgcatagcgaacacatggacaacggggaccacgcacatccgactcacaccggacaagccagaatgacaacacacaataccggcccgtaccccgcccaaaccaggtggcggaggccaactgcgtggcgagcatcaccaagtccggacaccaaccggaacgaactcctggcgggaccaacccggaaccaatggaaaccacatccggcacacagatgacacatcccgcaccgctgaccaccagggaatccacatcagccagcggtcagcaccgaaacaacccactaccacgac

SEQ ID NO: 594487 - DNA, 155 bp, Homo sapiens
aaggctgacccagatcccccataagactctggcaccgggctaaggttccaggccgtctgctgaggtatctggctctgcgttagcgaggtcttgctggcggacattcctagtcgggatcatagtggtctagtgtttcacagcttgtgtgccgggag

SEQ ID NO: 594488 - DNA, 168 bp, Homo sapiens
gggagaagcttaaaccttagtcacacatccagcaatggggtccgtctgcccagcgccatctgggaactgagaagcacctctgcccggcccccacaccgtgtggaaagtgaggagcacctctgcctggccgccaccccgtctggcaagtgaggagcgcctctgcccggc

SEQ ID NO: 594489 - DNA, 1108 bp, Homo sapiens
gttttatattgtttttgtgggaattggaacatttaaatatcataaatcgggtgtggggccacacctctcactgccaggtcccgtgggtccctctcctatattctgtctcatgtattgtgcccgtggaacggcggctgttggcctgtgtcgagacgcgaggagggcctgtctcgcgcccgagatgtccctctgtgagaggaagagggcatcttcacaggccacccacaagagcccctgtgagcaggaaagagcggagagagcccaagacagagccagcaggctatcacagaggggagggtgtgggacgagagagagagaggagagagaccagacgaccgaagaaaacaacgcacagtgttgtcggccgtcgaccgaaggcgcccgacaatagttgtagtggtgttgtgtacaaagtgtcgtccactcttttacacacttgttgtggttgttgttgaccacaacggcactctagttgtattgataacacgtagtggtcttcaggaaggggtactcctaaaccacatgaagcaacaactaccgccggttggggcactacttcaagaaggaggggataacacatagcagggtacttctaaaaagaggcgagttaattgctggtgggagccaaaaacacctgctggcagatgaggtaagaaaagcgggcggaagggagaaatgcaacaaaaagacacccggtgcgaccccttcatcatggtgctatatgcacccaaccccgccggtagttcgacggtgccctctttatcccaagccccctgggcacaaaccgccgctatacacctactgaaaagaagggggcgaaaaacaaaaaggacaccaaatgatcaagtgggggtggtgaaactgttgtgacacccacaaaaacaccccgacagaacatctgcgcagatggatgtgtttgtgctccacaatgggctgcttttttccaaggagaatgcgatggagaagaagtctcccttttctgatggagaacgaactctgtggggaatgtgaaactatcgcataaagaaacttaaccacgactttattgaggagcgccggaaagcacacgttgaggaactgtgtgaacctcgcgcagttttgtgttaca

SEQ ID NO: 594490 - DNA, 638 bp, Homo sapiens
tggtttacctccctccattcattcacatgctcatctgaaaagacttaagttcttccagcttgggacaataacggctttaaaaaactgtaaagtagttacaagaaaacagtggcccaagactcagaattttaaaaaaaaaaaagggagcatgtgtattatgtggccaatggtcttcactctaactgggttatgagatctaaaaccattcctcactggctctaacatgctgaaaaaatcatctgagggggagggagatggatgctcagtgtgtcacatcaaaggatacagcattattcaagcagcatccattctggttaaaggccttccagtggttaagaagattggagggtaacatagatatggcttaatggctcataactggatggtgggctgggaaaattgggtattggaatttatagcatcagcaaggaacagaaaatggtgatgtatttaatgcttgtcaataagggaatgacctgtctggttctacagagatgggaattgggaagtcaaacacccttggtattccaaaatagggtctcaaacatttggtaattttcatttaactggtaaggaggctgggaagctataagtaatcttatcttccaatacacggttaatatagcactgaaataatg

SEQ ID NO: 594491 - DNA, 650 bp, Homo sapiens
  misc_feature (1)..(1): n is a, c, g, or t
ngtaatataaaggcctacttgagtggttccaatcaaaagccaaggctcaaggatgttggaccctgtgccttcttctattctaagaagttagtctgacctataccataagtatcccattgtcttgggggaacataaagaaggagtattacatttcaatgcatctcttattgcacggatggacctatacccgccctgtccaagccattccttagactggccctgttttgatcagggtcggatgagtacacccccaatcctggcttaggggcatgatttgggaatctgacactggacgctacccgtcgctatttgtggcactgtgtccgttagtgggcctatatagattcaaggtccgtgtaatgtccttgggccaatcgctataggcagtaactcaatgggtggttccgtctgcgtgtcacagttacatgcatgttcaaaggtgcttggcactaacatatttggtcttccagcatccatgctgattagtcattccacgtgaatctgtcagtatgctgctcccaaaagtcaatgttgcagaaataggaatcttttcatgtacacagtgttgtatatttagaaatcctggctcagtgtacataggatgccctgcaacgtaatgtagggcataacgtatagcgttggactgtatt

SEQ ID NO: 594492 - DNA, 584 bp, Homo sapiens
  misc_feature (16)..(16): n is a, c, g, or t
  misc_feature (76)..(76): n is a, c, g, or t
  misc_feature (98)..(98): n is a, c, g, or t
  misc_feature (114)..(114): n is a, c, g, or t
  misc_feature (150)..(150): n is a, c, g, or t
  misc_feature (267)..(267): n is a, c, g, or t
  misc_feature (291)..(291): n is a, c, g, or t
  misc_feature (348)..(348): n is a, c, g, or t
  misc_feature (350)..(350): n is a, c, g, or t
  misc_feature (357)..(357): n is a, c, g, or t
  misc_feature (373)..(373): n is a, c, g, or t
  misc_feature (399)..(399): n is a, c, g, or t
  misc_feature (403)..(403): n is a, c, g, or t
  misc_feature (419)..(419): n is a, c, g, or t
  misc_feature (446)..(446): n is a, c, g, or t
  misc_feature (448)..(448): n is a, c, g, or t
  misc_feature (454)..(454): n is a, c, g, or t
  misc_feature (465)..(465): n is a, c, g, or t
  misc_feature (478)..(478): n is a, c, g, or t
  misc_feature (491)..(491): n is a, c, g, or t
  misc_feature (497)..(497): n is a, c, g, or t
  misc_feature (512)..(513): n is a, c, g, or t
  misc_feature (532)..(532): n is a, c, g, or t
actcctttaaaaatcnccctatttcttttcagttaatatcctcatctcgcattaccctcatacattgcttagtttnattcattttactaaattctgtnaataattatttaatcnaatctacataaagattagaaaaaattctagcaaganttatacatcatgaaatacagaattaaaagtttaaacctaccaaaagtcctatgtgccttattatttagctgtgtaatgagaaacgtcaggagtataaatctgcacttttcgactgtnagttaaatttgctaatgctggaancgaaatagtgaaggaatactggggttgctaaaagattactttttttttttttttttncnaaatgcngtgtaccttaaaagtnttttacctagaaggcctccccctgtnatcncattaatttttctaangacaatttggtgttttgaagataaatntnattagnctatgataatngcatcttaggccnattagccattttncccttnaccatattttctctnnttagcatatagccatcttnatatttaggtgggagcactaccccaatggcgcaacacgttctcattttaaat

SEQ ID NO: 594493 - DNA, 355 bp, Homo sapiens
taaatgccaacccgggccttacccctatgtactcgtatcttacggacgagagcagagacctctatggacacgtattttgtctttgcaaaacatacatgcaaaacttggacccccgctcgaaaactgatatctttctgtcatgttacaaaaggacatttattcagctactgatgctgaccggtccaccagagcttgaaataccacaccttgccatcttggccggaagacctgcctaatgactaataccttctttcttatgtgtaaacaacctctaatcaacaggaccttccctgacggctttcatatatttagagacaggctcactatgtcatcaaggctggagtgcactgccccg

SEQ ID NO: 594494 - DNA, 404 bp, Homo sapiens
atcgtgctgcagcggggcggtaccggcttcgcgggctccggagtgaagctgcaagcggagaaatcacggccggtgatgcaggcctgagtgtgtgcgggagaccaaataaaccggcttgggtgcgcaacgacgtggcgccttcattcgcggcgtgggcgccccggggacagggcaggcgaggatgcagggccgtgcaaacagtgctcctacagcgcacgctggagtttgaaagagcgggctaagcatattgaatgtggtctcacattaagaacaaaatctggccaggcacggtggctcacgcctgtaatcccagcactttcggaggccgaggctagcgtatcacttgaggtcaggagttcgagaccagcctcattggaaaaatagggtgaggtaggccaagattt

SEQ ID NO: 594495 - DNA, 136 bp, Homo sapiens
ctgtagctgattctacgaggatccttatgggctggtggtaaggaaagtagagtgagggaagcaggtaggtggaggtgtgaaagggagagggcctcatctcaggttggctggacctgcaccagcatcggcctgcatg

SEQ ID NO: 594496 - DNA, 318 bp, Homo sapiens
attctcgataggagagtacagaagggataaggcccaaagattacagcttgacatatgctgaggacttgctaagcactggctgaatgaatatgtaggacaaccatgaccagaggtggggcaggttctctggcacttcatttttgactgacacatttttctctttcccagaatatttctatcttgcagactagaaaagcgcgaaaacagagcaacaacagccaacataccattatctccattagatccacgttgatttatctcgctgaagcgagaaagttatgtcgcgcagcttacgatccacacctcatggaggaccaa

SEQ ID NO: 594497 - DNA, 845 bp, Homo sapiens
taaaaagcacaacacccccgcgggggggggggggggggggggagagaaagagagagaagggggggggggggatgagacacacaacaagcaagggggaggtggaccggtgaagaaaaaaggggtgtaagagagtggaagagggggggggggaggagaccccccgcgggggggggggaacaacacaaatgcaggaggaggaggatagagtgcgggaagaacacaagaactgaaggggacgccgtcggaagaagaaaagaacaagaaattcaaagacgacacacacagacacaagtgggggcgcaccacacacacacacaaagagagaaatgccgcccgcgcaggggagaaataatggaggggggggcgaagagtgggcggtgaaatagcaggcggtggggcaaacaaacacagcctccccacaccacccactctctatggaggggggacaaacaaagggggacagcccgctgagagagagaggagaggaatcaaaacctacgaccgacgagagggagagacctcaccacaaagaacgaagagtaagagaggcagacgaacaaaaaaaaaaaacggaggagctaagaatacccccgggggaggacgaccaaaaacaaaaaacaaagtagggcgcgggcgaagaagaacacccaacagggggaaggtggtgaagaaaacacaaggtgtaggaccaaccccacaacaggagataaaaggtagtaagaaacaaagaacaacaaattaaccacagcaaacccacaaaactcggacttgagtatggtaagcaacacacacgaggggaggggcaaaacactaccccccaccataagagtaacacacacaaggtg

SEQ ID NO: 594498 - DNA, 831 bp, Homo sapiens
tggggccttttcaggcctgaggaccgagctgcagagcgctgacatgcgggcaaagaaccagcttcggtggcctgcctggcctgcccaggtctcagccaggcttggacgctcgatcgagccgtcagcgaggctagctccctattctcgatcgtgtgactcgacacgcctgcttccgcgtgcgctaggtgtggctttagctcgggctcttgaaccgcatgctgtggtggcgtggccaggcgtgctgcctagccgccgtcccgattgctccgtgtggatcatgagggctgagaggggcctggcatggcatgacatgttcgtttgacatgtgagctgtcctgtgggtctggtggtcatgtccaaggataacggtactaagtcggaacactcaagccgtccagggctgccacgtgccatggcagaacgcctcgcgaatgctaagatgtggagagcaactaggctagttagcgtaaggccaacggatcagagtgggtcgcgggcgcacaggggcacggcaaaggtgggtaccggtatctacttgggcacggccacccgatgtgaagcctaggggccttgcgtttcccttggttcgctatagaaaatcccggaggaccacagggatgtggcctatcccgttattagcttccgtgcgcgcgccatggtggaagaccagggggcgtccccggaacacggcgcacggtaagtccgttttctcctgtgtggtctagtgtcgccttttacaggggggtcacgcctcgccgtctcgaagggccaaggggggcgcatttgccgtgtggggtaacccccgcagtttccctggacggggggggtcgc

SEQ ID NO: 594499 - DNA, 637 bp, Homo sapiens
  misc_feature (55)..(55): n is a, c, g, or t
  misc_feature (468)..(470): n is a, c, g, or t
aggctcgaatgacagtagcattgaggtgtttgctgcagagtggagggaagctcancccaccctcccgcaatccgagatagtgtggcacatctgtcctgacaggcgaggagtgtaactgaaccaggaatatttcctccattcctgctctcccactgcacacagggtggtggcacattatccctctggggggtgggcacgcctggtgttttggctcaatttgggtttgttggtcacatggagctcttccatttcgtttagctgaataatgagttgttcctagaggagccagcctgtctctccttgttgcccccaaagcccatgccctgccgtggtggcagctgggactgtgaatgggagggggtccccaactatggatgatgttgcccctctctccggcatagccaacgcacggttcatagtacaaaggcccctgctgcaacatggtagagcaaaaattaattcctatcnnnccgtgagtaggagttgtgagaaattcccaccccacagtggaagacagcttatcgtgcatgcactcgttggtagttcggaagctcttacgtgtgccctgagcgtccatagcttatcacctatcacaaagcataccacctttccttaatacaccagcggggcggggagc

SEQ ID NO: 594500 - DNA, 200 bp, Homo sapiens
cgaagatgggaaggggacttgtatgattttaagaaaccacaggataggatataatcttatgagctaaatgtgtagcacatgcttttgtatcattattaatgatacacttttcttctcttcttagagtcgtttttcccttggcatattgtgatttgtctctctcttcatcaatggtgaggcggataccccttccgggttac

SEQ ID NO: 594501 - DNA, 157 bp, Homo sapiens
gggatcgttaagcacaggaggtcgagtgagccatgatcgcggcactgcataccagcctgggtgacacagtgagatcttgtctcaaaaacaaacaaacaaccctttgcttggtttttccttattgaaattgttctttctttttttattttgggtccct

SEQ ID NO: 594502 - DNA, 464 bp, Homo sapiens
  misc_feature (27)..(27): n is a, c, g, or t
  misc_feature (64)..(64): n is a, c, g, or t
  misc_feature (74)..(74): n is a, c, g, or t
  misc_feature (77)..(77): n is a, c, g, or t
  misc_feature (81)..(81): n is a, c, g, or t
  misc_feature (85)..(85): n is a, c, g, or t
  misc_feature (124)..(124): n is a, c, g, or t
  misc_feature (133)..(133): n is a, c, g, or t
  misc_feature (137)..(137): n is a, c, g, or t
  misc_feature (145)..(145): n is a, c, g, or t
  misc_feature (169)..(171): n is a, c, g, or t
  misc_feature (175)..(175): n is a, c, g, or t
  misc_feature (181)..(181): n is a, c, g, or t
  misc_feature (193)..(193): n is a, c, g, or t
  misc_feature (199)..(199): n is a, c, g, or t
  misc_feature (201)..(201): n is a, c, g, or t
  misc_feature (212)..(212): n is a, c, g, or t
  misc_feature (216)..(216): n is a, c, g, or t
  misc_feature (218)..(218): n is a, c, g, or t
  misc_feature (224)..(224): n is a, c, g, or t
  misc_feature (227)..(227): n is a, c, g, or t
  misc_feature (236)..(236): n is a, c, g, or t
  misc_feature (238)..(238): n is a, c, g, or t
  misc_feature (241)..(241): n is a, c, g, or t
  misc_feature (257)..(257): n is a, c, g, or t
  misc_feature (275)..(275): n is a, c, g, or t
  misc_feature (289)..(289): n is a, c, g, or t
  misc_feature (291)..(291): n is a, c, g, or t
  misc_feature (293)..(293): n is a, c, g, or t
  misc_feature (298)..(298): n is a, c, g, or t
  misc_feature (314)..(314): n is a, c, g, or t
  misc_feature (322)..(322): n is a, c, g, or t
  misc_feature (333)..(333): n is a, c, g, or t
  misc_feature (342)..(342): n is a, c, g, or t
  misc_feature (400)..(400): n is a, c, g, or t
  misc_feature (402)..(402): n is a, c, g, or t
  misc_feature (439)..(439): n is a, c, g, or t
gatctactcggggaaaaagaaataaanggccaggaacctacacgatataagtaaaaaaagcaanaagagaacancancatncagnaaaaatgatggattgaaagcagaaaggataaggaaaacnaggatcatngaanatatgtanaaggaagacgaatacccacagatnnncaanaccaanagagatgagatnaaaacncncaggatgagtnaagnanaaggcntgnacctcggananganaagggttttattgtanaactctttaatggaaaanttaaggatgaagtnananggatnaagaaaaggaagaacntaaaaccnaagggtaaagngagtagganaaaacataacagaagaggcagacgggtgacctgctggggggctcagcgcgcgcttctngnacacaggtgagaactgtgaactcgggcttgcacaganactcgtagctcaactgggtgtactg

SEQ ID NO: 594503 - DNA, 668 bp, Homo sapiens
  misc_feature (80)..(80): n is a, c, g, or t
  misc_feature (129)..(129): n is a, c, g, or t
  misc_feature (158)..(158): n is a, c, g, or t
  misc_feature (169)..(169): n is a, c, g, or t
  misc_feature (180)..(180): n is a, c, g, or t
  misc_feature (203)..(203): n is a, c, g, or t
  misc_feature (306)..(306): n is a, c, g, or t
  misc_feature (327)..(327): n is a, c, g, or t
  misc_feature (341)..(341): n is a, c, g, or t
  misc_feature (373)..(373): n is a, c, g, or t
  misc_feature (375)..(375): n is a, c, g, or t
  misc_feature (400)..(400): n is a, c, g, or t
  misc_feature (404)..(404): n is a, c, g, or t
  misc_feature (453)..(453): n is a, c, g, or t
  misc_feature (468)..(468): n is a, c, g, or t
  misc_feature (477)..(477): n is a, c, g, or t
  misc_feature (493)..(493): n is a, c, g, or t
  misc_feature (505)..(505): n is a, c, g, or t
  misc_feature (511)..(511): n is a, c, g, or t
  misc_feature (520)..(520): n is a, c, g, or t
  misc_feature (522)..(522): n is a, c, g, or t
  misc_feature (551)..(551): n is a, c, g, or t
  misc_feature (662)..(662): n is a, c, g, or t
aacgatttccagagacagtggggaagctttacagagagacaggcaggggaggatcttaacccggctttcgtaagcctctngctatgagtatggaaggactcaggaattctcccactccggaatgccttnctgctggggtgaccaggtcttcacttgtnaaacaggagtnggccacctcanccctgcgcctggcctggtggaanatgggtcaccgccccaaactggggcagccgccccatcccaacgcagttgctgccgctctccatgcctcccatgatagacccagctaaccagggggactatgtnccctgggaaaacctgggtacncaggctagcctttngtttcagcccctactcctcttcccgggctgcntntactccccggacggcccctttcccngggntgtaattcacatcagctgggaagggtcccttgcagacagtatcttggangaggtcgcgtccccnctagtgacnagcaaactcctaaaancggaccttgccncagagnccctgtagncnccaaccggcagtaaggaggcagcgccgtnctcagcgccgcttagtggcgccaggcgtgcctggaaatccgctttcgcagcgccccctcgtagccgcctccgcccgcagaaaggcgttccctggacagagaagcgggcgcncggggg

SEQ ID NO: 594504 - DNA, 626 bp, Homo sapiens
  misc_feature (584)..(584): n is a, c, g, or t
actttaagttcttggatacatgtgcagaatgtgcaggtttggatacatgtggagaacgtgcacgtatacatgtgccatggtggtttgctgcatctatcaacccatcatctaggttttaagtcccgtgtgcattaggtatttgtcctaattctctccctcgccttgccccccaccctctgacaggcccctgtgtgtgatgttcccctccctgtgtccatgtgttcttattgttcaactcccacttatcagtgagaacatgtggtgtttgattttcgtactacagttaattttgtgcagtgatgatttaataccacatctttatgtttgtttacatttttctcaactgtgaatggtgccatgtatggtctgcaggtgttttcataagttttgataaattttaatttttataatatatttgtgtatattttatggtagtaataaaatagactggtatccacatatattttatatattcatgacatatatttttcttaatttttttgatatttctaggctgtgtggttcatctgcaagttttttcaaattgttgcatcagatctccaaatttccaatgtatttatggngaaatactctgggacatgttgttgaggtgcttattagacatc

SEQ ID NO: 594505 - DNA, 310 bp, Homo sapiens
gactctcgaggatcccctatcgtctgccaagccccaggtctttcaggtggagcctcccctggcggtccacaattaccagctgaatctactctgtttccaggacctttgacttatgatggctcagctgggcctgaagagcttttgagcataacttattgtatggtttgagtgtttagaaagatgagcatctactctatgcctgatcagtgatgagtcttgaaccccacccttctccaacttcccttggcagcttcatccagttctgtgacaacatatgaaacctgccagaccacagacatcggtatcgctc

SEQ ID NO: 594506 - DNA, 127 bp, Homo sapiens
gcagcaggagccgcaggtcgggcctgaactgccgctgggagaggaagcagcgccttgccatgaacgaggggctgttgtagctgcaacacctgctccagcttcacctccagcagtgctgcgcacacgg

SEQ ID NO: 594507 - DNA, 375 bp, Homo sapiens
ggttttttaggagggatttttaagttttctaccggggctgacgttcccttgtccggaggggcttgcaggggggttaaacccctggggcaaaaaacaaagggtccagggccctctgggctcccaacagtttttcagttcccacttccgggtgagttttttgggattcaggatcgcaaatccggggcccaaaaagggtggggaacatgggggttatgttggggaaagcacccatgccccccccgccccccagccgggcatcctttatgggccggcaaaactgttttcctatgtttccccaggggcccccctttcaaatgaacggggaaaaaatgaaatgtttttttaaatttaaaaaaataagaacattaaaaagca

SEQ ID NO: 594508 - DNA, 567 bp, Homo sapiens
  misc_feature (3)..(3): n is a, c, g, or t
  misc_feature (8)..(8): n is a, c, g, or t
  misc_feature (19)..(19): n is a, c, g, or t
  misc_feature (24)..(24): n is a, c, g, or t
  misc_feature (28)..(28): n is a, c, g, or t
  misc_feature (33)..(33): n is a, c, g, or t
  misc_feature (37)..(37): n is a, c, g, or t
  misc_feature (42)..(42): n is a, c, g, or t
  misc_feature (53)..(53): n is a, c, g, or t
  misc_feature (69)..(69): n is a, c, g, or t
  misc_feature (89)..(89): n is a, c, g, or t
  misc_feature (91)..(91): n is a, c, g, or t
  misc_feature (124)..(124): n is a, c, g, or t
  misc_feature (126)..(126): n is a, c, g, or t
  misc_feature (138)..(138): n is a, c, g, or t
  misc_feature (144)..(144): n is a, c, g, or t
  misc_feature (148)..(148): n is a, c, g, or t
  misc_feature (150)..(150): n is a, c, g, or t
  misc_feature (167)..(167): n is a, c, g, or t
  misc_feature (174)..(174): n is a, c, g, or t
  misc_feature (192)..(192): n is a, c, g, or t
  misc_feature (196)..(197): n is a, c, g, or t
  misc_feature (199)..(199): n is a, c, g, or t
  misc_feature (214)..(214): n is a, c, g, or t
  misc_feature (217)..(219): n is a, c, g, or t
  misc_feature (222)..(222): n is a, c, g, or t
  misc_feature (229)..(229): n is a, c, g, or t
  misc_feature (231)..(231): n is a, c, g, or t
  misc_feature (258)..(258): n is a, c, g, or t
  misc_feature (261)..(263): n is a, c, g, or t
  misc_feature (270)..(270): n is a, c, g, or t
  misc_feature (272)..(272): n is a, c, g, or t
  misc_feature (294)..(294): n is a, c, g, or t
  misc_feature (296)..(296): n is a, c, g, or t
  misc_feature (308)..(308): n is a, c, g, or t
  misc_feature (321)..(321): n is a, c, g, or t
  misc_feature (352)..(352): n is a, c, g, or t
  misc_feature (399)..(399): n is a, c, g, or t
  misc_feature (418)..(418): n is a, c, g, or t
  misc_feature (430)..(430): n is a, c, g, or t
  misc_feature (434)..(434): n is a, c, g, or t
  misc_feature (454)..(454): n is a, c, g, or t
  misc_feature (461)..(461): n is a, c, g, or t
  misc_feature (503)..(503): n is a, c, g, or t
  misc_feature (555)..(555): n is a, c, g, or t
tantaatnaacgggttttnttttnctanaactnaaancatcnacggttctcanagctaaacttccaaanctacagtcagcaatttttcntnaaagcccaagggagaggggccagggtaaaaaanangagactttaganaggcanaaananaccagtaggaagagggngggaganggcacttatttttctctnttcnntnattgggttaaaaatnaannntgnttaaaananttagggggccaggttagggtttttttnttnnnaattacncnggaaggaacatcaaaaccccancnacaaaaaaaaantcatcaagccccnaatagaaggggagcctcccagtgcacctcanaaatgggggcaacgatggggaaggagcagaatggagagcacacaaanggttaggggtctttaaaantttttttgtaantttnttttattaaaaacatttccnaaaaaangtgtcttttcctttatgtctgggtgatatatatgactataanctggccttgagcactgtgtggagaggaaaaaggacagccaggagtcttcccnagcatcctattt

SEQ ID NO: 594509 - DNA, 112 bp, Homo sapiens
ctcgaggccaagaattccgtactacgttcactcagatttactttaagctcgacactattggtcgttttacatcgtctgggatgcaaaggccctggtcgtacccagggtatgc

SEQ ID NO: 594510 - DNA, 297 bp, Homo sapiens
cgctcgagaccgcgattgctgccagcttagccaggccaggtacaacaggtacagcgcgccccacgatcttcagtagcgctgaacaattgctcggatgccagacagagcgcaccgaggccaagtgccgaggcgctcagcaaacagatcgaagcaaatacgccgcccagaaacgccgggtaagagcggcgcaggccgaagttgaggctgttgctgatcatcagcaataacagcgggccgggcatcaggatcaccaaccaggcgcagcgcccgttaaacaaacagccaggtactccgggt

SEQ ID NO: 594511 - DNA, 160 bp, Homo sapiens
ggcctttggcccccccttttttctatttgcccaaccccttttttagggatgggcttttttttggacccctttttatcccttttcccttttaaagcagggtaagttggatatttctgttttttatggccaagggacccccataaatcatatgggaatttta

SEQ ID NO: 594512 - DNA, 574 bp, Homo sapiens
tgttttttatagagacgtggtttgccatgttggccaggctaatctcaaactctgatctcagggtgatccacctgcctgggcctccaagagtgctgggattacaggcgtcagccacctagaaaactgaaaattgcccgtgggactgccatgctatttctatcagacagactggtctaagcccagcttcttcgctgattcattggatccctcctaatctcttcctgatttcctcatctagggactagggagccgccccactagcgctcacactgcatagtttcgttaccttctccttggcccttgctgacagcattggggagccccttgtgagtctgcagagggcagccagggagggtgaagccgctgccttttgggagagacccctgagctgtctgaattcgagtctgccccagttagacaccgccagggttttcaggaaacaatttccagctttgtaaatatccattgaaaaaataaaaaggaatctattattttgtcaaccttcacaacaacctgaacttataaaacgcctctcacataaaggtctcggagtgttgcacgataaccaatacat

SEQ ID NO: 594513 - DNA, 1299 bp, Homo sapiens
  misc_feature (375)..(375): n is a, c, g, or t
  misc_feature (576)..(576): n is a, c, g, or t
gtaccagtgagccgttagccgctgcgcgccgtatttcccggacaattgtgtcggtcgacgtgtcagtgcgcctgtgcccttcggcgcgcttcgtgatcggtcgccgggcggcccgtggattgcctcgtccgaggcagtggtctgccggagttcagtgttgtccgttcggtgagccatcgagctgatccgctggttcatttagccagctcggtcgttgagctcagagctcgcggactcgctggcgagcgtccgtcgcttcctcagggaggggttgcaattctcgcttgcgcttctcgcttgaacctagctaggtctggcctctttgacatgcagactgggctggtagtcttagacgtctgcagcctagttgcgtantcagcacctgggggtgaacgaatgagcgcattgtatgctacactggttgacctaagtcgaagaacggggatgatttgggctaaaggaggcttcttttccatttccaagggggcatcttaacacgaagtgctatgtaggtcccgtgtcgaacaacttttccgtgaacttctaggaaccagcgtgattagagaaagtcccggntacgggttttgggtgcaggtcgaattagagccttgtgtattcagagaaagattcgaatcatcagatagagtcgaagagctttgagaagaaagaccattttgtgaaagcgtcaaaagattgacagaattcaacaagaaagcagaatatagtattgccagattgttcgcaaggactgggtagacgaatgagccctttacaggaagaccatacaggcgaggcttgaaaaattccaatcaagtgccaagtcagtgatccaaattgaagccttctaattcaaaagtgttaaccccagggaagggattgtgggcgaaaacaacttttggcatccagcccagcaaagcttgaaaaacgtacatggccaaaggcccactgaggggctaatgctattgttcaaacacagggattgttccctttttgctggcaaaaaaatccttggaccggaacacttcttgagaacccttggttgacgcaggaaaaccacataaaaggagcggacatatctatgttggaaagtaatatgcccgaaaaaaaaccatttaagcaggccgaagaatttacctttaagcaacaggctttgaacactctagtgccccagaaaaggggaacccaatgacacgaggatccaacaagaacaggggcttggggagagacacttacacggtgtttgaaccccacaggccaaaaatatttcctctatatgagaaaaacacccccattgtgtgg

SEQ ID NO: 594514 - DNA, 941 bp, Homo sapiens
  misc_feature (156)..(156): n is a, c, g, or t
  misc_feature (203)..(203): n is a, c, g, or t
  misc_feature (369)..(369): n is a, c, g, or t
  misc_feature (371)..(371): n is a, c, g, or t
  misc_feature (428)..(428): n is a, c, g, or t
  misc_feature (509)..(509): n is a, c, g, or t
  misc_feature (536)..(536): n is a, c, g, or t
  misc_feature (540)..(540): n is a, c, g, or t
  misc_feature (544)..(544): n is a, c, g, or t
  misc_feature (560)..(560): n is a, c, g, or t
  misc_feature (580)..(581): n is a, c, g, or t
  misc_feature (604)..(604): n is a, c, g, or t
  misc_feature (613)..(615): n is a, c, g, or t
ggagctggtggcggcgctccgcagggctcggctgttttccgcgcggcaggcgcggccatggcgcagctgggaaagctgctcaaggagcagaagtacgaccggcagctgaggttgtggggtgatcatgggcaagaggctttagaatctgctcatgtntgcctaataaatgcaacagccacaggaactgaaattcttaaaaactntggtactaccaggtattggttcgtttacaattattgatggaacatcaggtcagcggagaagatgctggaaacaatttcttccttcaaagaagcagtatcggcaagaaccgagctgaagctgccatggaattcttacaagaattaaatagcgatgtctctggaagtntngtggaagagagtccagaaaaccttctagacaatgatccctcatttctctgtaggttnactgttgtagttgcaactcagcttcctgaaagcacttcactacgcttagcagatgtcctctggaattcccagattcctctnttgatctgtaggacatatggactagtnggtnatantgaggatcattatatnaagaacatccagtaataganntctcatccagataatgcattagnaggatctannnctagataagccactcccctgcaactgagagaacatctcccagtcctatgactctggctccatatggcaacacactggaccacatgtcatactccatggatctggtgatcatagctagctatttacgcacactcgacttcctgccaccacatggccgaatcacccaccacgtcctacacactcaccactcacacacaaaacattgtactctcccaattactccaacaatctcaaacacacacccctacatattcactcaactctttaataacctcatacaaaacacacccacccccatcaactccacctaaaaccaaacaacccacc

SEQ ID NO: 594515 - DNA, 142 bp, Homo sapiens
gtggatgacactcctgcatagtttctggagcgagagcttacagtgactgtggctgtgaatgattggagtctagtatctgtctcaagtcagactcatctgctcttggtttgccgggctcagtgctctcagcgtgcggcgggga

SEQ ID NO: 594516 - DNA, 902 bp, Homo sapiens
  misc_feature (156)..(156): n is a, c, g, or t
  misc_feature (203)..(203): n is a, c, g, or t
  misc_feature (369)..(369): n is a, c, g, or t
  misc_feature (371)..(371): n is a, c, g, or t
  misc_feature (428)..(428): n is a, c, g, or t
  misc_feature (509)..(509): n is a, c, g, or t
  misc_feature (536)..(536): n is a, c, g, or t
  misc_feature (540)..(540): n is a, c, g, or t
  misc_feature (544)..(544): n is a, c, g, or t
  misc_feature (560)..(560): n is a, c, g, or t
  misc_feature (580)..(581): n is a, c, g, or t
  misc_feature (604)..(604): n is a, c, g, or t
  misc_feature (613)..(615): n is a, c, g, or t
  misc_feature (669)..(670): n is a, c, g, or t
  misc_feature (698)..(699): n is a, c, g, or t
  misc_feature (789)..(789): n is a, c, g, or t
  misc_feature (809)..(809): n is a, c, g, or t
  misc_feature (828)..(829): n is a, c, g, or t
  misc_feature (839)..(840): n is a, c, g, or t
  misc_feature (871)..(871): n is a, c, g, or t
ggagctggtggcggcgctccgcagggctcggctgttttccgcgcggcaggcgcggccatggcgcagctgggaaagctgctcaaggagcagaagtacgaccggcagctgaggttgtggggtgatcatgggcaagaggctttagaatctgctcatgtntgcctaataaatgcaacagccacaggaactgaaattcttaaaaactntggtactaccaggtattggttcgtttacaattattgatggaacatcaggtcagcggagaagatgctggaaacaatttcttccttcaaagaagcagtatcggcaagaaccgagctgaagctgccatggaattcttacaagaattaaatagcgatgtctctggaagtntngtggaagagagtccagaaaaccttctagacaatgatccctcatttctctgtaggttnactgttgtagttgcaactcagcttcctgaaagcacttcactacgcttagcagatgtcctctggaattcccagattcctctnttgatctgtaggacatatggactagtnggtnatantgaggatcattatatnaagaacatccagtaataganntctcatccagataatgcattagnaggatctannnctagatatttcatttcctgtatatcttttgtttatacttttttcttgtcctatnnttttgtgatcttatggatatataaaagnncctacagtcattactccattggatttgttgtatcatagcttaattatttagcatctagttgtgtatatttgatatactaatattggacgnatacctaaaaacgttataanagaaaaaagagggacattnntttttttttnntttaagacaagtgaatttctaaaaaaattgnaaaatgggggctccagaaagattgaatgaga

SEQ ID NO: 594517 - DNA, 171 bp, Homo sapiens
ttctagaacctggcggcctgttgcttggcacccacggtctggtgatgcatacctggtaatcccagctactcaggtactacaggctatgggaagggggagaagtgattgagcctgggaggtggaggctgcagtgagccatgatcatgccactgcgcttcagcctgggcaaca

SEQ ID NO: 594518 - DNA, 3504 bp, Homo sapiens
  misc_feature (147)..(147): n is a, c, g, or t
  misc_feature (153)..(153): n is a, c, g, or t
acaagagcccgcggtggcgctgccaggggatgctagcccgagagcgagcagaggagcagcgcacccgcacgagccttggaccctttggaaccgaaagcacgcccgtcctcagagtcccgtcctcaaagtcccatcctcgccatggcncccggngagaagatcaaagccaaaatcaagaagaatctgcccgtgacgggccctcaggcgccgaccattaaagagctgatgcggtggtactgcctcaacaccaacacccatggctgtcgccgcatcgtggtgtcccgcggccgtctgcgccgcctcctctggatcgggttcacactgactgccgtggccctcatcctctggcagtgcgccctcctcgtcttctccttctatactgtctcagtttccatcaaagtccacttccggaagctggattttcctgcagtcaccatctgcaacatcaacccctacaagtacagcaccgttcgccaccttctagctgacttggaacaggagaccagagaggccctgaagtccctgtatggctttccagagtcccggaagcgccgagaggcggagtcctggaactccgtctcagagggaaagcagcctagattctcccaccggattccgctgctgatctttgatcaggatgagaagggcaaggccagggacttcttcacagggaggaagcggaaagtcggcggtagcatcattcacaaggcttcaaatgtcatgcacatcgagtccaagcaagtggtgggattccaactgtgctcaaatgacacctccgactgtgccacctacaccttcagctcgggaatcaatgccattcaggagtggtataagctacactacatgaacatcatggcacaggtgcctctggagaagaaaatcaacatgagctattctgctgaggagctgctggtgacctgcttctttgatggagtgtcctgtgatgccaggaatttcacgcttttccaccacccgatgcatgggaattgctatactttcaacaacagagaaaatgagaccattctcagcacctccatggggggcagcgaatatgggctgcaagtcattttgtacataaacgaagaggaatacaacccattcctcgtgtcctccactggagctaaggtgatcatccatcggcaggatgagtatccctccgtcgaagatgtgggaacagagattgagacaacaatggtcacctctataggaatgcacctgacagagtccttcaagctgagtgagccctccagtcagtgcacggagggcgggagtgacgtgccaatcaggaacatctacaacgctgcctactcgctccagatctgccttcattcatgcttccagacaaagatggtggagaaatgtgggtgtgcccagtacagccagcctctacctcctgcagccaactactgcaactaccagcagcaccccaactggatgtattgttactaccaactgcatcgagcctttgtccaggaagagctgggctgccagtctgtgtgcaaggaagcctgccgctttaaagagtggacactaaccacaagcctggcacaatggccatctgtggtttcggagaagtggttgctgcctgttctcacttgggaccaaggccggcaagtaaacaaaaagctcaacaagacagacttggccaaactcttgatattctacaaagacctgaaccagagatccatcatggagagcccagccaacagtattgagatgcttctgtccaacttcggcggtcagctgggcctgtggatgagctgctctgttgtctgcgtcatcgagatcatcgaggtcttcttcattgacttcttctctatcattgcccgccgccagtggcagaaagccaaggagtggtgggcctggaaacaggctcccccatgtccagaagctccccgtagcccacagggccaggacaatccagccctggatatagacgatgacctacccactttcaactctgctttgcacctgcctccagccctaggaacccaagtgcccggcacaccgccccccaaatacaataccttgcgcttggagagggccttttccaaccagctcacagatacccagatgctggatgagctctgaggcagggttgagaagacagatctagtcaggaccaccagccatggtctaaggacatggatcgggtgcccccagacgtgtgcacaggggaccctctgccccactctgggcttttcagatactctgaccaaaaagcctgctttaaaccgcaagatggggcctgggcatgcgcaggaggagccatcgggtactacgcagcaacactcacaactgtccaggctgagataaatcccgggacctgaactattagcacgtcactagagactgggagccgaggcagtggtgctggcccaagtgaaggccagagtgaggactgatgcagctctttacgggtcttgagagggaaggactcttccaaagccccaaagccgagggtttcacccacactgccagcctgggttggggcccaaggatgtgaccttgagtgtcaaggctggacagctactgccagatgccaaagataggagaaagtgccagccctgaagctggagccgcttgtgaataaactgttcttcatcattgacactggagaaaggtgtcctccatgccctcaggcagcagagaactggcccagagcccttggagtgttggtggagatcagagtgccgtggtggaggtctgggactatgtcagagtgtcctcactttggggcatgggtggctccaggagatggatttagttattcaattttgtggatgaataaattgaggcacagaaagattaagttaccggcccaaggtgacacagtgaggaggtggcagagctaggatttgaccccagacaatctgacttcatgattgtggcatccaattcgtgtctgtgcctcaatttgtgcaaacgactgtgtcactttgcttggggagggggagcatcccacccacatgccctgggcaggtgacccaagacagagctgacccctccaccaccaaaggcctgtctctcaccaacaagccaactgctcacagatgacccacttcataccacattcacatctggccacctgactccagctatcaggtattaagtcccgggcagcgataagcccccccacaacagtgtgttagctctgtcttagcaacctgataggttagcataggggctgcaaatgttgttccgccacaccaaatccctgtttttgtccatgaactaagaattttattttattttattttttattttttgtagaaataggatctcactatgttgcccaggctgttcttgaactcctggcctcaaatgatcttcccacttcagcctcccaaagtgcagggattacaggcacaagccaccgtgcccagccaagaatttttatttttgcttttaaatacccaaagaagaagattctgtgactcatggaaatgatatgagattcgaattccagtgtctataaataaagttttattggtacacagcccc

SEQ ID NO: 594519 - DNA, 745 bp, Homo sapiens
cacagtggctcacatctgtaattccagcactttgggaggccaaggcaagcggatcacaaggtcaagagttcaacgccagcctggccaacatagtgaaaccccgtctctactaaaaatacaaaaattagccgggtgtggtggcacacgcctgtagtctcagctattcgggaggctgaggcgggagaatcacttgaacccaggaggtggaggttgcagtgagccaagattgtgtcactgcactccagcctgggttacagagtgagactccatctcaattaaaaacacacacacacacacacacagcacacacacacacacacaacaatataacaaatattagaaagacatatacgtgagacataatgtgaaaacagagaaacaatattataaagacgcaatatcttagagcggaagaatatagtgagtgacccaatattatttcaactagagaatttcaacgggcagactctattcacgctgaagactcagtgaaagctaggcagttggtggctcacgcttgtaactcccggtgctgtgagaggctgagaccaggagagatcacttgaggccaaaagttcaggatcagccagggacaacatagtgagacgcgtgtctattcacacaaaaaattatctaggctggcgccgtggcgtaatccagcattttgggaggcagattaggggaaatcacctgaggtcaaagagtcagaaaccagcgcgtggtcaaccagcagagaaaccccatc

SEQ ID NO: 594520 - DNA, 432 bp, Homo sapiens
cggccttagcctatggctacctcttccctgagtattccctggccctggggcctgagatctctccgggcattctcagtcatgagctccgggtccagtagcaaggttggccacaccacccaccagccagctccagcctcgacgcttaaccagccatcagtcccttaactgtcagcgttcgtggactatgcacaacaatcaagcccgggacccattaagcccgcaattttaggcggcccagtggagcgactcacagaggctgctagtgcccgtgctgttggtgctgctgctgtggagtgcccaggaccaggtgctaggggagacggcgtcaataactatcattgtctcgtctactgatccccatgccacgttctcaagtcaggatttagaaccaccaattctctagctccagctactccaggcttggggactgcc

SEQ ID NO: 594521 - DNA, 337 bp, Homo sapiens
aggtcccttttggttttcagtttcagtgggtcctttttttgttcccccattgaattttgtgcccccccctagccttttccataaccttagggattcagtttggaggggttttttggatttttgaggattcctggattttggatcctttccttggatctccttaaatggaaagaaataatgtatttgggccttttgtgagggatggggggaacaagtggtcccagggatccccattttcaagccccccctcccttttcaggtccccccccagcaataaaaggttccccctgaaatccatccctttgtagtttgaacaaatatatttatatgatatgta

SEQ ID NO: 594522 - DNA, 258 bp, Homo sapiens
cttggaggatcttatagtctcgatcgttagtgagttctgatggcttatcagcatctggcatttccccggacagcattcatggtctctcctgccaccctgtggaggaggtgccttccaccatgattctaggtgtcctgtggcttccccagtcactgggaactgtaagtcaattaaacctcttttctttataaattacccagtcttgggtatttcttcacagcagcactgagaatggactaactatacctactgttacct

SEQ ID NO: 594523 - DNA, 295 bp, Homo sapiens
taccctgagtgtggtggtacatacctgtagtcccggctgctcgggaaggctgaggcgggggattcgcttgatcccaggaggtggacattgcagtgagcagagatcatgccactgtactccagcttgggtgacagagcgagactgcacctcaaaaaaaaaaaaattatttcagggaatcctagtggccagtttccttggctcgtataggggcatacaaccaagttagttttggtggtgattttgtggaaccagattcctgggaagcattatcaagagcattctcagcattgattgg

SEQ ID NO: 594524 - DNA, 265 bp, Homo sapiens
  misc_feature (11)..(11): n is a, c, g, or t
ctgaggtgccnagaggaccccggccaccatgtgctggctggacacttggtcactttagaagcatgttactaaatgtcactgattaaaaaaaaaaaaaaaaaaaaaaaaaaaaaaaaaaaaaaaaaaaaaaaaaaaaaaaaaaaaaaaaaaaaccccccctttttttttttgggggggggggggggggggggggggaccccagggggcccccgggggccgtgatacgtgtgggggggagggtgtcccccccccacgatattccccc

SEQ ID NO: 594525 - DNA, 111 bp, Homo sapiens
gtcaacatgaaaggctctcattgttctggggcttgtcctccttctctgtttacggtccagggcaaggtctttgcaaggtattgagttaggcccagacctctgcaaagcata

SEQ ID NO: 594526 - DNA, 151 bp, Homo sapiens
ggcggccaaagtgctgggattacaggcatgagcactgcgcccagccatgcttttataattgtacaattttgttcctcactgtgacttacgtttagattttgttgctttatcttgattttgtgaagtttgaatatgaaatgtgtaggtggtg

SEQ ID NO: 594527 - DNA, 879 bp, Homo sapiens
gacatgagccatcaaactggtggatgttcgggtatgaggttgggattaagccaagggattcaggtgtggtgccgtgtgggaactgaggaagtcgcccaaggtttcaggatggcagcatctatgcatggtcagcccaggtccttctctagaagatgcagaactccgaagagcaatggtcatacgaagtcatagaccacctattgacatatcttagaaagagacctgacacacaaatatatatcaaatggcgacatttggaacaccagcgggtcactctggaatatttctcaaacttcctgttcagacgctgcttcaaggttcaagatgatgctttgaagactatatgcgtcattggctacaacttccattttagtctactgttgttactgacaagctttttgtaatcgatgcttgtattcagatacactataacgcaagggaaacactgtgtttgcagaagctcactgattggcatagttgtggtgtatacctatcccagtacttatggcttttacctaatgattggaccgccgttgggactcaacgtatcatagccggttccactgtcgaccaaaataggaagggtattgcaatccatttgactgaggcattgttcacaacacacaattgacccattagtgtagactacctctaagtcctaccaggaatcatgtctggactattgaaaagtgtcttaaaccactcatgcagttttggaaagcacgctctgggtcataaactatcgctaggcgagttaccgcaacaaatcgtcaatggtggcgttagccaagctcaaataaagatctgcactacaggagggcacaggcatctcgcacgcggtacaacaacattggcgcccacaaatgcgtatgagcgctc

SEQ ID NO: 594528 - DNA, 204 bp, Homo sapiens
tactgcacccacagcatgtgataccgtttcagactttttcttagcattaacagtatctctatcaacatgccatgtgtgccaaacacataacaagggactatatgtgctatatcttatgactccctctttcacacttgtagagtatacctttggggcctttaaagcagaggtcagtgtaactacatcccacagtcaagaaatgct

SEQ ID NO: 594529 - DNA, 210 bp, Homo sapiens
acaaagttagccaggtgtgattacaggcatgagccaccatgcccagctaattttgtatttttagtagagacgggatttctccatgttggtccgcttggtctcgactccccgatctcgggtgatccgcttcgctcaggagtttttatataatttattaaccataagttatataagtaattttacatggctatctgaccgcttgctgtcacg

SEQ ID NO: 594530 - DNA, 421 bp, Homo sapiens
atcctggaacaggaaaagggcattggggaacaactagaaacatcctttgaaaaagagtgtggagtctgggcgtgggggctcacacccgtaatcccagcattttgggaggctgaagtcggagagtttcatgagcccagaaattcgagaccagcttggtcaacatggcaagaccccatctcagcaaaaaattaaaaaattagtctggtgtgctggcgcacatctgtggtcccagctacttgggatgctgaggtgagaggatcgctcgaactcgggaggtcgaggctgcagtgagctgtgatcgcaccactgccctccagcctggataacagagcaagaccctatctcaaaaacaaaagacattttagaatagtttcagatttacagataagttgtaaaaactacagtgtttcctgtatgcccc

SEQ ID NO: 594531 - DNA, 400 bp, Homo sapiens
gaattcggcttagcgtggtcgcggccgaggtacagccgtaataaaagtgcatctatatccataaatttgttttcatttcattccacacaacacaattattataaacatcaagaattgggagctattgaacagatggtttattagtgtcctaattcttgatctttattctagtaaatccttccatttcatatcctttccacaaatcctatggccattcagggcatgatgaatgattttttaaatgctgctttaatgttgatgtcatttttttgtaaacaaatatgtaaatgcagctgtccagcaggataatgataccacgttaaactcttcaaatatttaaactagacatatcctaacatgccagcaggttatgaataagctgaatgcccgcgtacctgcc

SEQ ID NO: 594532 - DNA, 319 bp, Homo sapiens
cttctctgctgattccagattcgtgagcgccggctcagatcctttgtagggttattttgatcctgtccatatattgtagaaatattctcttcataaaactctctgtaggctgggtgcagtgcgtcatgcctgcaatcccagcactttgggaggccgaggcgcgcagatcatgaggtcaagagatcgagaccatcctggtcaacacagtgaaaccccgtctctactaaaaatacaaaaaattagccaggtgtggtggcgggtgcatgtagtcccagctactccagaggctgaggcaggagaatggcgtgaacccaggagt

SEQ ID NO: 594533 - DNA, 755 bp, Homo sapiens
  misc_feature (91)..(91): n is a, c, g, or t
  misc_feature (103)..(103): n is a, c, g, or t
  misc_feature (108)..(108): n is a, c, g, or t
  misc_feature (129)..(129): n is a, c, g, or t
  misc_feature (198)..(198): n is a, c, g, or t
  misc_feature (201)..(201): n is a, c, g, or t
  misc_feature (207)..(207): n is a, c, g, or t
  misc_feature (218)..(218): n is a, c, g, or t
  misc_feature (221)..(221): n is a, c, g, or t
  misc_feature (226)..(226): n is a, c, g, or t
  misc_feature (235)..(235): n is a, c, g, or t
  misc_feature (254)..(254): n is a, c, g, or t
  misc_feature (262)..(262): n is a, c, g, or t
  misc_feature (275)..(276): n is a, c, g, or t
  misc_feature (317)..(317): n is a, c, g, or t
  misc_feature (320)..(320): n is a, c, g, or t
  misc_feature (326)..(326): n is a, c, g, or t
  misc_feature (329)..(329): n is a, c, g, or t
  misc_feature (332)..(332): n is a, c, g, or t
  misc_feature (334)..(336): n is a, c, g, or t
ctctgtgtcacatatctgtcttgcagaaccatgacctatcaaggtgttttgtcaaacacaaactcatactttccctgtgatatattcatanaccgcatttggnttatncactcatctgctgattgtgtncccctcttgggtattatgagtaatgctatgaacatgggtgtacacatctctcttgaagtcccttcttangtnctttanggatacatatncangagcngaactactngatcacatatgctaaggtntgaatgtncccccaccaaatnngtatgttgaagcaaccaccaacgtgataggtgaggctttangangtgatnatntcntnnnagctccattctcattattggataaaccccctttataaacgctgtcatgggaaccaattaccattctttgctccttagaatcctctttaccttatttatgcacgtgtcttcgctccaagccataaagcccaaccttctggctttaaaacatcgactctgcttttaaaggctgtataaccgcttccaaacaaatcataacttgggacttcctgtagtttttatgtggccaatgcctttacctttaattcggcttatatctgtttagatttatgcattttggtttctcacaccctacacttttctgtttaatatattctatttcaccactctccgtcatcaaaacctttttttctctttctcggtaacaataactttcttttcttccacctttgcgagaagcactctttattctttcttttt

SEQ ID NO: 594534 - DNA, 95 bp, Homo sapiens
gaaaaagttatgtcctcaactttttgttaaatgttgctgcctcattgacctgggaaaaatgaaaaaaaaaaaataaagcaaatggtaagaccctt

SEQ ID NO: 594535 - DNA, 546 bp, Homo sapiens
  misc_feature (148)..(148): n is a, c, g, or t
tggaagagatcagaagagagagaaatgatccatgcactggtaaaaagaggcagggatgggttggtgtacatatgccctgcagacaaatgccacactgagtcacacatgcactggtggtcctgctgtccgtgcagaaaagttcaagagnagagtcctccacaatccttcaacctgactttctggctgtatgagttagggatgggagggagaggcaattatattttaagtgtctcctttctagaagaactgagtgttctctgaaggaccattccagctgcagaagtacttctgaatgggtgaagaaagggcactaaaatgtaccaaaagattttgggcccaagtgacatccagaccatttttcttttctattaaagtaaactgaagtttagataagggctagattaaattcaaggaaactcctgataaccatgttaagatcaaccacagtaggctgagttttactgaaaccttggtcctcttaagctactacatactgattctattataagtacattttgattctccccagaaactaaaaatacttaa

SEQ ID NO: 594536 - DNA, 629 bp, Homo sapiens
agcgggtcgggcatgtccgtgatctggccgagtcggacggccccgctggggcttcttgtgcaggtctagggactgtgtgatgccgggcccgcagcggagcgacggaggggctgggctgcgtggaggccctggtgccccgcgcgatctcagccttagagcgcttgctggttgccgtatccagctcccgtgtgtctggtcccgatctccaggcgcatccatgctatgaagatcgcccctgctgctggcagctgcggctgctggcggcagctcctcacgcgagacctgcatggtgtgcgtccagtcgtccgtccgcgctgtcggccagtcggggtacgcggggctttgccagtcccattgcggtgtcagcgcgggctcaacggggcacagccttgatgggaggcgaagggggacttcccggcggcaagggattgccccaaattgttggtggcgccaagccccttgggcccttggcggctttcccaattcctccaaaggggtttacaaagtttcccgaaggggcttcacttttttgggcccccttccggaccaagtggggggcacccccgagttggagcggaggaatggcggccggaaaccgatccttgtgtgcaaccgggaacaagcgaact

SEQ ID NO: 594537 - DNA, 683 bp, Homo sapiens
  misc_feature (502)..(502): n is a, c, g, or t
gcaagaccttgtctcaaaaataaaaagtttataaaaaagaaagctagggtttaatccacgtatatgtgactccagaatgttaactcttaaccattgtaccattgtttcccataatgtggttatatcaccatatgaggggatttctgtggcacctagaaaggactttttattgtaatagctaagtatttattttaatattaccttctatttgtggtaagaaaactactggaagttttccatttaaaagtatgctgatatttaaaagtatgctgatgataagcatacttttaacataaatggaattaaaaattggcttaaagaaaaatagatcgcgcaggtgtggttctggaggctgtgaagtccaagagcaaggtgctggcatatggggaggactgtcctctgcttcaagatgaagcctttggcccttggccgggtgaggtggcttacgcctgtaataccagcactttgggagggcaaggggggtgggttaactgaaggtatngcgtttaagaaccggctcgtcaacatggtgaaacctcatttctactaaaataacaaaaaattaatccagcatggtggcagacgcctgtaattccaactacttggaggctgaagcaagagaatcaattgtacccggaggccgaaggtgcgagctgtgaatgttgcactacacttcctggggg

SEQ ID NO: 594538 - DNA, 594 bp, Homo sapiens
gcttcctttccggctcggctatgttttcctgcgcaggagccgcaggccgtaggcagccatggcgcccagtcggaatggcatggtcttgaagccccacttccacaaggactggcagcggcgcgtggaccacgtggttcaaccagccggcccgtaatgatccgcagacgtaagtgcccggtcaagccaaggcgcgccgtatcgaacccgcagcacctgcgtcgggtcccagtccggcccatcgtgcgctggccactacggttcaggtaccacacgaaggtgcgacgccgggccgcggctatcagacctgaaggagctcagaggtggacgtgcatacacaagaaggtggcccggaccatcggacatgtctgtggatccgaatgaggcggatgaagtctcacggagtcccttgcatgcacaaccgttgcagcgactgaaggagctaccgttaccagagtcatcctctgaccccaggaagacccatcggcccccaagacaggcagacagtcgtgcatgaaggacactgaaactggacatccagctgaccaggaccgggtcatgcccgtaccggaaccgtctataagacaggaggaaacg

SEQ ID NO: 594539 - DNA, 959 bp, Homo sapiens
  misc_feature (3)..(3): n is a, c, g, or t
  misc_feature (81)..(81): n is a, c, g, or t
  misc_feature (94)..(94): n is a, c, g, or t
  misc_feature (102)..(102): n is a, c, g, or t
  misc_feature (109)..(111): n is a, c, g, or t
  misc_feature (116)..(117): n is a, c, g, or t
  misc_feature (120)..(120): n is a, c, g, or t
  misc_feature (125)..(125): n is a, c, g, or t
  misc_feature (135)..(136): n is a, c, g, or t
  misc_feature (138)..(138): n is a, c, g, or t
  misc_feature (143)..(143): n is a, c, g, or t
  misc_feature (145)..(145): n is a, c, g, or t
  misc_feature (151)..(151): n is a, c, g, or t
  misc_feature (157)..(158): n is a, c, g, or t
  misc_feature (164)..(164): n is a, c, g, or t
  misc_feature (167)..(167): n is a, c, g, or t
  misc_feature (176)..(176): n is a, c, g, or t
  misc_feature (178)..(178): n is a, c, g, or t
  misc_feature (181)..(181): n is a, c, g, or t
  misc_feature (187)..(187): n is a, c, g, or t
  misc_feature (189)..(189): n is a, c, g, or t
  misc_feature (204)..(204): n is a, c, g, or t
  misc_feature (259)..(259): n is a, c, g, or t
  misc_feature (266)..(266): n is a, c, g, or t
  misc_feature (299)..(299): n is a, c, g, or t
  misc_feature (349)..(349): n is a, c, g, or t
  misc_feature (396)..(396): n is a, c, g, or t
  misc_feature (410)..(410): n is a, c, g, or t
  misc_feature (413)..(413): n is a, c, g, or t
  misc_feature (417)..(417): n is a, c, g, or t
  misc_feature (765)..(765): n is a, c, g, or t
acnaaatgcaacttatgtttatacataatttacaactccaagcaagcatgcttataaatcatgtgaaatttaaactttaanaactctggatgantacatggnggcaacnnnccatnncanctganaccatcattnncngagtngngtagcnttcagnnttcgcngtngcatattananccntgtttngnacagccctgctcggnttggttttgtccacgtggttgataattgtgttcagttgctgctaagtgattttgngaatttnatttataatcctcgccctacaattacctaagtnctgtttctgcaggttaacctgtttgctacgctcagtcatatacctttcanagttactaatgcaactgccaagggggggcagtgtcaatatcattgtnttcattgggggggnggntgcnccacactgtgggagcactgctgttcctaacagtagtttacttttagagggatgtgagaatcagtttgaccttaattccagatgtgcatgcctcaaaagaaaaatcccattctccttccttttggggagcacttttggtggcaccaaggctggtgtggggtagtggagagagcactgagcttagagtcacaaccagatgaaactgctctggtcttcactagctgtgtgacttgggcaagcagcttgcagtctctgagcctctgagatccctgatggacgaggagaacaatgaccccctccccaggctgtgctgagagagggaattgatcttggatatgaaaatgctgcnctggcacagaggtaggagctgagcaacactgctggatgaataaacacatgtaatgcagggtgaacagaacatttcatctgcaacagctgaaggcacagcttacctatgcccatggaaagaactgcgtggaaaattcatttgttgcatttttgccaggttgatgtttgcaaagcagggcactcttctccacattt

SEQ ID NO: 594540 - DNA, 170 bp, Homo sapiens
cgcggtttatagcaagacctaaaggtaatttactttctactagaaaatctacgcttaacagtggacctgctgtacacacaccagtagatggctttgctgtcaactgagctgcatcaggtctgcattacgaggcctccaaacaagctgtctgcggtggcgcaaagaaaata

SEQ ID NO: 594541 - DNA, 1419 bp, Homo sapiens
taagactctacatccctcaattctcttcgtgatttactgacaactataacaggatgatgcataaggtggtttacaggggatgcgttatagatgctcttacggcatggatgatcttgccttgtaatatgtacgtcatagtaaagtcgatctagagaccatttaacgcatgctcctgtaagactctacgtgactcatcatgtcgtgcatgttccttatgctcgccatagtcttgacacatactcatatcctacatcactacacatgtatcggacctacgcgatacttgcgcttatgagatgccgtttgtaatagttcgacgtcagattggccccttagatatccaaaggaaatttcagttgttagtcgacgtacacttattaccactcttcacatagctaaggcgagactaagtattgtggaataagtagtcgtagcgcaactctgttgacccatgggcacctctttacatactacgtccgagtttaattaaacaacggctcaaagcatatcatttggactgtacactgcagacatttgaacgttccttagagggaatacgtcttctaggtgtagatttgtgacacccgtgttcaacattatacttttcactttgtaacacctcccatcacgtgtccaactttatcaaatagtttcacgcgtcacattctgacgtacacacgtttaaacgccaccgatacataaactacacatgagaagcgcctaccattgacatccgttgacagaaaacgtttatgtcaacttatgcgcacgcaacttcacagagtccgaacgagcaggtaagactccatttcttcagaaacttcaccatcgcggagcaaatactataacgagaacgtcttctaccgtcaaaccccacattcggcgtcaacaatacgtcgacttgacaatcgttccgaacctacacagctagtttccaccaaagatggggggcatagatcaggagacccctaacccatacagggaatacagtactgccatgcacacttcaattggtactatggagcagatacacctctgaagttgccagcctgatacactccagccacactactgggccacactcaaacgcaccccgatacccttaacatcccacagacccgtatgctacgacctcgtgcggaccacaccactattaacgactcaccgcacactaaacagcacgatgcgctcatcaggcgaccacaagcgcccaccaccgcggacgcatccatacagctcttttatccaattcatcccctgcgcgcaatcaccaccaacggttacacgcacccggcccgacgatgcgccccctgcgccgaccgcgcgcgtcaccagtcacaccaacgagcaggccaacgaacctgctacctcaccccgcgacccgacgcgcgcacccatccaagaaggcgccgacacgtg

SEQ ID NO: 594542 - DNA, 261 bp, Homo sapiens
cacgtcatatacagcggatcagcagaattatgtgtcttaccattacgcactccagcctgggaacagaatgagactccatctcaaaaaaaaaaaaaaaaaaaaaaaaaaagggaaccaaattttttggttcccccttttgatcttcaaacgggcggggttttttttgaagccacacccgggggggccttggcgggaaacccccggagaatatggttgtgggccccccagaacccttatagcagccctagtggttaacacaaa

SEQ ID NO: 594543 - DNA, 812 bp, Homo sapiens
gcggagccaacatgccagtggcccggagctagggttatgtctgcaaaacttatagtagaccccgacggagacccttacgagaaatctacgtactacgaccaagagctagaagctagatatgtgccgagtatagggctaccgcgatacaaacgtagatggtctagcgatgggtcaaatattaccctgtgccaagtatccgtctaatggcccgccctgggcaactagctagacagctatgatagagcaaggacccaacaggcgtctagcttccgacagcgcaacggcccctgctagcgcgctgcgcttgcgtacccgccatacacgagcgtagctatggcatgcacggggacacaagcatagcaacgctagcgcatataaccactaccatagcggacccttgcacacggcactaagcaggcatattgcctatacagccaagcatgcatccgcccctagccaacgaaccccccaacgagtacttatacacagcgcctagggccgcattaatgcgccccaacacggttaccaattcgcacccctagcgactaacgccggtagccatgcggcattctcagtcccaaacggccggaccctaatgaattaacaaccgcgtcgtccccacgacgaacatcgaccaccgtcgctaggggtatagacaactcattaaccccaggataacgatgatacaactacccgtccccctcgaccttagggacttttcacccacattgaaatcggccagccatttaccgcacctttatcgtacgttccttagccccgcctctccctaccctccttaacctgtgctgtgc

SEQ ID NO: 594544 - DNA, 717 bp, Homo sapiens
agcgggatcacttgaggtcaggagttcgagaccagcctgccaacatggtaaaaccccatctctactaaaaattaaaggattagccaggcatggtggcacgtgcctgtagtcccggctactagggagactgaggcaggagaactgattgaacctggaagaaggaaaaaacaaaaaaccaaaaacacaccaaacacactcaccaagaaacaaagcaaaacacaaacacaaaaaaaaaaaaaaaaaaaaaaaaagagggcgcgaaagcgggtggtcgtcagaggtgtccacgagtccgcgaaaaagtgtccgcagcccgtgaggagggagaggagcagatggggggtagaattacgcgcgggaaaggccggggagagggcgtgagtacgcggggctgaaggggcacaggagtgagggatctgcactaggggtgaggctgcgagagagaatataagataaataatcgtgtgtgtctgaaggtgagagtatgtattcctgttgtaatagatatgttctttagagcttctatgctatagaatagagtctcttcgatagctctgttgatcatagtattgctttttgaataggtttgttgtaattattttctcagtttgtctttttttgtatttcttctgtggttgtattaatttttaatcttcccttagtaagtatttttgttttattctctttttatttatttttctttctgctctagttatt

SEQ ID NO: 594545 - DNA, 1012 bp, Homo sapiens
  misc_feature (684)..(684): n is a, c, g, or t
  misc_feature (687)..(687): n is a, c, g, or t
  misc_feature (692)..(692): n is a, c, g, or t
agcttgttctttcgctgtttgcaataaatcttgcagctgctcactcttgggtccacactgcctttatgagctgtgacactcactgcgaaggtctgcagcttcactcctgaagccaacgagaccacaaacccacggggaggaatgaacaactccagacacgccaccttaagagctgtaacactcaccgcgaaggtccgcagcttcactcctgagccagagataccacgaaccccctcagaaggaagaaactctgaacacgtccaaacaccagaaggaacaaactccggacacgccgcctttaagaactgtaacactcatcttgagggtccgcggcttcattcttgaagtcagtgagaccaagaacccaccaattccggacacactatcttgatggatatggagtcatagcatttgaaaagaaaaaaaatattgagaactgagaaaaggcactttgggaggtcgaggtgggcggatcacctgaggtcaggagttcaagaccagcctggacaacacggtaaaaccccgtctctattaaaaatacaaaaattagatgggcgtggtggcaggtgactgtaatcccagctacttgggaggctgagacaggaggatggctgaaacccaggaggcagaggttgcagtgagccgagacatgccattgctctgcagcctgcacaaggcatgcantgncctgnacagagagaatccccgcccccccaaaaaaaaaaaaaaactagcaaagggaaaggaaggtatagtggagagtgccgttagttcactgaaatccatttgccatttcttccttacacacagtctagaactacattttccagcgactttcggcaattaggtatggcgtccagtccagctggctcacatgagccaagcaaatgaggaacccaggcctcaggggcagtgggcatgtactcggtccatgactcttatcccctttctcacaatgggaaactcagaactggctcgtataatccagcatcagcccatgcagaagacaatt

SEQ ID NO: 594546 - DNA, 174 bp, Homo sapiens
aaaatgacctattatataaaatgtattgtgtcttactaaggtaaaagagaggtatatactaatttattttttgctcttcccaaaagaaatgtgttttttattatatgtaggtttattttgtattacccaaaatgtgttatatatttaaatatttaatttaaatctactgaattg

SEQ ID NO: 594547 - DNA, 228 bp, Homo sapiens
gaagtggtgcacgcagcacctgcgggcaatgatcatcctacccgagatggtgggcatgcatggtgggcgtctacaacggcaagaacttcaagcaggtggagatcaagcccgagatgatcggccactagctgggcgagttctccatcatctacaagcccgtaaagcttggccttgccatatgcaagggtaccgcactcgcaatcgtcaaccaggtcgtcgctgtttccg

SEQ ID NO: 594548 - DNA, 285 bp, Homo sapiens
  misc_feature (233)..(233): n is a, c, g, or t
  misc_feature (236)..(236): n is a, c, g, or t
  misc_feature (285)..(285): n is a, c, g, or t
atcccagcatttagggaggccgatgcaggcggatcacttgaggtcaggagctcaagaccagcctggccaatatggtgaaaccccatctctactaaaaatacaaaaaaactagactggagtgtgaatgtgcatgcacacctgtggttggtcccagctactcgggaggctgaggcagatgaatcactggacctgggaggaggagggagatttgcaggtgaagccccaacgcatcngangaccactggtacgtccagcctgggcaacagagagagatccatctcaacn

SEQ ID NO: 594549 - DNA, 675 bp, Homo sapiens
  misc_feature (13)..(13): n is a, c, g, or t
  misc_feature (57)..(57): n is a, c, g, or t
  misc_feature (64)..(64): n is a, c, g, or t
  misc_feature (79)..(79): n is a, c, g, or t
  misc_feature (121)..(121): n is a, c, g, or t
  misc_feature (155)..(155): n is a, c, g, or t
atacaactcaagnatgagacaagtcggcaaggtgtgaagacggaagccactggcagngtctgcncccgtcccgtgcggnggccatgcggcgtgctgcgtcggcttgggacggacgagcgcnctcagatccgcgcagactctcgctggctccgcgnagcccagtggcctgggcgcccccgcgcgcgggttaagagcaggggagccgggcagaagaggaaggagcccggccgccgcccaacaccgccccccgccccacgccccgggagacccggcccgagcgccgcgggcaccgccctgaacctcttcgaggccccgctgcgggcgtccagagctggggactgtgggtctgactcctgcgttccagccgtgggtgccacctcttgcgggaagcagggcaaaaccactttggtcaggcgctcctcgtgcctttctcccttcgtaggtgaccagcatctcgtaagaatgataaccatcagtaaccgggaccccaaaccttctcatcaaggcacctctcgggtcaccattactttaactttgaatttgggtctccttcatttttccgctggatgcgttaatgtgcgcgacccacagctccaggcggcggtttcctggcggaactggaccaccgccacaggctgggggtctgcagtgggggatgggaccggccgcggccgc

SEQ ID NO: 594550 - DNA, 390 bp, Homo sapiens
caacctggccaacatggggaaaccccatttctatcaaaaatacaaaaattagctgggtgtgatgatcctcacctgtagtcctagctactcgggagtctgagacaggagaattgcctgaacccaagaggcagaggttgctgtgagctgacattgtgccactgcactccagcctgggcgacagcgagactctgtctctgcaaaaaaagaaagcccaaaaagggactgcagagttactataggattaaaaaatcaggctgggcacaagggctcacatctgttatcccagcactttgggaggcacaggtgggcacatcacttgaggctcggagttaaggaccagcctggccaacatggcaaaaccccgtctctactaagaaatatgtaacaatt

SEQ ID NO: 594551 - DNA, 478 bp, Homo sapiens
gttgaggctgagggaggtcacttggccttcgcgacacgtgaggcgcttatcaggagttctcagtaggaagcgctttcctgcagcctcaggcagagaccgtgcgtgcaaggcgggaccgaccgcaggtgcagaggccccgggcctgcccaagatcgaattggtcgcaaatacgttccctcgccagaaactttaaaaggccagaagaaaataaaccggattcagctccctctcatctccaaatctcggtgaccagcatctcgtaagaatgataaccatcagtaaccgggaccccaaaccttctcatcaaggcacctctcgggtcaccattactttaactttgaatttgggtctccttcatttttccgctggatgcgttaatgtgcgcgacccacagctccaggcggcggtttcctggcggaactggaccaccgccacaggctgggggtctgcagtgggggatgggaccggccgcggccgc

SEQ ID NO: 594552 - DNA, 151 bp, Homo sapiens
gcactggagtcagacactgtactcacagtggtaggactttcatttttgagaagataccatttgatccagcagaaaatgtcccaattatatcaggtcctctattcttcacctacagggaatgtagtcactttgatgaggaaaagaccctggt

SEQ ID NO: 594553 - DNA, 433 bp, Homo sapiens
tggaaggggcagccgttctctttattttcttttttagacggcgtgatttttgctctgccacccatgctggagtgcagcggcacgatctctgcgcactgcaacctttgtctcccatgctcaagcaatcctgctgcctcagtctgctgagtagctacgaccacaggcaccagccaccacacctggctaattgttgtttttattatagaggtggggtactaccatgttgaccatgctggtcttgaactgctgacctgaagtgatctgaccaccttgtcctaccaaagtgctatgattacaggtgtgagccaccgcaaccagtcatgattgaaactataatcttcttctccttggacgacgtccttcttcctttctttgaccaccagtttcttcctatgagcgctgcagccacaccacaagcacaagagcggaattc

SEQ ID NO: 594554 - DNA, 116 bp, Homo sapiens
tgaagctaatagatcaactagatcaagaactttcaactttcaagtcatattatttaagaaacaaatttcctggctggacccggtggctcacacctgtaatcccagcactttgggac

SEQ ID NO: 594555 - DNA, 441 bp, Homo sapiens
  misc_feature (3)..(3): n is a, c, g, or t
  misc_feature (6)..(7): n is a, c, g, or t
  misc_feature (15)..(15): n is a, c, g, or t
  misc_feature (40)..(40): n is a, c, g, or t
  misc_feature (170)..(170): n is a, c, g, or t
  misc_feature (234)..(234): n is a, c, g, or t
  misc_feature (254)..(254): n is a, c, g, or t
  misc_feature (259)..(259): n is a, c, g, or t
  misc_feature (281)..(281): n is a, c, g, or t
  misc_feature (380)..(380): n is a, c, g, or t
  misc_feature (412)..(412): n is a, c, g, or t
  misc_feature (414)..(414): n is a, c, g, or t
ggnctnnggcacgancccgtgcgaatctcaggcacgagangtaaaaatgctggctgccaccacagaggaaactggggttccactaaaacctagaggggagagcagacctacgctgggctggcctccaccccgtttcctgaccgctgccctgaggggctgaggcccatgcntggtctgaccagctttttggacatgcagagcccatgcccaggaatcctgctaatgcagggtgtnttcatgttcctgggggtgtntgggngaaggttggggaaggggaaaantggggagcccgttcttccaagctctcccttggtggatgccctcagccacacgccctgggagttcaaaggccctgaggtggtgagaggttgcactccggntttcaacaacaaggttgcggccccaagctttntnaacctactttaatagctattaaagtta

SEQ ID NO: 594556 - DNA, 620 bp, Homo sapiens
gccaggccagcacccgtgataagacagtgctttcgcgggcgttgatatccgccgtggtgatgttctgcttggcacaagcaatgatgtctggaagcctgattaatgacttcatctcctccgtgcacatgtaacagggtaggtcgattatattgaagagtatcagccccgatgcttctgcaagttgttctgcagaaaggagacataagatctgcacacagtatacagagatctgggtggggtcagaggcgtccatcacaaactcagcttcccaaagtgctgggatcacaggagtaagcccgcgcgcccggcccaaatgaagccgacctggtgtcactcgtctctgtcctcatgtggccatcagttctccatactggtatccgcggcacaggccagagagagaccgccagtttccatagtaactggaccagatggggcccatgcaccccccaagctcccggatggtgatctttctctgtgccacaatgtcagtaagattggtgcccaccgtggcccgtgtcgggggcggctcccacaggtcgcctttcccatcccgggagctcacctcctgcagccgtttcaacaacagtgtcttcccgacgcccgtggcccacagctcgtgc

SEQ ID NO: 594557 - DNA, 404 bp, Homo sapiens
gatggggtttcaccctgttgcccggactggtctcgaactcctgagctcgggcgatccggccctcggcctcccagggtgctgggattgcaggcatgggccaccacactcagccgagcccagtgatttcaaaccctaccaagaccacatagagtgattccccaaagcaaagggtgcagtgtagagaaaaagagggagaaaatggccagaacaacggcatacttcttgtagatcacaccagggaagagttacagaaccagcgttctagactggagggaagccttgggtggtagtagtaaaaagctattagggagctcactttatcccgactgctggaagtagtgtcttcatgacacctgggagtcaaggaactgggttctagtgccttctctgccacatactgttag

SEQ ID NO: 594558 - DNA, 331 bp, Homo sapiens
  misc_feature (182)..(182): n is a, c, g, or t
aaactaaacctctaaacaaagataatgaaatggatggggatgtccaatatagcaccacatgaaaacaagaaaaggaaatctccaggatcagaaaaacagtgtatttattactcagatggcaatcaagaaggatgctgtaggatcccatgctgatggtggtcgcccccacacccttccaccanacatatactggcatcgcgcccgctggtttggtatttaacacccaagcagggactggagatttagcctcttgcccatgaaagacacagagctggaactaagtcttttgtatgtggctggaagcactgaaggctgtcatctattttcttaa

SEQ ID NO: 594559 - DNA, 116 bp, Homo sapiens
catgaagtacaacagtataatcaaaatcaattgtatcatcattagttttccactgcctcacactagtgagctgtgccacgtagtagtgtgacacctgtgttgtcatttcacccatc

SEQ ID NO: 594560 - DNA, 135 bp, Homo sapiens
gttagggggagtatgagatcagttggtccaggctgctttatcgccctgccgggattacagcaacgcgcacttcagtgcccgcgaggatgcacgtctttactatgtgcacgatgagccgttgctgcgttacctggg

SEQ ID NO: 594561 - DNA, 153 bp, Homo sapiens
  misc_feature (51)..(51): n is a, c, g, or t
tggaagcaccctgttatctaaagaatctttgtaaaatttttgtaaaatttngttttacaaaattttatttgaaaattgttttttgcaaaatggttatatttctgtatgaaatgtattttttattggaataacataaaaaaatccttatcatcc

SEQ ID NO: 594562 - DNA, 103 bp, Homo sapiens
cttagtgctgacttgatgctatttgtaggttgatgtagtatcattgaggtcagagttgtatagaatacttctcattgcccactcttttttttttagagtgggt

SEQ ID NO: 594563 - DNA, 1200 bp, Homo sapiens
caagccggggttccccgttgaggattgtgcccgcaagaggtgagcgagggtcgccgcccccctgccccaggagtgggtgggccacggggtccggggggaccactggccacaggggggcaatcccaaatgctcggcctgtggaatggcccccccttccccagtgtttttttgggcccagcctggcccaaaccccgtggttttacggcccacgggtattgacccagcgttattataggacctgcccaacgtgggaggacaccctttgggggcgtgcccgggacttcccccgtgctggttcccccggatttttgacctgtgcggtgtgttccatctcaatagctgtggggatccccagaattggggatccccttgtgagccccgggaactcccgggaggtatctctccagggccccatgggtctccttctgggatgccacccccctttacccgggggccccccttcgggggaggccccgggatttgggcgataggcttataggccccctcttgcggttatagttgctcttggggataatatcctcggcgcacccacaggtgggattcccccccacctcttgaagccacggagaagatttcacgccacggactcacccccacaggtttatattgaagagaagctactcgagcacaccctcttttacacactcgggggagcctccacagagaagggataatataggagagagaagaattggtggagagttgcaccgcactttcactgagaagaaagtaacactccccacttgtgtggccacaaaatgtcactctcacaagcctctgtgtcctcgagacaccacggaggttccggccaccctcaccactttcgcacgaaagaggtattttcacccgcctctgcgccacgtccacggatagcactgaggctcacgaacacccgcccacggaacactctcccacgttatcacggcccgcgaccacctcggagaaacttctgaattcgagactggccccacgccccactggcgaaggcccccactgagccaagactgtggagcctcccacggagtgccgaggaaagctgtggaggttggtccacgctaatgcttatactttaaagaaaggtttctggagaaaggaggaagaaaacgtaagaagccgaaagtgagggatgaatcagagacagaagatgaagaggagaaaagcccagaggacccggagcca

SEQ ID NO: 594564 - DNA, 411 bp, Homo sapiens
tgagtgacagagtgagtagagtgagattctgtctaaaaaaaaaaagctttgatattaaatctgctgctggtctagacccaaaacatttaatagtagtaatctctgatgagcaggattaagggagcctgtcattttttacgttttatatttctacatgcatatatgtatatttaaagtacagttgactcttgaacaatatgggcttgaactgcacaggtgaacttacgtgaggattttcttccacttctgccactgctgcgataataagaccaacccttcctcttcctcctcctcattctactcaatgtgaagacaacgaagatgatgatctgcttccacttaatgagtagtaaacatattttccttatgataagagtccttatgattttcttttttcttttttgagacaga

SEQ ID NO: 594565 - DNA, 110 bp, Homo sapiens
ttatcagctcgtaccagtgctactccacaaacagctgggattagaggtgtgaacactgtgccccgcccattattcacttttgacatttcagtcttttatccatttggaat

SEQ ID NO: 594566 - DNA, 586 bp, Homo sapiens
  misc_feature (557)..(557): n is a, c, g, or t
cgatcctgttctgtgttgtccattctcgaaactctcacctgcctctggtgcctcaacttccccttctgtcgaatgagataggttcttgattggaaaacccctgcggaccctgatcctctgtccacctgtgcaaggggagcacctgagccacggctgcccgtctgcaggctttcttggctcctgggtcctgcaggatccagcgcgtgactttaacaatgagaactcagccaaagagaaggatctggaaaaaccctttgcagcccagcttgttccctgagcccagctcgataaagccatgggaacctctagcttttttctacacacacccaggtggcagggacagccagtttcctgcagtggggcgaggcggggggactcggctgcccccaggttgggagacagagccgtgcatcaaagcagggccgccaggagcctggggtctgtcctggcacagctgacagctcactgcgtagcctggccatcccagtgccctgggcctcccagctggcacagggttggtctcacaagccctatgcccacgttctgcccagtctggncatgatcacccagtggggggagtcgcctt

SEQ ID NO: 594567 - DNA, 315 bp, Homo sapiens
aacaagaaaggagataagggtacaagaagccatatagggcagcaaaacaagtaacatagaaaggagggtccctagtgatagtagtgtagtgctgatataaccatggagatagccctggctcctatgcagcagggctgggcctgcgagacccaaggctcactgcagcgcgctcctgacccctccctgcaggggctacgttagcagcccagcacatagcttgcctaaaatggctttcactttctacttttgttataaaaatgactcataggtccctgacatttagttgattattttctgctacagaccccatgcctg

SEQ ID NO: 594568 - DNA, 345 bp, Homo sapiens
  misc_feature (24)..(24): n is a, c, g, or t
  misc_feature (82)..(82): n is a, c, g, or t
  misc_feature (300)..(301): n is a, c, g, or t
ccccctctcccctccttatcccanactcaaccttcctcatcccaaaagttgaaagaagatggcccgggcgcggtggcctcanaccctgtaatccccagtactttgggagactgaggcaggaggatcacctgaggtcaggagttcgtgaccagcctgaccaacatggtgaaaccctgtccctactaaaaatacaaaaaaaatagctgacgtggcagcacgcatctgtagtcccagctactcgggaggctgaggcaggagaattgcttgaacccgggaggcggaggttgtagtgagccaagnntcgcgccactgcactccagcctgggcaacaagagcgaaactcca

SEQ ID NO: 594569 - DNA, 216 bp, Homo sapiens
  misc_feature (47)..(47): n is a, c, g, or t
  misc_feature (70)..(70): n is a, c, g, or t
  misc_feature (88)..(88): n is a, c, g, or t
  misc_feature (120)..(120): n is a, c, g, or t
  misc_feature (130)..(130): n is a, c, g, or t
gctcattgtaagagcttcattttgtagcaaatggcatatcacagganctgtccagataatcgatattttnagtatacaaatgtaaatnatcacagatgagaatgtacttagctgtatttncaaataagtnatcttccccccttttgtaggactttgaaactaggcatcaatgaaacctgtttttgctattatgactgggatttagtcatgatacct

SEQ ID NO: 594570 - DNA, 245 bp, Homo sapiens
ttctcagttacacactatgctcacacctttgaaactcataccttgtctcccaacttaggggtcatctgagtaatggtgacagtaatattagttaaaatttatcaaacacttatcagtatcaggcactacattagtgcttgttttccatatctcatttaattcatgccaagctgctgttattatttctgctttacagataaggaaactgagacatagagaggataagacattttccagagtttatc

SEQ ID NO: 594571 - DNA, 483 bp, Homo sapiens
gtgactctccccctagggcccaagagatgaagggctgggtgaggaagcccgtggatgatgggtacccaatcagactcaatgaacaagccccgttgcctgtaacactggaactaatgaaactgatataagcagctctaatctatcatgccaactgacagagtactcttgcttcagtgtcttgaagtacatgtctatgtatctgagtgaagtgtcagttctttaatattactgacaagtccatgttatttttgcttctaggatagaattagaaaagcatgttaatctcttatggtgatctttctcattcaactgtgagcaactctgtcttacatctgctttgcacagcctgaaagcaactctcgtgcgtctctgattataatctcagacactttgataaaaatgttctcactggagtcattagaactcaatgtcaaatctgttgtaaacagattgaagtaattacgattctaatgctccaaccac

SEQ ID NO: 594572 - DNA, 188 bp, Homo sapiens
cttcattggcggccaattgttggcccaaaacttccttcaatctcaaactctccaggcccacctttctgctttcccagttggcattgaacaggcccagcttttgactttgagaacagccttcttgcaggcccttgctcttgcttcccaggggcttttttcccccaacattcgggaattcttctagagtc

SEQ ID NO: 594573 - DNA, 113 bp, Homo sapiens
actccttacacaggattggtacaaggaattgggtcactggaccgggtcatatatttcagagggacgagcaacatcacccaatggccagttatagagacggtgaaccattgaag

SEQ ID NO: 594574 - DNA, 399 bp, Homo sapiens
  misc_feature (242)..(242): n is a, c, g, or t
  misc_feature (246)..(246): n is a, c, g, or t
  misc_feature (250)..(250): n is a, c, g, or t
  misc_feature (274)..(274): n is a, c, g, or t
gcaacctgtcctctgcctctgccatcatgggcaaccccaaagtcaaggcacatggcaaagaaggtgctgacttccttgggagatgccataaagcacctggatgatcttcaagggcacctttgcccagctgagtgaactgcactgtgacaagctgcatgtggatcctgagaacttcaagctcctgggaaatgtgctggtgaccgtttttgcaatcccatttccgcaaagaatttcccccgtangttncagntttcttgccagaagatggtgactncagtggccagtgccctgtcctccagataccactgagcctcttgcccatgattcagagctttcaaggataggctttattctgcaagcaatacaaataataaatctattctgctgagagatcacaaa

SEQ ID NO: 594575 - DNA, 514 bp, Homo sapiens
  misc_feature (106)..(106): n is a, c, g, or t
  misc_feature (167)..(168): n is a, c, g, or t
ccatttccccctttcccttgggggcgggttcttttccaattgggggggggttcaaacttttgggggccgggactgtcagttttttgggaagggggaggggcatccncgaggggttttcctcctttgtttttggggaacccagggtttttttcagggggtttaggganngccggggggtttccccccggggggcccaaatcaaggggggggggtaaaaggttgtaaaaaaaaaaaaggggggggggggaacggggggttttttcccccccttgggggggtggtcaaaggggttttggggggttccccctttttttccccccccccttttttttttttttaatcaagagaaacttccagggttatggggggggggggttttcccggggggggaattggttccccccccggccttttttgaaaaggggggttttttttttttaaccaaacttccccccgggggggggggggttcccaattttttcaaaaaaaaagggaagggtttgggaacggccca

SEQ ID NO: 594576 - DNA, 218 bp, Homo sapiens
ggaagatgacaatttggcagtacagattccactgacaggaaaaattgacttgcatatgcgagagagacagccaatggatatttctcatatttgatatttcatggtggaataacacagagacatgttttaactgactttggatcttcatcacctcacagagagtgtgttgatggcagttccactgaaggacaactaatttataacttgttctatattgt

SEQ ID NO: 594577 - DNA, 360 bp, Homo sapiens
  misc_feature (9)..(9): n is a, c, g, or t
  misc_feature (26)..(26): n is a, c, g, or t
  misc_feature (112)..(112): n is a, c, g, or t
cccccttanattgcccaaccccctanatgtgagtcaagcccccctggatgtggtgcctggcagcgaccctgtgattggacaaccccccaattataaaggcaaatggaagccnccctatgattgacaatccccagttcccccaggtttgtgccctcttgatggttgagttgctttcattaatctgtttgtattcagatagaagttttatctagagtaaggctgcccaggttggtcattatattcaagctgttgaattaaaagcagaaagtagacttcctaagttgaaagagagctttcaaggataggctttattctgcaagcaatacaaataataaatctattctgctgagagatcacaaa

SEQ ID NO: 594578 - DNA, 108 bp, Homo sapiens
cgcaaatggcttgcacgtatttaattgctgcggtgctcagcggggacccgcggggtcgcagcccttgctgcgggggtaatgggtagtgataggggcgggagggtccca

SEQ ID NO: 594579 - DNA, 966 bp, Homo sapiens
  misc_feature (8)..(8): n is a, c, g, or t
  misc_feature (29)..(29): n is a, c, g, or t
tgcactcnggtcccacaacggaactaccngcctcacggatagtatgtgcatttcccaacaatgtgcactcacttctagttctctctatcgcatatacatacattcctatacagaacactagagacacataatatatccctcactttcacaattaacctattttcactctcccttaatttttctagcctttattctcttctttttattctttgacttttcctctttagtatatttcgccccacaaggggccgagccttaatctagcagagcatagagaagaggctgagtattgtacttagtttatatatatatatttattcttattttttttttttatttttttttttttttcttcttttctttgattttaatttttattatatatttcttatcaggtcgagaagattaatgaaaaagatgatggagtagcgaacccacgcgcatctcgccggcagctttatgtatccattctctcgttctttcacgtcacttcttcacgcttcctctcaccgtgccccatattctacctcccttcttcttctctgtctctctctgttgttttcgtccttcgtttttcgtgcctgtgcatatcttatctcttctcccctcttcttctccagttgcacacttctggattctaagtctagcaaattcgagcttatgtcgcctattttacgcttccattcatattacttacgtttatctcacactcctcctgcgtttacgtttttcgtttattcttctcctcggccctctgtttaatcggttctttatcgtgagaacacactcatccaagtatggactgctcactatctcctctgcgctccccgttgtacctgatctccattgatctctacttcttcagtatactctccgctcttctcgcatatgacgaaatattactacgttacgatacgttactgtcacactgccagccttctctaatcagtacaagcgtcactccag

SEQ ID NO: 594580 - DNA, 458 bp, Homo sapiens
agcggagtccgcagagcgcgagccgccagcccgtaacggtcgccagtgtgaggggcgggagggaaagaagaggggaaacacaaagccggtacgcgctgcgagataacaagagtaatccacagactatacgagcaacgctcagatgccagacaaggccgtgagtaaccactcctcctcctcacacaactatgcctccactacacgcacgaaggcatatccatgaacgccatccaaggagcaacattgagacccaatctacagtcaaggcgactaaggacaaccaattgtactaccatgcacctcctaacgatagcatagaggagctgtcaaaacactgaatggcaaggctgactgaagcgcgaaagctacagtcgagactccactgagcagatatcccatgcgcgcttaggcgacagaccttgggactggccccactacagacggacgcgactgccgac

SEQ ID NO: 594581 - DNA, 244 bp, Homo sapiens
ctatgctgtctcaacacacttgaactggagtcacccggctctgttggttgaacactagagcaacacttactccttctatctcataagccaacctctcttcatccccttcctaacccaatacccttcccagcctgcagtatctatttcttctactccctgacttcatgagatcatcagggcggtcatgtgcacggcagcatggtagttatcggttattggcaaaattcatgcgacagcatatcca

SEQ ID NO: 594582 - DNA, 211 bp, Homo sapiens
  misc_feature (45)..(45): n is a, c, g, or t
gaggatcccagtgctactccacaaacagattccttacagtctttngtaatctctcttactctttcccactaaggacattccaaggtggttcagacacagcacaagaagtacttttacagatttttttttttcattttacattaaggatgggtcttatcttttttttttttttgggaaagtctcgcttggtcgcccggcgggtgggggaggg

SEQ ID NO: 594583 - DNA, 270 bp, Homo sapiens
gccgggcgtcgagagatacttctacatagacataatcaagtatgactatatggaaaccaagcatcattaacattctctcaacactcctaattgcgaagcaatcgataacatttcaacgcagtgatacacatttctctagaacacagaaaagaagtgattgaccacgattataacaagtactctaggcactggatgctgatgttttctatccccatccctaacatttgaacgacctatgagagaaatgagtacttagatgacaagtagatg

SEQ ID NO: 594584 - DNA, 109 bp, Homo sapiens
tttaggccggacactccccggtgcatatgagctctcggtaccgatcgcgtgattgctcctggaccctgccgctgtacaaactccaccagccccagtgtctggcctacca

SEQ ID NO: 594585 - DNA, 400 bp, Homo sapiens
gctgagggtgaccacggtctgaccttggaggacctagaggcccccggtaaggagcactgaaggagaagaatctagccatgggtgggtctccattgcccagcgtccgtgcccacacttcccgcctgttgccctgatccagagtcatcatgcctcttgagcagatggagtcagccttactgcaagtcctgagaggaattggccttgatggcccgagagagaggcccatgggccatggtgggtgcgcatgtgctcctgctatctgatggatgcaggtgatggcgtggctcctcgctcttcttactctaaggttgaaggtcaccctgggggtaggtgccgtgctgccgatgtcaccaggattcctcccctgaggtcctcatgggatgcctcccagactccccag

SEQ ID NO: 594586 - DNA, 142 bp, Homo sapiens
gagcggagtatggcaaaggtcagctgcctagatagtctggtccaaggatctggaccgcaagctttgagatgacaatgtagcaacatgcttctgtgtgggagcaggagctgaggtgggcgtggacgggactccggctcctgcg

SEQ ID NO: 594587 - DNA, 215 bp, Homo sapiens
aagattccagtactatccacactgctgttacaggcactcatgttgagaactttgatccagactgcagagggctggcatggaaaatcacatgcatgtaggagagtcacctgaggaatgttttaaatgctgatgcctgagtttggaccatgaggattcaaatgtaaatgatctggaatgtggcctgggatcaggattttagtaaagcactttagggt

SEQ ID NO: 594588 - DNA, 1293 bp, Homo sapiens
  misc_feature (1235)..(1235): n is a, c, g, or t
ctgggcctcatatggttttggttcctaagtctacattacacaactggatgagtgaattcaagagatgggtaccaacacttagatctgtttgtttgataggagataaagaacaaagagctgcttttgtcagagacgttttattaccgggagaatggatgtatgtgtaacatcttatgaaatgcttattaaagagaagtctgtgttcaaaaaatttaattggagatacttagtaatagatgaagctcacaggatcaaaaatgaaaaatctaagttgtcagaaatagtgagggaattcaagactacaaatagactattattaactggaacacctcttcagaacaacttgcatgagctgtggtcacttcttaactttctgttgccagatgtgtttaattcagcagatgactttgattcctggtttgatacaaacaactgccttggggatcaaaaactagttgagaggcttcatatggttttgcgtccattcctccttcgtcgaattaaggctgatgttgaaaagagtttgcctccaaagaaggaagtaaaaatctatgtgggcctcagcaaaatgcaaagggaatggtatactcggatattaatgaaggatatagatatactcaactcagcaggcaagatggacaaaatgaggttattgaacatcctaatgcagttgagaaaatgttgtaatcatccatatctctttgatggagcagaacctggtccaccttatacaacagatatgcatctagtaaccaacagtggcaaaatggtggttttagacaagctgctccctaagttaaaagaacaaggttcacgagtactaatcttcagtcaaatgacaagggtattggacattttggaagattattgcatgtggagaaattatgagtactgcaggttggatggtcagacaccccatgatgagagacaagactccatcaatgcatacaatgaaccaaacagcacaaagtttgttttcatgttaagcacgcgtgctggtggtcttggcatcaatcttgcgactgctgatgtagtaattttgtatgattctgattggaatccccaagtagatcttcaggctatggaccgagcacatagaattgggcagactaagacagtcagagtgttccgctttataactgataacactgtagaagaaagaatagtagaacgtgctgagatgaaactcagactggagttcatagtcattcacaagggaggcttgtggatcagantctgaacaaaattgggaagatgaatgcttcaaatgattagacatggagcacacatgtg

SEQ ID NO: 594589 - DNA, 879 bp, Homo sapiens
  misc_feature (821)..(821): n is a, c, g, or t
ctgggcctcatatggttttggttcctaagtctacattacacaactggatgagtgaattcaagagatgggtaccaacacttagatctgtttgtttgataggagataaagaacaaagagctgcttttgtcagagacgttttattaccgggagaatggatgtatgtgaatggtatactcggatattaatgaaggatatagatatactcaactcagcaggcaagatggacaaaatgaggttattgaacatcctaatgcagttgagaaaatgttgtaatcatccatatctctttgatggagcagaacctggtccaccttatacaacagatatgcatctagtaaccaacagtggcaaaatggtggttttagacaagctgctccctaagttaaaagaacaaggttcacgagtactaatcttcagtcaaatgacaagggtattggacattttggaagattattgcatgtggagaaattatgagtactgcaggttggatggtcagacaccccatgatgagagacaagactccatcaatgcatacaatgaaccaaacagcacaaagtttgttttcatgttaagcacgcgtgctggtggtcttggcatcaatcttgcgactgctgatgtagtaattttgtatgattctgattggaatccccaagtagatcttcaggctatggaccgagcacatagaattgggcagactaagacagtcagagtgttccgctttataactgataacactgtagaagaaagaatagtagaacgtgctgagatgaaactcagactggagttcatagtcattcacaagggaggcttgtggatcagantctgaacaaaattgggaagatgaatgcttcaaatgattagacatggagcacacatgtg

SEQ ID NO: 594590 - DNA, 1147 bp, Homo sapiens
  misc_feature (117)..(117): n is a, c, g, or t
tttttttttttggtaacataactgcgtgctttattggagatacacagtaaagcagtcctcataatcacaactagtcaaggccactattattgtgggtgacagctcgtgccatcatgntgtggtgacaacagtgccagtaacacacgtgcacattttaaaaaaataattcgtcaaagtgttcacaggtgtgtgggtgttcaaaacacaatatattatgatactcaagttaagaactcagtaccgtgaaaacaagtgacaaaacagtgccagtggtgagtgtttatgcttcagttacattatgatttacagctttaaatactgtgggtggttataaagaacacaacacgaaaatagggtccaaattaattatgcttaaaatgcagcaataaagctctcaattttggttcaaactcattatgacagactcactccagaagcctcaagtggtgctcctcaacaacaacaaacacaaacaaaaacacacaaaacacacacaaaaacacaacaacaagacaacaaacaacaacacaaacacacaacgaaaacaacaaacacacccgccaacacggcccgcacgcacaccaacacgcacccgacaaagaaagacaacccacgaaaaaaagcaagacgccgagcgaaacggaaacaagaaaacaagagggaaagcagccagaccccacacccgggacaacgcacagcacccgtcagaacgaacgcgagacaccgcagggcgggagagcagggcggggcggaacagagcgcagggaggcagacgcggccgagaggcgagcaccaggcacgagcgaggagcgagaaggcgcacacagcgccgcaagcgcgcaacccgcaaccaacgaacaagagcacaacgcgggcagaagagacgcaggcgacaacgagcagggccagacaacccagaggaacaccgactgaggtggaacggagggaaagccggactcgcgaagagcacggaccaaaaagagccggagaaccgacacacgaccaagcgcacgaacagaaaaacgaagagaccaaaagcaagagaagcgcggcggaaggacgagaaacgcaagacaaccacccgggacgcaacgacaggggaggcgacgcaggagagctagagagagagcgagattgaggcgggggc

SEQ ID NO: 594591 - DNA, 238 bp, Homo sapiens
agtagctgggaccacaggtgtgtgtcaccgcacccggcttattttttttattttttgtagagatttcttctttgacctatagataatttaggaatgtagttttaggccgggtgctggtgtcacgcctgtgatcccagcactttggcaggctgaggcaggaggattgcctgagcccaggagttcaagacctgcctgggcaatatggtgagacgctatctctatttaattttaaatttaa

SEQ ID NO: 594592 - DNA, 149 bp, Homo sapiens
ggtcagatgctgagtccaaattgcaaaatatagcttctggtatagaccatcgtgctttaaaattctcaacatgtcttaatatattctagtgctcgggaaactcttacacatagccttttctggctatttaggggaaagccccagatcag

SEQ ID NO: 594593 - DNA, 428 bp, Homo sapiens
  misc_feature (42)..(42): n is a, c, g, or t
  misc_feature (62)..(62): n is a, c, g, or t
  misc_feature (136)..(136): n is a, c, g, or t
  misc_feature (217)..(217): n is a, c, g, or t
  misc_feature (426)..(426): n is a, c, g, or t
ataccacatttgtcactataaataaacttattgaaaaaaaancatactatttaaataagaantcagttcatgaaagtatacaaaatacaaccaatgtactctgacttgtggttatatcttaactatctcaactgtncttttctgggtatgggccagagccttttgcaaatattaccatggtattttaattttatgatataaaacagtagcaatttangaagttttccattataaaaattaatatgggcaattgctgcaaaatactggaaaaaagctggttttatggaaaggcgaggtagccgcagcatgcagctggcaagcggtatttgcgctttgctgcttaggaaaagcatgcttgcaaaagggcacattttaattactaggtggtttatatgctaaagataggtaggtttgggttttgaattncc

SEQ ID NO: 594594 - DNA, 805 bp, Homo sapiens
  misc_feature (435)..(435): n is a, c, g, or t
catctggcaaaatgtcactttgcctgctgtattctatgttcctattcgaccaaatatcgtgaacttgatcacaccaaacttgcgtcaagaaacaacagacagccctatgctgtcagtgaatcaactggtcatcagacagagtgctgagtcttggaggtactggcatgacttctagtgcgctcgaagtgcccagtatgttctgagtgtgggtgggagctcaccagcatcttggcctagtggctgctattagaaacactatcgtgtcgatgggaagcacgaatcgtttgcacccaaccaaataacactggcagagaccagctaggctatcctgtagagtgagcatcataaccccaaaaacagatcactgacctatcatggtatctagcccttgagctttagccatcatagcccaaccgagcgactagagtcaatgtnctacaggtccatcagcattgagggaagttccgtgaagcttccttaggcttcatgttgaacggtaaccgttgaagagctacaaggaattagccacggaagcgtgttgtagctccttaaccaaacttaaattcctggaatgattatcaacacatacggtcttagtagcttctctcagtggacactgagaatgtcgttggcattaggctaaggtgatgaataccgtacgaccggtatcccagcgcaggggcccgtgcattccttctactagatgaggatactctggtatcatcagggggcctttcatgaaatcatccctgtgacattgatctctgcttaaatgtaagctagctgaacattttgaagcttgctc

SEQ ID NO: 594595 - DNA, 367 bp, Homo sapiens
  misc_feature (186)..(186): n is a, c, g, or t
  misc_feature (211)..(211): n is a, c, g, or t
  misc_feature (217)..(217): n is a, c, g, or t
  misc_feature (221)..(221): n is a, c, g, or t
  misc_feature (225)..(225): n is a, c, g, or t
caagggtgaaaggcatcgtggagcgcaggcctggggggcaaggactccccaaccaaaggcaagggttggctcccagatcctctagcccctgctccatttccacccagtccattgaagaggaatgaacaatcatctgagctggaatttctttctagtcctttctccagccaaatccttcttaaagcnaaagtcctggctgagcccctgtccntggggnccgntctnccgtgtgaccaggggaagaaagttcccgaaagcctgttccaccaattctgcttctgtgttgtgaatccagtctgctttccattagaaaaccgcttcggcacttatggtccctttaataaatctagtatgtaaaaaaaaaaaa

SEQ ID NO: 594596 - DNA, 120 bp, Homo sapiens
aggtagaagcggcggttggcctgtgaccccaggtagagggcatacatgtagctgtagaggcgctggtaggagtgctgcatcatcgtactaggccagaccagataggagtatgcgaggcaa

SEQ ID NO: 594597 - DNA, 493 bp, Homo sapiens
tggcgacgccagtgacgcacggtcggacagaacgtctgtgccccaaatcataacggccagttcttcgcgtactggaatcaccatgggttacttgtagctggtgccatttctcctcatcaacccaaatcccgcttcccagatggaccttgccatggtctaggatatacttgtccatgacaggcgcaggagcggggtaataggacgacgtattggcttcctcactgaaagtgctccgtaactccggctcgggctcgagacattctgactttactttttccagatcaatggcgggaccgctgccaagcctcaggagcagcacgtccgggagcctccggttaaggtcacggagctccttcattccagacacaagtgccccgtactccttgagcttctcggcctgttgtaccagctgcctccgagtccgctccagctcctgctggaggtggcgcatctcttcctgttgctgctggtagttgcgcagaagctcctcata

SEQ ID NO: 594598 - DNA, 534 bp, Homo sapiens
cgggtcttttttttttttggagacggagtctcgctcggtcgcccaagcgggagtgcagtagcacggtctcagctcatggcaagctccgcctcccaggttcacgccattctccggcctcagactccgtgtgtgttagctgggagtacaggcaccgtgccaccatgcccggctaattttttatatatttttttagcagagacagtgtctcactgggtaagtcaggatggtctcgatctccgtgacctcgtgatccgcccggcctcagcctcccaaaggtgctgggattacaggcgttgagccaccggcgcccagcaaggcgggtctggcgtgggttttcccagagctagacgggtcttgaattccagggctcaagagatctcccacctcaggcgctcccacagggctgggattacaggcgtgagccgccacacccagccatattcaaaattttttttctcttaggagacggggctcttgggtggcccaggctggaacggcaggtgatacaatcatagctgactgaagcctcaaatc

SEQ ID NO: 594599 - DNA, 146 bp, Homo sapiens
ttatgtctgacccacccttatgggtagagccagcgtagatatcggaggcggtgtcgtgggagtgatgagtaagaagatcctgctaatctatagtgcttgtagtggagtggggctgatgactgggtgtgggtcacgagacataaggt

SEQ ID NO: 594600 - DNA, 701 bp, Homo sapiens
  misc_feature (133)..(133): n is a, c, g, or t
tcagagaaagaggacagcttcgacaccctatgatttcatctctgacccaaccaatcagcactccccataccctagcctgctacctaccaaattacctttgaaaaatccctaacctccaagccttagatgagtntgatttgagtaataactctgcctcccacatggtgtggctggcatcatgtcaattaacctctttctttactgcagtgccatggtctccatgaactgattttttgtgcaggggcaggaagaacccatcgggcagctacacatcttgaaagagaagctcttcctgtgaggtacatcaactgtggttaagaatcttacatacttatcattttttgtgtgtgagaacatttaaaatctacccttttctttcttttttttttttttttttgggggagggggtcctcactcgttgtggcccaggcgggagttgcaagggcttgatctgggttcaccaaaaccgggggggtccaaggtgatcctggtgggcctcagcctccggagtagcggggatcacgggctgtgcaccactcttttagcaattttattaataacatgggtctttggacaaagtatctaacctttaacttagaataacggcggtatatgtgcaggctggcaaagggggaaaacggggagcagaagctgggggtatgaagatcctgtggcaaaatgtggcttgtacacaagcaaaa

SEQ ID NO: 594601 - DNA, 456 bp, Homo sapiens
tccaggcatacgtagatcgtagatatacaggaactctctttcagcattaataataggctacagctgcatagagccggttagttacttccaaaaatcgtgtacacaagaatcttgatacaattcgcaaatcagacagcatgcttaaaaggcttcgaagtaaacttctatcaattgcttcaccattcctttccctctcaatcaagagaagaatgccatcaattgtcttattctgcactttctgatcacttataatatgagccctaaataactccagtcccatgtcccaaatggagggtagcattgaattctgaagaacgtacgttctatacagaaacaaaaaaatgctcctgatcatgatcattagtcggcaatggttttgccagcatatatcaatcttctttaaaacacaaccgctatccattgactcctctctgactcgatgaatctgtgcttaga

SEQ ID NO: 594602 - DNA, 311 bp, Homo sapiens
  misc_feature (15)..(15): n is a, c, g, or t
  misc_feature (101)..(101): n is a, c, g, or t
  misc_feature (113)..(113): n is a, c, g, or t
  misc_feature (124)..(124): n is a, c, g, or t
  misc_feature (145)..(145): n is a, c, g, or t
  misc_feature (149)..(149): n is a, c, g, or t
  misc_feature (171)..(171): n is a, c, g, or t
  misc_feature (173)..(173): n is a, c, g, or t
  misc_feature (182)..(182): n is a, c, g, or t
  misc_feature (185)..(185): n is a, c, g, or t
  misc_feature (194)..(194): n is a, c, g, or t
  misc_feature (239)..(239): n is a, c, g, or t
  misc_feature (243)..(243): n is a, c, g, or t
  misc_feature (249)..(249): n is a, c, g, or t
  misc_feature (284)..(284): n is a, c, g, or t
ggctcgatggggcangtgcgtggcaatagtgagtgaggacatttaggaagatttttcggcctcgatctgggaggcgagtgtgctggtggcgccgcaggagngattgccatggngcggcggcggngcaacttcagctccaccagcncgtncccgttcagtgcctccgggctngnggctgggcnggngcccctggngcgaacgagcgcggccgcgcgaggctgtggcgagcggcgggtggnggcnaatggnggcggcccttctcgtcgaagcccctcgcagatctngagacagcggcatgttcagctgttcct

SEQ ID NO: 594603 - DNA, 444 bp, Homo sapiens
  misc_feature (22)..(22): n is a, c, g, or t
  misc_feature (65)..(65): n is a, c, g, or t
  misc_feature (149)..(149): n is a, c, g, or t
  misc_feature (188)..(188): n is a, c, g, or t
  misc_feature (290)..(290): n is a, c, g, or t
  misc_feature (334)..(334): n is a, c, g, or t
  misc_feature (348)..(348): n is a, c, g, or t
  misc_feature (440)..(441): n is a, c, g, or t
ccagagccaatcagtagccagnatctgcctcccctcactcccaccgcagatttggctcttggaancctgggaacatagaactcatgcggaagagttgagacctacgagaaatagaaatgggaactactgctggcagtgaactaagaaanccttaggaagaatttttatatccactaaaatcaaacaantcagggagtggctaagcacggccatataataacatggtgtctctaaaatagccataaagggaggactcatcattccatttccctctttctactatttttcanatctctctcttttaagttgggtgatatgttggagattctaatgncttattgagcgatnataacaggaaaagaagcagggttggttccctctttttgtcttatctaagccttctggttttatgggcagagttccgactgccatcttggccnntct

SEQ ID NO: 594604 - DNA, 726 bp, Homo sapiens
gaaaaaaatttaaaaaaaaaatttaaaaaaaaaaaaaaaaaaaaaaaaaaaaaaaaaaaaaagaaaaaaaaaaaaaaaaacaaaaaaaaaaaaaaaaaaaaaaaaaaaaaaataaaaaaaaaaacctttggggccctcttggcccaagttttttttaaaccgagaaaattttaccttggcgcccaaattcgggcctttttggccaaattccccttaaggggggccttttaaaattcaatggccggggttttaaaacgtcgggctggggaaaacccttgggtcccccaatttatatcccttggaataaaaccccttttcgtccggtggcctaaatcccaaagggccccgaccggtggccttttacaaaaattgtgccaccctaatgggcaatggaaaattccaccgccaaatatctggcaaaactcgcctaaacatttctgctaaaccgttattttttaaaacaaatggcccaatcgggtaaactcctttttaaccaaataaattcccccataatgggcccggtgtggttcccactttggaaaagaatgtcccctttaaagaacgtgggtctcaacctcaaagggctaaaaccccttttttaggggcgatggccctctttcgaacacctcccctaaataattttttgcgggctaaggtccccaaaactctaaattggcccccttgggcccccctcttttagagctttgcggtatctgcacatctttc

SEQ ID NO: 594605 - DNA, 195 bp, Homo sapiens
ggaggctgaggcagtgagaacttgcttgaacccttgtaggcagaggttgcagtgagctgaggtcgcgccattgcactccagacctggtcacagagcaagactctctcttgaaaaacaataaaaattaaaaaataaatttcattatctgcataccacatgatattatgggatacatatagatagttgtaaatagcg

SEQ ID NO: 594606 - DNA, 684 bp, Homo sapiens
cgtgggtatggtcaaccagatttttcagccaagttgtcctttgcgggtacaccatatcaagtctttcggaaccagcggtattatctctagctcgtcggcaactgaaagaacaattccagctttaccggtgtatgtggcaggaaataaataacattagttgctaagggtcttcaaaacacagtcgaagataaaaatactgcctttcctttttccagtgaaagtacaaaaagagctgtcagtggaagttatcacaggcagtaatactgatttgaaagactgagataaaagtttttttttcgatcaacagtgccaatggttggacatacagaatggaaagtcctccttgtcttctctcagataacctttgttgttcattgtaaggccaatgtatcttcaaaaacttgccccacgcgcaaagttgcaaaagcatagtacagtttgcgctaaatgttttcctatgttttacaatctgcttggcagccgcaggttaagcatcaaggactgtttggtattaaactttgtgttcacgggatgcgccaaagtgtgtaccccgtaagcatcaaacccgtgtttggcgtaatttttttagttcctagcgcggagcatcaaacaagcacaatacgttctgttattatgacttcctttcgtttcgtttttcagaagcactccactctgatctttgga

SEQ ID NO: 594607 - DNA, 198 bp, Homo sapiens
ccgcagcggcatttcgtcgccccacagcgtccagtagtggatcagggccgagccggacaggttcaggaacagcttgccggcggccgggttctggtcgaagccctgggcgccggcgcggaagctggccagctccagttgcggatgcaggccctggcggcgggcttcggcgaacagggcgtcgggaaagtgcagggtggt

SEQ ID NO: 594608 - DNA, 471 bp, Homo sapiens
  misc_feature (39)..(39): n is a, c, g, or t
  misc_feature (71)..(71): n is a, c, g, or t
  misc_feature (102)..(103): n is a, c, g, or t
  misc_feature (106)..(106): n is a, c, g, or t
  misc_feature (138)..(138): n is a, c, g, or t
  misc_feature (144)..(144): n is a, c, g, or t
  misc_feature (152)..(152): n is a, c, g, or t
  misc_feature (161)..(161): n is a, c, g, or t
  misc_feature (163)..(163): n is a, c, g, or t
  misc_feature (187)..(188): n is a, c, g, or t
  misc_feature (194)..(194): n is a, c, g, or t
  misc_feature (197)..(197): n is a, c, g, or t
  misc_feature (214)..(215): n is a, c, g, or t
  misc_feature (221)..(225): n is a, c, g, or t
  misc_feature (227)..(227): n is a, c, g, or t
  misc_feature (258)..(258): n is a, c, g, or t
  misc_feature (260)..(261): n is a, c, g, or t
  misc_feature (264)..(266): n is a, c, g, or t
  misc_feature (279)..(279): n is a, c, g, or t
  misc_feature (298)..(298): n is a, c, g, or t
  misc_feature (301)..(301): n is a, c, g, or t
  misc_feature (309)..(309): n is a, c, g, or t
  misc_feature (368)..(369): n is a, c, g, or t
  misc_feature (376)..(376): n is a, c, g, or t
  misc_feature (384)..(386): n is a, c, g, or t
  misc_feature (391)..(391): n is a, c, g, or t
  misc_feature (395)..(395): n is a, c, g, or t
  misc_feature (465)..(465): n is a, c, g, or t
tggttcatttggttttatacacttggtggaaagtgaggngagaaaaacaatgacttgggccaattacacgnctgcaaagctagagctgccaacagggctccnnccngcttggcttctgtagaagttctaaggaagccntacganctccacgncggtggggngntaactagcagggacccctgcaagnnttggtnggnggcttcgagttgcttgnnttgacnnnnngngtggggtttgtgtagccaacaggtgaccgangnnttnnntggtcatggtttntttggtcaaggggtttttnttntttttgtnggtaaattttgctttgttgtttagtttttttttaattttgtggggttggtttttttttnntatcccnttactttnnnttggngcantagttttgttttgcacagtgttcagctccataactaggtctgcgttgttggtttttttagttttccccgnacgttg

SEQ ID NO: 594609 - DNA, 645 bp, Homo sapiens
catcgtgactttgagcgactatgtacttgagctaggtcacccctattagtgggtgcaaaaagctgggtggcctccacttccccaagagagcagccccagcaaacagtgattgctgagccactcgctgagcgccagtcacatgggagaccaccatgaaacttctgaaagaccagggatgcatgatctccgccgtggacccgtccactaaagcagtttgctatcccttacggaacatggcagtatgtgccatggttaccagatgacttgccagtactctcttcccttgccaaggttgtctctcgcctggtgaaagtgggatgacaaattgcccatgaggcatgtacgatggcacgcgtgcgacatctcgaccaaagcacagtctggtgggatcgcaggggacttgcgactggggggaacacccaaaatcctcttaacataccatggacagcttcaatcggtgaaggggcactagcctaaacatgctaggccggctgtggtgttgaaccctggctactcctccatcccacctgtatttccaggctctgatctgaactggaaaggggagaaaaccaacagcaagcgatgacaacattcgggccatgcagggcgaagtcattgtgtgctacaaaggagctgtgtggccct

SEQ ID NO: 594610 - DNA, 425 bp, Homo sapiens
gctcatctactctctgtgtctatggacttgcctactctgcacattttatatacatggaatcatactctctgttgtcctttgtgtctggcttatttcatttagtgtgttttcaaagtttatccctgttgtagcatggatcagtacttcattcctttttattgccaagcaacattccaatgtatggagataccacatttgtttatccatttgtcagttgaagagcatttgggttatatccactttttggcttttatgaataatgctgccatgaacatttgtgtacaattttttgtgtaaatgtatgtttgcagttctcttagatgaatagccagaagtggaatttctgggtcataaggtgatatagggcaactctgtgtttaagactttgagaaagccatcaacctggtgaacccgtctccaccaaa

SEQ ID NO: 594611 - DNA, 347 bp, Homo sapiens
  misc_feature (116)..(116): n is a, c, g, or t
  misc_feature (234)..(234): n is a, c, g, or t
  misc_feature (323)..(323): n is a, c, g, or t
ccagactgtccttaactaaccgacactgatactgacttccataaaatttagcttttgccagggaaaaggagagaagaccgctctttggtttggcttccgcttaactgacaacaaanccactaatatgcactaccctcctcctccatccatccctctgcttctctaatagttccagccggtttgttttaaaccaggcttacaaagaattaccaaaccttaattctttttagctgnctggagtttgcaaaaagttcagagtattgatcaagactatttactatgggagatacctagaaagatgcagtataattgaccctgccttnagtggtttttgaaatctagtatgg

SEQ ID NO: 594612 - DNA, 127 bp, Homo sapiens
gaggaggaggtctcattcttaaatatcttcaaattatagcaatacatggcatatttaacagtggcaattaaaatctaaattttccaatctatttagtcataaaattattctgaagaactataaagaa

SEQ ID NO: 594613 - DNA, 889 bp, Homo sapiens
  misc_feature (9)..(9): n is a, c, g, or t
  misc_feature (69)..(69): n is a, c, g, or t
  misc_feature (81)..(81): n is a, c, g, or t
  misc_feature (93)..(93): n is a, c, g, or t
  misc_feature (105)..(105): n is a, c, g, or t
  misc_feature (141)..(141): n is a, c, g, or t
  misc_feature (168)..(168): n is a, c, g, or t
  misc_feature (170)..(170): n is a, c, g, or t
  misc_feature (178)..(178): n is a, c, g, or t
  misc_feature (190)..(193): n is a, c, g, or t
  misc_feature (196)..(196): n is a, c, g, or t
  misc_feature (214)..(215): n is a, c, g, or t
  misc_feature (219)..(220): n is a, c, g, or t
  misc_feature (222)..(223): n is a, c, g, or t
  misc_feature (226)..(226): n is a, c, g, or t
  misc_feature (243)..(243): n is a, c, g, or t
  misc_feature (247)..(247): n is a, c, g, or t
  misc_feature (254)..(254): n is a, c, g, or t
  misc_feature (269)..(269): n is a, c, g, or t
  misc_feature (301)..(301): n is a, c, g, or t
  misc_feature (368)..(368): n is a, c, g, or t
  misc_feature (380)..(381): n is a, c, g, or t
  misc_feature (400)..(400): n is a, c, g, or t
  misc_feature (431)..(431): n is a, c, g, or t
  misc_feature (768)..(768): n is a, c, g, or t
  misc_feature (775)..(775): n is a, c, g, or t
  misc_feature (777)..(777): n is a, c, g, or t
  misc_feature (779)..(779): n is a, c, g, or t
  misc_feature (796)..(797): n is a, c, g, or t
  misc_feature (799)..(799): n is a, c, g, or t
  misc_feature (801)..(801): n is a, c, g, or t
  misc_feature (807)..(807): n is a, c, g, or t
  misc_feature (809)..(809): n is a, c, g, or t
  misc_feature (814)..(814): n is a, c, g, or t
  misc_feature (816)..(816): n is a, c, g, or t
  misc_feature (818)..(818): n is a, c, g, or t
  misc_feature (821)..(821): n is a, c, g, or t
  misc_feature (824)..(824): n is a, c, g, or t
  misc_feature (826)..(826): n is a, c, g, or t
  misc_feature (829)..(829): n is a, c, g, or t
  misc_feature (833)..(833): n is a, c, g, or t
  misc_feature (844)..(844): n is a, c, g, or t
  misc_feature (848)..(848): n is a, c, g, or t
  misc_feature (851)..(851): n is a, c, g, or t
  misc_feature (859)..(859): n is a, c, g, or t
cccctccangatgggtcctggggtgggccagatgcctgcccacctctgtctcctgcctctgctcctctncccctcttatanccagcacttgtntcttctcagcanccttcactttgtccttgtccctttaccattcccccncaaagagtagtctgctatatcaatttntntagatatntctttctttttnnnnccncagagaaaatgcccattnncccnnannatnctctgcactcctctctncttnacattcnacttccctgttctcntctttggtaggattcttccagttgtttttgcntcttctgttcctgggtaatggtgggtcttaatggaggctgggtggaccactgcccgtccattcttcnacaggaggaacnncatgccaccacagtaacanacattagagaaaggacagaggtctgctcctncctgccacctttctcctggccccttagcattcccccagcccccccctcttcaccttgctccgtctatgtcttcccagctcagccttttccccactcttaaatactgtactacttcactgtaagaacgaaagaatagttaggataccaatgagtaaaagggttcctgttcactctgactctgtgcaaattgtattacagtagaccgctgacgttcccaagtgacagatccagggcctttcaaacatcccaaagtcatggcatactcccattagccagttctacatctgttcagggtatccagctgtagatgtcttatcccccatacttgtgagttctnggggtgncncncaaaactaggggttttnntngnattttnancaaanananccnaangncanattnattctctttgnaacngcngtcttacnataaaagaattcttcgcccttccaaaaaaa

SEQ ID NO: 594614 - DNA, 313 bp, Homo sapiens
  misc_feature (16)..(16): n is a, c, g, or t
  misc_feature (19)..(19): n is a, c, g, or t
  misc_feature (29)..(29): n is a, c, g, or t
ggcacgagccggcttnttntaccagtttnaccgagaccagggcctgcgggttgacttgtttgaggtcgaaaatcagctgcgacaaatcctcgatcgagtagatgtcgtggtgcggcggtggcgaaatcagggtcacgcccggcactgcataacgcagcttggcgatcaggccgttgaccttgccgcctggcagctgtccgccttcgcccggcttggcgccctgggcaaccttgatctgcagcacttcggcgttgaccaggtattccggggttacaccaaaacggccagtggcgacctgcttgattttcgagct

SEQ ID NO: 594615 - DNA, 400 bp, Homo sapiens
  misc_feature (101)..(101): n is a, c, g, or t
  misc_feature (108)..(108): n is a, c, g, or t
  misc_feature (111)..(111): n is a, c, g, or t
ccaaccccccactattttattaacctagccatgcccccccccttatgagggggggcagggattaagggctttcgcttaaagattaaaaaggcccaggcccnttttttnccncaggggccccacccccccttttccccatattggtttttttggaacccatcggcctattctttcacccaatagcccgggcgggaggcctacccggtaacattatggcgggccccctattcaggcccctatttgggggcccccccctagcaatttccccctttacccttccctttccatttttttttttcccatttttatttttactggctttcctagaaatgggggtccccttaatccaggcctaggttttcccctttttggtaggcctctcccggccggcccccccata

SEQ ID NO: 594616 - DNA, 301 bp, Homo sapiens
  misc_feature (187)..(187): n is a, c, g, or t
  misc_feature (199)..(199): n is a, c, g, or t
  misc_feature (252)..(252): n is a, c, g, or t
  misc_feature (255)..(255): n is a, c, g, or t
  misc_feature (262)..(262): n is a, c, g, or t
  misc_feature (269)..(269): n is a, c, g, or t
  misc_feature (274)..(274): n is a, c, g, or t
  misc_feature (278)..(278): n is a, c, g, or t
  misc_feature (292)..(292): n is a, c, g, or t
  misc_feature (297)..(297): n is a, c, g, or t
acagctgagaggaccggagcacttccagagactgtgatcatcgtgactgtggtcctattgaggccagtggctgagttatgggcttggcacatataggatccgctattattcacagtgatgttggggataaagagctcttgtgtggattgctggaacgtcccattgattaaccaagagtactgtgcangtaggttagagnctgcgtggcaggagaggttcagattttcccctggacggtattggcctttgagnggnaatgtgngccactntggancatngaggacattcaaantctgnttgc

SEQ ID NO: 594617 - DNA, 877 bp, Homo sapiens
  misc_feature (75)..(75): n is a, c, g, or t
ttgtgcactacactgtgtgggtcccgggtggaggggggcggggtgcggcttcgcttcgtttggtctgcgccacangcgtacgtgctgtggcgggtgcaggatctagcaccttgccttccgccgccgcgtgtgatttcggtgcgccgccactctgttttggttcggctcgccgctgtgggggtctcggcgagtcagccagaattgtttggttggttgccgtcccgctgccccccccccccgctgcctgtcttttgttgtgggctctcccgccccccctgtttttgtgtgtgtccacccgaggctgccgcgagcaccgggttgtggtgtggggtgcgcgcgccccccgttgttggtggggggggcccctggatcgtccgcgccccccgtctgtgtgttttgatgtattgggctggggttctcgcgccctctcactccgttgtggtgtgtggtggcccccgcctcgctttatttttctgatgcggcggctcgcttcccttgtggcgcgtagactgttgtcgccttcgttgttgattgtgttcttctccgccagctgcttctcttctgtttgttgtgcgcggggtgcgcctccccgcccgcgggtttgttttgttatttttgttttgtctgcgcgcagcaagccgtgtcccccggcgggggtagcatcaccacgcgcgggggggcgccccctccgctgctccctgttttctgcagcagcaagtctttttttttttccccccgtcgtgggtccctcctcccccctcctttgtcgtccgctgtggtggccccccccccccccgcggggttcttttttttttttttctttcccccccccccaaatttccccccgcccccccccctttttatggtgggcccccca

SEQ ID NO: 594618 - DNA, 199 bp, Homo sapiens
atgatactaaatggaaacagatgtaaagacattagtagtaaatattaaatatgccaattcatttattcatatggtgaataatagtagagcaataaaggataatttatttgtcagatagaagacagggtggtatagctgataccaccagaggaaagagagaaagtcctggtagtgagttttaaggtgtgggtggtatcag

SEQ ID NO: 594619 - DNA, 380 bp, Homo sapiens
cggatgaacagtaggacttgtagttgattccactaagtgaaagaagaacagtgtttctgaacggtaggagaatttaataaatcagcaagggtattttagctaatagatgaaatagtataacaggaagaatggattaggctatgaaaggttctcttaaagttctatcgaaataatcttcatgcagagatattcagggtttggattagcagtggaataaggagatgggcatagtgtcccctataattgtgcgggtttgataactttcgtaagtattacttttactggctgtgtttgcataacttatccatatgcatgagggtgaaattttaattcgtagccatctgttcccatattatattattgattcatagaaaatatct

SEQ ID NO: 594620 - DNA, 106 bp, Homo sapiens
ttgcgggcgacttagagtagttagataagtgttagcacttggtatcagcagaaagcaggtaaagctcctataactcctgatctatcagacaggtgcagcgatagaa

SEQ ID NO: 594621 - DNA, 184 bp, Homo sapiens
tgaatggtggtccagccgcctggccctgcgtgggaccctccacctggcagcagggtctcgctctgtcacacaggctggagtgcagtggtgtgatcttagctcatcgtaacctccacctcccgccttcatgcgatcctaatgcctcagactcccgagtattttgtattacagtctgctaccagac

SEQ ID NO: 594622 - DNA, 589 bp, Homo sapiens
  misc_feature (589)..(589): n is a, c, g, or t
aggggtcttagggggaaaaaaaaaaaaaaaaaaaaaaaaaaaaaaaaaaaaaaaaaaaaaaaaaaaaaaaaaaaaaaaaaaaaaaaaaaaaaggttcaaaaaaaaaaaaaaaaaaaaaaaaaaaccttgtggggccccctgggcccagtccgtttttaaactccgaccaagtttttgcttggggccgaatttcgggctcctttggccatttccccttttagggggtggtttaacatttaacgggccgtcgtttaacaacgtcgggcctggaaaacccctggggttccccaacttaatcgcttggcagcacatccccttttcgccagtgggggtaataggaaaaaggcccgacccgttcgcccttccaaaaagtggccccaccctgaatgggaattggaatttgtaccctttttttttttttaaaattcggttaaatttttttaaaaaagctttttttttacccatgggccgaatggggaaaatcccttaaattaaaaaaatacaccggatagggttgagggttttccatttggaaacaagaccccttttccggggctctccacctggggggttttgggggtggggggcn

SEQ ID NO: 594623 - DNA, 524 bp, Homo sapiens
  misc_feature (162)..(163): n is a, c, g, or t
  misc_feature (167)..(167): n is a, c, g, or t
gttggtcctcttcctcaagaaaagggataggactcgacataaacaattatagacttccgtgatttttgtttaagattttattaacattaaatttttttaacttttaagttcaggggtacatgtgaaggtttgttacataggtaaacttgtgtcatgggggtnnttgnacagattatttcatcacccaggtattaagcctggtatccattagttatttttcctgatcctctcccttctatttttgctaaagtattttcagaaaacaaaagttgttaagtttgtttcctttggctagaatatctcggaaatataataaacctttgatgaaagaattaaatatgtctggccaggagcagtggctcacacctgtaatcccagctactcaggaggctgaggcaggagaattgcttgaacctgggaggcggtggtggcagtgagcctagatcatgccactgcactccagcctggctgacagaacgcatctctgtctcaaaaaaaagaacaacaaacaaacaaacacattc

SEQ ID NO: 594624 - DNA, 1148 bp, Homo sapiens
  misc_feature (940)..(940): n is a, c, g, or t
aacaagatccgaagaaacttccacttataattgttccccttggcagtacttaaagtacttcaaggttcaatgtcaaactgcagataaaaccccttcattttcaaacttactaagctgttaacaagtacatttgatagtgagcagaatatgaacagtacagatgttcatcacaaacgaggtaaacttcatctatgactacgatacggctctcacgcacgactctaaccacgcaaccttttgcacataccacaggcgcatgtctcactgcacctgggcgacacaactcaacacgcctctactctctgcacacgcggagctggcgcctcttcacatacatcgcagcctaatcaacttaacctgcagaaaatgacgataacatagttatcctgaacatcaaaacaagcaacagctaatacagctaatgcattataaataatgtatttcatcaactgaattagtaaacgcatggttaccactctaggctagcacactaactcagctataaccacttctgtagctctctaagtctctaacaaagctttggcttccctatttacaatcccatctttactatatactatattcacatactatacacactgctcgtctgtcaactcaacactataatcgcttgctctgtcacacacgaacgttttcacataatcagagatgccttacacagtcccacttacctcaacctttatcctggtttataaaaactcaacaaattctgcccattccttcctaagtggtgagcaaattggctccaatgcacatccatcgcacacaaattctcagaggcccattatcacgcacggtacgtctcctcattaagacgtcaatgtcgccggaactacaccagtactcaccaagtcccaatacccgcgcactactcgacacctctcaccagcggctcacgatacccacgcagcagcggggnacccacggcgcaaacacgtgcgcacagcgtgagatagaccatggggcgtcgccagccaccacaaacagcgcgcaccggaccatactagaacacccgcgcacccacgcacgacacagacaacaagaacatcgacagaaagtccaacctcaggacccaaatgagaacgaactaacagaggcaatacgaaatgacaacacaaccgcccaac

SEQ ID NO: 594625 - DNA, 81 bp, Homo sapiens
gggctttcctcggggacccaaagggtgggggggtacacaccagataagaggcagcgagggccgggccgtgtgctagcagtg

SEQ ID NO: 594626 - DNA, 309 bp, Homo sapiens
ccagttgtcccccatttccagacggagacgatgtacgtcttacatgtgttgatggatgtctcatgtctctcttaaagatataaaaccaaatgtggcctgacaaccacagacacatgttctcaggaactcctgaaggctgtgtcatggcgccattggccactcatatttggttcagaataaatatctttaaatattttacagagtttgattattttcatcaacaacttactaaggaataaagaagaaattaatgatttgaaaagcaggaaatgataggatcaattaataggcaccaaagctggttctttt

SEQ ID NO: 594627 - DNA, 381 bp, Homo sapiens
  misc_feature (10)..(10): n is a, c, g, or t
  misc_feature (50)..(51): n is a, c, g, or t
  misc_feature (58)..(58): n is a, c, g, or t
  misc_feature (171)..(171): n is a, c, g, or t
  misc_feature (255)..(255): n is a, c, g, or t
  misc_feature (263)..(263): n is a, c, g, or t
ggccacccgnctattaaagtacgtttaattaaaaaaacagctttgttttnnttaaaanaaaaaaaaaaggccaagcacagtggctcacgcctgtaatcccagcacttcgggaggccaaggtgggcagatcacctgaggttgggagttcgagaccagcctgaccaacatgangaaaccccgtccctactgaaaatacaaaattagtagtggcgcctgcctatagtcccagctactcgggaggctgaggcgagagantcacttgngcccaggaggcggaggttgtggtgagtggagatcacaccattgcacttcagcctgggcaacaaaagcaaaactccatcttttaaattagataactaactaagttaaattaaataagtt

SEQ ID NO: 594628 - DNA, 82 bp, Homo sapiens
cctatgtaacttatttacttttgaatgttcttctgtatctttaaaccttttattaaataaggttttaaaaattaaaaagaga

SEQ ID NO: 594629 - DNA, 476 bp, Homo sapiens
ttttttttttcctcttaatttcacctaaagatctatgactaaagcaaatataacactgtgttgtggggtttatgacatgtgcagatgtaaaatttatggcaacgacagcacaaaggataggagataaatggtgctattctgtagcaagtttttctattttacactcactgtaacagtacaatattaactctaaactgtgagaatgttaatgatgcacactgtaatccttggaggaactgctaaaaaatgaaaaaatgtgtcacttcaatgctaataaaggaatacaacaatacaaaaaagtacttgtataagaatgttcatagatctttactattatgatagcccaaaacaggaaataacccaaatattcatcaacagagaaatgtatgaacaaaccatggtgcattcatacaacagaatactattcagcaatacaaagggacaaactactaaaacacacactatgggggtgtttc

SEQ ID NO: 594630 - DNA, 903 bp, Homo sapiens
accacgcctggctaatcctggtaattttagtagagacgggatttgccatctggccaggctggtcttgaactcctgacctcgcgatccacccaccttggctcccaaagtgctgagattataggcgtgagccactgcacccagccatttttttttttttttggaaacggagtctggctctgtggtccaggctggagtgcaggggcacggtctcagcaacctccacctccggggttcaagtgattctcctgcctcagcctctcaagtagctgggaccgcgggtgcttgccaccacaccgggctagttttttactttttagagatggggtctgatggtggcccaggctagataatgctttttggacattaaatccccccaaaagggtgttgcttccctcccagagcatcctatcggggggttaatgatactgacctgtctttatactggtgatgacggtcatgatcattgcgctaacgtggtgtctgccaggatttttctcctctaacacgggtgctatgagaacctgcttttttcttttctttttttcttgggacacggatttctctcttgggccccagggcggacattccagggggcacacatccgcgcttcaatggcacttcttgcggccggaggtgcagggagatcctgggccacacccccacgagatacggggatataggcgccccggcacaccaccgccaggtaattgcggggctctaggagagacaggggggttcaccccggtgttgtgcagaggtggccaaaaagtccgacgctcacaggatgacgccccaaaggcgggaacagggcaagccacagcgcgggcactgatgatagcgggacgagcttagccatgagacttttcagaagggccgcacaaccggttgggcgtcccgtggccc

SEQ ID NO: 594631 - DNA, 192 bp, Homo sapiens
cacgctgatctcttcccagtcttgctgttcctagcacgacgtttggcctgtgacttgcacttacatgtatatgctcatcagaaactgtcaatgtactgctataactttaacatctgcagtactgtaacatacacgctgtttattaaacaaaaaaacgaacaattcacattaaaaaaaaaaaagtgcggacga

SEQ ID NO: 594632 - DNA, 81 bp, Homo sapiens
ggggggccccccgccccaaaccccccttaagggtttgggggcccccccggcctttttcccaaaaaaggttttcccccccca

SEQ ID NO: 594633 - DNA, 177 bp, Homo sapiens
gaattccccccccccccccccccccacaagaccgaggatgactgccatctcctggaaagacgctcaggtagttctttgggtttaaaaggaagatattgaaaactggaattttttttgggagtctcgctctgtcacccagactggagtgaagtggtgcaatctcggttcactgaaacc

SEQ ID NO: 594634 - DNA, 244 bp, Homo sapiens
actcttatacatagacataacctagtcctgtctgccctttacctaacaaatacacaaccaaactacacatcatactacacatctcacacgcctcaggaaataaaaacagtaagaactatcctgcccgccatacatcctagtcctcatcgccctacccatccctacgcatcctttacataaacagacgaggtcaacgataccctcccttaccatacaaatcaatttggccaccaatggtactgaa

SEQ ID NO: 594635 - DNA, 802 bp, Homo sapiens
  misc_feature (480)..(480): n is a, c, g, or t
agcggcggatgtatctttcgttctctttttcgactgtaataatgagatttgtattgaacgatgtcttgagaggggaaagagtagtggtaggagtgatgacaacagaagagagcttgggaaaagagaattcagacctaccttcagtcaacaaagccaattgattgacttatatgaagaaatggggaaagtcgagaaaatagatgctatctaaatcgggtggatgaaggtttgatgatggaagtatgtagcgagattgtttgactagaggaatggcgtaattactaaagcctagaagagcagtccttgagagatcatgcttgaatattggctttgatagcgtgctatcatgacgcgccttgtgttaaggcaagtctctaatcgtttcataacttacgatctcacattgagtcggcgtcggtaacacgtaccatggcttaaaagcaaaagttaacagtattctctctctcatggttgctgtantctgttggggtccacaggagtcagacagtgaattcaggtttaacttcacctttatgttgatggtgctcaccaatacgaacgggtatcagctatttgttcttgaaattcaaaaagaaatatccctttcatagtcttgtgccttctgtgagcaaaacttgttagtacgcgttatatatccctctagtaatcacaacatgtacaggatgttgagggatacccgatgtcctctttgtacttgcaagtttttaaatttgccaaccttaagtgaattctcgtggaccaaatttccaaggaacttatcgtgtcagtcagctcttgccca

SEQ ID NO: 594636 - DNA, 175 bp, Homo sapiens
tgcgacgcgccgctctgcaccattgcctcatactgcgtgcggatctctttcagggctgcaggtgaggtctgtcttggccacgtcaagctccacatggacctgctgacacgccagctgctcttggagtacccgaacctcctcctcgtggaccttcctgaagaaccggatatcctcc

SEQ ID NO: 594637 - DNA, 637 bp, Homo sapiens
ggggaaatggattcgggtagaacgaagtcgagagatgcagatgatagacttgcagacggggactccttgggaatctgtcaccttcacggccctgggcactgaccgaaaggttttcttcaacatcctggaggaagctcgagagctagccttgcagcaggaggaagggaagaccgtgatgtacacagctgtgggctctgaatggcgtcccttgtgctatccacgccgcggagaccacttgaattctgtggttctacaaccagggtctggctgaccgaatgtgtcagagacgtccaggaattcatcgataaccccaagtggtaacactgacagaggcattccttacagaatgtggctacctgcttaatgggccccctgggttgcggaaagagcagttttatcacagccctggtctggggagaactgggagcacagcatctgcctgtggagcctcaacggactccagcctcctcttgatgaccgtgatcaaccacttgtgaggcggggcccgaagcaagagcctgtactcctggaggatgtggatgctgtttctcagtcgagacttggtggtggagaaccagtacagtaccaaggctaggtcgctcaccttcaggtggactgtcaatgccttggatggtgg

SEQ ID NO: 594638 - DNA, 282 bp, Homo sapiens
  misc_feature (213)..(213): n is a, c, g, or t
actaactggacactcccatcgtaatcagcaatgagaacatggctagcagcaggcacagtgactcgggcatgtggtcccggtattttgggaggccgaagcaggcagatcacctgaggtcgggagttcgagaccggcgtgggcggcatggtggaacctgtccctgctgaaggtacaaaaattagctgggcatggtgttgcacgcctgcggtcccnggctgcttgggaggctgaggctggagaatggcttgaacccaggaggtggaggttgcagtgagcccgaag

SEQ ID NO: 594639 - DNA, 968 bp, Homo sapiens
  misc_feature (542)..(543): n is a, c, g, or t
agcggaaggtcctctctgcctgccagtgatcccacgcttctcccacctgagacaggcggagcaggaggagaagctccctccatagcccaaggactccagcttttttgacaaattcttcatgctggacaacggcgacaggattaaaggtgccaggtgacagccaacaggaagccaagatgggcagagcatcaatgacaatggtggatgaggttcctggacttatcacgggcacgtccgactgatgtccctgcaggggagaggacataggttgacggcaaggaaaggaagaagggacacagaacttggagagctgctggagttgtctcttgtccctggtgggacccacgcacatggacgtggcatgacgtgcaacaggaacgattgcccaggccatggcagctcatatcgcagaagatatatttcaattccagtcgatgcagtttcgtttataagactcttggtttcaccatagacagagagcttgaacccaagataacaggaccgcagaaggacagcggcgatcgatagaggcagaaagtgtnnctgtgaaggacatatgcgtggtcagtaagacaatccgcaggatccagtgctagcaggctacctaagcaacaaagcacctgttggatagccgccatggctcatgacctcgcctttagaacacattctttaggcattacacggggtgctgaggaagtcacccagcacttcagctgaccttgagtcagacaaaggcaacgtttacatcccaggagacccaagggggcgtggcgagaagtccaaaggatgcgaacccatcggggcacacacagggccgtgagaaccccctgagacctgcgaaggaagggcaccaccgagaagtcagggaccaacgtctcctgcctctgggccaactgttgggaagaaagactcagactccaccgaaagaactatcccaccgcagaagcctgaaccacaggaagcgcaaa

SEQ ID NO: 594640 - DNA, 643 bp, Homo sapiens
caaggtctaattgtaaaatttcaaaaaattgcaacctcaggcataaatgggttaatcgacatttatagcacacacatgcaacatgtaccagagattccttcttttctatgaacatggtacttccaccaagatagaccacattgtgaactataaaacaaatctaaaaacatttgaaatgaaggaaattatataaaatatgttctctgatctcaatgaaattaaattaataactatatctagaaaaactcccaatatgtgaatattaagcaacatacttataaaaaattcatagttcatggatgaaatcaaaagagaattcaaaatatttcaaaataaattatgatgattatataaaatgtagaaatgtgtgggatgccactacaccagttcttagagtgaaatgcacagctttcaaggcttctgttaaaagagttgggaattacaaaacaaggagcagcgactgccaatgggtgtggagtcttttttggggtgatgatgaaaatgttcaaaaattgattttattgatggttacacacgtctataaatatatttaaacggaagaattatatgatatatatgtgatatatgaagtatatctctgtaaaattcctaaggattaaaagaagaatggtatcacaaaaaa

SEQ ID NO: 594641 - DNA, 830 bp, Homo sapiens
tgctggttggctcatcaccatgtaattgccatgacagattgggaggccaagggcgggaggatcaggaggtcagggagatcgagaccaccattggttaacaaggtgaaagcccatctctactaaaaatacgaaaaattagccaggcgtggtggcgggcgcctgtagtcccagctacttgggaggctgaggcaagagaatggcgtgaacccgggaggcggagcttgtagtgagcagagatcgcgccactgcgaccccagcctgggcgacagtgcaagactccatctcaaaaatgggcatttacacaaaaggactaggaaggctactaagccaaaggagtcaaagaaaagtgtgcgactttgtgtttccaataggtgcaagggcatactagcgttccacgctcctggcccgtggtcagccttgaggcaaaagggctcagcggaggtgaagacggggattccagtatatacggcaatttactgagtaattgtcttgccgttacgtccagcacatgtcgagtcaagttacatcagcttactgtcccagttgcactaccgtgaaagatttagaacctgaggcataatccgagaaccaagcccggtgttagaagccagttctttgacactgtgtgcccaggggtgcacgaatgagcctcaaataggcgccgcggtaatccggctagagacacataacgggggaagggccgcaaagggagggcgcagcgatcacacgggggaggatccacgcgaagtccgaggaaccaacttgggggcccaacagataaggtcgaaaacgcccgccgaacgctcactcaaaccaaatcacacaggaca

SEQ ID NO: 594642 - DNA, 1091 bp, Homo sapiens
gctggaacctggctgtgcgcgctgtcgctttaagacagactctgccggcgccgtcctggagccttagaaacctggccccggatcgcgagccggagctggagccggggccggccgggctgctgagtgcccgagcggcagtgatgctgcatgcgctggagcgctgatgccagtgctgcccatgtcgcgagaatgctgcctgcctgcctctgccctgccctgtgtctgtcctgcagccccgtggcggtccatgtgggctgtggcactgtgtgtcgctgcagggcgccgtgctgccctggatggtgcatgccgctttaggcgctgcagcctacttagtccgccagcaaggttcgcgatgaccagtggctgtgctgtgtggctgctgccacaagatccctggaaccccatgtggatgcagcccagcccagatgtgtacccacacaaccatacacaattggaacggcctttacaaagggcgtggtgacattgaaggcccttgggaagctgtgatagccaggcacgcggggcattcgcagtgccccggagcacgacccagcaccaggcacgagcacccaggatggaagcaattgcgggggcaccacggcacattacccaagccattgggaccccggagccaccaggcgcagaaaacaccccgggctagaaggccaggcttcggaggaacacctgcccgggacgacgacgagagatcagaacattggagcaagccggaagcgtgcccagtgacggacacggggacggccgccgggaaaggggagaaaacccccgaacgggagaggcccccgaaagaggaccaacgacgtgtacgcgggggagcggacgcggcggctttgccgcgcgggagcggcgagaacgggaagtccagggaccaagaaataaagcgagaggcaggcaggaggtgggaaaccccgatagagggacgatttcagacaaagggcccaggagaggcttggcaggaagccgacgaatggccaccaggtaccagggaggtgaacgccggtaacgcccgggcgagcgcaggcatgtgaagcggaagagagaaacgagcagcatgagggaggcagagggcgtcg

SEQ ID NO: 594643 - DNA, 235 bp, Homo sapiens
aaaggggggggggggcccttttggggaattttggttttttttgttttaagaaccccaaaaaaccggccttttttttggaaagttttttttgggtcccggatttttgggcctccacccattgtttatatgccctggtcctttggggtaaaactttggaaaaataaagttggttttttttcaattttttcctttgcaaatttttagtaaaaggggggtttttataaattcttaatta

SEQ ID NO: 594644 - DNA, 330 bp, Homo sapiens
agagctactctagagtatccccatgctgcactgacggtcaaaaaaaaaaaaaatgggtagggttgaataagtgacacaatcagatgttccgtttttagcaaacttgattgagtggcaatgaatgagatttctagcatagaggaactagcattggtagagatagggaccacatgggaccacaatatgataaacaggctggaagagagaagtactttagttcagagatatgaccaggcagttaagtccaatggcagttcccaatatggaattccaaggctcaagaagagtcagcaggaagtcactgggtctctataagcctacagaaatggg

SEQ ID NO: 594645 - DNA, 470 bp, Homo sapiens
gacctcaggatcataggcgacaaagcaatacaactaccccaacacctattccagggtacagggatgcaaaattgcctgcccagcaagtggcatggtttccatctggtctcaacctgcatcttgagcagacctagagtgctggctctgcatccactttcacagctcccagaggcagccgagtcctagatgctcgaaacacccagaatcacaaagagtcactgaggagttctgacccaaccaggataaaagagggacaagctccagtcagagaaagggcaggtagcactagagataaccagatggcaagaggcaagcacaaaaatataggcaaaaaaaaaaaaataataaagcaaggctacttggcatcaacacaatctagttctccaactacagcaagtcctggataccccatcacaccagaaatgcaagagccagatttaaagccacatctcatgatgatagtagaagat

SEQ ID NO: 594646 - DNA, 1009 bp, Homo sapiens
  misc_feature (836)..(836): n is a, c, g, or t
ttggtcatggtgggagatcaggaatctgctacggagtgtgttaccaagctcagctgctcgaatcatctagtcctgattgttggatggcgctggacggtggtgccatacccgagcgtagcagatgttagatcagtggaagcggagagagaagttagttgataagcacatggtcaaggaaaggggattagcaagcaatttcgtgatagagccaaatacgagtggggagcaaggaaacgagtaagtagatcgggagcagagaatggaggatgtcaagaagattaaggcagcaaaagtaatgtactgcatttcacgacaagactgttgtgtatgtcactcattgtgtgacagaaatatggttctaacatcgtaggagcgaggagaggacaaagcgtacagagattggcgaatgcgaaagtcgaaagaggagggttagataaagtagtaggatttcggatggattgcgttacgagtaagagtttgtccaggagaagaagaaagatgcctctaaaaggaattctttcagaggtggtagaatgaaacgagacttacagagacatggtgactatgggaagacagagaagatctatagggagagagatcaatctgggcaatagaagatacataggcaggaggggtaataccttggggcaaccttacatcttgaggactacagaggagagaacacgattcttggagctggggtgtatacaatgatgggcccagatttcgtacaagacttgggaaccgcagagcaaaactgaggcgcggatcgaaatgcatcgggacggacacacttcgcagcgaacagcacacgccagtacaatgacttccaaganaaagttaacaccattcttggctgaaggccgaaagagtcccggctcttggcctagaatggtcggacgtcattcctttaccacttggatcttgggaacccacaacaaacatgtggggcgggcgaggtatccaggggggcaaatcgtgtcacaatattcaagggcgcgcatgagct

SEQ ID NO: 594647 - DNA, 254 bp, Homo sapiens
acactcttggttgcttgaaaggggaactgaagaatgtgcacttctctactcccagatggcttgggaaccaggcgtgctgaatatttctgctaaacctgatgggtaatccttggtgtctaagcaactaacccgtttctttttctttttctttttctttttctttttttgagcggtagcaagggttattgtgaagagcgaaagaacaaagcttccacagcgtggaagggtcgatggggacccaaccaagagtgtcg

SEQ ID NO: 594648 - DNA, 321 bp, Homo sapiens
  misc_feature (73)..(73): n is a, c, g, or t
  misc_feature (171)..(171): n is a, c, g, or t
  misc_feature (280)..(280): n is a, c, g, or t
  misc_feature (292)..(292): n is a, c, g, or t
attttattttattttattttttctggcctggcacagtagctcacacctgtaatccaagcactttgtgaggtcnatgcgggtggatcacttgaggtcaggagtttgaggccagcctggctaacacggtgaaaccggttgtctgggcaccgatgacagactcgtcagcgagancaaaccaagcccttcagtgagtcacacaaactgtggagtttgaactgaacatctacaaggagcgtggaaggctgagcttctcaagagtcctgcttgctgtgccaggagnattcctggtggncctgtcaagggtgcctggggttgggggct

SEQ ID NO: 594649 - DNA, 837 bp, Homo sapiens
ataaccagacaagataaagaaaaggcagatcacgagatcaagagatcgagatcatcctggccaacatggtgagaccccatctctactaaaattacaaaaatcagctagacgtggtggcgggcgcctgtagtcccagctgctcgggaggctgaggcaggggaatcgcttgaacccgggaggcggagattgcactgagctgaggtcatgccactgcaacctcccaagcctggcaaacagggcaagactccatctcaaaaaaaaaaaaaggaaaaaaaagaaaatttagggcagcttttaaacttgaggccccaaagtaccaactaggggcacctaaacttcaactctctttggagtggtgatggtactctactcggcaccccagtggtaaattttgcaaaattcaaggcctacggtttttaaacatttcctaatttcacaataacccacaccagaattctataataacatagcatcatgtaatactgacctcagatccagcgggaacgcaaactttcttcacactttgggcacacaactgactgacgctattatttcaacgaaaatagcttggtccctgtggtgagaaagactccatgtccacatatgtccagttctctccctgacttaagtctttcaacaaaaggcctaatattattgccgggccaaatgtattgcccaggggcaggaggggattggcgggaagtggcaaccatgacctgtgtccgggaatggtccctggccaactgctaacatcttgtgaaaactcactgaactggcccttacacgggcgaactcgtcatatccattactcaaataacctaacttaaaaacccaaaa

SEQ ID NO: 594650 - DNA, 666 bp, Homo sapiens
ttcaaattgtttccaatccttaacctccgagtttggtttatataggagccgaagtggggccggtccccattgcccctcctttgacctggcacaagattgccgtgtaaatccaactttaaccggtggttccaccaacacagccttggccttaaaatataaggatccagtggccctccttatccaggaaggggctgccacccttaatatacctctccatccatcccctccggtgtgcaaatgctccttgcctaccaatggggttccctcccaataaatgcttcataaagtcaaaaagttgtaatctgtctggatatatgtattggtctgttctcacattgcaataaagaaatacctgagactggataatttataaagaaaagaggtttaggctgggtgcggtggcttacaccctgaaatcccagcagtttgggaggctgagttgagcggatcacctgaggttaggagttcaagaccagcctggccaacatggcgaaaccccatctgtactaaaaatacaaaaattaaccgggcatggtggcactgcctgtcatctcagctactcaggaggctgaggcatgagaattgcttgaatctgggaggcggagattgcggctgcagtgagccgagattgcgccactgcattctagcttgggcaacagagtgaga

SEQ ID NO: 594651 - DNA, 169 bp, Homo sapiens
  misc_feature (102)..(102): n is a, c, g, or t
  misc_feature (135)..(135): n is a, c, g, or t
tgatctagaggatcgcaacggtcgagtcaagtctgataggattacgtctaactcaatgtataatagcatggggaatagctaaactttttaaaaaaattatgnattttctccctgttaaaagatttcaccaggaanaacttcatataaaaattcaggggccctattttgg

SEQ ID NO: 594652 - DNA, 233 bp, Homo sapiens
tccagcgctgttaccagactgtcgacaggttgctcaaggattgccttccgtctcttagcgctgggccaggtgccacgtagagtgcttggtgcccacgagtgcgcccggttacatctctgtcacggccttggtcgcctcttcttcgcacatggtaattactccatagtgagagaactctttcctcagttggtcgtcatcaatggagtcgtccagcttcttcacatacaagttca

SEQ ID NO: 594653 - DNA, 439 bp, Homo sapiens
gcatgcggaactatacgtaaggtacaaaggctcccttctaacatatcccatactctcttctaccgctacccaacaggaaagggaatgctgtacccatatactaaccagtatgaaacacataaatgttacaagggaaaaaaaaagcatttagactagcatgtgaatttcatcaagcagagacaccttggttaccaagcaacacttgctggggtggcgaggaaggaaaaaaggaaaacctaagaaacaggaccggagtgctcactgtttatcattatcagccctttatcatgagacggcgtctcgctctgtcacccaggttaggagtgcagaggcactatctcggctcactagcaagctccgcctcctgggtacacaccattctcctgcctcagcctcccgagtagctgggactacaggcgcccaccaccacgcccagcta

SEQ ID NO: 594654 - DNA, 1759 bp, Homo sapiens
  misc_feature (1022)..(1022): n is a, c, g, or t
  misc_feature (1098)..(1098): n is a, c, g, or t
  misc_feature (1562)..(1562): n is a, c, g, or t
tgggacaaattatacaagtccaggtctctttcagccccttggggctcataacggtcagacgcgggccctccaacacacacagtcattcaatagggcagcttcgtcctcgtggtgaacctccggtgaactcgtgacctcgtgggctcaatagcttcttccttcactccttcaacactcttctgggcagcattcttgagaggtttccataggtctcaggtgggcccagctgtgcggcgggatatctccggggggcgtggggcgggccccggggtgagcggggtggggagagaaaacgcccgtggaaggataacctcgtggtggacattcagccccaaacttctcaacagagggaggtgaaccaccagaggctcagaggacattgtggcggaggcgtcccatgtggcgacagaggtgaagagagcgcacagctccgggcgccaatacacagaggggctctcactgtgggagccattgtgcgacacactcagagcacaccccaagaggagacacacacaaaaaaagaggcctctccccagagagaagtgcgcccagagagtaatacgcccaagggggggactgacgaaaggggctcataacagctgtgtatcacacacccactggtgtgggtgggtgccccccagctgtgtgtaacgcctgtgggtgttacgacgccactcctagagaggagatgtgccgacgggtgcggaagagtccggcaggagaggagcgaagcgacgtgccagaaaggaccactgtagagaggacctcccggaggggagaaacctcaccccaaacgcgcttggtgtggccccgcaggggcagacagcaccacgtgggtcgctcacaacggaggggccccacagggggttgtctaaaagaggggggggggggaaataaatactcccctcttcgagagaaaaagggtctcctcctccaggggaagacctccgaagaggggacactacaaaacgacgaggccgccagctggcttcccacacaagagaacaagtagttggcggccnctacaaagcgaagacaaattcattcccatgggggaggccgagaggacgcatggtgggcgcagaacaccaacacgancggcgccacaaaacatgtgtgggacgaagcgaattcgggacaaatccactgatgccatgtgcgccaacaggtgatagatcggcctccgtggaaggacaaccgcgtttgaggagcgtagaacacgccggccccacacggggcgcacctcccccccgttatccagccccgtgggggggcgagaaaacaaagcacatcacctagagggatggcccaagagcgcgcccgactttcaccacccaacggggcgaagaatgtaatgatgggcgccccaaaggttgcctgagcgggacacaccacgacacgaccccccgcgagcgcccacctgaacggagaaaaagcactgacggatcgccataacccaagaggggggggctcccccaatacagccgctgtggtggggtggaacccacctcctcggggtgggccctacagaagagagaggggagaaacacctcctcgtgtangaggcagccttggtgaagcacacgcacctgtcggtggagagacacacacgcgaggtcactaaagtggggagagcaacacagcgccagcttgcaactatggtggagcgcgactgacacagagaatacgcagaccacatatataaacgcaggcgagggagggagcgctcactcaggcagacacacaacgttgtgcaggg

SEQ ID NO: 594655 - DNA, 630 bp, Homo sapiens
acatacccatggccaaggctcctactcctcatgtacccattctaatcgcaatggcattcctaaggcttaccgaacgaaaaattctaggctatatacgactacgcaaaggccccaacgttgtaggcccctacggggctacatactaacgcgcttcgctgacgcctataataatctcttcaccaaggagcccctaaaacccgctcgaactatcgtactcagtcatcgctctatcatcatggacccgaccttaggtctcacccatcgactcttctactatgtaacgccggtcctccaccgatgatgcaaccgcctggtcaaagctacagactaagggccgcgcgtataccattactcagcacatctcgttagcctcaacctcgtaataacttcagatatccgctctgagtaccagggtatggagcatcaataaggatcggaaattaggtccaccggattcggcggcattctgaggaaagaagttggtcgccaaaatgcgatctccataatgcaggtcattctctaatgtccatggcagttctaacatattttggtcactaggtatgtacagctggctccctggggatgcgtctcacattccggatatcgcaactataaagatacacttatcta

SEQ ID NO: 594656 - DNA, 272 bp, Homo sapiens
ctgtacgcagcctgcttcacagttccagtgttttggcgtcggtcacacgtatattcttgtgatacagcggttcgtggtgatgcgcagccagatttgcgtcgatctgcggacgtgcgccatagaccaccaccagacggatgccgaggctgtgcaacaacccgatatcattaacgatactggagaaattctcatgctcaatggcttcaccgccgagcatgatgacaaacgtttttccccggtgggtattgatatagggaaccgaatggcggaat

SEQ ID NO: 594657 - DNA, 128 bp, Homo sapiens
gcagctcaagtaccttctctcctgttagctaggtgtccagttttggaaggggcatgtctggagcccggccacttcagtctacatgtcatagactaagtcttagttgttgcggttcccgagaaatacag

SEQ ID NO: 594658 - DNA, 139 bp, Homo sapiens
tgtgtgtaaataaggaaagttttcaatgagtattacttattgtaattatgtgcagaaggacttcccccgtcaaccgaatctgccgaccttttactcagtcaagtagcatctcattaaacccattcatttagcgttcata

SEQ ID NO: 594659 - DNA, 161 bp, Homo sapiens
cctttttccccgggggaaggggggcccccccccccccttttttttttccccgcttttcgggtcccaaggcccccgggcccccttggggcccttgggggtttcctttttttccaagggggccccccccggcccccccgttttttttttgggttttttgggga

SEQ ID NO: 594660 - DNA, 818 bp, Homo sapiens
  misc_feature (482)..(482): n is a, c, g, or t
  misc_feature (521)..(521): n is a, c, g, or t
  misc_feature (573)..(573): n is a, c, g, or t
  misc_feature (597)..(597): n is a, c, g, or t
  misc_feature (642)..(642): n is a, c, g, or t
  misc_feature (654)..(654): n is a, c, g, or t
  misc_feature (659)..(659): n is a, c, g, or t
ttcgtctccggggaggagtatttgtcggagagggtaaccgggaccctagaggcggggcctggatggggggcggagcatcgtctttgtgggcggttcttggtgatcaggaaggcgggcagggcctccaggtaaggtctaggtgttggagggcgggacaggatctccagggaggctctaggtgcctacgaggcagggctgggtctccctaggggttggagctgcatctccggggccagaattaagagcctggctggccgcggtggctcgcgcctgtcatctcagcgttttgggaggtcgaggcgggaggattgcttttacccagttcgagacccatcctgggcaacatagcgagaccccatctctaaagaaaaaaaaaaccaaaaaacccggccagatgcagtggctcacgcctgtaatcccagcaccttgggaagccgaggcgggcggatcacctgaggtagggagtttgagaccagcctgancaacatggagaaatcccgtctctactaaaattacaaaanttagccgggcctgtgaggaaggggaatcgcttgaacccgggaggcggaggtngcggtgagccgagatagcgccatngcactccagcctgggcaacaagagcgaaaccctgtctcaaaaaangaaacaaaaaancccanaaaaactaggagcctggaaggccggactgggtctccgtgggaggggcctgagtctggagagcagggcaggtctcctgggcctaggggatggggatggggctgggtctcagaggaggcagggttcacgtgcggaagagcggacttggtctccgggtcccg

SEQ ID NO: 594661 - DNA, 113 bp, Homo sapiens
tcgccgatgccgcaccagctccgtgaggttagccacgtactcgtctgtctgctgcaagatgtatgccaggcgcttgtccttcttaaatatgatgagttctgtggctgtgaatg

SEQ ID NO: 594662 - DNA, 95 bp, Homo sapiens
  misc_feature (2)..(2): n is a, c, g, or t
  misc_feature (18)..(18): n is a, c, g, or t
  misc_feature (22)..(22): n is a, c, g, or t
  misc_feature (34)..(34): n is a, c, g, or t
  misc_feature (38)..(38): n is a, c, g, or t
  misc_feature (51)..(51): n is a, c, g, or t
  misc_feature (92)..(92): n is a, c, g, or t
gnaattgttataaaaaancagnctacataattgnatgnccaaatataaagncagctgtgttcccaataagatatggcattattgaagaaatnaag

SEQ ID NO: 594663 - DNA, 199 bp, Homo sapiens
agagtggtgcggcatcaccacgtttagaacattttcctcacccagaaagaaacgtgtacccattaccatcactccccattctccccacccctaaaccctggcaaccactaatttactttctgtttctatgtgtttccctattctgcacatttcatataaatagaatcatgcaataggccgcatccaaagcggggatcct

SEQ ID NO: 594664 - DNA, 179 bp, Homo sapiens
tccccctcacctcggcaaatcaggtggttatacgggtaacaaaatatactgtattttcgtgaaatggcacaagaaacaggctttcatctttaagggctatgcctaggcaaactactaacacgcattgtgatgaatgccgtgtatacctcactgtactgtgctactttgtacgatatatt

SEQ ID NO: 594665 - DNA, 112 bp, Homo sapiens
ctatacacaaagatcctataaaacagaaacatgactagaataaaagatacagtcccataacaaagctacatcaaataaatataacccatactacttgacttaatagtaaaca

SEQ ID NO: 594666 - DNA, 148 bp, Homo sapiens
ccggggtgttagtggcatcaatgacgctgaaatgcggtacacagagaagcagcgagtggacttcctcggcgaggcgggcatcatgggccagttcagacaccacaacatcatccgcctagagggcgtaatctccaaatacaagctcagt

SEQ ID NO: 594667 - DNA, 217 bp, Homo sapiens
ctagagtatagtagatgtgtcttgtgtttatcagtaacaatgcataacatctttaaaatatattgcttagaataaataaatataccaactctttacctactttatctttacttatctttactttttttatatacctatttggagaacaggttacttgcttcttgtcgcccagggggcacggaaagatgcagggtacccgaagctccgaattgcggta

SEQ ID NO: 594668 - DNA, 874 bp, Homo sapiens
  misc_feature (302)..(302): n is a, c, g, or t
gccggggattggattgtgagccagggactcagtttctcctctgcccctgacccactgtcccatccacagacaccgtggggctcatacctcggtgcagacccggcgccatggatcatggtcctgggtggctggatggcgtcctaggtggtggtcctctcataggcctgggtccgtgacttgactctggctcctgggggcagtaccttctgatggacggcgtctggtctgcctgccaagcagtcgtcctatttcgagcagtagagatacgaccaatagggagtgacgaaagtgagcactccggncctcccaggagacgacctgaactcggcggctgacagtcctggcagcaatggcaccggggcatctctacaacatcgcgcgcgcatatccaaccagtgagcggtcattccctatgggtcaacgcggatgcctggcagtgggactgttgaacatggacgtgaacctgcagcaagtcccgtcaggacgggtgaggccgacgacggacccggtgaactgtgattcacatcgtattatgccacagaggcgttgtcgaccttggttgtaacttccctggatccagccaaacgagtcctggtcggcgaaagggcgaaagaatatggcacagactggcttcgaagaaatacgatttgccgtatgaaaacggcatggtgcaccagtacggcgaccctcttccatcacgcagcaccccactggacaagtggaagaaggtcaacatgaatcaccttccattttccgcccagacccagaatggcgaacccccatgcaacgccagtgaacgtggtgtccccccgtgttggtcctatgggaggcaccgaagttaactcaacgggctgacacagttctcactctcgta

SEQ ID NO: 594669 - DNA, 254 bp, Homo sapiens
tgtcacacatactcaccccaccatgtcatctattcccagttgaatatttctacaaggcccaatctacgtatactgcaaattatgcctagagacacattccatggactctaagaaagtttgttagtttaatctgtgatacttaaacttattatcagctattaaaactattgattcttgattgtgttttacaatcaaagtatttcctattatcacattcgctatcaggcgcgttcatatctcttttccctgtgtaa

SEQ ID NO: 594670 - DNA, 214 bp, Homo sapiens
gggcgcgggctcagccctgggagaacgggcagtacagccgcccctgtctcggctccacccacagccggaacgcggggctaggatggcagagaagccttcagccagcgttggggcctcgaactgcttcctgtagccatacatgaccatgtctgacacggggatatgagaggagtccgtcatctctcgaaaccggttgttgtgggcgcgcccacaa

SEQ ID NO: 594671 - DNA, 352 bp, Homo sapiens
  misc_feature (286)..(286): n is a, c, g, or t
gtcttgctatgttgtccagtctgatctcaaactccgtgccccaagcagttctcctgcctcagccttccaaagtgctagtattacaggtgtgagccattgcacccggccatttttctctaagtatactatagatcaaaaaagttaaaaatactgaagacccagagtgtgtttacatatttatatgtgtatatatatagatatatacacacatacatacacatacatgtacatagctatgtgtacatgagtgtatataactataaaactgatctttattgggatgaanaaagtgacacttgagtgagggatgacttgtcacatcttataaaattttactgattgaaattttatg

SEQ ID NO: 594672 - DNA, 321 bp, Homo sapiens
  misc_feature (41)..(41): n is a, c, g, or t
  misc_feature (255)..(255): n is a, c, g, or t
  misc_feature (259)..(259): n is a, c, g, or t
  misc_feature (276)..(276): n is a, c, g, or t
  misc_feature (312)..(312): n is a, c, g, or t
ccgaaaccaaataattcaagcccgggttattacaattttanggggtttttattttaccctcccacaagcctcaaaggatttggagtttcccttccccatttccggggggatttaggggtcaacattttttgtagccccagggttcccgggatttcaggtcattatggggtcaactttccccccaatttgtttcatccgccaaaaaaaatttccctttacatccaaacatccctttgggtttgaaacccccccctnaaangggcattttgtaaatgnggtttgactatttttgtatgtccccctctattgatnagggtttta

SEQ ID NO: 594673 - DNA, 643 bp, Homo sapiens
  misc_feature (70)..(71): n is a, c, g, or t
gcctgggagaccctccgccctccccgcggtggcagcgccgatccccggctccggcgcgagggacggccgnntgcgctcggcctgaggttacccggcccggcccttcctcgcttccctcgactattccactgcgtctccgcgccccggcgtcatcctgcgagtccctctgacgggagggaagatggctgcacggagctggcatgtgacgatgctggcccagcaggccgaggagggctcggcccggctgcgggaaatgctctcggtcggcctaggctttctgcgcaccgagctgggcctcgacctgggggctggaagccgaaacgggttaccccgggctggggttgatcctggttggggcaccttcggcgcggcttcgggggctgcttgcttgcttggtatatcagctgggagctaccggctgggggccgcggcgttgcggccgggacggcccggcaaaaaaggcgggagtgaggcccgcgcccgcaaggcggggagcgaaggcggcgggccgaggcccggccggggccccccgaacgaactggggccttgctgaaagaaatctccggagcgaggaacaagaagaagaagaaccggaagaaactgtccgaagaaggcccaaaccaaatgggcggactgttgaagg

SEQ ID NO: 594674 - DNA, 770 bp, Homo sapiens
  misc_feature (510)..(510): n is a, c, g, or t
  misc_feature (552)..(552): n is a, c, g, or t
aataggagaaatggacattaaacagaaatataacttggtaaatcgcctttatagctcgctttttatttattgtaacacataaaggtaagatggctgatttactattattcattccacaactgattccctatttggatattcttttggcactgtctcaatatgcaaagcgtgttaattgcaaaatacctgtgcagaaaacattgtgtgtataagatctaaagcctaaaaggaaaaaccaactttataatttagagtataaaataaggacagggaccgtgtctgtcttgtccaccatagtatccccagcacccagcttcctatttgacgtgtggtaagagttcattaaatattagttgaataatgaatgaataaatagggaataatagaatatgtttattaggaactacatgtgtaattttcatatggagattgaacggttatccatagcattttttattgactggaaagaatttgacttcttgaatgcataagacttgagaagagaagttnttttttttttcttttttttgataagtcccctaccattgcctnctcaccttccttcactacgtgctaagccccttcctgtactgggaagacaagataataagacacagtccctgctgtgaggaagctcatgcactgctgaagaagagattcaccaaacaaagaatcacaatggggacaaattcaggtaccaccaggcactttaccaggaacaaccaatcaggaaggaagagaagcttttgcaccggtgtggatgacttctc

SEQ ID NO: 594675 - DNA, 351 bp, Homo sapiens
  misc_feature (294)..(294): n is a, c, g, or t
gagatcggttttcaccattgttgggccaggctggttttgaactcctgacctcaagtgatccgcccgccctcagcctcccaaagtgccaggatgcacaggcatgagccaccacacccagccccatcaaagctttttggaaatgatctgtaggccaggagtggtggcttgcggcctgtaatcctaggatcatgaggccacaaggtggagtttagatctagccttgccaaatggcagaccctgttctctacaaatctacaaataggttggcttggctgtctggcacgtttctgtagngccctgctcttttgggctagggtggggagtctccctcgacctgaagttattgctcac

SEQ ID NO: 594676 - DNA, 679 bp, Homo sapiens
caagttattactatttaatattacacattctgatcaatgcactctctaagcctgtacctcactggattttgagacattacattctggtttgctattcctggaaagccgattggtgcatgtcctataccttacatgaagtgggtacataatgcaaggggctgtgagcgttatatagtgaacttgggactttgttccgacagtgcatgctgtggggggacttactgattcatgattgtcagtggtggagccatatggcgcagacactgcatgaatgatctggtgaccctcgaataaaatatcatgatattaaaattttgcctgaggctcagatctgatccaaatgacctaatctggagaacggaagaaaacactagctgttgtagctttcaatgcgcaagccttagaatcctattcttcctaaatttcagaactctcgagatattgtcattgccatgaggtgcacaacacttaatactgggcagttggtggcattgaggattttagttagagctccaatgagaacgtctaaactgaagcttctacggaatgatcctaagaatgcactggaggcatcctcacgctgatttgagtcctaagcaatttgggggggctggttcttaaccgatatgggaaacgcaaatctggcccggaacgtaaattccgtactcactttggaatg

SEQ ID NO: 594677 - DNA, 527 bp, Homo sapiens
  misc_feature (57)..(57): n is a, c, g, or t
cctccctgccagaaatttttcagttttgggataccagagcagataatcggttcaacnctgtggtccccctcaggtaatgccccagacccatggcaaaggagactgttttgagtgccctcaaagagaaaaaaaaaaaaaggccagtggaggaagaagcccaaattttccttgatggccgggaaaataaaagaaggccccatgataccagtggcagtggacattaagcatttgagcccctggtggccagtggagtccccgttttttttgggcctaagccggggtttttaaaaaagggcctcaattttcagggctcaaatgcccccttgaataagagatcccgaagtttttccatgggctccttgacaggggtttacacaaggggcatccctagctccagccgcaatgccattaccagttcctaaagctcccctgggggcttttcccagctggggaaaaaaaagggccccagtttatcccccttttttagcccacccttatcccgttcccagaccccggaggggccagca

SEQ ID NO: 594678 - DNA, 269 bp, Homo sapiens
tcggtcacctcgggcccggttatagcggtctgacatgagaacaacacagttttagatttgaaagacttgatcttcttagagaaataaaagcgctaaaacacagggatcaaacgcactgaaagctaccgagctactgtagcagaagaacccgcatcatggtgtaaaggcaatcaagtcacgacccaatgagaacagcccgaaagcaggacgggagatgctgctgcagttgtaggtcactgcacctatagtggaagagaccgctattaccg

SEQ ID NO: 594679 - DNA, 165 bp, Homo sapiens
  misc_feature (70)..(70): n is a, c, g, or t
tatgaccgtcctgggagatgatggcttgaatatgcagacaacttgaatgtgcctactaaattatagcagnggactgtggcacccaaggagttctgactttctgggattataatagtaattcccagccatactctgaactttatttgggtagtctaaatgcaatca

SEQ ID NO: 594680 - DNA, 245 bp, Homo sapiens
ttttctctgccgcgtgtgcgttttacctcctcccccgccctcagggtccacggccaccatggcgtattcggggcagcagtccctgcggcagcaattggcctttgcagcggcggcagagcaccaaggctctgcagcggcaacccccagcggcttaggcatggcgcttctcacggcattcagcagccagcgtttctgttaacccacaaagacaccttcgaattaagcacatttctcgattcccagca

SEQ ID NO: 594681 - DNA, 114 bp, Homo sapiens
tatattatgatattaaacaaaaaacacatttcggtaataacttttgtagcaatattaagaaaaatatgtgatttgaccaaggagagtttttatttccgcaactggtacggcggg

SEQ ID NO: 594682 - DNA, 382 bp, Homo sapiens
tctgagttttacaaagagagagagagtggtcacggaggccgtgtctgtagtcccagctactaggaaggcagaggtacgagaatcccttgagctcaggagttcgagaccagcccaggcaacagagtgagaccccatctcatagaaagaataaaaataaaaggagaggccaggtgcggtggctcacacctgtaatcccagcactctgggaggccgaggtcggtggatcacgaggtcaggagttcaagaccagcctggccaagatggtgaaaccccatctctactaaaaatacaaaaattagctgggcatggtggcaggcacctgcaatcccagctacttgggaggctgaagcagagaattgcttgaactcaggatgcttcttga

SEQ ID NO: 594683 - DNA, 1546 bp, Homo sapiens
  misc_feature (1369)..(1369): n is a, c, g, or t
  misc_feature (1374)..(1375): n is a, c, g, or t
  misc_feature (1378)..(1378): n is a, c, g, or t
  misc_feature (1401)..(1401): n is a, c, g, or t
  misc_feature (1405)..(1406): n is a, c, g, or t
  misc_feature (1410)..(1410): n is a, c, g, or t
  misc_feature (1417)..(1417): n is a, c, g, or t
  misc_feature (1422)..(1423): n is a, c, g, or t
  misc_feature (1463)..(1463): n is a, c, g, or t
  misc_feature (1514)..(1514): n is a, c, g, or t
ccactgatcgggttactgttctggtgcttccttttgttttctgtcagactggtctctgtgactgagtggtcgtctgtctggtgtgttgatgtggggtggtgttctattgtggtttggagtgtggtgtgttgtgtgggtgtggtgtgggggttgtggtgttggtggttggttggtgtgtttgtggttggtgtggcgtgtgctggtggtggtttgttgtgtgcttgtttctggggggcttgtgggttgtcgtggtgtggccggactgctcccttggtgttgtgcctcggacctttgatcccatgcccctttgtgtgttcgacgagccacccatgcgctgttttgggggtcccccccaatgtgtcacttctgggaaggggttccccagcacgaggggtggagcaccaatacaagccacggccctttgtttatatccgccgcggcccgacggtatgcttttgttcttctgtgttcctatatgggttctccgtagtcctctttgtgtggtgggcggtattttcgtgcattcgatgggcggcccccactggggtatcgggatgccccgccgtgtgggtacagggaggtgaaactactgtgcctctttcattggggggttgtaccaccccgtgcgccccccacgcctgttgatgggtgcccaaggtttttcctgtggccaagtcaaccggcccgcgggctccctcttcagcgcccttctgtgtgtgcccccccacgaagtggggaaccccactggggggcctttgtccgttttgtcacggggcacacaagcatgtgacccccaaaggtgccgctgtctcttgcgctgtgccctcgtttgaccccggttttggctccctcgtgggataaaacatagagagggggcccctgattttaagacctcccacacgtcacgtggtggcacacaacagatgcacacacacgggtagcactattgtacacgtgcacccgcgggcttggtctgcgtttttcacagtccacggagagaaaggtcacgcgaagaaaggaagttttatatgaagtgttgaagtgttgtttgccacatgtgaaaatttggggcacactgggcgttcttgaactctcctcccccctcccaagaagaaggaaaggagccccctcatccaccccccacactggcgaagacacgtttaactttgccgaacttgccacagtgttttgcccaaaccccaagagattttgaaaggaaaatgaagtggccacgcgccacagggcccacaggccacatgttggcctgcccacaccctcacatgtcaacttggcgcgcgggcgtggggtgggggtggcccgccacgcactcccacgccttgagagtgcttcacctttcctttcttctgtnaaccnnganactttgagaaaattgttcgtttnatcnnggcntctgttncctcnnatggccttttgctacgtgcctcccgagaaatttgtctttntcgtataaatgaccaagtgttgaaaatgtatttcctgaaataaatgtttcnaatgccagaaaccccccaagaaaaaaaacaaa

SEQ ID NO: 594684 - DNA, 802 bp, Homo sapiens
  misc_feature (228)..(228): n is a, c, g, or t
  misc_feature (235)..(236): n is a, c, g, or t
  misc_feature (247)..(247): n is a, c, g, or t
  misc_feature (253)..(253): n is a, c, g, or t
  misc_feature (256)..(256): n is a, c, g, or t
  misc_feature (268)..(269): n is a, c, g, or t
  misc_feature (277)..(277): n is a, c, g, or t
  misc_feature (294)..(294): n is a, c, g, or t
  misc_feature (297)..(297): n is a, c, g, or t
  misc_feature (315)..(315): n is a, c, g, or t
  misc_feature (321)..(321): n is a, c, g, or t
  misc_feature (326)..(328): n is a, c, g, or t
  misc_feature (334)..(334): n is a, c, g, or t
  misc_feature (336)..(336): n is a, c, g, or t
  misc_feature (353)..(353): n is a, c, g, or t
  misc_feature (388)..(388): n is a, c, g, or t
  misc_feature (511)..(511): n is a, c, g, or t
  misc_feature (519)..(519): n is a, c, g, or t
  misc_feature (655)..(655): n is a, c, g, or t
  misc_feature (699)..(699): n is a, c, g, or t
gtgaatccggttcagacaattggcaggattcaattcgagggacacattcaagcaggttgtcgagaggttaaaacattacgaggttaacaacgaggaatgaacaacagaatcaaccggaacacctggaatgacaatgctcggagctcccctgtggtcatcgacgcctccactgccattgatgcaccatccaacctgcgtttcctggccaccacacccaattccttgctngtatcanngcagccgcccntgccangantaccggctacannatcaagtntgagaagcctgggtctnctnccagagaagtggtccctnggcccngcctnnngtcacngnggctactattactggcntggaaccgggaaccgaatatacaatttatgtcatngccctgaagaataatcagaagagcgagcccctgattggaaggaaaaagacagacgagcttccccaactggtaacccttccacaccccaatcttcatggaccagagatcttggatgtatccttncacagttnaaaagacccctttccgtcaccccacccctgggtatgacactgggaaatggtattcaagtttctggcacttctggtcagcaacccagtgttggggaaacaaaatgattcttttgagggaacatgggtttttagggcnggaccacaccggcccacaaacgggccacccccataaaggcatanggccaaagaccataccccgcccgaatgtaggtgaggaaatccaaattggtcacatccccagggaagatgtagactatcacctggtacccacacggtccgggac

SEQ ID NO: 594685 - DNA, 122 bp, Homo sapiens
cggattatctgatagcctccactctgccatgtgcgtaattgagatggagggactggcgagggacagaagttgttcaggcaaagagggcactgcagacaggagtggaggctgaaagagctgtg

SEQ ID NO: 594686 - DNA, 380 bp, Homo sapiens
agtcactcccccaggaagtaggtgatgagccctttactctgagaatgtctgcgcctggtggtggtgggaggacaaatgagccctgtgtcagtcctgctccctgaagcccacagtctggtggaggaggtgtcaccagggacctaaatagctatcaggaagcatgggggccacctccccgctccctgcacctccagagagactgccggctccaggaatgtcatccctccctacttgactctggcagagggaggctgtgccgttgcaaggccccaggtcaagatattggtggcctggaggatgtgatttcattaaaatcaacattgaggggaatgattgtactaacaacagcatgtgctgaaatacagtacttgcgcatgcca

SEQ ID NO: 594687 - DNA, 831 bp, Homo sapiens
  misc_feature (228)..(228): n is a, c, g, or t
  misc_feature (235)..(236): n is a, c, g, or t
  misc_feature (247)..(247): n is a, c, g, or t
  misc_feature (253)..(253): n is a, c, g, or t
  misc_feature (256)..(256): n is a, c, g, or t
  misc_feature (268)..(269): n is a, c, g, or t
  misc_feature (277)..(277): n is a, c, g, or t
  misc_feature (294)..(294): n is a, c, g, or t
  misc_feature (297)..(297): n is a, c, g, or t
  misc_feature (315)..(315): n is a, c, g, or t
  misc_feature (321)..(321): n is a, c, g, or t
  misc_feature (326)..(328): n is a, c, g, or t
  misc_feature (334)..(334): n is a, c, g, or t
  misc_feature (336)..(336): n is a, c, g, or t
  misc_feature (353)..(353): n is a, c, g, or t
  misc_feature (388)..(388): n is a, c, g, or t
  misc_feature (511)..(511): n is a, c, g, or t
gtgaatccggttcagacaattggcaggattcaattcgagggacacattcaagcaggttgtcgagaggttaaaacattacgaggttaacaacgaggaatgaacaacagaatcaaccggaacacctggaatgacaatgctcggagctcccctgtggtcatcgacgcctccactgccattgatgcaccatccaacctgcgtttcctggccaccacacccaattccttgctngtatcanngcagccgcccntgccangantaccggctacannatcaagtntgagaagcctgggtctnctnccagagaagtggtccctnggcccngcctnnngtcacngnggctactattactggcntggaaccgggaaccgaatatacaatttatgtcatngccctgaagaataatcagaagagcgagcccctgattggaaggaaaaagacagacgagcttccccaactggtaacccttccacaccccaatcttcatggaccagagatcttggatgtatccttncacagctcctcctggcacttctggtcagtaacccagtgctgggcaacaagtgatctttgaggaacatggatttaggcggaccacaccgcccacaccgctcaccccataaggcattggccaagccattcccccgaatgtaggacaagaaggtctttttcaaacgagcatatgatggccccattccaggacacttgtgagtacactaatttatgcagtgccgtggccactgatgaagaacctttccagttaggggtcctcgacttctacaagggcacttgacagggctaaccgaggtgccccctcaacaacacaatggaggg

SEQ ID NO: 594688 - DNA, 319 bp, Homo sapiens
  misc_feature (221)..(221): n is a, c, g, or t
  misc_feature (302)..(302): n is a, c, g, or t
  misc_feature (317)..(317): n is a, c, g, or t
ccaccaaaaaaaaaaaaaaaaaaaaagtaaccaggaacgtgtgacttggcaaaagcagttgaagacatggctcatgaagtcctgacccttggtcccaccacaacaaagtacaagtcaacagagatacaaaacctagactgagtaattcttaatagacttgaatttttatgacttaatccttctatcttttaaatatttgtcagatattttaacattgttcnctggagcttgtaagctgggcaatggtggcactcacctttaatcccagcacttggcaggcagaggcaggaggatttctgggntcaggggccagcctngg

SEQ ID NO: 594689 - DNA, 596 bp, Homo sapiens
  misc_feature (2)..(2): n is a, c, g, or t
  misc_feature (67)..(67): n is a, c, g, or t
  misc_feature (86)..(86): n is a, c, g, or t
  misc_feature (200)..(200): n is a, c, g, or t
  misc_feature (220)..(222): n is a, c, g, or t
  misc_feature (247)..(247): n is a, c, g, or t
  misc_feature (260)..(260): n is a, c, g, or t
  misc_feature (263)..(263): n is a, c, g, or t
  misc_feature (279)..(279): n is a, c, g, or t
  misc_feature (281)..(281): n is a, c, g, or t
  misc_feature (283)..(284): n is a, c, g, or t
  misc_feature (287)..(287): n is a, c, g, or t
  misc_feature (289)..(290): n is a, c, g, or t
  misc_feature (315)..(315): n is a, c, g, or t
  misc_feature (317)..(317): n is a, c, g, or t
  misc_feature (343)..(344): n is a, c, g, or t
  misc_feature (347)..(348): n is a, c, g, or t
  misc_feature (356)..(356): n is a, c, g, or t
  misc_feature (423)..(424): n is a, c, g, or t
  misc_feature (435)..(435): n is a, c, g, or t
  misc_feature (438)..(439): n is a, c, g, or t
  misc_feature (442)..(443): n is a, c, g, or t
  misc_feature (455)..(455): n is a, c, g, or t
  misc_feature (457)..(458): n is a, c, g, or t
  misc_feature (468)..(468): n is a, c, g, or t
  misc_feature (471)..(471): n is a, c, g, or t
  misc_feature (481)..(481): n is a, c, g, or t
  misc_feature (485)..(485): n is a, c, g, or t
  misc_feature (487)..(487): n is a, c, g, or t
  misc_feature (489)..(490): n is a, c, g, or t
  misc_feature (493)..(494): n is a, c, g, or t
  misc_feature (498)..(498): n is a, c, g, or t
  misc_feature (502)..(502): n is a, c, g, or t
  misc_feature (552)..(552): n is a, c, g, or t
gngtgctgctgagttgcatgggatgagatctgcttctgagatcctggggctgtatgccacccccaantcaccagagctcttccagnacacagcagcacccccaccccccagctggcttggagttgggcagagaagcttatgaggctgttatctctcaacagacagctgtgcagggctggaggcagcagctctcatcaggnggcctgcagtgattcacagnnnaagaaaaagattatatgctgaatantaatttccagcantgnatttgtgctcagtctntntnntcncnntttcccaagggtgtgctgtcctttntnagagagagggcagtgaaggggagatnntanncaaagagntgggggctttgtgccagccttctgggtaaggttcagtttattgtctggaggctgcagattcaggganntcagcagggtntgnnaanntttgcagtgaantnnaggagagttnatngatgatgtanttanantnnttnnttcncctnccagaaaaacaatgtgccgctccctttcccttagtggcgatgtacagggntacacgggcccccatttgcaacagcctctgaggccagggccagc

SEQ ID NO: 594690 - DNA, 172 bp, Homo sapiens
cgtcgaccgcggtcgcgtcgacgggagggagggtctcttgtttgttttacaatctctctacacagcagcagaaacgtaaaatacctggttggcatttcttttttctttgtaacaaataattcaatttagtatactctgtgtatatacaaagtttttgcatgtttgtcgacgc

SEQ ID NO: 594691 - DNA, 726 bp, Homo sapiens
tggctttccaggaaatagggatttatttctgggtcaggggagggtcttctgaaacctcacagggcagataaagctctacttttaaagttgttcttctgcaaatgccacatggagaaaaagcctgtatccttgacagtgatttgatcagtggactctggatttcctgaggactgagcttcacttttgaggccagagtgggcttatctagaacctcatactgcaagggtaaatgaaccataaagttcctcatgaagcgacaggcctgtggggaccaggtaagtgattgatagaaatgggtgaagcagacaaatacaagaaaaactgtagctgtgatgatgaactaaagcatgttccctgattatggaaacagctactttactagttaggatgatctctgttgaaagtgagagaaaatccaattcaaaatggcttaaacaacaaggaaaatgtatggctcatataataaggagtaccaagaaagtgtgaggtaactccagcagtcactgatctaccaattccatgacatcattgaaaggccaggttttattcttttcatctttctgctctatctatctatctatctttttcagccttcataatcaccgtgtggagcgcagcagtaccagctagagtattcagatgcccatatccagaaaaagagacgaggggaaattttccagaagtgttgtaacataattcctctgtcgtcttactagcaaaaaaaaa

SEQ ID NO: 594692 - DNA, 748 bp, Homo sapiens
gatctgtaccgagcaggagtgccggatgtgcgtgcacgcggaggaccgaaggagtgacaggctatgcaaataggaccttgtagtctctgcgaagagaagagaaggcctaatgatcatatgggtccagccatttcagacattgcaggcgccatgtccttggtgtaccagataagtgaatggaagcagtgctggtagcgtacactgggacacgagattggcagtggtgcgtggttcactctgcaccagcgccactgaatgtgtgccttacccagggccctctctacaatgggtgccaccagtactgacagagtcgttttaactggtgccttcgcctgatacctcgtagttagacactaagtgggttccacgactagttgcatgccttcctcataaagcatgtgatgcactgttgcttgagtgtgccagtgatgtgagtggacgcgtggctggaatcttcgggagagctgactgaggtgtctcgaatcgaatctcccaggaggctttccttcacagctccacacgtaattcgtgggtaagctacgcagtgtaggctttcctttccaggggccctcttattcgtggttaacatagccaaatgagtcccgtctggcgttgcaaaggtgtagcggggctagacgattgggaagcgattgcagacacgtgtgcccaggtggcccatggggaactatgaaaggcatgggtactcattggccacacaaacagggtttagagacataggaatgaacaa

SEQ ID NO: 594693 - DNA, 906 bp, Homo sapiens
catgcaatgatacagtatagctatgagatagcagtctagactgtcacactggaatgatagggtatatagagcgataggtttagatccgggaagtcactggttgcatggtatcgaagcccatcacagtgaacctttcttgagcctctggcagatgattaagaaaagcagtattattcagaattctaatatcatcattgaaataaggaagttgataatcgcattgtataaggtaggcgatactgtgtatgtccatattaggtgtgatcgtgtgtgaatgggtctgatgactgtagtgactgtttggtaggagagctttatacagtggaagatgcttggacatgaatcagattgtgcaggtgttcaacgtatagtggctaagacattgatgttttctactttgcagtgcctgcagtaagtggcacatgatcaaacgagattctggtaatggctgattgtttggtaaagtaggaggattaagagtcatacagcaaaatgtgggttaattcatatgtagatgaaaaataattaacactgtttagaatgaccgagttaaaaaaagatgctatcaatgtacacaaatgaacaagaatgtgagttagaaaaacagggtacttaagaagtatgacatttgtgaagtattgtatttaacgggcatgagttttaagttccctggagtttcaagaaatccctttaaaagaaacatcgaaacaagtaaaacttttttatagaaaacgagtgaccaaacagtacaaagttaaaagaaaaagaaacaatattggcaggggaaaacagagaacgagaaaaataggaagaaaagggggggggggagataaaaaaaaattaatcgagaggagggggagccgaggaaaatgggggcacacagacttattaggtgataaaagaggt

SEQ ID NO: 594694 - DNA, 107 bp, Homo sapiens
cggtatgtctacgtctggaactaaatcttaaaatgatgagattttctacttggaaaaggattttcaaatgaaacattgaattgctttgaactataatccctttcttt

SEQ ID NO: 594695 - DNA, 1270 bp, Homo sapiens
  misc_feature (657)..(657): n is a, c, g, or t
ttgtgcgtcgtgtgttcggtcacatcaacctcgtggtgtacaattgtgctcctgactcacagaacatcagtgtatctctgcttactgtagtgcggttttaatcgataagtgtggttaatttgtaaggtacgacggtggcagcttttagtgaagttagatattctttgttgagtatagaaattgttttttggtggcgtcgtcttctctgtctgtgttgcgaacaattttgccggtctggccttcagcaatgaaattgtggctgttgtattgtacttatctatgcaatctgttgggtgtcttcctttcacatcttctgtgttgggggtatgttttgttgtatatcgtccctccgacagaggtatgctgagtagtacgtattctgtattaagtcgtaatgttgttcgtagtgtgtgtgttatgctaagtttgtgtggtgatgggttttataacaggaaacatcatctggctaaggaataactgttgcccgttggtggctatccactattcgcttataatgtttggcctcagctcctgggttaacttctctcatgttgggttggacagcttacgcaaagaatcttttgaatgcatattgcctaacttctcgattcaaaactcactacacaggtgtgccatcggctagaacaggagggaagncgtgtgctatacaagagaggttaagtgcgcgtaacaaaaggcttgtaggactgtatgcgtcctttgaaatttacgccaagttttgtggttaatgcactagttaagagcatagtctagcgttgataggctgtacatatgtgtcaaaagaacatggagagctgatcggagaagctgtcgatggtttcgtgctgtcatgtcgtctcgtgaaaatagtaaggaaatatgtacttgatttctcgtagtactggtaatgtgatgttctatacctgtttcatatagtaatattcgggcaacatagaaatatgtgtggtagcaaggaagatatgctataagacctggtttatcccgtcaacaacatagtaatgaatagcttgcgtagctggaaaagtgttataagacattagactaggcttgtccaatgtatagagtcgttcatattcgtgttgcatggaagaaagttgggttcttggcatagagttgcatgatatgtaagatgtttgtgcattaataattagctataaaaactctgtgttccaaaaagtggacatagcatgtagcaggcagttttctgtcctgtgcacaaaaagttaaacaagttgttaaatatgttcga

SEQ ID NO: 594696 - DNA, 668 bp, Homo sapiens
tgtggggttaaaaatatggttgtccctttaaaaagggaaatattttcccccttggttggctaaatatatactgggggagtaatacaccctgtaagtgttgtccccaatatggtgtcatcattgaagggtgtaaaaaagcgaggtggccattgtatatcgctgggtggtgtaaagggccagggcctctaccaaccattgttggccactagacttgcttgttgtcgacccttgggcaatgtccactataactataagggtggcctcagttatcccttctgtaaaaatgggggataaataatatactgaccctacctacaaaggaggacagtattgagagggcatatagactaagtggctttttaacaaaggcttttgggagatccttcagcaccagagaatttctcaacagacctgaggttttttttaataaatagggaattgtcccccaatgaacttgatacgtccgtgttggcccccagttttgcttgactcctctaaaaaacaaaaaaaaaaaaaaaaaaaaaaaaaaaacaaatcgtccgcggcgccaattatcagggtggtgtcgcgacaagaatagttaaaaaaaatgacacgtggataaaactagtataattcacacaccacatttcttaataaacgaggtaataactcagcgactacacaag

SEQ ID NO: 594697 - DNA, 619 bp, Homo sapiens
gaatggtattcgaggtacacgtgaggccaacagaagctggctggttgagcccaaagggtccctcgaggtcgaactgcaggcaccaccctgtaaaccagcctgaagctggagtggtctggagaaccatctctagactacaagacttctgctggagatcgaaaacagagctcaagtggaaaccagttactatggatctcaaaaatcatcgtcccaatgacacggaatcctccaaatgactctccttcaactgctccgggaagcaggagtcatatgacattccacaacgtcacgcagtgtactcaagcactccaaagagcaaggtcagtcactgaacactagcaagaccgagattatgagatggcatgtgcgagctaacgctccttgtcacacagtttgaagtatgcagtaggtgcgccaaacgatgtaaggccccatgggaacatggcatcaaccacgttctttacatgtgaccagttgggcacaacggagaattactgcacgtagtgaaggaccgttccgcggaagtgcacgccccttgcatccggaatggacgggccgaaagaacacattcaaacaggcacgcgatgactgcaaggatgtgcaaccgcaattatattgc

SEQ ID NO: 594698 - DNA, 430 bp, Homo sapiens
  misc_feature (61)..(61): n is a, c, g, or t
gagactcacacttcttctttctcatcagggaaggaaagcccccctgtaagcgatactcagnatgagggcgatgagcccatgccgatccccgaggaccttcccaccacctcgggaggacagcaaagctccaagagtgacagagtcgtggataacctgaggaccatggatgctgatgagggtcaagacatgtcccaagtttcaggtgagaccttatgagatagctgtgtgggaagttcatgagaaaagcttccctggggccggaagtcacagtgcttggtatgctcatgggggaggaataggggctattctgcaaaagaaaagaccatgatggaatttgcctgagtgtttccttcacctgttacaaattatctcactttgagctgaacagaaagcctccaagatgaaattagttttactgttaaacttcagg

SEQ ID NO: 594699 - DNA, 207 bp, Homo sapiens
cacccaggcgcacttctcccaggaagcagactgacctcttgctcttcagtaatcgaggaaagcccaaagcactctccatcacctccctgatatcacgccttcagtctctacatcatcacatgatgggctctaactctgaaggcaggtgtgctcccacagggtcaagccctgaacattggacccagaagtgcgcctgggtgcggctat

SEQ ID NO: 594700 - DNA, 324 bp, Homo sapiens
ctgacttcgaggatttccaggcgcttgttgggtaggtacagagaagcttcaagctctgagggaaagggcctccttcctaaatttcctgtcctctttcagctcctgaccagttgcagtcccttctagtcaatgacatgaattttagcttttgtgggggactgtaaagtttgggcttgctaattcttgtccctaggtgttttgttcaccattataatgaattaagtgagcataggtgatcccatgtaactgcctagaaacaacactgtagtaaaataatgctttgaaatttgaacctttgtgccctatcacccaacaagcgcctgg

SEQ ID NO: 594701 - DNA, 739 bp, Homo sapiens
  misc_feature (236)..(236): n is a, c, g, or t
ccctgtagatcaagtctcgcacccccagggcgctagtactcgcgttggatccggtgctccatcctggcctcactggccccttcccacaagatgtggattagccaccggagttcagcgagtcgggcccctccctcgtccccccgccaatgctttttaaccgggactcctcccagatgcgtagcctttgctgcctgggtttattgaggatagaaatttgcccctggccaatgcaccanacctcatgctagcctccccgaaactggattagccttcctgtaaagaaattgtccctgaagcttgtatctgatatcagccactggattgtagaacattgttgctgattttgaccctgtattgaagttaactgttccccctggtattaacgtgtccgggctgagtgttctgggatttctctagaggctggccagaaccccttgtgtttgtcttgccgggtctgtccgggttggaaagtcccagccctaggaccccgtgttcccttcttagctgatgtctttggcccagcaccccctgggctgttacttgctttgagttgggagcggtttgcctttacccccgtaaatgtattcattcttcatttatgtaaggttttttttgtaccccattctcgattctttgaagagatgaccaccaattttggttttctactgttatctgaggaccttaggcccccgccacccgtccttgtgtaaggcaaaattaaagtgctgccgtaacccta

SEQ ID NO: 594702 - DNA, 907 bp, Homo sapiens
gcgtcgctcagcgtgaagggcctaccttctgggacaaggatggacgccaggatgcgcgagattcgagcgcttacagcttctgactgcaagccccgatactctgaggctggaatccgaggctgcggcgggtccgggagccatgcgagtcggcggcgtgagcgctgggtaggccgatccttgttccccagcagtcgtagctgtgcctggcgggctatcctaggcagacactaaccgacgatgaggacggggtagcttgagtttggcctatatccacgtgacagtagtgaaatgacagtgggcatgtcctatgtgaatgcgcatgacatcttccgaatctacgtgaatgggaaaaaagagtagccggcgggagtcgaccgcccaatccgtgtagctctatggaggcgtcccccgctaagtatgggtggcgtccccgaatgtggatctgcgatgggctggctatagggccttgttggtgagtgaaccctgttaccaagttgcacgctgtcctggccacgcattacgacctttgtgtgtgatgcgtactagccggaggcgtactaggggcttgactaccagggggcgtcgatcggaaggctcgcagttctgtagtcccattcggagcagcgtgtgtgaaggggcttctcggctcaagccgctggtctccgggaaggtgaccaagcgggaggacttcggtgtgggccagcgcatggtgaccttaggggtccactcacggaaacgttggacgcccgaccgtcctccctcttgttgccatggtgagggccccagcccatgtgggcgcagcgcgtgagaaattcagagtacttgggttccaatcggagggaatccggaggtggtgagtttcctgaaagacccgttgggcgagagttgtgccaggtgggcctttagc

SEQ ID NO: 594703 - DNA, 660 bp, Homo sapiens
gaactggtgtgctgttacctgtcgagggtactggcagatcagcgtggacagcatcaccatgagacggagaggccatctgctgtgcctgaggtgtgcaggcaatttgttgacacctggaacctctctgctgaccggcccaaccagccccattgccaacatccagagcgacatcggagccagcgagaactcagatggcgacatggtggtcaggctggtaacgcatcagcaggcgtgcctgacatcggtttcacacaatcaatggagtccagtacccccgttgccacccagtggctaacatcctgcagagggaaggggagctgcatcaggtggcttccagggcatgaacctccccaacggaattctgggggagccttgggaacctgggtgatgtctttcctccggccaagtgtggagaaaataggtcctaaaaaattgtatacagacaacccttttatttccaaccaaaggtgtgccgagagaagagagagagaaaatagttataagaaaaattgtatacagacaagcttttgtttccaaccaacgtgtatctagaaaagagttaggccgacttattttatacatagcatcagtgaatagtaatgaggggtcggacatttcaaaatcctgttgcctatattatgtgaatccagtgtgaagaga

SEQ ID NO: 594704 - DNA, 662 bp, Homo sapiens
cctgccagatacttagtatgatgaaaacgtgtgtcagcccggtgcgctttctattacatttgcctaccatcttaggacgatggcagaaccttacatatacagggagctacgatgagccagagtaatatacataaaccaccagaaatcatcctctcctttctaagacacaacaaaatcacacatatcatctttgtcaagggcgtaaatatatcattcattacccccattaaattttggtagaaaaattaccacattaaatatatgaagtaacgtagataggatatgctgaaatagaagtagggcatattagcaaaatattcttaatttgtggcctcgattctttattactacatattacccaagttatcttaagatgtctgtaacttaacctttaattaaagttttgtcaatctttgtagacatagtggttgtggaacaggaaaaaaccatatggggactatagtgcaacctatatgggtaaaaacaccatttgctcagtgaagaacgtaaataaataaaattaaaattacagaaacatgtaacaggccttacccatggaaagcggtcttccttgtcaacgataatactgttcaggggctcttctgatcccgaatactggaggaacctccaacatgttaaacgacagcaacggcttgcccgct

SEQ ID NO: 594705 - DNA, 280 bp, Homo sapiens
aaaagcagcacaagatccggccggggactctttcccctctttccggaacataactaggttttgtatgtgctctgagttcctagtttaactgtcttggctgagaacccacagacaaggactagacttttcataccatgcgagagcccactgagacctgcttgtttattttgggcataattgctagacaaaaaggtccgcaaaggaacctgccaggacccagggccgtgtgcccaaggtttccaggtcattctaggtttctcttcacaatttccaaaattgt

SEQ ID NO: 594706 - DNA, 129 bp, Homo sapiens
ttctatggtggtgagcagagcattctcttatacaactcaacatcttgtgtcagatttgaactcttcaatctcttgcactccaagcttgtaaatgatagtgaagcgtgcataagtatgcccgcaatcgaa

SEQ ID NO: 594707 - DNA, 718 bp, Homo sapiens
gcagggggtgggccgggggccctggtggccctgggatggggaaccgctggtggttccgctggaggtttcggcagtggcatcctggggccggggtctgcggcctgtggactgtgtggcctggggcctgatggccgtggagctcgcggaggcaatggcctgatggataaggagtggatgccctgtcaccaagttgggcctgcttggtcaaggacatgaagatcaagtcccgtggaggagatctatctcttctccctgcctattaaggaatcagagatcattgatttcttccttgggggcctctctcaaggatgcagggttgtgacagattatgccagttgcagaagcagaccctgtgccggacatggcaccaggttcaaggcattttgttgctatcggggactacaattggccacgtcggtcatgggtagtaagtgctccaatggaggtgtgcacctgcatcctgtgggggccatcatccgtgggccaagctctccatcgtccccgtgccgcagagggctactgggggggaaccaagatcgtgcaaagccccgaagtgtccctttgcaaggtgaacaggcctgtgggctctgtgctggtacgcctcatccctgaaacaggggcactgggcatcgtctccggactgtggctagaaggtgtcatgatggtggtatcgataatgtaacctcagccgggttgcttgcacctggaattcgcaggc

SEQ ID NO: 594708 - DNA, 910 bp, Homo sapiens
tgaggtgtatgtcccgctgcgtttgtggttgatgatcgctgttactgttggcggcttttttcgtatggtgacgggaatctgccatgtgaccgtcccgtggtggccgcggtgtatcattcatgggttgctccctgagttgtcggtcctattcctgggtggaacgcgcaatttctgttgcagtcttaaagtttccgagtccggtcccccaacttgccggcttttcccttccccggctgtttggtcgtctcggcccccctgcgccatagcactagtggtctgcacaggctgtcaggggcgccaattccacaggcgcgggcatgccgaaagtgttattggtgccgccacacggccccgggcgtttttgccggtgggtgtcccccacaaaccgcgccgcctcttttgtgcaacccccccctcgggggccttaaaaaggtcccccgccaccttgttggttcacggcaactcgaacacccaggtcatgttcccacagggctttctgccagccgtttctgcgcactcattgttccaggccacatacgcccttctacacatgtgtcagcccggccgttggcccctggacaatagtgcggtgtccctgctcgggcggatggcgcccctacagcgaccgtgggtgcccggtggcttccccgcgtacgccaggtgccccaccaccgggtgagggcggcgacggtttccatggtacacaggcttccgagggtgactctctccttaggcgcattccatctcccctggggtaaccccggacacccgtgttggcacgctttttgtaatctcgcctcacgccgtctccgtggggctcgtaccaccccggttggcctcgcaccgtcgtctcccgtccccaacccccttgccgggcccccccctacactcatttccaaaaaacataaca

SEQ ID NO: 594709 - DNA, 327 bp, Homo sapiens
cccttactagatcgatcacacccaggccttaatttaatcaatttgatttcgatggacaacaagcttggtcccaacattatgatacgatttctgctggtctatccctaacttatacggatgccgaagatggccaaaagcgacagatttctgctggtcaagctttgaacatgttagatggtgagcctaacaacgaaacacgtgccaacattatggcgagctacgaaaaatgtgggccagtgccggatatctcaccgctgatacgctcaatcatttagccggtttccgtttaacggaccaaaagctcatggttaccagtcacatcttgga

SEQ ID NO: 594710 - DNA, 760 bp, Homo sapiens
agcggagtctgaacgatgaccaatccaccacacgcacctacatgtgtaggacttccattttactctctattctggttctggggctgggcatagaactgttggagttgagtataaagatcagggcttacagctccgtagagtggagtatttatgggctgagacgatggggttttccagatataggatcatgtcatctgcaaagaaagacaacttgacgttcctctcctcccatatgactacactttatttctttctcttgcctgattgccctggcctgaatttccaatactatgttgaattcatgactcactatattgactataagagttcaacagtgaacaccaagtgataattcagcatcaggaaaatgatgtggcagtgatgctaaagtctaggaataggaatatagaaacgtctgtgagatacctaaacatcagatttgtagaaacagaatatgaatctgactacacagatctgtagtcttctccactccgtgttcctgcagctagagagcatgaactaagcatcctgatgaccactctcagggaccttgagtgactggccggtgcaccatggaacttaaagtatgggtggactggagttcacgcaggatggtgtgtggagtcactgaattccacatttgcgcagagttgtcataggcttaagctcaagcaataggtcgaactggaaggtacacccttatagagacatggcgagatactgcatgacacttagcaccgtcttgaagatctattatatc

SEQ ID NO: 594711 - DNA, 386 bp, Homo sapiens
gtgattcccatgcctgaacttgttgagtatctggattacaggtttggggcactacaccgggctaatacgtgtatttatagtacagacgggctttcatcatgtcggccagactgatctcaaactcctgacctcaaatgattcaccagcctcgatcttccgtgctgggattacatgtgtgaatcaccatgccatgtctgtatagatctaatttaataattaacacttactagaatacgttattcctatactgtgatctattatttacattctttattaactatgcaactgtcatccagtgtgctctatatttgaggtcccttccttctctattcttacttgacatgcatgtcatcttcatgcatgagtctatgcctttaccacatatt

SEQ ID NO: 594712 - DNA, 155 bp, Homo sapiens
atctttaactggctcattttcacactagtgacttccaagtccgttatggtcagcatcctcggtcttcccatctccacgggagcatttccaacctccggccaccaactcaacacattcagggagaagagggcgggtctgggaccacagaaattcct

SEQ ID NO: 594713 - DNA, 684 bp, Homo sapiens
agcgggatgactctaggtgtttgctgttgtgaatagtgctgcaatgaacatatgtgtgcatgctttttctgtgcagaagctctttaattaaaccccatttgtcagtttttgcttttgttgcagttgctttcggcatcttaatctttgctggttcctatgtccagaatggtattgcctaggttggcttcaggggtttttatagttttgggttttacatttattaatccatcctgagttaatttttgtatatggtgtaaggaaggggtccagtttcagtcttctccatatggttagccagttatcccagcaccgttgattgaatagggaatccttttctcattgcttgtttttgtcaggtttgttgaagatcagatagttgtaggtgtgcggcctcatttctgggctctctattctgttccattggtctatgtgtctgcttttgtaccggtaccatgctgttgtggttactgtatccctgtagtatagtttgaagtcaggtggcatgattcctccagctttgttctttttgcattttgcttaggatggccttggctatttgggctctttttaggttccataggattttaaaagttttattaaataaattatggtcctgtgaaaaatgtcctgggaaactaacggggaatagcatcgaatcttgaaatggcttggggacagaatgga

SEQ ID NO: 594714 - DNA, 548 bp, Homo sapiens
  misc_feature (51)..(51): n is a, c, g, or t
  misc_feature (171)..(171): n is a, c, g, or t
actctcatatgtgtgcagtactgcaacgacagacgggcaggcaagcctganacagtctccttgagcactttcccaggttagaaaccctcttcagcctgtgcttcgcacgtttccttcagcgtgccggcattcaagactgcgccacttacgtcccagtgccacgctgcgtgnatcaagtgtcaacgggaaagtatgagttaggcaagcgctttttttttaagctgtaaacgcttcacatgactggccccgtaagaaatggtgggagcttagatgagcctggagcttttcaggaactgaatgaggactctgtacacaaatgtgtactggcagagagtctgcaccagcatcattctctgttgcctcagcatgtccagcactctcgggatgtccagcacctcattgtgttccaggcaggcgatcatgatctccgacaaaatcaccacgccagtccttcctaccccagcactgcagtggaccaacaacggagggttggggctttggggatcacttgtgctatttgtatggcgtcgaacagactggatctcttc

SEQ ID NO: 594715 - DNA, 349 bp, Homo sapiens
ccgaacaggttatggctacgatcctgttacacgccagtgtgggcgatgtgatgagggccctgggtcagaacccgtaccaacgccgaggtgctcaaggtcctgggtaagaacaaccgtgatgagatgaatgtgaaggtgctggactttgagcactttctgcccatgctgcagacagtggccaagaacaaggaccagggcacctatgaggattatgtcgaaggacttcgggtgtttgacaaggaaggaaatggcaccgtcatgggtgctgaaatccggcatgttcttgtcacactgggtgagaagatgacagaggaagaagtagagatgctggtggcagggcatgaggaca

SEQ ID NO: 594716 - DNA, 385 bp, Homo sapiens
gataaccgtctgaaggcagaggttctatccttattcactcttaaagacttagtacagatctggcacattctttttctctttttctttggagacagagtcttactctgtcacccaggtggctcactgcaacctccacctccctggttcaagcgattcccctgcctcagcctcccaactagctgagattataggtgcatgccaccacacctgactaattttcctgtatttttattagagacggggtttcactatgttggccagactggtctcaaactcctgacctcgggcaatccgcccgaatcggccttccaaagtgctgggattacaggcttaagccaccacgcccagcctgcccaagatcttacagcagataagtggtagaatc

SEQ ID NO: 594717 - DNA, 239 bp, Homo sapiens
gaacaatagtcagcagtggtattcacaggcgcgatccactatgatcagcacgggagttttgacctgctccgtttccagaactgggacggttcacccctccttaggcaactggtggtcccccgctcccgggaggtcaccatattgatagccgaacttcagtgcggacaaccgatacggcatagcgcactacagaccacaactcctggactcaagcgatcctccagcctcagccattctta

SEQ ID NO: 594718 - DNA, 149 bp, Homo sapiens
acgcaatgttggtgcttaggcatatacacgtcatgtggatatttgtgtattagatttaactctatcatcttgccatttgtatcggttttgtcctgtctgtaccttgttatctttttctcctttatctgtcttcttttggattagctgaa

SEQ ID NO: 594719 - DNA, 286 bp, Homo sapiens
ctttatatcattttttatatatttttataaaaatgtaaaaaagaaaaaccccgcttttgccttttccctgggttggagttttttggagtgagccctcccgccctaagcgcccattcatgtgggcatttcttgcgagcctcgcagcccccggaagctgtcgacttcatgacaagccttttgtgaactagggaagcccagggggggtactggcttttcttgagtccccctgctagcaaatggcagaacccaagctcaaataaaaataaaataattttccttccttcca

SEQ ID NO: 594720 - DNA, 412 bp, Homo sapiens
ccatgttataatgcacgtgtgggaagcacagggatcggctccttcgtaacgtccacaccagcaaagctcatgcctgtctctgaaatcccggccaagggcatggccagttgctctgaagataggtggtccagctccaggtacacgtgatctttctcagggccacagcttcttccttcgcgtatctccagagtcatccaccaagacaccacatctctagacgccaggtccttcgcatatgggggcgtatcgctccataaccctttcgccttgactgttaatgagaatgcctccctctccacgacatccttcggtaatgacacacacagcaccatatgtgcctgtgggtgtgaacctgcacaaactagaggtcctcacaagaaaggcctgccctggtgctcatgcccgtgctgtc

SEQ ID NO: 594721 - DNA, 163 bp, Homo sapiens
gcacgagggttaagtcactgatacattataaaaattaaaactttttaggtctggcagcggctcacacctgtagtctcattactttgggaggccaatgcgggcatatctcttgagcccagcatttagagaccatcctgggcaacatggccaacccctgtctcta

SEQ ID NO: 594722 - DNA, 116 bp, Homo sapiens
gatgcctctaaccttggattggcctgtgtgtgtgtttgtatggggaatatttatttttatacagttttcactttttgaaaatgccagaagtatgatcgcatcttacgtgattatta

SEQ ID NO: 594723 - DNA, 126 bp, Homo sapiens
atcgttcgcggtcccaggtcccggtctcggtccaggagtctcccccagtgtccaagagggaatccaaatccaggttcggcgatcgaagagttccccccaaagtctcctgaaagaggaaaggagcgg

SEQ ID NO: 594724 - DNA, 298 bp, Homo sapiens
ctgctatgggcttttcttctactttgatctgagcatgtgatcaaagtttcctcaatgtcagaaactggattagccagctacagatgcatgtcatttagtgaaaacccagaatatagtgctgtgtgtaaacaagagtgatctggaggaccacagactagtgaaagaggaggaagccatagctctctcctagtgtatatggaatcccctactttgaaactagtgctgccaatgggacaaacataagccaagcaattgagatgcttctggacctgataatgaagccagaagccacgtcgga

SEQ ID NO: 594725 - DNA, 418 bp, Homo sapiens
ctcaggattgactcatgtggacctgaagggtgacatcccaggaggggcctttgaaatttccaacacccaagcgcctgtgctgaggactccttccatgtggccccaggtgccaccaataaaaatcttacagaaaaaaaaaaaaaaaaaaaaaaaaaaaaaaggaaaaaaaaaaaaaaaaaaaaaaaaaaaaaaaaaaaaaaaaaaaaaaaaaaaaaaaaaaaaaaaaaaaaaaaaaaaaaaaaaaaaaaaaaaaaaaaaaaaaaaaaaaaaaaaaaattttgggcccttttgccccaaggttttttaaatttggaaaatttttttattggggcccaatttggggtcaattgggcaaatcccccttaaggggggggatttaaaaataaaggggccgggttttaaaaacgttgggttggga

SEQ ID NO: 594726 - DNA, 1517 bp, Homo sapiens
attcggaagctgccgaagtagttggagtcttaccggactcgagaacaatctgtcgggggactcgcgttctgagagaaaaggggaaggatgtgcagctggcagttcattccgtcattctagagtgtcgcactatgcgctttacccatgcgtacgtctgtaacgccgtcgaggtaccaaacaataacgtgaaccgcattactcactcctctgagtgctactctaacaatcaacactacaccgatgcatgagtgagaggtagtgggccctgtgcagctggattggggccaattgaggtgccatggtacctcccaggcgatgaaagcggtttgtccttagcaggaacgctgcgataggttaaagggctatgagtgcctggaaaaaaagtgtaggaaccacatcatgacgtggtgcatgagggtctcgcgaagcgagcctatgaggtagtagttcttgcgtggcattaaccagaacctaccctatctaaatgctcttggcattgtgggcccgggctaagcgatcctgcactggggaattcgaagtcggggttcgcccgcacggtcctagtgggccctgacactgcgggggaacccgaccggatcgggaaactaacgggtcccgaaagagcaggctcggggagctaaacaagcttggcagagcccaaacaactatgcggtggggaacaacaacgccatgcacaaacgccaaaggcgagaggggggccgttgcttaacctcggcctttgagctaacacgggcgcatggacctccggggcattatcccattgacttcaaagatttacaccggaataaagcctagttatgccttggacatggcggaggcccactaggcaacttccctcgttagtagattgggattgaaggcgttcacacctcgcggctgattgtacgtacacgccgctaagacggcttccttggaacaccctgggttgatttaccacactccgagggcttggaaaccgaaaacatccaactgggaacccggagggcacccgcggtgcactcggggtttaggttgtgccacaccccatataaagcatatggccatatgatcccagccctgagaccccttcccgtaaatttttggttacacaaggcgtagcaccgagcgtctatgaagccagactacccaagtcctgacactctgagccacgtacccaacagccacgagccttcccctaaccgggcgacagacaatgctgcacacatcccttagagaaacatgggacagagcgaacgatccgggcgagcgataatcaccccccacaggcggagcttataaaccaactgaggcaccacaacgccacaccgagtcggccacaacagtaaagcgtggctatcagcctgcacacgacaccctcccgcgggagacccacacacgccagcaaacgacggggcgcgatagaacacacacccgcgcactcacagccgcgcacacccacgacacgcaacagagagcgtaccatggcacgcaaccaaagcgccacgcgacacgcgaac

SEQ ID NO: 594727 - DNA, 1043 bp, Homo sapiens
  misc_feature (186)..(186): n is a, c, g, or t
gagccatcgttgtaccagttgagatagcatataagaggggctatttcagctgaggaactcagttgagattctctcagatccaagtgatgataccaaaggattttaatgaccccatagcactgaatgaaaatcttacctatctgcaactaataagaacagatgcacttaaggatgaaggaaacagantcatctgtcttctgcctctgaacggataccgaagaacactaggtgctagactatcacaaaagaataccctcaggaagcgtagaggggtcatagtggatccagaaaccaataaacgaaatgtctagtacatggaggtgtgactatgaacgggtcctaattgagttatgaaaccttctacaagtatactggtgtcgcacgcgaggatatgtcgcaatggggggaagcaatatagacacatccacggggagtctagcatggcttccatcgagggatggatccatggtcagatcagcaacagcactggccagtccagtatgatcattccaatgaatagcgttattgactaagggctctatgtcttgatcaggacagttctcttgcatcaagtacgcgagtccgggggatgcatctagactcaacatcaattttgctggacattgtatcttcgctttgactccattcgggtgttcggcacactaggagtcgagtatggaggcagtgggttgtccggcgaatgatgtatttataagcacgttcccgatcatgaactcatgtaacgtaagatttccatacataatcgcagtcgtcagggaactttaaccataagggagcagctccttgattcagagtacccggggaaggaattctgagccccagttgcagcgatctttgagcatagaaaaccttggagaaatatttccctttaaagaagggtttacgccggggtggcattcgttgggaagcctcacggtccaacgggctcctggaaggctcaaagactgaaaggtggcataatccaaccaagataagggccaaaagctgcttacagaacgttacccaggcggttgtttgcccgg

SEQ ID NO: 594728 - DNA, 1348 bp, Homo sapiens
gaaaattaaaaaccacggggctgcgttcttgctctgttatatgtgtggaacaacttccgctgtctcaagatatttgtgttgtccctcttcggtggaatgggagccgctcctgcactctctctcacccacacacgccccgtcgttgtgctgttgtggaagcacgccgctccccccaccatttgttggaatggatagcacaccctctccgcgggggtgtaccgcaggatgattatccccagagcgctgctcttcgctgggggagactttctttattgcgctccttaatatgggtgccccgccgcgccgtggaggctcgctggatggtttgttataccccagctgttgttgtcatgcgaccaccccacctgcggggtgtactcctaccgcgctttatggtggtgctccgcccctcttattgggggccccctatcattctttattaggggtgcgtaacgcacacccccctcagtttattggggaaccccccacagcttcttgtggttacccaccacacaagagagcccacgccgctgctccgcgttgatgacaccccgctgtccccgcggagagtattttctcccctggggggagaaaatatctcgtgtgtgaagaccccccaacacagcgcgcgtctctgcacacacagcgagatagataaatagaggatactccccccgcggagaagagagagtttttgtgcgccacgcgggcctgtagtagtgagaggttgtgtctctccatagagagtcccccacacagagagttttccccctgtgctcacagcgggaggaggttctcccacactgtgtcgtcacacacagggggcacacacccgtgtgtcacacacacacgagaagctcttctctctctctgtgtgtgctctcacactctcctctgatgaccacaggggacacacacttctgtgtatacacaacgtgtcgcggtgtgtcccggtgtgcgacactctgagacacacagccgcacacgacacagagtgtctctctgagagggggtgtcacaccacagagatgtcacacggtgtcacaggggagcacactacaggagagcctttgacacagagagagagagcacaacacttttctctctccctctgcacgtatgaggagagctctcggcacagagagcacacacattttcactggccacccacccccttataccacactaagaaatatgtgtgttttagagagatatcctcgttttgtttagatcttcttagaaaatattctcttttggtggctcttttatagtttttcccgtttttctccctctttatttttttcattttaatattttaggagcaaactgagacaattttataaaccca

SEQ ID NO: 594729 - DNA, 479 bp, Homo sapiens
ccctgccaagaaaagagctacttcctcttgaagtaaatgaagatagtgatgctttctcttaaactttacttataaaaagcatcaaaggggggaatgaagcaggaaatataaaaggaaaaacaagtaaagggaaaacaagtcctttcctgaccagtctgactcactccaaagtcctgctggagctatgataattatctgcaaggccaggcaggggctccgaaggagtgggctccaggagcagggatgagaaaaacaagttctccttatcagtttccctgtttgaaattctctccccataacattattctttgttctgctctcacaactatttttgtaactatttctgcaagtctgtaaagattttgtaagttcttgtttttctttctgtagcatggcaaggtcacaagacatgtttaagtaaggataggctttattctgcaagcaatcaaataataaatctattctgctaagagatcaca

SEQ ID NO: 594730 - DNA, 121 bp, Homo sapiens
cgtctctccagactgtgtcacactggtctctctccacactggcgcagggagttatcttctggaatacattagctctttcaaaagataactccctttgccagtgtggagagagccagtgtgt

SEQ ID NO: 594731 - DNA, 274 bp, Homo sapiens
  misc_feature (44)..(44): n is a, c, g, or t
taatgacgatgatgatgagaaaaagaatctctgaagtctgccanaaatggttaccttgagacagaccctttctggcaaagaccagaggaccccaattgttcatccattaaaccagggccattggagccaccacattcacaggctggttcctggggctggggattccagcaaagtggtaaaattgctatttgtaaaaagcaaacaaacattacaaggcagttatctcattgctgttttgggagaggaacgggaaaagctttttgcttatttgtct

SEQ ID NO: 594732 - DNA, 905 bp, Homo sapiens
gacagcccatgggaggccgaggggcgcggcgtggggtggggagtccccggcaccccaggtccgcgccatggcgcgcaggagggcagcgcgcgggccgcggcggaaggcggccgccctcggacctcccgagcgctccctgaggccttcgcccgaggaggtcggcgccgcgctgaaggcttccggtggagccagggggggctgacgcgcgagtgtctggcccgggcccgggggggttgcccctgcacaggttgggcattgtgggaagtggggccaatttgtgaacccccgggcgtctgcccaggggcctgaatcgtgggccccggcatttgggggctgggttgcgactgttgtggggctgggggccaacaagaattgcgggcggggtcttggttggttgaagccccggtggtgggaatagccagtagtgggctttctccctggaagaaaagcataggtgtgtgtgggcgacagtctgggggttctgcgagcaatacgagactgggttctgtgggagacaagtgttttgggtcgaaagaaacacgctgtttggggaaacaattgggaaggggaagccatttggggcggcttggtttggcctataacttggtgtggggcgagcaaacccctgggtgaacttaatggggggggcccttaagagcaattttcctgggcgtgggaaacggttgtggtgcgacaacctttcgtgccatcggtaaggctttcaagaacgttggtgggaaattttgtgctggggggaaagttaaaggtgggggcagagggttttgtggaacctagacgggctagtctgttggacaagttaggcggctggggaacccggatggtgttgtggaagcagacaagatttttgggaattggcagtgagagccccagaggagagattgact

SEQ ID NO: 594733 - DNA, 347 bp, Homo sapiens
aggaatggacgtggtatctgaattaagttgcccagaatggtccatgttacatctgtagtcctgatctaataattaaggggggcactttcagtctcagaacagtaacagttaggataataaattacatggtgaccctgtctaagaaaccttgacctcagtgattagaatgtattaggcacccaaggcattcatcccgaagatcagagcatgatgcaatgcctgcaacaaagcacagtggagtatgagcagtggcaagcaacagaagccatgcaaacattacgtagcaacatgacgaagtcaagggcacataacataagcagttagggcaactcaacgtgctatcatgg

SEQ ID NO: 594734 - DNA, 848 bp, Homo sapiens
gggccgagacgatggctgaccacaagcactgacagtcgactccacgcgcggcacgctgctgcgacgcgtgctggatacatgcggacccgcgcaccccgcggcgaccccggaagtgctcgggctggagcccggagagccctgcttgaaacggcttcccccaggaagttgagtggccaaacaaggactgatagccagagggcgttcccatggagccagtgtctgtttggcagtatcggtccatattcgaggccagtgggcgacttggaggaacagactacctcggacgcgtgctgaagaacatcctactaacgtgccccagaatcttccatcctgatgcctgagtcgggtagtgaaggccagtgccagcaagcgcgcaggcggtccaactcctccaggacgagagagagcagttgcggcagccgtggagctgcgaagcttcctgagctcgagcgcccgctcagaaccctggactccaggtctgctgtgcccctggcaggaggaaacagaggctgagactgtcagtgtttcagcagggagtggaccagtgggctgtctctctcccaagagcctcaggggaatgctgatgcctcttccctcaccagatccctcaagctgaaccttttgccaacacctcttcagccagcagtcagtgcagaggcctggcttggcccggagacctccagaccgaccgagctgtagacgtggggtgcctgtttgcggggatctgcgagatacttccgcgtgctccttccaaacattgtgttggaggaaacccaagccgattctctcagtccattggttgggtcccccgaaggtgtatcacatccctgccttgacgactcaaactg

SEQ ID NO: 594735 - DNA, 120 bp, Homo sapiens
cgacagcatttaagtttgagtctgtattggacaaataagcaccatgcttttcaaataaaagtaatttttaaatcatttgaaaagcatggtgcttatttgtcaatacagactcaacttaaa

SEQ ID NO: 594736 - DNA, 145 bp, Homo sapiens
aacctaattacgcagctgcaacctacgccaagtgcaactatgctgcagctgcagcagtgcagatcttttcacgcagtgcgccaggccaggatctaggccacacctccacagtaacccaagccaccggtcagattctaaacccact

SEQ ID NO: 594737 - DNA, 1064 bp, Homo sapiens
  misc_feature (1064)..(1064): n is a, c, g, or t
ggtggattagattttgaatgatattggataattatggtacttttatgagctgtgagaagggtgtgtagttgataacaagacgtgtcttaatttgcatacttaagcatttaggaatgaactgttatagtgtcttacaatgtctcaaatggtttagcaaaatgtatgtgaggcgtatgtggccaaaatgttacatgaatctacctggttggacatggttgtgcattgtactgttttgtgctatcttctatatgtttgaaaatgtatacttaagtaaacaatattgtcaatttggttgttttgaatgaaagattacataaagagggtgtaaccgggagtggcttgagtgagggcgggggggcaaggaataaggattgtcgacattgggtaatagtgacctatgagagatctttgggccatcatttgttttgtccaagtgggtaaaaagctgggggtgtctgcccgagaagagtggtcggctcatgtcctatgaaagcatggcttttcccccttcctaagaagaccgtgcacagcacggaagagcaacaggggcagtaatccattatacgcgatgatggagaccatgtattgtggagtctcaaacagggcaccgcagtccaccgtacggttctcaaacacagtgttctacggcttgacgaaagactgtggtcacttgccccacggtgttcatgcacagagttcaagaaagagcacacacctatcaagagccaaaagtctctccaacacaggggaaacctccctgtaggccgaaggacacaagaagccggggtgggtggcacctgggtataacccttgggtgtaccctgtctacaaatggcagggtcttgaaaacacataccggacaacggtcccgaaaaccgcaaccactaaggggtaggcatttacacgatgggggaaacagataccggtgtgacgccgcaagtggacagagagacccggcgggtacgcctggaaggagaggaaggtgaagcatatgaccaagctggcagtgtgatatggaacgtgaacacaaaaacgcagagggtctcctatgaggactaatgtgn

SEQ ID NO: 594738 - DNA, 624 bp, Homo sapiens
  misc_feature (624)..(624): n is a, c, g, or t
atggtgctacattggtctggttagaatagatgaagaagggaagaagactagatggtaagagaaagggtaacttgatatttataacccaatgtatatgttaagattagcgagttattggaatacttaggttggtgtagataggctcaattgataaggtgatggaagaacagaatggaaggtcatggtttattgccaaagaactatatatgttagttttggattcgtatctcttgcgaagcacaaggatatctaggcgacaacatgtggataaccagaactattaaggcactgggtagtgttcgtctaataatgacccactatttgagacattgctagtttaggactggacaccactgatgtcaacatgtgtagacgagtgggtagtggtacatccgctatgtccactagcaatggtgatcaagtctcgagctgcattgaatctggggctgcaacgtgaataattactcggcacaagggataacacactcttctgcattattgtccttgggtccactaggttttggagcctatatttcaagacctcttcttttggttcgttgtttacagaccctatttattccatattagttccccgtttatattcctattttattatgatatctn

SEQ ID NO: 594739 - DNA, 1530 bp, Homo sapiens
  misc_feature (819)..(819): n is a, c, g, or t
ctgtgggttgtggtcgttgtgctgcttgtggtcgacccctgggtggtcaggcgcgctgtggtgtggttgcgtccctctcgtatggttgtgttcctgtggggttgcccccgctccctggggggtggctcgccgtccatcgggcgggaagtctgcttctaccgacgggttttgttctcctggccggggtgccgcggtccaccagtgatgttttggggggggtgtccacgatggtgtaagagccgctggttaccgcaggcgccgctccccgtgggttgttcgcgccaatagtcggtgccggtgtaacgatcccaggcggtcctctcagaccagtgtgcccccggagggccccccgggtcccagtgatgtaggagggtgttcacccccccctgttgggttcccgatatgctattgtcgcttgcgtggcccatatggccccgtctccggatggtgtaccccccatggcggtattccgtgatggagagccagtttctgcccactgcgccgacttcgcgggggacggcaaaatcatttgggggggcacacaagagaatgtgttgcgcgccatacgcccagaaaaggtgggacccccaccgagtttttatggcaagggggactctgtctcccagtgtgactgcctgccgcgccccaagatgtgcccctgtttccgcctcgtttagtggcgcgccagcttatggcatataaatagggcgcgcacacccgccgaactgtatccccaccataggagccgctcttcctcgcacagcacggctgaacaggtggttttttctgagtgtaagtacacacgcacgcacgcgcccncacggcttgtgcacagaccacttccgccacggctgctctcctcgagagcgttgtagcacacccgacctcactggcgctcgctggagacccacagctcggctggggctgtctctctcggagacctcttcaccacgagtgcctcgggagtagtgttcaccggagtgtccacaggctctgtcttggtgtctctgtcacagagcagcactcagggagtggaggaagacacgcactctgcgcttgtgtggagaccacgcccgcgtgattcttccacgcccctccggaatggtggacaatgttcacagctcacgcctccacgaaggctctgagacttgtctcccacgttgaataaaggcagcactgagatgccaccacttcgccggagacacccaaagggtctcccccgcgccgcttattggggagattttttcacataccgtcacgagtccaccacaaattcgagggaggcttatactcgagacaccctcgagagagaagaatgggaccacgagaccctctgagtgaatagtcaccaccaccacttcacgggacacccgctctttgaatgtattaataggccacggaaatgttttttgctaccctgagaacccttacctagagtcagccctcaagcccgtccaactccgtttaaccagttaaggagcccaaagtgtttccaatggagttctccgttaaggatctttggagaccccg

SEQ ID NO: 594740 - DNA, 149 bp, Homo sapiens
aacgatctcaggctcttccaacatctgcatgccaccgttccaacatctcatagcgccttccaacatctcatgccccttccaacatctcatctctccttccaacatctcatctctccttccaacctctcgatccctcctctccaacatct

SEQ ID NO: 594741 - DNA, 1079 bp, Homo sapiens
  misc_feature (1)..(1): n is a, c, g, or t
  misc_feature (64)..(64): n is a, c, g, or t
  misc_feature (66)..(66): n is a, c, g, or t
  misc_feature (68)..(68): n is a, c, g, or t
  misc_feature (71)..(71): n is a, c, g, or t
  misc_feature (76)..(76): n is a, c, g, or t
  misc_feature (80)..(81): n is a, c, g, or t
  misc_feature (90)..(90): n is a, c, g, or t
  misc_feature (103)..(103): n is a, c, g, or t
  misc_feature (105)..(105): n is a, c, g, or t
  misc_feature (114)..(114): n is a, c, g, or t
  misc_feature (119)..(119): n is a, c, g, or t
  misc_feature (122)..(122): n is a, c, g, or t
  misc_feature (125)..(125): n is a, c, g, or t
  misc_feature (127)..(127): n is a, c, g, or t
  misc_feature (146)..(146): n is a, c, g, or t
  misc_feature (149)..(152): n is a, c, g, or t
  misc_feature (155)..(155): n is a, c, g, or t
  misc_feature (165)..(165): n is a, c, g, or t
  misc_feature (174)..(174): n is a, c, g, or t
  misc_feature (178)..(178): n is a, c, g, or t
  misc_feature (192)..(192): n is a, c, g, or t
  misc_feature (198)..(198): n is a, c, g, or t
  misc_feature (201)..(201): n is a, c, g, or t
  misc_feature (207)..(207): n is a, c, g, or t
  misc_feature (227)..(228): n is a, c, g, or t
  misc_feature (231)..(231): n is a, c, g, or t
  misc_feature (235)..(235): n is a, c, g, or t
  misc_feature (266)..(266): n is a, c, g, or t
  misc_feature (271)..(272): n is a, c, g, or t
  misc_feature (309)..(309): n is a, c, g, or t
  misc_feature (469)..(469): n is a, c, g, or t
  misc_feature (575)..(575): n is a, c, g, or t
  misc_feature (579)..(579): n is a, c, g, or t
nggcgggaacaggccgcgctggacctgtacccctacgacgccgggacggacagcgggcggcacngncnccnccccncaanncgccaccancccgcaggacacngngaccgaganaacgnccnccncncccagccacccggccaacnccnnnnacnacccgcggcngaaggcccngccncccatcgccagggngacacngcngcggcngcgacagagccccagggccnncancccncccgcccccaggccggcccagcagggacaangaganngtagacagcgcctcagttccagaaacgccgctggacngcgaggtctccctgtggtcgtcctggggactgtgcggaggccactgtgggaggctcgggaccaagagcagaactcgctacgtccgggtccagcccgccaacaacgggagcccctgccccgagctcgaagaagaggcgtgagtgcggtccctgataactgncggtcgtaaaaccagaagccccgcagcccctggggccccccggagccatggggtgtcgggggctcctgtgcaggctcatgctgcaggcggccgagggcacaggggnttangcgctgctcctgaccgcggtgaggccgccccgaccatctctgcactgaagggccctctggtggccggcacgggcattgggaaacagcctcctcctttcccaaccttgcttcttaggggcccccgtgtcccgtctgctctcagcctcctcctcctgcaggatacaagtcataccccaaggtctcccagctacgtctaacatcatgtctccttataagttattgctgctccaggagattgtccttcatcgtccaggggccttggttcccacgtggttgcaagatacctcagacctggttgctctaggctgtgctgagcccactctcccgagggacgcatccaagcggtgggccacttgagaatgtgaatacactggggcggcattcggaaagcgtcaagtgtatcccatggtaatggatctctcagccgtactgaatacagacctatcttctgtggctcacaacaataacacacacaaccacaacaccaacaacaacacacc

SEQ ID NO: 594742 - DNA, 724 bp, Homo sapiens
tccgacccggggaaggtcgctgtggacaggtcagagttgggaagagcggtcagccccgcgcacgcaccgcagcagagcccattactcctccatttctcccacgtcctatctgcctctcgctggaggccaggccgtgaagcatcgaagacaggaggaactggagcctcattggccggcccggggacgccggacctcgggcttcaaataggagctccgtggctctggctgggacccgcaccgctgccggccgtgccagaccatctctgcactgaagggccctctggtggccggcacgggcattgggaaacagcctcctcctttcccaaccttgcttcttaggggcccccgtgtcccgtctgctctcagcctcctcctcctgcaggatacaagtcataccccaaggtctcccagctacgtctaacatcatgtctccttataagttattgctgctccaggagattgtccttcatcgtccaggggccttggttcccacgtggttgcaagatacctcagacctggttgctctaggctgtgctgagcccactctcccgagggacgcatccaagcggtgggccacttgagaatgtgaatacactggggcggcattcggaaagcgtcaagtgtatcccatggtaatggatctctcagccgtactgaatacagacctatcttctgtggctcacaacaataacacacacaaccacaacaccaacaacaacacacc

SEQ ID NO: 594743 - DNA, 395 bp, Homo sapiens
  misc_feature (10)..(10): n is a, c, g, or t
  misc_feature (22)..(22): n is a, c, g, or t
  misc_feature (57)..(57): n is a, c, g, or t
  misc_feature (72)..(72): n is a, c, g, or t
  misc_feature (91)..(91): n is a, c, g, or t
  misc_feature (122)..(122): n is a, c, g, or t
  misc_feature (366)..(367): n is a, c, g, or t
agaaatagcnagaaatgttggnccccttaattaaaaccccgggtggtttcccttaanacctattcctgtttnactttgccatatgttaagnaaatagttcctggcctgggtgtggtgccccnatgcttgtaatccccagcactttgggaggccgaagcaggtggatcatgaggtcaggagatcaagaccatccctggcccaacatggtgaaaccctgtgtctactaaaaatacaaaagttagctgggcgtggtggcatgtgcctgtaatcccagctactcaggaggctgaggcgggagaatcgcttgaagctgggaggcggaggttgcagtgagccgagatcacaccactgcactccagcctgggnnacagagcgagactgtctcaaaaaaaaaa

SEQ ID NO: 594744 - DNA, 194 bp, Homo sapiens
  misc_feature (36)..(36): n is a, c, g, or t
  misc_feature (113)..(113): n is a, c, g, or t
tgagtcttacccccgctggccaatggcaggacaatngcgagactacaccaagggttggatgggctgtctgagcgctgtgcccagtacaagaaggacggagctgacttcgccangtggcggttgtgtgctgaagattggggaacacacccctcaggcctcgcgatcatggaaaatgccaatgttctggcccgtta

SEQ ID NO: 594745 - DNA, 124 bp, Homo sapiens
  misc_feature (5)..(5): n is a, c, g, or t
  misc_feature (67)..(67): n is a, c, g, or t
agctngacagatcgcggtttgttaaaaaatggggacaaaccatacatgggggaaatcggcaggttcnataagggcaaggtgaaagaacgggacgcaggagaagaacaccctgcgcgaccaaagg

SEQ ID NO: 594746 - DNA, 188 bp, Homo sapiens
tccagatggcctgaagtaactgaagatccacaaaagaagtaaaaacagccttaactgatgacattccaccattgtgatttgttcctgccccaccctaactgatcaatgtactttgtaacctccccacacccctgctccccactgccgctgctgcctcaataaatctgctgataagctgccaaaaaaaa

SEQ ID NO: 594747 - DNA, 352 bp, Homo sapiens
  misc_feature (290)..(290): n is a, c, g, or t
ttttagagacagggtctttctctgttgcccaggttggagtgcagtgggttcaccagtttgcccaggttggtcttgaactcctggcctcaagcaatcctcccaccttggcctcccaaagtgctgggattacaggcatgagccaccgtgccaagccacgcctggctaattttttaaaattattttttgcagagacagagtttcactatgttgcccaggctggtcttgaactccttggcctcaagtgatcctcccacctcagcctcccaaagcattggggttacaggcgtganacctgcacctggccctgttttcatggcttttatttcctttcatcccacacatttgtcttgca

SEQ ID NO: 594748 - DNA, 275 bp, Homo sapiens
cccgaatacggactttcgagaaagccttacctgttagctaaggaggaggcctactcgggattggggtgatgtcgagccctggagtaaaggcctcccctgcgaacacaggacaggcctgctgacagggctgagtctagcttggcagagaccaagatatttgttcccgcgccactggggaatctgaggggtgatggaagagaagaaacctggagtgaaaggagcagagttgcaaattaacaactcgcaaatgaggcgcaaataaaatgcagatgagt

SEQ ID NO: 594749 - DNA, 268 bp, Homo sapiens
gtagttttctgactaagtaatagttatagtatgtgaggagaatatagttaaatggttaattttaatgagtataagtgattttatctttaattacacacagaatcccctctgttctgccccaaatagcacaattaacaggtatatatgtttagcttcaggtcagtgaacagaggttcttctctgggaggttattaccactagtttatgtcccccggtcgacgcggccgcgaatttaatagtagtagtcgtagtagtagtaggcggccgc

SEQ ID NO: 594750 - DNA, 955 bp, Homo sapiens
agcggacttcagattctcggagagaagaggcgggagtggacctggtcagccctaccccactgaccccaccggacccaggcgcgtgctccgccacagccatcagcccctgcaccctgcatgcggcgcggcgaggcgaggcgatggccaaggtgtcaggtgctgaacgtggcggtcctggagaacccgagccctttccacagctcccttccggttcgacgatcatgcttcgagtgcagtgaagccctggctggacgacctggacgtggaagatcatctactgttcggctcggctgacactgacgcgcctctgatcagatcctagactcggctgctggtgggccctgtgccagacagggagacacactgtctgatctttcaggccgacgcccccaagcgatccctcatcccagagacctgatgccgtgggtgtgactgtggtcctcatcacactgcacctacgcatggaccaggagttcatccgagtgggctacatacgtcaagaaccgagtacctcaaccctgagctgcgtgagaacccgcccatgaagcccgacttgctcccagcgtccagcggaaacatcattggactcggaaccccacgggtgaccccgcattcgatattccacactggccgacatacccaccaatgagacacgggactcgacacggcccatacgacgactccagagacaaccactccactgaggcctgacggcacttcccaaaagttccaaaacagtagcaacatcccgcaaatgcaaacggggcgctctgacgtgtgcataactcgttggagcactcggactcaccacttggaggccagtcgcgtgacccgtatgagcaatcacttagcacatggggacacactacgaattcttagaacttagcgaagggtgacatctcccacgaacgattggaccccaatacgcgactgcgcctgtgagaagatacgaagg

SEQ ID NO: 594751 - DNA, 996 bp, Homo sapiens
taccataaatagcaaatctttccattcaggagcacatggcagactcactgaaaagtgcatgacaataaatgctgatttatcgcatctgttctatattgaaattttattatttgggtttagtattttacagggtatttaaaaatgtatattgtctcttttgattcctttaagctccttgtgagaagctggatgaaagcacataaaaggataacaacacataaaaaattacagtgttttaaaaaatgaaaaatataatatgtatactgtcttagaaattctagaaagctcagaacttttgaggaaatgtgaattaattatggagattaagcagctctattttttcctgcagaacattttactatgggaagttagttgattatttataagacacttgtaaattgtcttatttgattaaaatttaatatgtttatcgtagagattttagaaattgtacaattataaataataaaatgcattccacgtttaatctgattatcaaaaataccattactaatatcagaaacattactattagtcttcctttggtacaaaaacttaaagttatgatgtgtcttgacatgtgctttgacatttgatactaaactatggacaggggaacatagggaggagaatcataagcccgaccgtcgcggccccaatattcagggaacccggtcccactacatgtaacgcgcccggaacaattcaacaaagagaggcccagggcgcacaccctgcacaaacccccgtgattggtacaagagcaaaccagagagcgaaccatacccacacaccaccaccgggcggcatcacagagcacacccacgcaggaacgatatagttagaccttcctgtctctctccgccgaacctgtcttaatgcctgccaccagccacagacggaccaaggctcaaacatccaccacgacaaacgacgacaacgacgcacgcagaacgcccgccacagccacacaaccccgccgaaccaccagcaaca

SEQ ID NO: 594752 - DNA, 1298 bp, Homo sapiens
ggtgacgggcgggcgcgggcgtcgcgagctgagggagtaaggaggctcccaggaaccggagctggtgacccggccgaggtccatccagatcccagagtagccagagtgaccccatcgaccgtgtcagtgcatgggggagatggagcaatcgtgtcgtctgggaagctggagctagcttcgaagaaagcaagattgctacgatgccaggaagagcctgtagctgactgtgactactggacagaggtaggtgtcttggccttacaggtgtgtgggacgacgtccactatgctgggacgtcggagcggaacagttcaaggtgcgaacacactgtgggcactaagaatttgactgctcaatggtcgcttggggtccaccttgaattcctacagcctgtcttgcgctaatgttgctctcggacaatgcatcggggcaacgcctgaatgcggtcgttggtgaatcaaggctaagagcgcatctcaagatcgaaacgagttggcatcgccgcataccgctagaattgttggcattcccttctcttagtgtgttccatttggacggcattgttggcccatattgccacgccaattttcagaggtggcaaactctatgtgcgagtgggtactgggttggaggcgacagagcgcttcaggcaactcagagcgattagtttggtttccactattgtcaactagaggcctgcaaatagttcgccccggtttgaagggggtcgaaaacttaggattcaacacaggggtccacaggagccagaggagaagaccccatatagacattggacattgcaaagagaaccaacgttggactaaatttccatcatttcgacattggctttgaccctggcgtgttacacgttgcgaatttggacccaggcccaacgtagttaagggttggacccccaatgagataccgaggagagagagaaatccagcccgaatcagggatgatttgccccctaagatttcggtagaaaccacaacttttgcagcgaacccgttgggtgcggtccaatggtcaacgagtaaaacaggcaaccgttgtggcgaaacttacactgagcgttggcgtcggaaccaatcaacgagggagtgttagacactttgtcacattggcacggcccacggtgtaggtctggattgtattcattccccattgtagcatttccccaaatatctttgcattctccgaatttatctaccgagtgtgcggaccccatggattagcacgatgagcacaaggttggacacaataagtgtatcgaatgcgacggaaccatgcttagg

SEQ ID NO: 594753 - DNA, 195 bp, Homo sapiens
tctaaaccagtcacttgtacccctgataagtggtgattgacaggcgcccccatggtgagatcttgtggcctggacaggcgaccagtggtcctcagtgcagctgtcagtatgttctaacttgtgcagcattgtgctttttacgatagccggacaggagtcatattctggggccttggcactcgatcctggattgtt

SEQ ID NO: 594754 - DNA, 2175 bp, Homo sapiens
acagtctccactgaaaggctaaatgggaggatcttcccccgtgacctcaaaagctattgtggatgctgatggaagaatttatattcggaactggcagggtggcatcctgtctgggggctttgagaagaacccgaaaccaattttcactgagggcaagaaccagctggagattcagaatctacaggaagactgggatcactttgagcctctgttgagttcccttctgaggaggatgccagaattagagactctggagatcatgaagttggtgaactgcccagagaccttcacaccagacatgaggtgcatcatgggcgagtctcctgcagtgcagggctactttgtcctggcaggaatgaactctgctggcctttcatttggtggaggagccggaaagtaccttgccgaatggatggtacatggttatccctcagaaaacgtttgggaattggacctgaaacgttttggagccctccagagcagccgcacctttctgcgccaccgggccatagaagtcatgcctttgatgtatgatctgaaggttccccgctgggacttccagaccggtaggcagttacgcacctctcctctctacgaccggctggatgcacagggagccaggtggatggagaaacatggatttgagaggccaaagtactttgttccccccgacaaggacctcctggcattggagcagagcaagactttctataagccagattggtttgacatcgtggagtctgaagtcaagtgctgtaaggaagctgtgtgtgtcattgacatgtcctctttcacaaagtttgagataacatccactggggatcaggcattagaagttctacagtacctcttctccagtgacctggatgtgcctgtgggccacattgtgcatactggcatgctcaacgagggtggagggtatgaaaatgactgcagcatagcacgactgaacaagcgcagtttcttcatgatctctccaaccgaccagcaggtccactgttgggcctggcttaagaaacacatgccgaaagacagcaacctgctcctggaggacgtcacctggaagtacacagccctcaatctgattggccctcgagctgtggatgtgctgtctgagttgtcctatgcccctatgactccagaccacttcccaagcctcttttgcaaggagatgagcgtgggctatgcaaaggggatccgggtgatgagcatgacgcacacaggagagccaggattcatgctctacatccccatagagggcatggatttcattggtcgcgatgccctcctgcagcagaagcagaatggagtgtataaacgcctcaccatgttcatcctggacgaccatgattcagacctagacctttggccttggtggggagagcccatttaccggaatgggcagtatgttggcaagaccaccagcagtgcctacagctacagcctggagcgccacgtttgcctgggctttgtgcacaatttttctgaggacacgggggaagagcaagtggtgacagcagatttcatcaaccggggagagtatgagattgacatcgcgggataccgcttccaggccaaggccaagctctaccctgtcgcctccctcttcacccagaagcgccgaaaggatgacatggagctgagtgacttccttgcccttccacctcctcctcctaatattcactctgggctcttcttcccttcccacccctcactcagctgctcgtggtggcaggaggtatgtctgacaggacagaagcaagctccccatcatcttgtcctagagtgggcgtcaccttggagcttctcttccttccgcctctgttcctcttctggagcctttgcctcccatctcttatctccttgatataattttgaacttgacctactttaaacttttttgctctgctgtgctgtgggctggcactcgatacctctggcaagaggatgatcatctacctcactgataagaggcatcgcatggacgttctctggtctgtagtggagacaagcagttaacctagcaccatcctcatcctccctgcagaagccattagcagacctttgggccagggcagcctccctataattttcttcatctcttgctaatctctataataaggttgctttttctttcttagttgagtaaacaagtaagccacagtgtttgaaagg

SEQ ID NO: 594755 - DNA, 777 bp, Homo sapiens
  misc_feature (503)..(503): n is a, c, g, or t
  misc_feature (510)..(510): n is a, c, g, or t
  misc_feature (566)..(566): n is a, c, g, or t
  misc_feature (589)..(589): n is a, c, g, or t
  misc_feature (618)..(618): n is a, c, g, or t
  misc_feature (636)..(636): n is a, c, g, or t
  misc_feature (659)..(659): n is a, c, g, or t
  misc_feature (684)..(684): n is a, c, g, or t
  misc_feature (686)..(686): n is a, c, g, or t
  misc_feature (689)..(689): n is a, c, g, or t
  misc_feature (702)..(702): n is a, c, g, or t
agcgggatgccccgcaggcctggactgatccaccaggagaacttcagtgcatcatgggtcctgctattgctcatcctcttccctggaaatgtgcggtttcacaggatggtaaacatctttccctggaacagagccttgaggatgctatggtgcagtatgatgaccaccatcccagtctgccaaggaatgagtaacttcctgcaatttaggactttcggccctaaaaccagtacagtcctggacacactaagattgttggtcaccctagaagaatggagatctggcggctaccactcacatatactcgtagaacattgattgcaaggtaacttactggctgaagcaggtgatgcattgcttcggtggggctgatgtcgaaaaccttcagcttcccaagacaacactgatcaggcctccaggagcatttctcctgctcagtgtcacagtgccactgcagagcgcaattcctggggcacgtcggacattcagtaaatacgtttatngaatgantaaaacataacacagtaagtaattcatcttaaagtcaaccatttacattacttttnatccctgaatacccttcctctanctgtcaattcagcagtccaagggaaaaancagcttggtcaacattanatctggagctcccacatcatatnttcatagaactaaactaagacatantntanagagaaaatgttncactcctcacgtgacatgttctcttggactggctttccccttcattccatatctctaagtcagttatcctttgag

SEQ ID NO: 594756 - DNA, 212 bp, Homo sapiens
  misc_feature (205)..(205): n is a, c, g, or t
aaagtatggggaaatcacagttttcagacatgagtaatcaaaaacttgacatttttcttgatatccaaatctagatgtctgtatcaaaccagaggtgatggccttggggatggcagtgaagactgttaggaccattagatcagattgttctgaaatagaaatacaggagtggggccctggggcaccgcttaggccagaaggtcanattatta

SEQ ID NO: 594757 - DNA, 490 bp, Homo sapiens
  misc_feature (427)..(427): n is a, c, g, or t
cacgaggcctcgtgccgacgacttcttcaccggcacgcgcgcggccatctgcggcggcacgacaacggtgatcccgtttgcggcgcaggagaagggcggctcgctgaaagcggcggtggccgactaccaccgccgtgccgagggccgggcggtagccgactatggcttccatctgatcgtggccgaccccactcccgaggtgctcaagcacgaactgccggagctgatccaccagggctacacctcgttcaaggtctacatgacgtatgacgacctgaagctgtccgaccgcgaaatgctggacgtgcttgacgtggccaagcaaaacaacgcgctggtgatggtgcatgcggaaaacgccgactgcatttcgtggctgacggagaagctggtgggcgaaggccgcatctcgccgcgcttccacggnctctcgcgcccggctgctgtcgagcgtgaagccacgcaccgcgccatcacctttgccgagctg

SEQ ID NO: 594758 - DNA, 530 bp, Homo sapiens
tgctcgccactgaaccaccaagtgactgctggtttgagtggcctaacccattacggctcaggccctgacagggtgtgtgtgcaccacttcggggtgtgaaagcatgaacagctgcagaacgcgtgagttttctgatgctggctgccgctgccttccggattagggcctgtaacggggagccagacacacaggaccacatgtgcttctgggtaagctggcccatcatagtgggggacataaggtatgggggggcacatacacacttggtatgaacactttggttgtaccgcaatcttacagcacggctgagaggagtggggctttctgtccttgaccgctggattcacataagcaccagtagaggacctggggacttacacactcactgcaggggccttccacttgtgggatctcatggacaaaagggactggttctatatccacggctctatggttctcacccccccaggagtacaaagtgggcccccccagactctgggtacgaactcagcatgcgcaagcacttggag

SEQ ID NO: 594759 - DNA, 946 bp, Homo sapiens
aagcagtggtatcaatgcagagtgcccattacagtcgggtgcctcatcgttcaggtgtcagcagtgacctggagacagtgaatcgacaatgccgtcttctgtctcgtggggcttcctcctgctgtgaggcctgtgtctgacctggtctcctgtactcccctggtctgagagatcctcgcgaggaaatgatggctgtcgccagaatgacagatatctatacctcactcagtgatacatggatgcaaccaataaccttcaaacaagattcaaccttgaaacgctggtctgagattacgactcttcagtccttataccgtcatacatgaactacacacaagggttctcgagaacaaagtcgaccaaagtaaattcttttcttattctacgctccgagatggatgtcggggtcggacattaactagcctcgtgtatgcaagatggcttcgtacctctggggtgacccaaagggccttgaccacttccactcggagtgagcctcccgtgggagggggtcttgtacatcttacaaggacctgcaccggacgcagttcccgtggaggggactccagagaaattccatgaacagggcttattcgaggggagagcatcctgtccggataaaccccatcagaatcaaggtcatgaacatggccagggttcacagacgtgatgccaacccggcgtggaattagagccttgataactcgtcgtacatgacgtgagcacttgaacgcctcagtttgggaatgacatgtttatatcgggacgagaatgctgattagaacgttgtgtaccaaaccttccgaggaatggccgttgcgacggtgactaatctttcggaggggcactagccggataagatgggccaaatgaaaacaagaatcagacggattaatcgttggagaaatggttactcaagggggaatagattggggaattgggccag

SEQ ID NO: 594760 - DNA, 1360 bp, Homo sapiens
tctgaaatggattctcgctctgtcaccaggctggagttgcagtgggcgcgactctcggcacaccttccgcctctcccgggttttaagcgattcttcgtgcttcagcctcccgagttaaaaggcagtgcattcaccacacctgtggtttaatttgtgtaggtttaagataagagagtggggctctcaccagtgtttggccaaactgtggctcttcagaacctcctgtgaccctcaggtgtgatctccgcctgtgtctctcaggcctctctccaagttgcgtgggatttacagggcatttcagccactatattcgcccggctgtggggactcaatatgtgtttccaccacatgtgtgtttgtgttctcacatatatacgcccatgtgtgtaactgtgtcgaaaccccaccgctatatccatgtgacatatattctacaatgagctctctctctccctgttgtatacgcccgtgtggtgtggacaaatatgctgtatatgtggtttatacggcccagaacgctcttctttctccacgccatatataaggctcttcctgttgtcgcccaccaaagaacccccccctctcagctgtgggtctcccctatgaaaagaggtgtctcctggtgtgctctgatgtgtgtgttctataaacacccccatgagaggggacggtgtctcctctattctcccacagagagttccgttgtccggtgagaaatgtgtgtcgtataaccccttttgcccgaggtgctgttgttgtacacaacccccatgttatagacgacaaaggacaaaacatcttcacaagagttgtgtctctccccttttgtggcccacacaaatgttgtgcccaaaccagaccagagcataaaacccaacacgagcacacgacacaaacaaacatcccctgcgggagaggaggacacatcctctgatgatatgagctgtagagcggtggtggtcgctgccggcggaaaacacaccaccgaggctgaggctgagctacatacagacacgaaccaagtgtgggcgccacacacaccagttggttgtggcttactaactgatcgacgagctggttgagttcttccacagctggttgcagcagcacccaccagacgttaggttagttacgctccttttgtgtgtatgtacacaccacagacatgaggtgtggtgtgcaagaacaacatctcatttcttagggcccgtggggtattcctcactccccccatatctataatgaggagcgcgacggacctgcagatataatctactaagtcttcttagtggagtacaattatacaagccccgaatgggtttttacacgcccctgtcggagactttatataatgagcacg

SEQ ID NO: 594761 - DNA, 139 bp, Homo sapiens
ccggcgcaggagcgagcgccgctttccaagtttggagactagactgaaacttttttgggggagggggcaaaggagctggagatccaagaagttggggtgcgggtctggggactctggaaagcttggtttggggtcagga

SEQ ID NO: 594762 - DNA, 267 bp, Homo sapiens
  misc_feature (29)..(29): n is a, c, g, or t
  misc_feature (94)..(94): n is a, c, g, or t
  misc_feature (159)..(159): n is a, c, g, or t
ggtgggggacgtgtcgcgcggccgggtgnttcgggtcggtaccctgggcgcggaagcttgcctcattagtattcgtacccacgaggcggcgcangggccctcggggacagcgagcgtcgggccatggcttatcactcgggctacggagcccacggtcanaggcacagggcccgggcagccccggattccccctcccctctttcgatgacacaagcggtggtttttttccagccagcccgggggataaccagccacagggagcagact

SEQ ID NO: 594763 - DNA, 540 bp, Homo sapiens
  misc_feature (17)..(17): n is a, c, g, or t
  misc_feature (113)..(113): n is a, c, g, or t
  misc_feature (260)..(260): n is a, c, g, or t
taatgttgatagcagantagggtggactatagttaaccatgtattgtctatttcagaatagctggaagacttaaaatgttccttaccacatagaaatgataaatactcaaggngatggataccctaaataccctcacttgaacattacattccgtgcaggtaacaaaatatcacatgtacccacgtaaatatgtacaaatattatgtatctaaaaaaattttttaggccaggcacagtgtcacgcctgtagtcccagcantttggggggccgaggcgggcagattgcgaggtcaggagttggagaccagcctggccagcatggtgaagccctgtctctactggaagtacagaaaaattagccgggcgtggtggcgcacgcctgtaatcctagctactcgggaggctgaggcaggggaattgcttgagcctcccgagtagctaggattaacagcgtgcgccctggaggcggaggttgcagtgagctgagatcggacaactatactccagcctgggcaatagagtgggactccatctcagga

SEQ ID NO: 594764 - DNA, 515 bp, Homo sapiens
agaggaagattttgccaatcagctgaaacaatacaggcaagctaaagaaacctcaaatattgctttagggtcatcattttctaaagaatcaggaaaaaaacagagaatgaaaggagttcagcaaggtattgaacagagagttaaaagttttaatgttggtcgtggacgtggcttgccgaagaaaatcaaacgaaaagaacgtgggggaagaaccaataaagggcctaatgtgttttcagtatcggatgactttcaagagggacctaagaatttatgtataaggaggggaggagctttttcatcttttaatttatttgatggcaaagaaagcattgtgattttaatgatacttctctagtaaatgaaaaattaccagctcagataaaatgagtatcaataacctccaaaaaatagttgttaattagttgtgaaactaatttacagattttgctgactttgaaataaaattgttatgtttgaaagaacctcaaaataaaattgctaagtttaaaagc

SEQ ID NO: 594765 - DNA, 943 bp, Homo sapiens
gcacggggagttatgcatccgctcagtgccatccctagtatgctgtaactagctgccatttcccctcctccttctctactcgaatgacacatacggagtgcctgatgtacctgtactcgccctcgctgtctcccccaccaccctacttgacatcgtgggcatcttcaggcacagtcttgggagtgcctggtgtgctctgacaatcaatgaccatcacaattcataaactcactccaaatcccgaaacctccgcgtttccgcagagacacataaacgccagcatcaggtaccatgaaggcaacgtatgtcctctcgttctaagcagccctctctgcactgttaccgccgctcccatcggggacacagacgggtaggaaatggttggcgttcgacatccactaggtgttatcaggcagaggggttgtcgactagtgacagtctctctcagtggcagtatagcgccccgaatgttacagagtgttagagagcatgggagactccttgtggtctccgccagttgaacttttgggctctttgggccggagataactcgtagttgtgcccaggttctggagcgcaaatggtgcgagttgggagcgctgatgcagactctctgcctccgtgagtacagggtgagatcgtcttcctctgcagacatcccgctctttgggagtgtcacgggtgtggtgccagcgcaatcgtgggttcgttggggcgtccttgggagcctacagattgtgcgggtttcaccgatgtcgttctcgtaaaattctgcatggtctttatcggtcgggtgatccaaccggtccctgtggcactgcaggaccgctggggattgcggcttgcatgcccttgtgctccccctggttcccgttgcgattttttgcgctttcaaagaccccccgttgcgcctactgcgggagggggggcggcccccccctac

SEQ ID NO: 594766 - DNA, 246 bp, Homo sapiens
gcagtcccccatgagaaccctgaccaggtcccactgtgctgtcaaggactttctgggactaatactgggggttttgttatagttttatgaactgtctcaaatgttctcccaaagatgctaaaaacacagcctctccttttagcaagttaaaaggctgggtaggactgcgggagactgcctgcctttcaccattttctccccacttccagtgactgctcttattttgtgtaccacggtgctataacg

SEQ ID NO: 594767 - DNA, 219 bp, Homo sapiens
ggtcgaccttgcccattaagagaggtctatctacatccctctttcccagatgtcttggttaccaattttccagtcatgtaccttccaattccctgaccatccagccaaaccattggctacagcccatgaatcagtatataatcacgtgtctggctatttctccttccaaccaaagtgcacaaccatatgctctgtccagacttctgcccatggggaaga

SEQ ID NO: 594768 - DNA, 365 bp, Homo sapiens
agtgttattggaacctttcgcgctattggtgataagtctcgctcttattcttatctctatactttgtggaacagcatgtagacaaggaggcttgattcagctgccacatattttactatatatggcataatagctatagatatactatatggacatctgatgctttatatacagtttatatatgcatatgattctgaggtcaccatgaatgctggcatgaatacaatagagatgtttcatggatatgatactgtgtatgaagctcgtgacgataatggggatttgcacatattatggacttgtgaacctaatcattgagttactgatagcctcgtaattattgtcgtttggagagatattgattc

SEQ ID NO: 594769 - DNA, 307 bp, Homo sapiens
  misc_feature (147)..(147): n is a, c, g, or t
cacgatgacatgagcaggagaacatcccttctttccatcctctgcccaacttagcaagcagtccctctctccgaccagccactctgcgagtgtggtctcttactgatccccacatccctcgcacagcctgaaaggctgatttccatntttctatcagccaaccttaaaatccaggttgaaaatttccccctttaaagaacagtggggccctgtgtaacccttgggggattccttcttagccggggatcctcttagaagttcaaaccttgcagggcattgcaaagctttgggcacctgcccgtcgttt

SEQ ID NO: 594770 - DNA, 204 bp, Homo sapiens
agagtagcgatctcacctaaaatagagaatatacatgggagtacagcatagcaaacattctacctactgtgtcagatacgatctagttcgggtacgatagtgtcatccagggtataacagttacacagattttggttttgttaggagcacaaaatagtgtaaattattacactgtagctatctctatgcacatcatgtgaccac

SEQ ID NO: 594771 - DNA, 721 bp, Homo sapiens
gcttccccactggtgcggcaccctcgactggtggtctaccctaccctcatggatgccctgtcttgctgcccaattgaggccccccgtggtcgccctggccagagctggccccgatgcatgacacctggccatgccttcctcgccaatgcccccagccctgctcctgtgtgctggagccctgcctcctcccccagcaatggtgctcgtgagccccggcccctagtgcctcctgtctctgtgccactgccaccatctgccctgcacccctgcgaagaacctcgcacctcaccacgccagcccgggaccctgcctggctgccacctgcctctgtgcctcggacccagcacctggtgaaaagactcaaagtaaaccctttaccatccagtgaactggaactcctgttctactgggttaccacggcagcagctacatgccccagaatggggttggagccctgtcaagccctgttgatgctcacccagtctagacccactgacaaagtgtggctccccaatgcacctggaaagtgctcgacaatgatgccacctaggtggggggtgcttgcggcccaatgcagccatgggccccgtgaatgctttggcgggatgtgccgaccacctcccacatcctgcggtctgttgcctgagagcctgtcctctgtacagcccgctgctccagaccgcccaggagtcaatggtaccagcgggttgtccctggccca

SEQ ID NO: 594772 - DNA, 578 bp, Homo sapiens
ggatcggctcacgcagcttcagtgacgctgtgaattcgcttgcaggctcagtatttgtaatgccattggagtattgcagcaatgtggtcctcctgcctctttcaataatattcagacagcaattaacaaagaccagccagctaaccctacagaaagagtatgcccagctattttggcagcactgattgcacgaacagcaaaagacattgatagtaaggatagattccttaacccagttgaaggacatctaacaagcttgcctattacagggcctgcctagctttgctataagctagcacagaagaaaaccatgaacagctgctaccattgtctgaacggaactgtagattaactcagaaggaacggacccattgccttacttgggacgacagattacaaaagcgcactttgcctgactacttgcacagtacacagctgaaagacaagaagtggtaacccatagccagtctcttccagactcatagcatcagtggataccatgtggctgagaaaaagacctgtttgagtgccattaagaattctgcatcagacttagatacaagccttaccaacaattc

SEQ ID NO: 594773 - DNA, 110 bp, Homo sapiens
  misc_feature (82)..(82): n is a, c, g, or t
ccgcgggacacttacccttgttgttgccctagaccaccggcaggtaccgtgccggcttttctgccttaattaaaaaaggccnttaatctgttggttacttacccctgtgg

SEQ ID NO: 594774 - DNA, 897 bp, Homo sapiens
cgcctcctctcgccgctgcgccaggccccacccccgggacgggtcgcgctctccgtccggccgctccccctcgcgggcagctcgcgaccgctgaatgagcccgttgttctctggagactcgcaggcgttttatcaagtgacgaggacgccggccccgcccctccccaccctctcgcccctccttgacgcgccctgcgagccggagcaccgcccgcaccattacccgccggctctggacgtaatccagctgcccggtacctgcccggaagccacgacgtgggagccccggaggcgagctcgcggcgaagcagcccactgcgccgccctcctgtggacagaattgtggttgccgagtagcacagagcgagggagactttactacccgttataaagagaagtgcaggtgatagcaccggggcctcatggactgagcaagcttgttacttgcaagatggtgggaccaagtggcagactgcatacggtacatttacagttcatattactacaggtgttaaaatggagacgcttaaagggcgtgcacacaaaaattgaggggaactacaaggattgtgactaagactagttactgagtacattcaaaggacctaaaagacgtcaaaaaaatgaatcacaagtggcacacagactttgaataggtgagtgatataactggtacaacataccacagaaccaatttacagttcaaagttcgactcctataaagacgatgcgtagtgaagtgtaagggaggttgagagatgaatatagaagagatcaaaaaaaacggaaaagtttacaggggttggatgcccgaggattagagctagggagtatgtggcccaaggttgacagagggagaagcatgtgggcagaacagttcaagacgtgtcaagggat

SEQ ID NO: 594775 - DNA, 901 bp, Homo sapiens
  misc_feature (857)..(857): n is a, c, g, or t
gcgcttgctgtccagactatggaaatgatgttagacaaaaagcaaattcgagcaattttcttattcaagttcacaatgggtcataaagcagcggagacaactcacaacatcagcaacacatttggcccaggaactgctaatgaacgcacagtgcagtggtggttcaagaagtttcacaaaaggagaggagagccttgaagatgaggacgcatagtggccagccatcggaagttgacagtgaccaattgagagcaatcatcgaaggctgatcctcttataactacacctgaagttgctgaagaactcaacattgaccattctacagtcgtctcggcatttgaagcaacattggacacaggtgacaaagcttggtaagtgggtgccttggtgaactaagcgaaaaacaaaaaaatcgtcgtcttgaagtgtcatcttctcttattctacgcaacaacagtgaaccatttctcgatcagattgtgatgtgccatgacaagtggttttatacgacagccagtgacagccagctcaagtggtttggcccagtgacggccccaaagctttcccagagccaaatcttgccccaaatacggccctggtcactggttggggggtctgctgtggtctgtccctacatgttttgatcctgggaacccttctcttggaattggtccgtatctcgttggatgcccaaactacaatctggcgtggcttgcacagaaaggccactcctttcccgaggtgcccccacttgcaccgcctgggaattgcatgggtcgagttgccccccatccggctctccgcattctctctgtattctgacccccgggactctctgcccgtgttgggctttgcanaaagcgctcggtgtgtatgtgcacatctgttctagcttctcttg

SEQ ID NO: 594776 - DNA, 102 bp, Homo sapiens
  misc_feature (9)..(9): n is a, c, g, or t
  misc_feature (54)..(54): n is a, c, g, or t
aattcaagncttctaacgaatgtacggggacaatgggatttgggcctttttganttaaattcctggctcccctgcaaataaagcctttttacacaaaaaaaa

SEQ ID NO: 594777 - DNA, 720 bp, Homo sapiens
  misc_feature (243)..(243): n is a, c, g, or t
  misc_feature (295)..(295): n is a, c, g, or t
gagtttttttttgttttttatttcaaagtgaaaaatctttattaacaacgggtttcaacgaaaaagcaaatgaatacccctaaaaactatggacagctatctcccccagcagcaggcagggaaagggaggcaggaggggtataaccctatagggtgtgtttccctataggaaaagggccgaggtttccctctcttatctccagcctgtgggggccaccgagaagcgcgcctctcattctcagnggaaagtctccaggagtggcagcgtgagaggacagcgagtgttttagacagncacaaagccccgaggcgctatagtgtggatatagaacggggtctccaaatatgtgtgtgtacccttctcataggctgtggttattcaccatgtggggggcgttacagtgggcgtgaggattctcgtgcaaatataggaacattcaccagcggacaaaagagtggaccagctttgaaaggcttacttcattcatttgtggctttcggtgttcctctcgcgagcctccgaagaagtttggcaaaggctttgatttgaaaggagaggcaggttaaacaggcgagcccccaaggcaacaccacactttacagctttaagcacattgagggcgcgcaaatggctgtgaaaatttcagtgccacaggaagaggttctcatgtgtggctcgcgaggcgctcgggggtcgctccaagggggccggggttaact

SEQ ID NO: 594778 - DNA, 263 bp, Homo sapiens
  misc_feature (194)..(194): n is a, c, g, or t
tgggaacatcgcttgagctcaggattttagaccagcctgggcaacatagtgagacctcatctctacaaaaaatttaaaaattagctgggcatggttggcacacacttgttgtcccagctactcagtaagctgaggtgggagaatcgcttgagcccagaaggtcgaggctgcagtgagcttgtcatcactccagnctgggtgatagtgggagaccctgtctcaaaaaataagacacggaaagaatttgggttcctctgggttta

SEQ ID NO: 594779 - DNA, 139 bp, Homo sapiens
agacgatgaagtcgggtattcacaccctagatataaagataccccgtggtcctcccccatcaaggtgaaggtatggggatgtgtactgcagggcccctaagggaggatactacaaaacagccctgggaccaggtcgaca

SEQ ID NO: 594780 - DNA, 108 bp, Homo sapiens
  misc_feature (37)..(37): n is a, c, g, or t
  misc_feature (83)..(83): n is a, c, g, or t
tttacaatataacaacatgtattttcattagatattnattataaaccaataatgcatgtaaactgaatacaatacttcaaatnattctgcacaaagatattacagatc

SEQ ID NO: 594781 - DNA, 414 bp, Homo sapiens
ggtggggggccattgggcggcccaaacttggttggaactcgggcgcttggtttggtttttcttcggaacccatgtccgacaaacccgatatggttgaaatcgagaaattcgataggtcgaacctgagaaggccggagccgcaggagaaaaatccatggctttccaaggaaccgatggaccaggaaaggcaggcagccgaatcgaatggaggcgtgcgcggccattatgcacggaccattcaacaggcatggccttctaatttaacttctttaagcggttaaactttgaaggaggcaagggggttgaaccaggttgcttgcctttccaatcggccaatcaatctgcttgccaggaaaggaaggacctggcttgttgttgaaggaagaagtgggttgaaagaagtgggttggacca

SEQ ID NO: 594782 - DNA, 127 bp, Homo sapiens
caccccggacagagacgtgaagcactgaataaatagatcagaatgactgaaaaagccccagagccacatgtggaggaggatgacgatgatgagctggacagcaagctcaattataagcctccaccac

SEQ ID NO: 594783 - DNA, 290 bp, Homo sapiens
ggcgcccgtgtagcgcgcgtccttctcccggtagagcaggttgtaggcgcagccgggcatcaggcgaccgtcgggcatcgcgtagtgcgtgcagcacttcttgatgcggtcgacctcgaacgtgttcacgtccatgaacgcgtggatgaacacggtcttcaccaggctctcgccgatgtggaggcgctcctcgagcgcgagcgccttgtcctccggatacatgaggaagatcgccttgcgcagcgccgcggggatcttcttcgcatcgggcacctgccccgcgctcgtcc

SEQ ID NO: 594784 - DNA, 777 bp, Homo sapiens
  misc_feature (32)..(32): n is a, c, g, or t
tatatgattcaggtaaaaaatcagtctagttntgcaggtcacaatgttgctgcaattggagtagggaaaggtaactgcgtcgctagtagaatgataggaatggtggtttatagaacagtcactagtctagatgacaaaagaacttcagttctccttagagaagttaggggtaaagaatatctctggtattgaggaggtgaattatttgtacaagatccagggaacagtgatccacttttataagcctaaagttcaggcatctctggcagtcgaagactttcatcattacaggccatgctgagacatcgcagctgagcagacaatgctgacccccagtcatcttgaaatccaggcttggtgacggatagtctgatctagtttaatggagacatggtacgtggtctcgtgcacaaaacaatctgtggatggaaaagcagcaattgctataggagaggatgatgatgatgaagttccatgatcttgtggacgaattttgatgaggcttccaagaatgaggcaaactgaattgagtcaacttctgaagataaacctgaagaagttactgggagctgctattttatattatgactgctttttaagaaattttgtttatggatctgataaaatctagatctctaatatttttaagcccaagccccttggacactgcagctcttttcagtttttgcttatacacaattcattctttgcagctcatttaagccgaagaagcctgggaatcaagtttgacacaaaagattaactaaagttctttgc

SEQ ID NO: 594785 - DNA, 268 bp, Homo sapiens
atcccgagtcacggcttagtacaacctccgacgtcccagcgtcaagtgattctcctacctcagcctcctgagtagctgggattacaagcacctgccaccacacccggctaattttttgtatttttagtagagatggggtttcatcatgttggccaggctggtctcgaactcctgacctcaggcgatccacccacttcccaaagtgcagggattacaggtgtgagccaccacgcccggcctctcaacctatcaacctggtcgacagtct

SEQ ID NO: 594786 - DNA, 942 bp, Homo sapiens
agcgggagctcgtttgcttgaggaaaagaaaaagcttgaaggaagaagtcagtaagttgcgtagtagcagtttggtatccttcaccatatgtagctacagcccccagaactttagtggatgcttgtgcagcctgaactcccaggtgaatcagatagatccgctgtggaaagagcagatgaaggaagagtggattcagacaagtggagacaagcatgatgtctagtacaagaaaatattcatatgttgtctgaagaagaacagcggataatggctggttagaacgaacatgcgaattgaatagaacgaagaaatataacagcggttaaagtacaaggactgagttgtctcagagcatgtctgcagtatcttgaaggcattctgaagaagatagctatcagagattttcaggtgggagattcaggtgctcagtcactcctagaggaagcgccatgacaattatgtgttatgatactgtatagtcgctacgttctatattttctacattcagagtcgtctacctgtccggtggatctcaaaccaggttcaggtgcatcgtagaagaccctgggtacttggagaagtcgtggaagagaatgctgtcacagtccaaatatgaacatgatagatctcaaacgttcccttgggcgaccacaggttgacaggagtgacagccgggaatgatgcaagtaaggaaagtgttaccgtgtgggcgccaattcactgcctgccagtgcgattttggcccgaattggccgcacgtggtaattgagtactgccagagaaaagacaggcccttttttggtgcacaaagctagggggagaataactaaccgcgcccgcgtctttacagcgacagtgggagaataaataccccaaccgcgcggataaagggcaggtcggggttcccgcacccaaatccacatatgtctacggaccgcggg

SEQ ID NO: 594787 - DNA, 630 bp, Homo sapiens
  misc_feature (217)..(217): n is a, c, g, or t
atattaagtctcagtacacttcctgtgccatgttattcagctcactggtttacaaatataggttgtcttgtggttctaggagcccactgtaacaatattgggcagcctttttttttttttttataatggcaacaatggcaaaagccaagaaagtataaggggtccacaagtcctaaacaatggaattcttcaacagggaaaacgagctagctggaanaactggtctgaaaaacacaactggtggtctatgggcatttagtaccttcaaataatgggcttggcagatatgggataccccagttaaattctggcacagtctcaaatttttcatctcttcaatcactagtcaagaaaatattatcaaaaacaacaaatacttccatatgggacgcattttctcaggagtttcctaaacccagtcttattttcctagtcagtaaactattcggtgaacaatatcacggtttccactaaatcacttcacggtgtcacctggtcttggcagcagcacaagcgaacaatattctgcacgagacctcatgcgttcggggcgcaagtccaagtggacctcttccaatatatctattactaaacttcttccactttgtccaaaacattggaaatcattca

SEQ ID NO: 594788 - DNA, 215 bp, Homo sapiens
gaggagcacggctactgctgctctatgcacagcagtcggaccaatgctgtgcagcgcattccggcttggcgccatgctcatgcagagcttccatgacatcattatggactctttcggatgcaacatgcaagggactcatgaaatcagtatttagattcattagacatgagctagttcgataagtaacagatctgacacttgcatacagtcgggat

SEQ ID NO: 594789 - DNA, 343 bp, Homo sapiens
  misc_feature (253)..(253): n is a, c, g, or t
ttcccagccatgctttgcaagatgggctttgcggtacatactagtgaactatcgtgaatccacgggctttggccaggacagcatcctcaccctcccaggcaatgtgggacaccaggatgagaaggatgtccagtttgcagtggaacaaggagcaccaggaggaacacattgatgcaagccatgtggaccttatgggtggatcccatggtggcatcaataccagccacatgattggtcagtaaccagagacctncagggcctgagtggcacgagaacccgtgataaacatagccaccatgtagggcaccactgacatccctgactggtaagaggtggaggctgg

SEQ ID NO: 594790 - DNA, 724 bp, Homo sapiens
gagggtctgggacctcagtgacattgacaaggatgggcacttggatcgagatgagttcgctgtggccatgcacttggtgtaccgagccctggagaaggagcccgggccctcgctgcccgtctcatcacctccagagaagagagtgtgtcctgggccgtcccgtctgctgcagcctccacaaagaagctcgtcagccgtcccacggaggtcagagctcaaagaaggagctgtccccaagaagctcaagcgaaaagcaaagtgaactgggtggtgccgtggagacagatgcgatttgatgagatatcctgaagactgactggactggatggctacgtgagtggccaggaggtgaaggagatcttcatgcactcgggcctcagccagaaccttctagcacacatatgggccctggccgatacgaggcaaacggggaagttaagcaaagaccaattcgcgtagctatgtatttcattcagaagaaggtcagtaaaggcatcgacctcctcaagtcctctcgccggacatggtcccgcttcggagagaggcacgcccggccggacagttcaggctctctcggctccgggagagttacatggcgtgaaggagcttgatgacatcagtcaacgagattgcccagtacaaagagagaactatcactggaaaaagcattcgagaaaaggaagaggatccaacagaaaacaggaggtgaggaattacacaatga

SEQ ID NO: 594791 - DNA, 386 bp, Homo sapiens
tttatagcctcccatggccctctgtagtctcttctaggggtgggatttccttataggggtgcagagccacttgtaccaacagctgtatggcaagaattaagactcaggctggtgcggtggctcacgcctgtaatcccagcactttgggaggttgaggcaggtggatcacctgaggtcaggagttcgacaccagcctggccaatatagtgaaaccctgtctctagtaaaaatacaattagctgggcgtggtggcgggtgcctgtaatccagctactccggaggctgaggcaggagaatcgcttgaacctgggagacagaggttatggtgagtcgagattgcaacattgcactccatcctgggggcaacaagagtgaaactccatctc

SEQ ID NO: 594792 - DNA, 144 bp, Homo sapiens
tgctgcacttcctaatccccattccagggcaatccacatgccatgatgtccagaggcattaacaagggagacacacaggggctcctcacgtttgctttccgcggttttgatgaaaatctcactttcctcatctcatacaatgtg

SEQ ID NO: 594793 - DNA, 283 bp, Homo sapiens
tccaagccaaaagaaaaaagagggaaaaaaggccaaaaattttgtgaaaaaaaaaaaaccactttatatattttgggttaaaatttgggattttttttaaaggattttttgggctgtgaacattttttgccaaagaccatgatgtatgtttgtatgttttaggtattgtaaaaatttaaaaagtaaacaagggtgttttgttatgcccccctggaccaggaatgctgccgcatttccctggggataacagtatttttatttaaaaaaaataatttaaagtgga

SEQ ID NO: 594794 - DNA, 849 bp, Homo sapiens
  misc_feature (765)..(765): n is a, c, g, or t
ataaagttagtactgcatgttagattttagtttgcaagcatgttgtttatctatacttgatatattctgaacaaacaagcatgcttgccaatatatcacagtatagtaacataaggtacataacagtttaagcaaggacaggcaatcatcttattcttctgtagttctaagacaaaccacttgttgagtgcctgctatgtgacacggcatgggcccatatgtgtgaggagcttgcttctaagtccatgtaggaagctaattgagatctcggatcagttacagtattgggcagtatacttaccgttcttgaatgaaagaacattcatcgagtacactctacaagtactcagagctgaattatcctcagggtgagccttctgtgagaatttgcaggtttctgggcaaactagcacgataggaggcatttgagttataaaataaagacctcctgtcttgcagtaaccttgctgatttcctcttcacttggaaacccccttcctgaaaacgtaccaaccccttcaccaaggtttaactcaatatggggacttaatctttctcgtaggttcatctcgcgctaatctcttgttctgactttccatctggctccggggatctgacacatttcgtggcaaactaagctctattgctactatttcataatcattcagaacactcttgccctttaagctatgttaaattcaatactattcctgctatgcctgtcatgtccatagacatttatctgtttcacaatcatgtttatcngatcgatgcggtcccacgggaatccacttaattaaaaccaggagataccagcttggtacccacacaacttacgtttctgactca

SEQ ID NO: 594795 - DNA, 468 bp, Homo sapiens
aacggtggcagatccatttcactgggcgtaaccagctgtacacctgggaccggagttccatctcgagcaccccatttcccgggcgtaaaggtcatgtgtgcgtgggatgcttaaactatctgatacctttcaattctgcaaatatccaaataccacgttggtacggtgtccttctgatgctttttattcttgcccaaattttgatcttgtaaagagctataacagtttccacaaatccttatgtttagctcctacaaagggccataccatttgaggttgaggtgccactacaccgccatggttccagataataggaacccttgccgtatttcttatcatttctaccatctgacaattttgttcagaccagctgaacatagtgtggccgtggcacgcagacagagaggtgcaattcaagctaaacatccccttaggagatcaatcaataatgattccataggaatcgtt

SEQ ID NO: 594796 - DNA, 654 bp, Homo sapiens
catgatacatagtgtctgtttccccatagaatatacaccagatgaacatgtctgccatctccccagagaggacaaacagttgcttggtttgctgtcagaatgcaacgcaaagggtgaagccacgcacctcctcattcaacagcatgcaaggtgatggagaaaacctgcaactgggaccccccagtcttctcttccttgaacagcctacatctccttgggtgttactgctcatcctgtcaaaacccaaactttgctctcctctgacggagctgagtttccatacagacagagcaatcaggtccccatggaaaccccaggcttgctgacccccagaggaaaacgctattactcacagtgctggaggcagattaatgtagaataaccctaatgaaaggcgttatcctcaaaattgtagggcctttgggtttaaatttcctttttttttctgcctaaactcccataatttgcacatttgcattctttgaaagggtgccttcactggagatgctgattacccacagctgaatcttgttgcccttttggcatcagataggtgtgcactgcagagaccatcacccacccttaatggggctggatgaatatttattctctattttcatgagagccaagtggggccttctaactccttgggcg

SEQ ID NO: 594797 - DNA, 1341 bp, Homo sapiens
  misc_feature (1314)..(1314): n is a, c, g, or t
tggaaaagtgggggtaagggctttgtgactgtggatctcaaaacagaatgtgcggggcctctctataaatataaaggggactcatcgtgaaatttaattaaaaaagtgatttagcttcttggccttaattttaacaggtgctataggtggtgaataaacttttatagctcagtgttcccttatactccaagagaagacccacagttaatatatattatgttcactataaacaccacacaagaaatatgattgttatacaccacacactatattttcaaatattatactctgtttcccatacactttaacatatttgggtgtaacgctttaaaaacacattcttagaggcactatcttgtgtgaaaaacgcgggtgtgtaacatatttaatatacaagggtgtccgtggtataattttttgtgtggtacacacgcgggggacatatagatgttcttacacacatgtgtgcgaatataaacatatattccaagcgttaaatataagaaatatatcggtgtaaatataatatgtggatatatctgtggtagtgaggaaatatctgtgggtgtctggggtgtataaatattctctgtgggtgcaatatatacctcactgtggggtcgctttgagaaaacaaaggtgtgtgtgatgtgcggcgcttaatattatattgttgaaaactccgcttttaatcccctggggggatttctcttgacacaacacacgtgcgcgccctatatgggggtgtacacacactcctatattagaactatttcccctatttttcccccagatgtggcgccaaagtcgagatggtacccccttttttttacaaaacactctctaagatgttgcggccgcaccaaacacaacgcgcccgacaatgtggggccacctcttttcactgaggaggacggaacaaccctcctaaaccggcggttcgggaccatcatacaaggtgtcgtgttcccccccatcaaagatgtgtgtgagaaaaccccccgcctgtgtggtggggaatcactcatatgttgcaaataatcaaacaacgtgtctgtggacacaactggttggtgacaacatcatttaaccggcggggacacaaccaccatgtttctggctgtggtgttccaacatcttccaacacaaccccgttcgttctcgtgtctttacaccacaagcaacggcacacagacgcagacacaacaacagggcgggcggcggcgccgcccatctaaaaaaaagagtatccaccccccgagtaggggcggccaccacacgcaatatagtacccagcgtcacacaccgccgacngtatatcctggtgcgaccaccacgagg

SEQ ID NO: 594798 - DNA, 168 bp, Homo sapiens
aatgggcttgcgctctaagataatccctagcccatttcgttactcacaaaggggacaccgtacaccttatctatctagttattatcgaaaccatcagcctactcagttcaagtcaatagccctggtccgtacgcctaaccgctaacattactgcaggccattcagacg

SEQ ID NO: 594799 - DNA, 521 bp, Homo sapiens
accaggcgcactcgatctctattcattagcacactatgccctggtgcggtctgcggactaatgctagtaatcccagcactctgtgaggcccagggccctggagcaccaccgtgcctaccgtatgtccacgatgtgagtccgaatctacagtcagaccggaccatctgtccaccatgcccccagaatgtgcacaagggctccctcggctacactagaaggattagattcctccctactattcccacactggcacagtctgactggtgtgaagctccggcggttttgtgtgtatagtactaccaaggtccgcttgataaggcggagctttcattacatactggaagtctgtgcaccggtacacactcaggcgtgctaccttccgcaaatatgatctaaatctctctctgtctgctgaagctggcctcggctaagacgattagagcattggctcaaagggaccaagacaggcggacagcccgatgttgtgagacccagggccacgatggccactacggggcgct

SEQ ID NO: 594800 - DNA, 130 bp, Homo sapiens
cagttaagcctggttcccaaccctggtgcccaccgccccccagctcatcgtgaatgagggggaacaaagagaggagaaggagcaggagtatgggggtcgaccgtccaccgaggccccacctcggcggccg

SEQ ID NO: 594801 - DNA, 388 bp, Homo sapiens
gagagagagagagagagagagagagagagagagagtgagagagagttttccatattatcgttctccctctttgatcttctgctcgccctctttccccggctcctcctcctgtccccctccttctcttccctctcgtgcccctccctttttcgccctgctctgccttctcttctttttctttactcttaccactgtctctttctctcatctccccactatttctctcctctccccccttcttccctcttttccgctccttctcttcttcctcccttccttccttccttccttcccttcttctctcctcctctttttcccccctctctctctttctttcttctccctctcctctccctctcctctctctctctctctttttccttcctcc

SEQ ID NO: 594802 - DNA, 1002 bp, Homo sapiens
  misc_feature (379)..(379): n is a, c, g, or t
ctctcctgttgcgtttagctgttctaccactgtgttccattgcgtctatgtttcggctcgtttttgtgtcgccacatcgggtgtcggattaaactagtgatcgtagatgcacccggggcgtgttagtgtgcgcctccaggtcatctgttgtgtttcgaccacgctgttttggcatcaaccacgtgagcggtggtggggggcacacccacctgtagtgggtgtttacaaaaacctggggcgccagctgacgcgtacgcgcgcagaaacgtttgtgtggcccgccgcccggacaccgttgttcgtgttcgtaattttctttggggcctaaaaattgtggaacaacgtgcccgcctacttataataaattttctggggccanttcccgtcaaagctggtggtgacgacgagatgttaaaaagtcgggtcggcgccaccaacaatttgggttgattctaatgccgggaacacgttttgttttctgcagaccgatgaattcctcgccccccaggagacctctctgtacggcagaaatagacgggtgctcccgcaaccattgtttccgtgaggctggcgaattattcaacaaaaaatttgttactgttctcccggggaggcaccgaattgataaagtttgtgtacacacgctggtgtggggcggaaaaacacataggccgccccgcttggtactactgctgtcggaacccctgtaaacgaagaaccggcttatatgtgccccgtcggctgggccccgcttatggctgaaaaatagttatgaaaagtggtcaccttttactggccaccaagtatgtgcagaaaaccttgagtgaaaatagcacagccagaatcaaataggaacagccattggttgctgacactgtaggtattatcatgccacatccagtgacgcacagttgcaaagtgtgttctgggcaatcaattctgtggtgcctttcacttcccccaataaacccaaaaatgaaatgggttcccccccaacatgac

SEQ ID NO: 594803 - DNA, 105 bp, Homo sapiens
gtcaagaaaggtggtgttgcaggttgcggactgtaagtactaatagtagatgccagcagctaggactgggagagataggagaagtaggactggctgggtaccggc

SEQ ID NO: 594804 - DNA, 313 bp, Homo sapiens
ttcaaacatgaccccattattgccaccgtctgaacaggtagaacacgtgagtcaattcttccagattcatccaaaaaacccccaggcgcgcctgatcaaacaggccgtggagatcatccgtgccggtggcgtggtgatctaccccacggattcctcctacgctatcggttgccagatcggtgacaagaatgcagtcgagcgagtaagacgcctgcgtgacctggacaagaaccacaacttcgcactgatttgcagcgacctgtctcagctggggcgtcgacgcggccgcgaatttagtagtagtaggggccgc

SEQ ID NO: 594805 - DNA, 1190 bp, Homo sapiens
  misc_feature (751)..(751): n is a, c, g, or t
tataaaagtttttccctctttaataaagtccgctatactaactaaaaggagaatctggggtttctcgccggatagaaccacgagggccaattcaccacgagcttctggtgtagaagaacagtggagaggtgccaagaatcaccatcgagggtgccgtttcctttccgtggtggctttccatcttccagttcagccgtggtctttggccttgagagggccccaaaacaacgagcccggggcatatacatcttcactcccaaaaggcggagaaaaagtgggcaggcaaaaacagcgggaggggtggtcacagaaggagggttcccatcgaggtgtccacgagggtgcgcccccgcggtgatacctctcgtgtgagaagattgctcacgcttctcaatctcagagcttctcagtgaaaagctctcctgtgtggagtcatatctctcacagagatacgacaggggctcccaggctatataaggcgctcacagagacgccggccttgggcacctctcacacagtggggctctcactctggggtgggcgttctctgggagacccctctaacaacgtctctctatatctctgtacaaaaagcgcccagcgacaagtcgtgggggagaatctgggcgtatacaaagctttctagtggcgtgggggaggagatatctcaccagagtcaacatctcccagtgtccccaccatataaacctctgtgtggggtgaggaggcggccagagagtatcactataanaaacccaggggtggtgtgtgcgccaaggcttagaaacagattctgggggtaaaaggtcctttggcgccaaattcgcgaagaattctcttccacagggacaatgttgggatgcaccctatggtgttgtaaaaccccattgtctttacttcctgttgggggttcttggcggctcgccttggccaacgaggattcgggtcttgggaggggccccaaaggtctgagagcacaactgggaggtctcccacacaacggaacagaggggaacaatttcttgggccctcctcatacaaaattacaaaagttccccacgtgggggctaccctactgagggcggctcaacagacaaggacatctccaagagggtcccccaataaggaggctcccatcaacaaggggagaacttgggataccaccagggggcgtcacacaagagtggatc

SEQ ID NO: 594806 - DNA, 523 bp, Homo sapiens
  misc_feature (381)..(381): n is a, c, g, or t
  misc_feature (411)..(411): n is a, c, g, or t
  misc_feature (451)..(451): n is a, c, g, or t
  misc_feature (503)..(503): n is a, c, g, or t
aatgggcttgtgtcaccaggagactactggatcaggacatgtgtggcatagggcagctgtgccgtctgggccattgcccatggaagtactgtgccagccagaacactggtctggcccgagagacctcttttcaggcttaggataccactttcaggccatgaatctgggagcagtgtcagatgaacaagggagcacaagccctgtgacatgtacattccctctcttggctgcatcacagtgttcgcatggagattacaactgaggtgatacaagacttgatctgctctgagtgtcgatgtgcaggctgctgaatgctccacgtgatagccatcatatacgtcaacagctgctgctggagacgtacactcactgtgaaggcanggctctgtgtcattgcttgtgtgtgcctgngtgtgcacaagtgtctgtgtgtgagccagtaggtgagcangagatcgagatcgacagattgatggctttgctatacatagcacactagagtntttcgacagggatagtcttt

SEQ ID NO: 594807 - DNA, 1285 bp, Homo sapiens
  misc_feature (12)..(12): n is a, c, g, or t
  misc_feature (14)..(14): n is a, c, g, or t
  misc_feature (16)..(16): n is a, c, g, or t
  misc_feature (18)..(20): n is a, c, g, or t
ggctggtacggncngnannntaggatcgcccctcgccctctagccccctcccgcgggagtcgcggcgctgcgggtaggagccgggttgcgggagaccccaggttcggttgggattcccagccagaacggagcttaagccgggcaggcgagcgaatgacggagtagcgagctgcacggcggcgtgctgcgctgttgaggacgctgtcccgcgcgctcccaggccgccccgaggcttggggtcttcgaaggataatcggcgcccggggccgaacagcgggggcacacggggcgctgccgaagtgcaaggccacggccagagctcgagcccgacgcgctgtctggagtcgtaggaccctgacgtggctgaagcggccccgggagcatgagcgggcagcgcgtggacgtcaaggtggtgatgctgggcaaggagtacgtgggcaagactagcctggtggagcgctacgtgcacgaccgctttctggtggggccttatcagaacaccatcggggccgccttcgtggccaaggtgatgtcggtcggagaccggactgtgacattaggtatttgggacacagcaggctctgagcgctatgaggccatgagtagaatctactatcggggtgccaaggctgccatcgtctgctatgacctcacagacagcagcagctttgagcgagcaaagttctgggtgaaggaactgcgcagcctagaggagggctgccaaatctacttatgtggcaccaagagtgacctgctggaagaagaccggaggcgtcgacgtgtggacttccacgacgtccaggactatgcagacaatatcaaagctcagctctttgaaacatccagcaagacaggccagagtgtggacgagctcttccagaaagtggcagaggattacgtcagtgtggctgccttccaggtgatgacagaggacaagggcgtggatctgggccagaagccaaacccctacttctacagctgttgtcatcactgagtcagcactcacctggcctgggggaattaaaggaattccccgtaagggctggacccagctcctttctgggcttgggtagtcaaatgtctgagctaccccaggtcctcatgtcagcagagtggcgcctgcctgtgctggcccatggaacggagacagcattgggctgactgtgggcatgaggagggataaggctgatttggaccccaggcttctgccctggacagcacttgtgtctgcagattatttaagtggcttttgatctgtaaataaaatcagtgcactgtgaatcac

SEQ ID NO: 594808 - DNA, 1683 bp, Homo sapiens
  misc_feature (12)..(12): n is a, c, g, or t
  misc_feature (14)..(14): n is a, c, g, or t
  misc_feature (16)..(16): n is a, c, g, or t
  misc_feature (18)..(20): n is a, c, g, or t
ggctggtacggncngnannntaggatcgcccctcgccctctagccccctcccgcgggagtcgcggcgctgcgggtaggagccgggttgcgggagaccccaggttcggttgggattcccagccagaacggagcttaagccgggcaggcgagcgaatgacggagtagcgagctgcacggcggcgtgctgcgctgttgaggacgctgtcccgcgcgctcccaggccgccccgaggcttggggtcttcgaaggataatcggcgcccggggccgaacagcgggggcacacggggcgctgccgaagtgcaaggccacggccagagctcgagcccgacgcgctgtctggagtcgtaggttggcgccgtttggggtcggggtctgaggcttgggcgctgcctgggccgagcggagatcggggtttgcctcccgtccccgctcaggaccctgacgtggctgaagcggccccgggagcatgagcgggcagcgcgtggacgtcaaggtggtgatgctgggcaaggagtacgtgggcaagactagcctggtggagcgctacgtgcacgaccgctttctggtggggccttatcagaacgtgagtgcatccggaggggccaggcacggtgggcgggggagtggggggccggtaatctgcacctatggccccgatctcttccctctcgttgcagaccatcggggccgccttcgtggccaaggtgatgtcggtcggagaccggactgtgacattaggtatttgggacacagcaggctctgagcgctatgaggccatgagtagaatctactatcggggtgccaaggctgccatcgtctgctatgacctcacagacagcagcagctttgagcgagcaaagttctgggtgaaggaactgcgcagcctagaggagggctgccaaatctacttatgtggcaccaagagtgacctgctggaagaagaccggaggcgtcgacgtgtggacttccacgacgtccaggactatgcagacagtagctgctcctcagccctttggggggtgggggtgtgtggctgtctgggtggatcaaagaaaatagggactgccttggctgccagggcaaggtgctctaggaggtcttcctggcctccttgaactgtggggtccaggagactccctgaactgctagccctcccttttgtctgtttatctaattctcaggtatgaggctttagtcacttctctttacagatatcaaagctcagctctttgaaacatccagcaagacaggccagagtgtggacgagctcttccagaaagtggcagaggattacgtcagtgtggctgccttccaggtgatgacagaggacaagggcgtggatctgggccagaagccaaacccctacttctacagctgttgtcatcactgagtcagcactcacctggcctgggggaattaaaggaattccccgtaagggctggacccagctcctttctgggcttgggtagtcaaatgtctgagctaccccaggtcctcatgtcagcagagtggcgcctgcctgtgctggcccatggaacggagacagcattgggctgactgtgggcatgaggagggataaggctgatttggaccccaggcttctgccctggacagcacttgtgtctgcagattatttaagtggcttttgatctgtaaataaaatcagtgcactgtgaatcac

SEQ ID NO: 594809 - DNA, 895 bp, Homo sapiens
  misc_feature (12)..(12): n is a, c, g, or t
  misc_feature (14)..(14): n is a, c, g, or t
  misc_feature (16)..(16): n is a, c, g, or t
  misc_feature (18)..(20): n is a, c, g, or t
  misc_feature (840)..(840): n is a, c, g, or t
ggctggtacggncngnannntaggatcgcccctcgccctctagccccctcccgcgggagtcgcggcgctgcgggtaggagccgggttgcgggagaccccaggttcggttgggattcccagccagaacggagcttaagccgggcaggcgagcgaatgacggagtagcgagctgcacggcggcgtgctgcgctgttgaggacgctgtcccgcgcgctcccaggccgccccgaggcttggggtcttcgaaggataatcggcgcccggggccgaacagcgggggcacacggggcgctgccgaagtgcaaggccacggccagagctcgagcccgacgcgctgtctggagtcgtaggaccctgacgtggctgaagcggccccgggagcatgagcgggcagcgcgtggacgtcaaggtggtgatgctgggcaaggagtacgtgggcaagactagcctggtggagcgctacgtgcacgaccgctttctggtggggccttatcagaacaccatcggggccgccttcgtggccaaggtgatgtcggtcggagaccggactgtgacattaggtatttgggacacagcaggctctgagcgctatgaggccatgagtagaatctactatcggggtgccaaggctgccatcgtctgctatgacctcacagacagcagcagctttgagcgagcaaagttctgggtgaaggaactgcgcagcctagaggagggctgccaaatctacttatgtggcaccaagagtgacctgctggaagaagaccggaggcgtcgacgtgtggacttccacgacgtccaggactatgcagacagtagctgtcctcagccttggggggngggggtgttttcttttcttgtttttttctcttccctgtttgccttttatatttgg

SEQ ID NO: 594810 - DNA, 1371 bp, Homo sapiens
  misc_feature (12)..(12): n is a, c, g, or t
  misc_feature (14)..(14): n is a, c, g, or t
  misc_feature (16)..(16): n is a, c, g, or t
  misc_feature (18)..(20): n is a, c, g, or t
ggctggtacggncngnannntaggatcgcccctcgccctctagccccctcccgcgggagtcgcggcgctgcgggtaggagccgggttgcgggagaccccaggttcggttgggattcccagccagaacggagcttaagccgggcaggcgagcgaatgacggagtagcgagctgcacggcggcgtgctgcgctgttgaggacgctgtcccgcgcgctcccaggccgccccgaggcttggggtcttcgaaggataatcggcgcccggggccgaacagcgggggcacacggggcgctgccgaagtgcaaggccacggccagagctcgagcccgacgcgctgtctggagtcgtaggttggcgccgtttggggtcggggtctgaggcttgggcgctgcctgggccgagcggagatcggggtttgcctcccgtccccgctcaggaccctgacgtggctgaagcggccccgggagcatgagcgggcagcgcgtggacgtcaaggtggtgatgctgggcaaggagtacgtgggcaagactagcctggtggagcgctacgtgcacgaccgctttctggtggggccttatcagaacaccatcggggccgccttcgtggccaaggtgatgtcggtcggagaccggactgtgacattaggtatttgggacacagcaggctctgagcgctatgaggccatgagtagaatctactatcggggtgccaaggctgccatcgtctgctatgacctcacagacagcagcagctttgagcgagcaaagttctgggtgaaggaactgcgcagcctagaggagggctgccaaatctacttatgtggcaccaagagtgacctgctggaagaagaccggaggcgtcgacgtgtggacttccacgacgtccaggactatgcagacaatatcaaagctcagctctttgaaacatccagcaagacaggccagagtgtggacgagctcttccagaaagtggcagaggattacgtcagtgtggctgccttccaggtgatgacagaggacaagggcgtggatctgggccagaagccaaacccctacttctacagctgttgtcatcactgagtcagcactcacctggcctgggggaattaaaggaattccccgtaagggctggacccagctcctttctgggcttgggtagtcaaatgtctgagctaccccaggtcctcatgtcagcagagtggcgcctgcctgtgctggcccatggaacggagacagcattgggctgactgtgggcatgaggagggataaggctgatttggaccccaggcttctgccctggacagcacttgtgtctgcagattatttaagtggcttttgatctgtaaataaaatcagtgcactgtgaatcac

SEQ ID NO: 594811 - DNA, 1589 bp, Homo sapiens
  misc_feature (12)..(12): n is a, c, g, or t
  misc_feature (14)..(14): n is a, c, g, or t
  misc_feature (16)..(16): n is a, c, g, or t
  misc_feature (18)..(20): n is a, c, g, or t
ggctggtacggncngnannntaggatcgcccctcgccctctagccccctcccgcgggagtcgcggcgctgcgggtaggagccgggttgcgggagaccccaggttcggttgggattcccagccagaacggagcttaagccgggcaggcgagcgaatgacggagtagcgagctgcacggcggcgtgctgcgctgttgaggacgctgtcccgcgcgctcccaggccgccccgaggcttggggtcttcgaaggataatcggcgcccggggccgaacagcgggggcacacggggcgctgccgaagtgcaaggccacggccagagctcgagcccgacgcgctgtctggagtcgtaggttggcgccgtttggggtcggggtctgaggcttgggcgctgcctgggccgagcggagatcggggtttgcctcccgtccccgctcaggaccctgacgtggctgaagcggccccgggagcatgagcgggcagcgcgtggacgtcaaggtggtgatgctgggcaaggagtacgtgggcaagactagcctggtggagcgctacgtgcacgaccgctttctggtggggccttatcagaacaccatcggggccgccttcgtggccaaggtgatgtcggtcggagaccggactgtgacattaggtatttgggacacagcaggctctgagcgctatgaggccatgagtagaatctactatcggggtgccaaggctgccatcgtctgctatgacctcacagacagcagcagctttgagcgagcaaagttctgggtgaaggaactgcgcagcctagaggagggctgccaaatctacttatgtggcaccaagagtgacctgctggaagaagaccggaggcgtcgacgtgtggacttccacgacgtccaggactatgcagacagtagctgctcctcagccctttggggggtgggggtgtgtggctgtctgggtggatcaaagaaaatagggactgccttggctgccagggcaaggtgctctaggaggtcttcctggcctccttgaactgtggggtccaggagactccctgaactgctagccctcccttttgtctgtttatctaattctcaggtatgaggctttagtcacttctctttacagatatcaaagctcagctctttgaaacatccagcaagacaggccagagtgtggacgagctcttccagaaagtggcagaggattacgtcagtgtggctgccttccaggtgatgacagaggacaagggcgtggatctgggccagaagccaaacccctacttctacagctgttgtcatcactgagtcagcactcacctggcctgggggaattaaaggaattccccgtaagggctggacccagctcctttctgggcttgggtagtcaaatgtctgagctaccccaggtcctcatgtcagcagagtggcgcctgcctgtgctggcccatggaacggagacagcattgggctgactgtgggcatgaggagggataaggctgatttggaccccaggcttctgccctggacagcacttgtgtctgcagattatttaagtggcttttgatctgtaaataaaatcagtgcactgtgaatcac

SEQ ID NO: 594812 - DNA, 1644 bp, Homo sapiens
  misc_feature (12)..(12): n is a, c, g, or t
  misc_feature (14)..(14): n is a, c, g, or t
  misc_feature (16)..(16): n is a, c, g, or t
  misc_feature (18)..(20): n is a, c, g, or t
ggctggtacggncngnannntaggatcgcccctcgccctctagccccctcccgcgggagtcgcggcgctgcgggtaggagccgggttgcgggagaccccaggttcggttgggattcccagccagaacggagcttaagccgggcaggcgagcgaatgacggagtagcgagctgcacggcggcgtgctgcgctgttgaggacgctgtcccgcgcgctcccaggccgccccgaggcttggggtcttcgaaggataatcggcgcccggggccgaacagcgggggcacacggggcgctgccgaagtgcaaggccacggccagagctcgagcccgacgcgctgtctggagtcgtaggttggcgccgtttggggtcggggtctgaggcttgggcgctgcctgggccgagcggagatcggggtttgcctcccgtccccgctcaggaccctgacgtggctgaagcggccccgggagcatgagcgggcagcgcgtggacgtcaaggtggtgatgctgggcaaggagtacgtgggcaagactagcctggtggagcgctacgtgcacgaccgctttctggtggggccttatcagaacaccatcggggccgccttcgtggccaaggtgatgtcggtcggagaccggactgtgacattaggtatttgggacacagcaggctctgagcgctatgaggccatgagtagaatctactatcggggtgccaaggctgccatcgtctgctatgacctcacagacagcagcagctttgagcgagcaaagttctgggtgaaggaactgcgcagcctagaggagggctgccaaatctacttatgtggcaccaagagtgacctgctggaagaagaccggaggcgtcgacgtgtggacttccacgacgtccaggactatgcagacaatatcaaagctcagctctttgaaacatccagcaagacaggccagagtgtggacgagctcttccagaaagtggcagaggattacgtcagtgtggctgccttccaggtgatgacagaggacaagggcgtggatctgggccagaagccaaacccctacttctacagctgttgtcatcactgagtcagcactcacctggcctgggggaattaaaggaattccccgtaagggctggacccagctcctttctgggcttgggtagtcaaatgtctgagctaccccaggtcctcatgtcagcagagtggcgcctgcctgtgctggcccatggaacggagacagcattgggctgactgtgggcatgaggagggataaggctgatttggaccccaggcttctgccctggacagcacttgtgtctgcagattatttaagtggcttttgatctgtaaataaaatcagtgcactgtgaatcacacccagcccctttccctgctgtgtggattaggtgtcaagacacctagttcttcctggggccacccggctggcctcactgcttatattaaggctcctcccaactctcattttcctttggaaaacaagacttttttccccatggttaccgctgagatactggggctgtagtagtataaaagctcacagttccttctgagtgctgaaaagagtgcatgagttgcttcgaaataaaagggtcaagcattcctacctgagacaggttaaaaaaaaaaa

SEQ ID NO: 594813 - DNA, 1862 bp, Homo sapiens
  misc_feature (12)..(12): n is a, c, g, or t
  misc_feature (14)..(14): n is a, c, g, or t
  misc_feature (16)..(16): n is a, c, g, or t
  misc_feature (18)..(20): n is a, c, g, or t
ggctggtacggncngnannntaggatcgcccctcgccctctagccccctcccgcgggagtcgcggcgctgcgggtaggagccgggttgcgggagaccccaggttcggttgggattcccagccagaacggagcttaagccgggcaggcgagcgaatgacggagtagcgagctgcacggcggcgtgctgcgctgttgaggacgctgtcccgcgcgctcccaggccgccccgaggcttggggtcttcgaaggataatcggcgcccggggccgaacagcgggggcacacggggcgctgccgaagtgcaaggccacggccagagctcgagcccgacgcgctgtctggagtcgtaggttggcgccgtttggggtcggggtctgaggcttgggcgctgcctgggccgagcggagatcggggtttgcctcccgtccccgctcaggaccctgacgtggctgaagcggccccgggagcatgagcgggcagcgcgtggacgtcaaggtggtgatgctgggcaaggagtacgtgggcaagactagcctggtggagcgctacgtgcacgaccgctttctggtggggccttatcagaacaccatcggggccgccttcgtggccaaggtgatgtcggtcggagaccggactgtgacattaggtatttgggacacagcaggctctgagcgctatgaggccatgagtagaatctactatcggggtgccaaggctgccatcgtctgctatgacctcacagacagcagcagctttgagcgagcaaagttctgggtgaaggaactgcgcagcctagaggagggctgccaaatctacttatgtggcaccaagagtgacctgctggaagaagaccggaggcgtcgacgtgtggacttccacgacgtccaggactatgcagacagtagctgctcctcagccctttggggggtgggggtgtgtggctgtctgggtggatcaaagaaaatagggactgccttggctgccagggcaaggtgctctaggaggtcttcctggcctccttgaactgtggggtccaggagactccctgaactgctagccctcccttttgtctgtttatctaattctcaggtatgaggctttagtcacttctctttacagatatcaaagctcagctctttgaaacatccagcaagacaggccagagtgtggacgagctcttccagaaagtggcagaggattacgtcagtgtggctgccttccaggtgatgacagaggacaagggcgtggatctgggccagaagccaaacccctacttctacagctgttgtcatcactgagtcagcactcacctggcctgggggaattaaaggaattccccgtaagggctggacccagctcctttctgggcttgggtagtcaaatgtctgagctaccccaggtcctcatgtcagcagagtggcgcctgcctgtgctggcccatggaacggagacagcattgggctgactgtgggcatgaggagggataaggctgatttggaccccaggcttctgccctggacagcacttgtgtctgcagattatttaagtggcttttgatctgtaaataaaatcagtgcactgtgaatcacacccagcccctttccctgctgtgtggattaggtgtcaagacacctagttcttcctggggccacccggctggcctcactgcttatattaaggctcctcccaactctcattttcctttggaaaacaagacttttttccccatggttaccgctgagatactggggctgtagtagtataaaagctcacagttccttctgagtgctgaaaagagtgcatgagttgcttcgaaataaaagggtcaagcattcctacctgagacaggttaaaaaaaaaaa

SEQ ID NO: 594814 - DNA, 286 bp, Homo sapiens
gatgttgatgcactggaggtcttttagcctgtccttgcatggcgcctgctggaggaagagagagctctgctggcgtgagccacaatttcttgactggaggccatccaccctcttggttgaggccttgttctgaaccctgacataggcttgggcactcatgggcctgggcttttaaggtggcctcctgccctgaacaaggaccctccccgcttttctggggctctcaattgaacaaagcaaccaaacaaaggccgttttatataaaagattataaacctggaataat

SEQ ID NO: 594815 - DNA, 291 bp, Homo sapiens
  misc_feature (40)..(40): n is a, c, g, or t
ggcttgagcgtccaaaaatggtgctccccatgtttcccgntcacgggtttaaaaaacccgcttgggaataccagtccccggggccctccctgtggggggggcgttagccttccccccccccccttttttgttgcctaagccttgccgggccttcctgtttagtttttcctgtaagccaaaaaaatgacccttcccaggggttggaagtgaggttttttttgtgaacccctttcccccctggggtctgggtcttaacccgatgaataacctgattttgttcttttgaaccca

SEQ ID NO: 594816 - DNA, 1729 bp, Homo sapiens
  misc_feature (12)..(12): n is a, c, g, or t
  misc_feature (14)..(14): n is a, c, g, or t
  misc_feature (16)..(16): n is a, c, g, or t
  misc_feature (18)..(20): n is a, c, g, or t
ggctggtacggncngnannntaggatcgcccctcgccctctagccccctcccgcgggagtcgcggcgctgcgggtaggagccgggttgcgggagaccccaggttcggttgggattcccagccagaacggagcttaagccgggcaggcgagcgaatgacggagtagcgagctgcacggcggcgtgctgcgctgttgaggacgctgtcccgcgcgctcccaggccgccccgaggcttggggtcttcgaaggataatcggcgcccggggccgaacagcgggggcacacggggcgctgccgaagtgcaaggccacggccagagctcgagcccgacgcgctgtctggagtcgtaggttggcgccgtttggggtcggggtctgaggcttgggcgctgcctgggccgagcggagatcggggtttgcctcccgtccccgctcaggaccctgacgtggctgaagcggccccgggagcatgagcgggcagcgcgtggacgtcaaggtggtgatgctgggcaaggagtacgtgggcaagactagcctggtggagcgctacgtgcacgaccgctttctggtggggccttatcagaacaccatcggggccgccttcgtggccaaggtgatgtcggtcggagaccggactgtgacattaggtatttgggacacagcaggctctgagcgctatgaggccatgagtagaatctactatcggggtgccaaggctgccatcgtctgctatgacctcacagacagcagcagctttgagcgagcaaagttctgggtgaaggaactgcgcagcctagaggagggctgccaaatctacttatgtggcaccaagagtgacctgctggaagaagaccggaggcgtcgacgtgtggacttccacgacgtccaggactatgcagacagtagctgctcctcagccctttggggggtgggggtgtgtggctgtctgggtggatcaaagaaaatagggactgccttggctgccagggcaaggtgctctaggaggtcttcctggcctccttgaactgtggggtccaggagactccctgaactgctagccctcccttttgtctgtttatctaattctcaggtatgaggctttagtcacttctctttacagatatcaaagctcagctctttgaaacatccagcaagacaggccagagtgtgggtgagtgctgtgctggagcctcacagcaggaacatgcaggggcaccagaggaagctgaatagggcacagagggctgggtcactgggagatcccagggctactggcattgggccctcgctgatcatcatttttcctgccagacgagctcttccagaaagtggcagaggattacgtcagtgtggctgccttccaggtgatgacagaggacaagggcgtggatctgggccagaagccaaacccctacttctacagctgttgtcatcactgagtcagcactcacctggcctgggggaattaaaggaattccccgtaagggctggacccagctcctttctgggcttgggtagtcaaatgtctgagctaccccaggtcctcatgtcagcagagtggcgcctgcctgtgctggcccatggaacggagacagcattgggctgactgtgggcatgaggagggataaggctgatttggaccccaggcttctgccctggacagcacttgtgtctgcagattatttaagtggcttttgatctgtaaataaaatcagtgcactgtgaatcac

SEQ ID NO: 594817 - DNA, 161 bp, Homo sapiens
tgatcgctcgtgccatcttgaggaagctctggtttggacacgctgcaggagctccttgcaggtttcccaatattttgcagagtaaggcagatttacctatcacattctcattagcgcaaggccaggatagttgatgtctgtccggagcggaccgtggtgac

SEQ ID NO: 594818 - DNA, 1465 bp, Homo sapiens
  misc_feature (12)..(12): n is a, c, g, or t
  misc_feature (14)..(14): n is a, c, g, or t
  misc_feature (16)..(16): n is a, c, g, or t
  misc_feature (18)..(20): n is a, c, g, or t
ggctggtacggncngnannntaggatcgcccctcgccctctagccccctcccgcgggagtcgcggcgctgcgggtaggagccgggttgcgggagaccccaggttcggttgggattcccagccagaacggagcttaagccgggcaggcgagcgaatgacggagtagcgagctgcacggcggcgtgctgcgctgttgaggacgctgtcccgcgcgctcccaggccgccccgaggcttggggtcttcgaaggataatcggcgcccggggccgaacagcgggggcacacggggcgctgccgaagtgcaaggccacggccagagctcgagcccgacgcgctgtctggagtcgtaggttggcgccgtttggggtcggggtctgaggcttgggcgctgcctgggccgagcggagatcggggtttgcctcccgtccccgctcaggaccctgacgtggctgaagcggccccgggagcatgagcgggcagcgcgtggacgtcaaggtggtgatgctgggcaaggagtacgtgggcaagactagcctggtggagcgctacgtgcacgaccgctttctggtggggccttatcagaacgtgagtgcatccggaggggccaggcacggtgggcgggggagtggggggccggtaatctgcacctatggccccgatctcttccctctcgttgcagaccatcggggccgccttcgtggccaaggtgatgtcggtcggagaccggactgtgacattaggtatttgggacacagcaggctctgagcgctatgaggccatgagtagaatctactatcggggtgccaaggctgccatcgtctgctatgacctcacagacagcagcagctttgagcgagcaaagttctgggtgaaggaactgcgcagcctagaggagggctgccaaatctacttatgtggcaccaagagtgacctgctggaagaagaccggaggcgtcgacgtgtggacttccacgacgtccaggactatgcagacaatatcaaagctcagctctttgaaacatccagcaagacaggccagagtgtggacgagctcttccagaaagtggcagaggattacgtcagtgtggctgccttccaggtgatgacagaggacaagggcgtggatctgggccagaagccaaacccctacttctacagctgttgtcatcactgagtcagcactcacctggcctgggggaattaaaggaattccccgtaagggctggacccagctcctttctgggcttgggtagtcaaatgtctgagctaccccaggtcctcatgtcagcagagtggcgcctgcctgtgctggcccatggaacggagacagcattgggctgactgtgggcatgaggagggataaggctgatttggaccccaggcttctgccctggacagcacttgtgtctgcagattatttaagtggcttttgatctgtaaataaaatcagtgcactgtgaatcac

SEQ ID NO: 594819 - DNA, 1141 bp, Homo sapiens
  misc_feature (12)..(12): n is a, c, g, or t
  misc_feature (14)..(14): n is a, c, g, or t
  misc_feature (16)..(16): n is a, c, g, or t
  misc_feature (18)..(20): n is a, c, g, or t
ggctggtacggncngnannntaggatcgcccctcgccctctagccccctcccgcgggagtcgcggcgctgcgggtaggagccgggttgcgggagaccccaggttcggttgggattcccagccagaacggagcttaagccgggcaggcgagcgaatgacggagtagcgagctgcacggcggcgtgctgcgctgttgaggacgctgtcccgcgcgctcccaggccgccccgaggcttggggtcttcgaaggataatcggcgcccggggccgaacagcgggggcacacggggcgctgccgaagtgcaaggccacggccagagctcgagcccgacgcgctgtctggagtcgtaggttggcgccgtttggggtcggggtctgaggcttgggcgctgcctgggccgagcggagatcggggtttgcctcccgtccccgctcaggaccctgacgtggctgaagcggccccgggagcatgagcgggcagcgcgtggacgtcaaggtggtgatgctgggcaaggagtacgtgggcaagactagcctggtggagcgctacgtgcacgaccgctttctggtggggccttatcagaacaccatcggggccgccttcgtggccaaggtgatgtcggtcggagaccggactgtgacattaggtatttgggacacagcaggctctgagcgctatgaggccatgagtagaatctactatcggggtgccaaggctgccatcgtctgctatgacctcacagacagcagcagctttgagcgagcaaagttctgggtgaaggaactgcgcagcctagaggagggctgccaaatctacttatgtggcaccaagagtgacctgctggaagaagaccggaggcgtcgacgtgtggacttccacgacgtccaggactatgcagacaatatcaaagctcagctctttgaaacatccagcaagacaggccagagtgtggacgagctcttccagaaagtggcagaggattacgtcagtgtggctgccttccaggtgatgacagaggacaagggcgtggatctgggccagaagccaagatttactcatcgaccaagatttactcatcgcccaagatttactcatcagccaagatttactcatcagccagaggattcctctctccaacagt

SEQ ID NO: 594820 - DNA, 907 bp, Homo sapiens
gttgtgctgcggcgccgcgcggcctgcagtcccgggcccgcgccccgcttgccgcccgcccgccctgcatggagcccggccccgacggccccgccgcctccggccaccgccgccatccgcgagggctggtatccgctgaagacactgcagccctagtggacccggaccagagccctgatcagcatagacaagtgtaggagcacgaatagcataccagcaaacggccgctacgcgctaactcaggacatacctacgtctttccgcagtaacgacctattggcaacgtgctaggtagtaggaccggtgtcatccagctgcaacggacagagagaccgagtactccgtaccaggacgactgatctgccaaacctgcctctctgccagaccaccagccaaaacaccagcgaaagggtgctgagtcatccggggagcgggcagatggaggtgtccatgacgaggacggctagagagaagacaagcccataccagaaggcagtcagaggatacactgtagaaggatcgaccgaagggactagacagtaccaaagctcttccacaggaaacgtacaccttgccacgagcaatgtgcccatatagcgataactcgatagacctatcgaaagcgttgacccctaacaatgtaagcgggtagacagggaatatgcggttcaatggacaccaggaaatcaagcgacatgcccatatccagaacggatgacttccttacacctagcgacttcacatcgagtaacccaccacaagtggtgcacccacggccggaaagcagttaatcgttcacaagggaggttccgtaattaacaacagaattcaatgaaggaacggagtactcaacgggaccaacttgcttatccatactgtctgccaagcgcaaaagtagccaattgcg

SEQ ID NO: 594821 - DNA, 202 bp, Homo sapiens
agaggattatctataaattttaatgtgtgttaatcttacctgtcttgaaagaaatagttcttgtgtgtcggtatgtatattaatgccctagttagcagaactgtactagaataaaggatacaaggattattgcaatgttactgcactgaaaaacgtgtgtgtattagtgtgctaaattatttagcagaatattcacaagtat

SEQ ID NO: 594822 - DNA, 248 bp, Homo sapiens
  misc_feature (50)..(50): n is a, c, g, or t
  misc_feature (174)..(174): n is a, c, g, or t
  misc_feature (191)..(191): n is a, c, g, or t
  misc_feature (211)..(211): n is a, c, g, or t
  misc_feature (233)..(233): n is a, c, g, or t
ggacatgtaccatgccagcaagagtgccaagcgggccctgagctgcgctntttccagactgaggagaagatcgagcgaacccagcggaccatcaggagcatccaggaggctctcgcccgcaacgctggccggcatagcgtggcgttcaccagctgcaggagaagctggcaggancccagcgccagtcaagncttccgggctcaggaagccngcctgcagcaggagcagagganggcagacacccacaa

SEQ ID NO: 594823 - DNA, 888 bp, Homo sapiens
gtggacgtacatgagatatcaggtgacagctcctcgagtcaattcccttcgagtccatctggagcgcctgctttgtcttcggagttcgcgattgcagctcttcgtcccctactccatagcctaagaggccggactccagcgcacagcccagacccacagcagcctgccagaagcacacccaagcacagccgcgatggcctggtctcagaccctggtacgaaaccccaggcctaaaccttccatatggcaatgtccacgtagccaatgaacaacctgacagtgtatcctaggaccccacatgagttggtggcaggtcgtacctaagctgataactaattgctccatctccattcttctcttctctgctttgtcaggggatgctggtctatccgttcaaagatgagtacacaccaggtgcctccgagcacacctatgtggtggctggccatacgtaggcaatgaacgcactcggattctggcccaatggacatcgtggtgaaagcatatccagtcttgaatgttgatgcgtgttgtcatgaaaacggagggctggaagtacttcctgccctgtcgtctccgagtgccagtcacaggggcgtcaggggactgcaagcatagccgaatcttagagcagtgaaaaacgaaagttgaacagtagaaaacgcgcatggggtccccctgctggtagtcgtggttgtgactagagttgttcaccttgcgtgtgtcctggcctgcattgagccaatttcccggaatctcggcaacagagtgccccggagcgcccccgtggtggtgctcctgggagtaagcgctgtctgggcctcacgggtgggccccaccccccataacttgtctaaccgaagttctactcactctggtgtggatcca

SEQ ID NO: 594824 - DNA, 289 bp, Homo sapiens
atgtagaactctgtcgacatgcaccatgaagcttggagtgaatgctcttccttggggacaagtgtgggcttcaatgtcaatgaatgtgtctgtcagggatgtacgtcgtgacaagggaaaatagtgacagcacagatgacccaccaatggaagcagctggcttcactgctcaggtgattatcctgaaccatccaggccaaataagcgccggatatgcccctgtaatgggattgccacacggttacacattgcatgcaaagtatagctgagctgaaggaaaaagaattga

SEQ ID NO: 594825 - DNA, 306 bp, Homo sapiens
aggattgcttgagcctaggagttcaaggctgtagcgagctatgatcatgccactacattccagcctgtgtgacagagcaagactccatttcttaaaagacaaagaaacaagaggggaggtgctctgaagatcacacacctatctccctcccctagtttgaaaccatggtattatattttcctgaaagaacaattttttaaattaataaggcatgttaccactgactctatgtagagatcagtgatcaatgttttgcacatgtattacttgggagtaacagtagtacacataattcatatataaaag

SEQ ID NO: 594826 - DNA, 495 bp, Homo sapiens
agtccaccatccggtggttgattcctgtttggctatggtgagtagtgctggcaaggaacatatgcatacacgtatctttgggtagaattatttattttccttgggatatatacccagtagtgggatggcggggtcgaatggtatctcaactcttagttcttggagcctgctcttcacaggggcggggataatcatacactcccactgacagggtgtgagcttggctcggtagccttgacagcattggtggttattggacttttaaaaaaaccatcgagtgggtatctcatggtgcatgagagggtatgtcatgggggtttggattggcatttccctgatgatgagtgatgtccagcattttttcatatgtgggtgggcggctggtatgtcttctttggagacatgtcggttcatatgcttggtccactttgtaaggtggttattggctttgggctgtgtaatttcaaattccttgtagattgtggatatcagacc

SEQ ID NO: 594827 - DNA, 598 bp, Homo sapiens
  misc_feature (386)..(386): n is a, c, g, or t
caggtgggttcaaatggccatttttgtgtgtccctctctctcatcttatgcttcccttcctttttttattttattttttggagacggagtctgctgtgtcgcccaggtggagtgcagggcgtgatcttagctcactgcaagctctgccttccaggttcacgccattcttctgcctcagccccctgagtagctgggactacaggcgcccgccacacgcccggctaatttttttttttttttttgggtatttaagaagaggcggggttccccgttgttagccaggagggtctcgatctcttgtgacctggtgattccacccacttggaattcccaaggtgtttgggttcacggggggtggaggccaccaggccggggctctttttttntaaggtggcaatctttggaggggaatattttaacctctatttggccccttcttagggctcttaaattaaatttggcattggctcttgggtaaaagtcccttccggtaagcgtctaaatttattttaatcccacggttaattccacagccctattactgaagcttctgcgagttgcgactctcggagaaacccctattttaaaaggatttatc

SEQ ID NO: 594828 - DNA, 107 bp, Homo sapiens
cactgatacctaccatggcttgaaatggcctaagtcacttctgtgtcttagcctttcctttcacaattgccacctccccctcccatgtctcatgggcctcacagtca

SEQ ID NO: 594829 - DNA, 235 bp, Homo sapiens
ttgacgcatccgtgtttattgtttttccccacagggagaccctcccccacctgggaatccttactcagactccccttttcccctctgacagaacaacaatgacaagtctttggcactagggcagtggtcttatcctccaactacttcctgctggccttgggtgtagagctgaccctaactatggctgttggtctgtcgggagatcctgtgggtcattgtcctggactgtgggact

SEQ ID NO: 594830 - DNA, 698 bp, Homo sapiens
ggcacagtcagtgctgtgtttgaggtaaatgcagtaacggttagttttctacttggtcttatagaaggtagaaaccattgtgtatgttatgttgtctataaaagaaaaaatactaatattaaataatttcttacgactctgagtcactcacttatttttccaataattgatattgtacattcctagtgccattaggtatgtatgtatgtaacttttacagtttttcagctgaaaggtgtaagtatttttttggagggggtcttaaatctcatttaaattccttggttggaacggtagtatatttaatttattccttattttaaccattttaaaccaatggtattgacttgtacattaatacagaatggaacatttggtagttgtgggcagtgaacccagtggtgggtgaattaaagcttaaaatatgggaatgattggggctatattccttggagagagaaggggaagaattagacctaatagtgatcatgattaagggaaagtaccggaagaaccatggggtcccctctgtttcttgtggtggaatgaggcaaggtaatcattttgataccgagtgaagacctgtgtctctaaggggggagagggatttaagagtttagcaaatgtggaaagttgttgttgcgctgtttgggaattggttggtactataattaccattaaactctaatttaaagatg

SEQ ID NO: 594831 - DNA, 203 bp, Homo sapiens
tggcatgcactgtcttcccactcatcgttgggcaagccctgcattgcagcttctggtttctttctttctcttttttttttttaacgacagagtctggctcctgtcgccaggctggagtgcaggggcccgatgtcggctcacggcaacctctgactcccgtggttcaattgattctcctgaccaaagctggggtccggagctcg

SEQ ID NO: 594832 - DNA, 977 bp, Homo sapiens
gtctcgagtgtctgacgggtgtctgtgttcttccggtcggagctgccgttgctgcgccgcggtttgttgccaccattgcggttccccgcttgtgtactgctgcagtctgtgcggacgcgtgcggaaccttgtgttggcccgctctattcgagtttcccgtcgcggggtccccagaaaattccccggtattgcgccattcgcgccggatgtgtgccccgtgtcgagcgccccttcttggacgcgcgccttcgaatggaggagcctgcgccagcgtgtgtggcgctacgcccacgtttggaggggcttgtccatgtacggactgtcgttatcaggcccgccaagatagctggcgcgattcttcccgccaagcagcagagggttccccggttttgttgccacgcggcgggatgaagcgcagtgccccgttggccccggggtggagttttttgctaggtggcgccgcgcgccggtttgttcttgccgacggccgggtgttccgccaatgaggtgggtgcccgccccgttggtggtggcccgaggggccttcttactgtgtgtgcccgaatggggcccgcgtacatgttatgccgcggttctctgtaacgggtcgtagcattggcccccccaggaggaggctccttgctatttgttggcccctgtcgacgggttgtccccacttctcgcttggggggaagccctgtcgccccgctggccccctttgagtcaaaggtgcaacaggttggggccccggagtgaccccctgcgccctctatgcactgttctcgtattaccctgctctgtcggttgcccactggcactcgttcagaactaccacctgttttttggtcctgcatttctgcggttgccctgttagtttccctcgggggccgcggccctctttttgtggtcatcatttttcaattccccaagcccccccggcccggccccgcccccaaaaaaccccttctaaaaagaca

SEQ ID NO: 594833 - DNA, 579 bp, Homo sapiens
ccctgattctaatagtcattctagagtatccccgctctcatctcgaatcctctctaggctcgtcgatcgttctctgattgatttaggttgtgatttatcttctccttctttctcctcttctctttttttctccctacatctttcatatttcttttgttactcctctggcagataagcagacagttatgcctacaagtactatttggcctagtttagttgacttgaagcacagagtgaactgctcatagtagaaagtgaaccaggatgtagtggttgaacttgaatttgatactggcctctaacgcttgtaagtctcatcatacgttctggagtcacttttgtttatattcatcttctctacatttttctgactccttcttttcttcttgtttctctttatcttgtttctctttttcctctttttctttttcttcattttcttgttctctggttcgggtagaacgacttcttcctattgttttctcagcttcttgaagatcagttaatgtcgctccctgtgttgatcttctagattgtcttgcttgtctagatcttgcttttctttgggattcagaagat

SEQ ID NO: 594834 - DNA, 164 bp, Homo sapiens
tgatgatgaagaggatgatgatgaagatgatgaggaagatgatgatgatgatgatgatgtgatcatacaagactgagtggggagctgggggaggggaggtctgttactgaaaaatgaaccaacttagtaactgtttaaacaaaaaaaccccatttttaaaatta

SEQ ID NO: 594835 - DNA, 182 bp, Homo sapiens
aaggaggaaaagataggtgccgaccatacagctaatgttcacaaatcaggcaagactgcgtcagggagcagaagcacctgaccccaatcctaggtacagttcctgtgtgtgttctttttgcgtcacatagggtggtccactctgctctatcatgttgaactcacaggtttggcccttatgag

SEQ ID NO: 594836 - DNA, 169 bp, Homo sapiens
tgaatgatgggaggaatgcaatggatcattgcaagagactctgtaaaagactaccaaccgttctgcggctactttaggtccgtttgaaagttctgcatacaatttcttttatcctgctaatgttccacaaaatgaccgcatgagtgccttcgggtagtgatgcaagcat

SEQ ID NO: 594837 - DNA, 558 bp, Homo sapiens
  misc_feature (184)..(184): n is a, c, g, or t
  misc_feature (300)..(300): n is a, c, g, or t
  misc_feature (307)..(307): n is a, c, g, or t
  misc_feature (333)..(335): n is a, c, g, or t
  misc_feature (368)..(368): n is a, c, g, or t
  misc_feature (395)..(395): n is a, c, g, or t
cgtagttcaggaggtacaattctatgcagaatggtctccagtgtctagcctgacaggccagaaatacaggtagctgactcattggggaagttctaccatttaaaagaaactatccttttcctaattataaatgtatattttgtagtagaattggattcctgaaactttaatgaacttgtggatncctggggggcctcgtgaggtggcagtatctgacttgggagggctgtggtggggttgggatgccgcatttctaacaagctctctggtggtgctgagatcactggcagacaaaccacnctggggnctatcaaagacttagcaaacaaacannnaatagctaggattacaaaagccagctgtaaatntgccttctcaaaagggacactgctttncattcctctctccacgccggactaggtcaggcctccgggcttccctctccgaacgtcacccacagcatcgagagagggaacagatggagatgaggatgtagagttgctggggaggccagaggtttggaatgagtgaatatagggtggggggttaggcccgaag

SEQ ID NO: 594838 - DNA, 1181 bp, Homo sapiens
accgttacagaccacaaccaaagtcccgtgagatcctgtgatgtaacaaggatatgagcgaatcgggtgcccactcccacatccggggtactggtggctggactgatgccttggagcctcgtgcaggcttcgcaaggcatggtgggtcagctggcggcactggcagggcgtgctggctgtggtgctggagatgatcctgggaatgtggaagattgcctggtcgtggcagtccttatttgctggccagcctgggcactggtggaatgactgtgccatctgccatgtgtgcatgtgatgcagtgcccatgggccctgacaacagccaattcacatgccatctgcctggaagtgaaatcttctccctggatgatgagcaatgacctgaggctgctgactgcaggccttcctgtgctggtccatcaggctgttctgcatcaaggaggagacagtgagatcatcgaatgtgtggaggatggtggagatccaggatttgatctgaccatgccaacagtggacgggctccaaggtgggcaaacgtgacccatcaagaccacagagatggagaccaatctacgacctgggcaccaagatgattgagtcactgacccaaggacgaagggacgtgatcaccatcgaacaaagggagacagggcaagatctccaaaggtggagcagatcacttcacacagacgcacgcgaactacgagctatggggctcaccaagaacaagtcagatgcaagatgccagatggggaagcccaagaaaagcaaggaggtggggcacaccgtgatcccagcaacgagaatcgacggtcaatcaaacatcatcgaacccaggggcatcagggcgcctcaccaggtgacccaggggagacaagtcaaagtcaggaacagacaaaggcaagtgactgaatgagcacgagcgaagggaaacaaccggacggagcacagaggcaatagcgaaatacgaaagtaacgtaaccagcagggccgaacgtggacgggctgcaggatagtgcacacaagagaacagacgagtgccgaaagagcctcaggacgaaacaggacaagtaagacaccaccggcacatcagccaccacagacgcataaagcacaggaaaagaatacactatacagaatatagcatagatgcgagtatcatactctaactaaaaagaaag

SEQ ID NO: 594839 - DNA, 116 bp, Homo sapiens
ctgtagaggcctgggcgggcagaccacttgagatcaggagtttgagtcgtttgacacacatgtcgaaaccctgactccaccagacatacaaaaacgtagctaggcatggtgacacg

SEQ ID NO: 594840 - DNA, 186 bp, Homo sapiens
ttagatctaagctaaggaaggactggtgcccgcaacaatgggtcaagatgttccagtttaacaaaaggtgcctaggttgggaccaccgggaccgggaagacctttacgagtcctctgacatctgactacccttggtacctgactggacactgtgctgggtaccgacacaggcacgtgacacgtcct

SEQ ID NO: 594841 - DNA, 755 bp, Homo sapiens
  misc_feature (443)..(443): n is a, c, g, or t
  misc_feature (480)..(480): n is a, c, g, or t
  misc_feature (571)..(571): n is a, c, g, or t
  misc_feature (755)..(755): n is a, c, g, or t
tccggaggatgtcgtgcaggctgaggctgggggcatgcgcaccgtgtagtctaagcaaaagtggccaggtctattccttcggcatgcaagtgatgaggtgtgccctgtggcacagggcatcacatctagtgagcatgcggctactgcggtgaatgcgtcctctgtgggaaaatgttgagacgcgtgcaacgacgatatggttgtgtacacgcgttgtcgagcaggggagatcatgtcacacgaggcaggcccttcaaccgagtgattggccggtgtacttacctcgtggggtgctaccgtttctcgtggcgagcaattcaaacgggatgtgaatttgggaccttgtgtgtgcagcgccaatttgtaaggaacgaagccactgggggtgcccttgggtagcaaaggtgattgctacggcttatgtgaaattggttggccgtagntggggtttcaaaaagcggttgtgggcgcttcgagtgnacaaactgaatccaaaccggttctgtcgttgggaacttcggcttgtgagaccatgccctctagaataggagattagaacagcttacataancaaggcccttatagtggactccttggcgggaggcgcggaacacccactggggggcgcaaggtctttaagggggccccttggtaggtaggccctctgtcggaccgcgttttgacttaattggggcgcaaaaaccaccggtttggggtttgggtgtcgcctggggcaaaaatgcgtggcccatacn

SEQ ID NO: 594842 - DNA, 343 bp, Homo sapiens
tgccaaagtgtgagtaacaagcatgtactggttcttgggcgtacctactctgggtgggtggagcctatccaacacgaactgagaaagctggtgaagtaatccctgtgcttcttcgagatgtgattcctagatttcgaccgcccttatggatcggctcagacaacgggcctgcgtttttggctgccttggtacagaaaacggcaaaggtattggggatcgcacggaaactacatgcacgtcccggcctcagagttccggaaaggtggagaggatgaatcggactatcaaaaatagtactactgtcttccccgctggatatttaaaacaacagcacaaggggcat

SEQ ID NO: 594843 - DNA, 394 bp, Homo sapiens
aaagggaataagggggggggggacaaaccagaagatgaggaaagaggaggagagagagagagggaggaggaaaacagagaagagagagagaagaaactataaaagccaaatagatttataaaagaccaggcgaataataagtaaataacccaataaggaaacatcaaaataaagtagatgaataagaaggcacacacgaaaaatgtgagcgcagaaaggacagttatttaggcaagtgaaggtttctgacagagagagtagagagcaatggcttctctctatctctcgctctcgctctctctctctctctctctctctctctctctctctctctctctctctctctctctctctctctctctctctctctctctcgcgtgcagaattcgtacag

SEQ ID NO: 594844 - DNA, 140 bp, Homo sapiens
cgctctctaccaataagtatctattgtctggcccacctctttctgcataatcatatggtccagctctgaggcagcttgccttagtggtggggtaggctccttcattcagcccaggcttactggcacacatactatgtgcc

SEQ ID NO: 594845 - DNA, 825 bp, Homo sapiens
gaccctttgtaactctcttctcctccctagatgctgaggttaaaatcttacagaccccccgtggctgtattgacaaactctgcctgtagcctgagtgtcctaaaaagctctagagaccgtcactcccgggtgtagctcaagcatgtccacatgtctggtcactggaaaaccacaggctttgggctggtgaagacatctcttgacatatggatcaggacataacatagtctatattgtaagacgaactgtcaaaacaaattatggtgccaatatcgacatgatctttctcacgtcgaaagaaagaagttggtgcatttgagccagagtattgccggcttatttgacggtagaatgatgtcaaaccgtgaaccaacaattcgcaacatcatagagcgtatctcagtgtgagacagaagacgtattgcagtactgaacttgtttcacgcccatttggagatataacggttagcctgccatgcgtcatgacaaaacatcatccaatgatcttgaagtgcgtgaccatctggtgccacggtccatgagctttcacgagattagaagaatagcactacaggggcctggttcccaagaatgctaggttcaagtagctggacagcattttgcccatgttctagcattctctacgtttattgagcagcgtgaacatggatgctggagtcgggccatggttttcaaagatcctgtgtaccgtggcaagacggaaagcaagttttgctgacaattgtcttagaaactaccgcaatgggcaaaggcaatccctcgaggttggacataccgttggaggaagtagcagaaagaccattg

SEQ ID NO: 594846 - DNA, 893 bp, Homo sapiens
gaaagggccgcacaggccccccctttgggtcgcccaaggggccccccgctggtgcgacaacggggaatggtatccccgcgtcgccccgccctattaagagcccccgctcgtgaaaatccgagggctgcgcccactcccgtagagggctccgcgccccccacaaggggtggtccccacggtcggaaacgcaccagacaaacaggagtgcgcggacaagtttcggaagcaagcgagtcatcggcacgagaggataattccacagcattgtcgccagtgtggcgccgacagtctgtcgaatggaacagacgcgggatgaaccaccacgtgattgtccttggggcgatgcctcaagagcagttgtagcccgccgggcgacaggagccgtccctggtgtgacagaaaaggatccgttgaacttaggcgcgtgtataaaactttgggtaggagagaatagcacgcggtcaggtttctctgtgtaaggaggcgcccccccgcccccgccggggtgggtcattataagacgcaccctcccgtggctgggtaatccacaacaaggggcgttccacccttcctcgtggagcaacaatatttagggggtagctaataggacgttggagctaaaatacaaaccgggttcttcttgggaccgcgccccccacgacaagtatgataaaacggggggagtgcatattgatgatcacttcacaccttcttctgggctttagcccacgataatacacgacaagaaacaatgtggtatgttagtttattcgtcaagcgaccccgcatgagtcgcccaagaaacaacataacaggctctccaccttggttgcggcacaccgttcttacaaatggattcaaaaaaaaacacaatgttttacaaaaacaaaaca

SEQ ID NO: 594847 - DNA, 155 bp, Homo sapiens
aatatacgaccagtagataagactgatactagcagatgcacagaaagttaaatctcgcactccatatgtatgccaggtatgtctctgagtgtcaggatatctgggtagctgcggctggtcttatcggaagaagtccaggctggtgagatgttcaa

SEQ ID NO: 594848 - DNA, 716 bp, Homo sapiens
taacataagtgctaagtaccaggccggtgttaatcaggcagaggccatggctgctggtaactgtacacgtatcctgaacactggagggccttacaaggctctcatcgctgctcagtacagcgagggctcagagtccgcgtgctctccgcaacaccccacttaccatatttagaacaacaccaacgcggaccccgtgcaatttcatccgcaaaatttcctgcctggccaggtcccagcatttgagggtgatgatggcttctgtgtgtttgagagcaacgccattgcctactatgtgagcaatgaggagctgcggggaagtactccagaggcagcaagcccagtgtggtgcagtgggtgagctatagctgattaccgatatagtagcccccagccagtacctgggtgttaccccaccttgggcatcatgcaccacaacaaacaggccactgagaatgcaaaggaggaagtagaggcgaattctggggctgctggatgctatactatgaagacagaggactataatctaggtgggcgaacgagtgacattggctgacatcacagttgtactgcaccctgttagtggactctataagcaggttctagagcctatactttaccgaaaggactttcccaataacaaaccgctggttcctcacctgaattaaccaagcccagatacgggctaggcaagggggaagtgaaactgtgtgacaaca

SEQ ID NO: 594849 - DNA, 120 bp, Homo sapiens
ggatttgctggtgcagtacaactaggcttaatagggacatgattgcaccactgcaccccagcctgtgcaatgaagtgagacccttcacgcttcacacacacaggaagttacaaacaagca

SEQ ID NO: 594850 - DNA, 211 bp, Homo sapiens
agatactgggccggatggccagcttcctctccaggattgtcatgatgccccagccagcacgtagtgtagctaccgcaattcccccaggcgaatgcgttcagcctccagcgtcttctccagctccaggacacgcacctgcgatctccatctcctgcttctacagcatgatgagggacaggccgtagaaatccatggtgtctctgtcctcatt

SEQ ID NO: 594851 - DNA, 250 bp, Homo sapiens
tgtcttgctgcctgctagactctgggatcttggggataggacgctgttgagattctcactatatgtcctttagttctagggcctccttcagactctcgcactcacttgtgtgtttgtgtatgttgctgtgccgatttgtctggttggcactatcatccagtgtgcgttcgaatcactgttgtgatgctgtctgttgcgcgtccatgactggggtcatcaggtggcgggcgagactgcgtaacgttctgga

SEQ ID NO: 594852 - DNA, 507 bp, Homo sapiens
  misc_feature (497)..(497): n is a, c, g, or t
cacttatgaaactaatgagaaacacccgcatgctgttggagagagtgagtgcattttcaggcccagcatttgggagcttcagtcttccgtaattcaatgcatgacaatagatttattattgaagaaatgaagaaagaggtcaggcaaaaaaaccagcaattaatcatttgaagacactgagtcatctactattttatgtcagaaatcttgtagccatgtttacataataataaaacagctataagagggcagatgttttaggcctagacattcgctagtcagtaacatgtaaatgtgagagtcctcgtggttacggtttcacacctttccatggcggttgccagtcagtttttccttgctgttcataagctaccaagtaatacacatttgtcttcactctggtctgtggtcccagctactcgggaggctgaggcaggagaatcgcttgaaccagggaggcagaggtcgcgttgagctgagaacgcaccattgcattncaacctaggg

SEQ ID NO: 594853 - DNA, 358 bp, Homo sapiens
  misc_feature (15)..(15): n is a, c, g, or t
acctcatttatcccngcaacaaaaatttggcccaaatatttattgagccctttaccatatgcccagacagtgttctggatagtaagaatatatccagtgaacaaaagacaaaaaatttcctaattttatggagcattttggtagcatttttcctaatttatttttagtttttaagttttaacttttattatagattaaagggtacatgtgtaggtttattattacatgggtaaattgtgtgatgctgaggcttggggtcccaatgatctcatcacccaggcaataagcacagtacccaacaggtactatgatcggcatcactgcactccatctgggcaacataacgagactgtatcta

SEQ ID NO: 594854 - DNA, 249 bp, Homo sapiens
cctgtcagtctgtctgggcgcaggtagagcgtggttccgtcgccgcgcaaccaggaccggcccagtctcctcaagaagttccgagaagccagctggagattcacatttagcatctctcatctcgcattgggcaaaggaactcttcgagacttggccacagtggccataaggatcacctgcagaatggactctctcaaagcagatcccaggggcaggtttagcaccgggtccccaagagcgacggacagg

SEQ ID NO: 594855 - DNA, 461 bp, Homo sapiens
  misc_feature (404)..(404): n is a, c, g, or t
cacttatgaaactaatgagaaacacccgcatgctgttggagagagtgagtgcattttcaggcccagcatttgggagcttcagtcttccgtaattcaatgcatgacaatagatttattattgaagaaatgaagaaagaggtcaggcaaaaaaaccagcaattaatcatttgaagacactgagtcatctactattttatgtcagaaatcttgtagccatgtttacataataataaaacagctataagagggcagatgttttaggcctagacattcgctagtcagtaacatgtaaatgtgagagtcctcgtggttacggtttcacacctttccatggcggttgccagtcagtttttccttgctgttcataagctaccaagtaatacacattttattcatctttgttntcaacggcggcgtcacccccttcatccaccacaccatcatgcattcctatcagctat

SEQ ID NO: 594856 - DNA, 1837 bp, Homo sapiens
agcgggtcgaggccccgcgcccgcagcccagaccggaagggccggcggacgctcgactagagtcggctcgcatggccggggctccagcggctcccgatggattgccatgtgcgtgcgtgttgtctgctggcgaacgaggttggtggcagctgattgctgtgtgctcagctgcctgcggggatgtggggccatcggtgctgcccagacagcaccacccaagcatcctggctccatggcctcactgggacgaacgaaagtcacgtcccgtgccaaccctcgaggcccagcccgggggtaccccacccggccatggggggcatcgcagatactttacccatggaactgggcctgggttcatcctggttccctcatgggacagaaatggcatgtacgccggaccaggtgaaccgtgggcgtatatcaccaagaaagccccacggccgttcatccccaatgccgcccccaagtggcgattcccggctggattcccgtggcacccaggccacgccttcagcccccgggggacccggttttatccatccgtttggcaacccttggaagatggagacaaatccgtcgcagcagttccccttcacaacggcaactaaacagtggtgtgggcccattatgtgccaggtgcaataacttttatttaggagtttccgcgttagtgaggtgaaaagcagtatttagtgtggggaaaaagggatttttctcacgctttcatatgggggtggatacacccgaaaggtatttgggataaagcggcaaatttaaccgtttgtgtaggggggtgtatagttgccacaagagaaaaccgactttattgatgagcatttatatgcagatttagtggattattaaaacgaaacgttgatgggggccatgggattttaagcaagagagtttgcagccggttatattcacaatggggagatgggtactccgacatagaggaggacgacatatttatacggaacgtatgttgatacgggaccctatgggtgggtatagactttggctaaaagggccccattgtgggagtggtgcactacttcgcatgttggtgtgcaaaaaggtggtgacatttatgtacaatacaagttggacagcacgagttacccgcatcgcgcttttgtggagtaatcataagcagtgtgaagttcatgtagacctctgtttggggcagcgattttagtgattagttacaagccctgatgttgtgagacaactcgatgctgagttaaatacactttgcccaacatgtgctacgacgatggggcaacgcgcaacatggggcaacaccagtgggagggaggagaatttgtgtacacgcgaggtggtcccatgtagtagatggtgtgagcaaacagggggatgagattctacaaactgatgtgtggtacaccgacagtttttatacacaactgttattgaattagtgagattgataaccgtgttcggggatttacgtgggacacaacatgagcaaaacctcgttatatgtggtgtagttcactgctacaagtaagaaataatttcaacccaccctatacaactttagtaatcatatcgggagggtggctatatcacgactgatgcggggtaataaatgacggagcggacgattgtacttaccgaccagacaggctttcacacaccaataaacacttattacataattatatcgaccacagcagctggatgatactacaacaacgggtgattcccactgctgtgtgttacatacataacgtcacatctaacacacaacaagcaacgtatcagtacagaagagcgacgcacgagccagacgacaccagacgcagccactcgg

SEQ ID NO: 594857 - DNA, 303 bp, Homo sapiens
  misc_feature (102)..(102): n is a, c, g, or t
  misc_feature (106)..(106): n is a, c, g, or t
  misc_feature (108)..(108): n is a, c, g, or t
  misc_feature (110)..(110): n is a, c, g, or t
  misc_feature (115)..(116): n is a, c, g, or t
  misc_feature (119)..(119): n is a, c, g, or t
  misc_feature (123)..(123): n is a, c, g, or t
  misc_feature (128)..(128): n is a, c, g, or t
  misc_feature (152)..(152): n is a, c, g, or t
  misc_feature (154)..(154): n is a, c, g, or t
  misc_feature (177)..(178): n is a, c, g, or t
gttgcaagcactcgaaacagtaaatggggtagcatggaaatggacaggtaaggagggccttcagtggagctcacagacaggcaacagggactttttcccctngtcnancnacccnnggntggnagccnccctccccacacccgcccctgtgntntgctgtctggaggccacgtggannttcatgagatgcattctcttctgtctttggtggatgggatggtgcaaagcccaggatctggctttgccagaggttgcaacatgttgagagaacccggtcaataaagtgtactacctcttacccct

SEQ ID NO: 594858 - DNA, 488 bp, Homo sapiens
cacttatgaaactaatgagaaacacccgcatgctgttggagagagtgagtgcattttcaggcccagcatttgggagcttcagtcttccgtaattcaatgcatgacaatagatttattattgaagaaatgaagaaagaggtcaggcaaaaaaaccagcaattaatcatttgaagacactgagtcatctactattttatgtcagaaatcttgtagccatgtttacataataataaaacagctataagagggcagatgttttaggcctagacattcgctagtcagtaacatgtaaatgtgagagtcctcgtggttacggtttcacacctttccatggcggttgccagtcagtttttccttgctgttcataagctaccaagtaatacacatttgtcttcactctggtctgcagtgaaaataaaatgagaagagaaagaagaagatatgaagtggaacaatgtggttgggaaattcccatatctttacaaaaa

SEQ ID NO: 594859 - DNA, 243 bp, Homo sapiens
  misc_feature (39)..(40): n is a, c, g, or t
  misc_feature (74)..(74): n is a, c, g, or t
  misc_feature (103)..(103): n is a, c, g, or t
  misc_feature (116)..(116): n is a, c, g, or t
  misc_feature (118)..(118): n is a, c, g, or t
  misc_feature (192)..(192): n is a, c, g, or t
  misc_feature (198)..(198): n is a, c, g, or t
  misc_feature (204)..(204): n is a, c, g, or t
gacgccgagactggcaaaaccactgccgcatcccggtanncgagcaaccatcactgtgagcactacaaggatcnccatcacgatgcgaagcacaccccgctcngcactccggtggncnagaagtacagtcgaatatctcccacgagctttcgttgcgcgagtaccgtaataattcgcaggctggccgcggcnagcccnacagangccacacagaacagggcgagcaggatcccgatagcgcgg

SEQ ID NO: 594860 - DNA, 448 bp, Homo sapiens
  misc_feature (85)..(85): n is a, c, g, or t
gctgacctagaggatccctccacgtcgaatattgaaagtgctgaggtgatacatagctttggatgcaagagccaaacctggaaantggtcagcctttgaatgcctgtaaactttgtttcctaaatttttttttttttattggagacaggtgttccctaattttggccgaggttgctctatgaactacttgggctcagtgtgatcttccgtgcctcagcctccccgagtagctgggactaacagtgtgcccactaccattgctgggcttatttttcctagggttggcaaacaattaaaataatacattatttaagggttaaggattttcctcctaattttgtaatccattttgtttgaaattcatccacttttttcaaataaagctattgttaaggatattctttccagcggaactaaattcaccatttttatatttgtatacataagg

SEQ ID NO: 594861 - DNA, 295 bp, Homo sapiens
  misc_feature (74)..(74): n is a, c, g, or t
  misc_feature (94)..(94): n is a, c, g, or t
  misc_feature (98)..(98): n is a, c, g, or t
  misc_feature (100)..(100): n is a, c, g, or t
  misc_feature (102)..(102): n is a, c, g, or t
  misc_feature (107)..(108): n is a, c, g, or t
  misc_feature (111)..(111): n is a, c, g, or t
  misc_feature (115)..(115): n is a, c, g, or t
  misc_feature (120)..(120): n is a, c, g, or t
  misc_feature (144)..(144): n is a, c, g, or t
  misc_feature (146)..(146): n is a, c, g, or t
  misc_feature (169)..(170): n is a, c, g, or t
atactaaaccgtaagttggggagtgagggcttggccagtcttgaattggccgttaggggtgcccatagctcggnacccagtgctttcgtccctngtcnancnacccnnggntggnagccnccctccccacacccgcccctgtgntntgctgtctggaggccacgtggannttcatgagatgcattctcttctgtctttggtggatgggatggtgcaaagcccaggatctggctttgccagaggttgcaacatgttgagagaacccggtcaataaagtgtactacctcttacccct

SEQ ID NO: 594862 - DNA, 482 bp, Homo sapiens
gaggatccctggcatcactgtcagtgtatgcagatgaggaaaaagactgttagttttcaaggtgaacagtgcatcccaggtgtagtatgtatatatccaaggattctggttatttacacccaataatggaaattcaatattaccaccttgacattccattgcacaccatgcttctatggtagaaaactcatacattctatttggtttcagtaacttggttacccaacccaagttctagagtcattatggcatgcaaacagtcttctaaaggcatctgaaccatatgaaataaaaactaggtcctctcttgaactcccaaagggaatatctctctggctaactccaggaatttggtcagggatatatggagccaagattgtagaagctgaatcggtatataaagttactctgacactctgggaggaaatttaggccaatccgtaatagtgagtagcaatctcatacactgacagtgatgggca

SEQ ID NO: 594863 - DNA, 184 bp, Homo sapiens
tctcccttagtaggaatccttcttaatacaaggagtgagaatgcagaagagcgaaccacaaaggaattccagctctaaccccatagtacctgggagagctgctaacagccatggagataaaagaggcgggtaggtaacacagtgactgagtctgacagactgcaaagcacctctccagcgaaag

SEQ ID NO: 594864 - DNA, 384 bp, Homo sapiens
  misc_feature (69)..(69): n is a, c, g, or t
aagaatataaactttataagtatgattataatagtggagaagaattacaagcgtgcaagttcgctttgntcctattcactgtgccccatttagtcctgatggagaactctatgccagtggttcagaagatggaacattgagactatgtcaaacgtgtggaggaaaaacgtatggtctttggaaatgtgtgcttcctgaagaagatagctgagagcttgcaaagccaaagatttgttttccagagacaacagaagaggggctagaagaaattgcttcagagaattcagattgcatctttccttcagctcctgatgttaagccctgagcgtcaatcatatgttgcagttagtatacaactgactaaaacaagcaagcagagaaaag

SEQ ID NO: 594865 - DNA, 112 bp, Homo sapiens
  misc_feature (49)..(49): n is a, c, g, or t
gtattcgtctatctactgtaatatatgtgtgtcacgataacctatgagncattgatatcatagctcagacattactatgtatcgcatggtctttttcggagtagtaagtaca

SEQ ID NO: 594866 - DNA, 87 bp, Homo sapiens
acggccgtgtattactgtgcaagagcccctatatggttcggggatcatccggactactggggccagggaaccctggtcaccgtctcc

SEQ ID NO: 594867 - DNA, 805 bp, Homo sapiens
gagaccaaggggtcaggaggtgggcgccctccatccttcgagaagcttcccaggctcctctgcttctctgtctcatgctcccaggctgcacagcaggcagggagggaggcaaggcaggggagtggggcctgagctgagcactgccccctcaccacccccacgacccttcccatttcatcggtgtgggacgtgacgaggtgtggggcgtgagcctggggaggttgggagggtcgcatcactagccacccatgctgtgctatggagaacccgcccacgtcaacgcaatcccccagatactcgaacatcctggttggtctgtccgcagtggggttggcagtgcatgtgtacattatgtattcgtgactgaaacgttatgcgatcagtaacgtgataataaagtctgactaagtccttgagaacatgtttgaggctagacgcgggacggggggccaggaccccagacccacgatgactccctggcgggcgactgacgggtcccgtggattaactaaacggccccagatagcattttcaacaggccgggggtcagacgtctttccccaacgaatttccacgtgggcagaaggacatactataccacacaaacacatcctcggtcatgggcgatgggcacgcagcacgggaacaccacctaccaaaatggtaggcagcccctaggtgcaacagggaggggttgccaggggtatgacaaccgttgagaagatcgatgcaaattcacaccagggtgggtccacgacggtcatacacatcgaagaccaaaggtttttcataaaatacgaacaca

SEQ ID NO: 594868 - DNA, 244 bp, Homo sapiens
gacgttctgtagtccgagaaacaactcaatgagctgaacatcatgacacagcaccgggccaagctgctcacggacgcgagctgctgctggactggtggactggcagtgaggaggctgaagagggcgccgagagcagccaggagccagtggcacacacagtgtcggaacccaaggtggacatcccgcgcgactcaggctgctttgagggctcggagagcgggcgcgatgactcaggcgcggtcgg

SEQ ID NO: 594869 - DNA, 784 bp, Homo sapiens
  misc_feature (9)..(9): n is a, c, g, or t
  misc_feature (85)..(85): n is a, c, g, or t
  misc_feature (90)..(91): n is a, c, g, or t
  misc_feature (167)..(167): n is a, c, g, or t
  misc_feature (194)..(194): n is a, c, g, or t
  misc_feature (226)..(226): n is a, c, g, or t
  misc_feature (250)..(250): n is a, c, g, or t
  misc_feature (253)..(253): n is a, c, g, or t
  misc_feature (263)..(263): n is a, c, g, or t
  misc_feature (271)..(271): n is a, c, g, or t
  misc_feature (281)..(281): n is a, c, g, or t
  misc_feature (289)..(290): n is a, c, g, or t
  misc_feature (297)..(297): n is a, c, g, or t
  misc_feature (304)..(304): n is a, c, g, or t
  misc_feature (311)..(312): n is a, c, g, or t
  misc_feature (361)..(361): n is a, c, g, or t
  misc_feature (363)..(363): n is a, c, g, or t
  misc_feature (367)..(367): n is a, c, g, or t
  misc_feature (384)..(384): n is a, c, g, or t
  misc_feature (392)..(392): n is a, c, g, or t
  misc_feature (461)..(467): n is a, c, g, or t
  misc_feature (469)..(469): n is a, c, g, or t
  misc_feature (480)..(480): n is a, c, g, or t
  misc_feature (482)..(483): n is a, c, g, or t
  misc_feature (485)..(485): n is a, c, g, or t
  misc_feature (515)..(515): n is a, c, g, or t
  misc_feature (535)..(535): n is a, c, g, or t
  misc_feature (579)..(579): n is a, c, g, or t
  misc_feature (729)..(729): n is a, c, g, or t
taagtgtanaggtaagaactggctgcctccacccactcccagggagaccaaaagccttcatacatctaagtagggggcaaaaaanggggnngaaagggcacgaaggctcatcattcaaaataaaacaaaataaaaaagtattaaggcgaagattaaaaaagagtttngcattacataatttacacgaaaggcgntgctatcacctcccctgtgtggacttgggagngggctgggccattctccttagagngangtggggtggnttttaggntggcaagggncttcctgnnacaacgngtctcanatttggnntgactattaaaaaaacaacaatgtgcaatcagaagtcctcggccacatngngaantttgggggatgctcgcnccaaccgnctgctgtcaccttcaccgttccagtttttaaatcctgagtcaagccaaaaaaaaaaaaaaaccaaaacnnnnnnngnaaacaaataangnngngccaatctcatcttgttttctgcgcaagtnaggttttgtcaagaaagggngtagacgcgaactaagtcatagtccgcctagaagcatttgcggnggagcgatgggggggccggactcgtcatactcctgcttgctgatccacatctgctggaaggtggacagcgaggccaggatggagccgccgatccacacggagtacttgcgctcaggaggagcaatgatcttgatcttcattgtgctgggngccagggcagtgatctccttctgcatcctgtcggcaatgccagggtacatggtgg

SEQ ID NO: 594870 - DNA, 1236 bp, Homo sapiens
  misc_feature (35)..(35): n is a, c, g, or t
  misc_feature (64)..(65): n is a, c, g, or t
  misc_feature (68)..(68): n is a, c, g, or t
  misc_feature (77)..(77): n is a, c, g, or t
  misc_feature (273)..(273): n is a, c, g, or t
  misc_feature (285)..(285): n is a, c, g, or t
  misc_feature (309)..(309): n is a, c, g, or t
  misc_feature (312)..(313): n is a, c, g, or t
  misc_feature (315)..(315): n is a, c, g, or t
  misc_feature (333)..(333): n is a, c, g, or t
  misc_feature (342)..(342): n is a, c, g, or t
  misc_feature (359)..(360): n is a, c, g, or t
  misc_feature (395)..(395): n is a, c, g, or t
  misc_feature (398)..(398): n is a, c, g, or t
  misc_feature (408)..(408): n is a, c, g, or t
  misc_feature (412)..(413): n is a, c, g, or t
  misc_feature (425)..(425): n is a, c, g, or t
  misc_feature (427)..(427): n is a, c, g, or t
  misc_feature (431)..(431): n is a, c, g, or t
  misc_feature (434)..(434): n is a, c, g, or t
  misc_feature (437)..(437): n is a, c, g, or t
  misc_feature (440)..(442): n is a, c, g, or t
  misc_feature (444)..(444): n is a, c, g, or t
  misc_feature (446)..(446): n is a, c, g, or t
  misc_feature (449)..(449): n is a, c, g, or t
  misc_feature (453)..(455): n is a, c, g, or t
  misc_feature (457)..(457): n is a, c, g, or t
  misc_feature (464)..(464): n is a, c, g, or t
  misc_feature (468)..(469): n is a, c, g, or t
  misc_feature (480)..(480): n is a, c, g, or t
  misc_feature (484)..(485): n is a, c, g, or t
  misc_feature (498)..(498): n is a, c, g, or t
  misc_feature (531)..(531): n is a, c, g, or t
  misc_feature (535)..(537): n is a, c, g, or t
  misc_feature (542)..(542): n is a, c, g, or t
  misc_feature (545)..(548): n is a, c, g, or t
  misc_feature (556)..(556): n is a, c, g, or t
  misc_feature (559)..(560): n is a, c, g, or t
  misc_feature (567)..(567): n is a, c, g, or t
  misc_feature (571)..(571): n is a, c, g, or t
  misc_feature (574)..(575): n is a, c, g, or t
  misc_feature (578)..(580): n is a, c, g, or t
  misc_feature (614)..(614): n is a, c, g, or t
  misc_feature (616)..(617): n is a, c, g, or t
  misc_feature (619)..(619): n is a, c, g, or t
  misc_feature (621)..(621): n is a, c, g, or t
  misc_feature (624)..(625): n is a, c, g, or t
  misc_feature (640)..(640): n is a, c, g, or t
  misc_feature (662)..(663): n is a, c, g, or t
  misc_feature (685)..(685): n is a, c, g, or t
  misc_feature (704)..(704): n is a, c, g, or t
  misc_feature (706)..(707): n is a, c, g, or t
  misc_feature (709)..(709): n is a, c, g, or t
  misc_feature (711)..(711): n is a, c, g, or t
  misc_feature (714)..(714): n is a, c, g, or t
  misc_feature (724)..(724): n is a, c, g, or t
  misc_feature (738)..(738): n is a, c, g, or t
  misc_feature (913)..(913): n is a, c, g, or t
aaaaagttggcaaataaaaaggaattgaagcagcngcagggaagaagcaagaaatatcaagctnntanaaaccactnagaagataaacagaaaaactttctatttttacgactttgggataggaatatggacatagcaatgggctggaagggtgcccaggccatgcagtttggacagcctttggtttttgacatggcttacgaaaattatatgaaacgaaaagaattgcagaatactgtttcccagcttttagaaagtgaaggatggaacagnagaaatgttgancctttccatatttatttctgcaanctnnanatagatgggctttgcacngagagttanttaaacggtatcaagannaatgggacaaattgcttttaacatcaacagaaaantcncatgtagatntatnnccaaaggacagnantatntanttnacnnnanantcncccnnngntatgacnactnncaggcatgacnaagnntatgtaattgggncttttgttgataagagtatgcagccaggcacancccnnnccaanccnnnncggctganccnngcaactnaatnccnnccnnnagataaatatttacaatgggaaattggtaacaananncncnccnnagatcaaatgatacntattttgttatgtctgaaatannatggtaattggcaagaggctcngcaattcgttcccaagagnanncntnctngttttctggngatttctcagcatnctcaagagtttatcaacagactaaagaaggcaaagacttaattcattttcaaaaggttctctgaatgtgcacagaacacgtggctcaaatgagaacatttgatggcttaaaaagtaaatgcgttagaaatacagttctgttaatgtatttcttcccaaacaattcatttttctcntctaaaggtagtctttcccaactgactgtagggttgtgtcttttcccaattaaatatgtacagaactttgggattaggctttgtttcctgtagaaagataatcaaaataagttgtccaagtattgctgaacagaataatctttatcccagttaaatagttgcaccattggtagacttttttatgtaggttcctacagggtggtgccctggggtgggcttgcaagctatgctaccccttcccccatagctttccccaggcctccctttgtctgtatgatccgacatctctttgtcagtaaactggttaatgagattccttcaaa

SEQ ID NO: 594871 - DNA, 205 bp, Homo sapiens
cccatccttccctctatacaatccttccctcctcacacaggctgtaggaagcatggctctggcaaggccgctgctcctgctctcaaggggctgcttttcaaccaaaaaccactggagccccctctgagccttgcacaaccactgactatttttttgccttacccagggtacctcctacctcagtctacgtgaaaaaaggaaggat

SEQ ID NO: 594872 - DNA, 234 bp, Homo sapiens
  misc_feature (1)..(1): n is a, c, g, or t
natcagcatacaagtacagactgaaaattaattcatggatctagcaagcactgcaggactgtcactcaccgaagcaggaaatatggttactacatacactgactgtcaggacagtagttctaatctattctcactaaatccaactggctagactcttcctcattatcttagatgcaaaccaattctcctgtgaactatcttagacaagtgcatgcatttcactactataacatt

SEQ ID NO: 594873 - DNA, 474 bp, Homo sapiens
  misc_feature (1)..(1): n is a, c, g, or t
  misc_feature (69)..(69): n is a, c, g, or t
  misc_feature (72)..(73): n is a, c, g, or t
  misc_feature (75)..(75): n is a, c, g, or t
  misc_feature (78)..(78): n is a, c, g, or t
  misc_feature (95)..(95): n is a, c, g, or t
  misc_feature (128)..(130): n is a, c, g, or t
  misc_feature (133)..(138): n is a, c, g, or t
  misc_feature (179)..(179): n is a, c, g, or t
  misc_feature (195)..(195): n is a, c, g, or t
  misc_feature (199)..(199): n is a, c, g, or t
  misc_feature (202)..(202): n is a, c, g, or t
  misc_feature (206)..(206): n is a, c, g, or t
  misc_feature (208)..(208): n is a, c, g, or t
  misc_feature (217)..(217): n is a, c, g, or t
  misc_feature (282)..(282): n is a, c, g, or t
  misc_feature (370)..(370): n is a, c, g, or t
  misc_feature (467)..(467): n is a, c, g, or t
nggaggagaggagaatttttccaaaatctgacggaaagaaaagaaacaaatggttcagatgggacgganggnngncgngggggggggggtgagtnggagccaggggggctgcctggggtgggggagtnnnttnnnnnntgggacgagttttcatcggctccaggaaagtttcttctgtnaaaagacgcttttganaagnttntttntncgtacaatntgagaaatttttcgaacgttaagtcccccaaaccaaagtttgtgatgtgggatggttggctcggntcccgaggtgggtgggcctatgaggtggttgctaagtcgacgcaagggcggcgggggtggtctcagggatggacaaggggatggagtngagtttgttcagcccccggggctcacaggggagggggacggcggagtcggtggatgacttgtcaaactcgggcgggccctcgctgttcgcatccccnttcacgg

SEQ ID NO: 594874 - DNA, 1231 bp, Homo sapiens
agcggctggaactcctggattggtgttaacggtggtaatttcccccatataagcatgtagcaatcactgagctctgagctagatgaaatctcttaaaattctctggttgtcttcattacggactgactgaggctgacgtctacttctctcactatgaacagctagatcaataacagcagagttctcactcagaatgctcagctacttaactttcccactgcaccaaactgtctctacactaaactgtgctgtactcctcctccaacaagcttaacagctcctactcctgcgctgatccccaccgacaactactaccgtgaaacagaccactgccactgtccccggtaacatacccacccagcagcttcctcgtcacaggccgtgcacccaacgctgccactcctcacactcccgtgcgacacactcatcctctcactcacccccctccctaaacacctaccacctcaccctactcacaccacatcactccccacctaaggcgtgctgctgcacgcccaaaacacctcgccactacttacctcccacacaacttggccacgacgccaccaggacaagccccccccctcacccgcgcaacaacacaggcccctcactcaaccacgcctgatctacaacctggcaagcgacccttggatcgcccatcacatctaccccattataaaccgttacaccctttttggtgcccttgaaccctttctggtgtccctggctacttggaggaacctccctccctactacactcccatttcaaaacacaccacaaccacacccacctcacacaccggcacaaccgcacgcggcgcaccaaacccccgctgctacttacaacacggacaccccctacccccgacaactacccccaccggggatcccccgcgcacccgcacgacacccagacacaccccccccacacgaacaacgcgccccatcacccaccacttcacccaccgcccaccccctccccgaccgccccgccctaaacgaacacccacactcgaacccacacgccgcctccacccacaacaccccggaccgaccacacagaccaccagcgcccgcaccagaccggccaccaccaccaccaagcctcgccccgagcccagccacatcggccgcacagttgaaccaaccccacacgcacaccggacgcggcacaaccccaccaaccccgcaagccacacccgggcaacccgccgcgcgcgacccccag

SEQ ID NO: 594875 - DNA, 143 bp, Homo sapiens
ctatactctatacgacacctccaaatggaggaaatagcaaagaaatcaatctagagctgctcgcatctccctgctgctcatcgagtctgtggctggagccctgtgcgtgttcctcacggagtatgtgcggacaagaaccgtgg

SEQ ID NO: 594876 - DNA, 1022 bp, Homo sapiens
  misc_feature (356)..(356): n is a, c, g, or t
  misc_feature (372)..(372): n is a, c, g, or t
  misc_feature (382)..(382): n is a, c, g, or t
agcgggcggggccgggggggggatggcgcacgctacgaggggcggagcggtgggcgctgagagtcgctgaggatccggaaacgcgccgaatagggtgcggcgccagtaggacgtcggcgggccgggaaggggccgggggcggggacagggaaacgttcagtggccagcggaccccgagggtgaagaggggccagacgcaggacctgcggcatgggaccccgtagtgctgaatctgcttgcctctgggatgaagagagtcgaagacagtaggggcagcgcgctgtgtctgcttctcgagacgtcgcaggcatcggacaggtgctatgggcagaggcgcctcttgtaccctgtaagangctgattcttggaccngtgcacatgngtcctccatgtgatggtgaccctaccgaggcactgtgcgccaaacatacggttggtccagcgggagattggctcgggacccatctcgagtcacctatcgtggatcgcaaaggctgtgggggcggtgtctcacgggggttagtaacgacactccgtgagggtacacgaagttggggccagcgtctcgttgagatgcaggcaggggaatgcatgtaggactagaagtacgtgttaggggtaagcaatcgggtgaaacacctgtgagcaaaaacagcgtagaaacgccccaatgtcatttgcctcggttgattctcacgcctgaagcctaaggcccggaactgccaggacaatgctacattgtctactcacattcggaattgtcttttctagtggcgaccccaaaaaggccacagtatgtaggccagattaccactcaccggggaagtgggacacatttggacactttttggagaaccaccccattggaaagcttcccacatgttggcgtggcgaattgagggaaggctatgcgtcggaaacatttacaaatacaccgtgcgtagagttggacggtccaacagttggcccgttttgagaccacaggtttctttcagagagaggacaagagctccacacacatg

SEQ ID NO: 594877 - DNA, 93 bp, Homo sapiens
cagtgtagcccaaagcccccaaccccccccagtggaaagctcctgcatcatgtgatcgagcttgtgcataaataaagccggggtttttcccca

SEQ ID NO: 594878 - DNA, 308 bp, Homo sapiens
aggggggggggaaaaagcccccccttttaaccgggataattttttggttccctttttaaaagggtttttttggagggttttgcccccccctttcccaaaaattttttgggtttttggcggtttttttttttttttggtttaaaaggggcgggcccttttttttgggttttttgggtttattttttttttccccgggggggggccctctcccccttcgggcctttgggtttggggaatttttccccctttagccccaagggggaaaattttttcccaacccatttttttttttttttccttaaaaggga

SEQ ID NO: 594879 - DNA, 112 bp, Homo sapiens
  misc_feature (73)..(73): n is a, c, g, or t
  misc_feature (99)..(99): n is a, c, g, or t
gcggagagactcccaaaatgtgccaagaatttcccggtcccaggcagggcaggggaaactaagggcaagcagnatacagggcgagggatgtggcaggtnagggggctcccgc

SEQ ID NO: 594880 - DNA, 936 bp, Homo sapiens
cttaatcggccacctgccgcgttctacagcctctttgcatctcggatttcggggcggctccctcccccatctttccctgcttctttgcaccccgctttttctgcgtttcgctcgaattttggagccgtctggttttgcaccccttttgttttgcttctaggcggtgtgtggggtgaaggtgcctcggcatccctttccctggttatctttccctgttttgacagcccccctttctatcgcagtcggggggcctagcctcggtgcaccttcgccgcactgccagcagaccacagtgcgtggctgtgcaccccggaatttgcagcagctgtatatctgactggagtctccctgcctcgctcccgcgcgcatttggtgcgtggagggcttcagcgcgcgacgccccggcttctccgcagcccccagcagcgcgccgggactcgccccgtgcctccaagatggtcatccagaaagagaagaagagctgcgggcaggtggttgaggagtggaaggagttcgtgtggaacccgcggacgcaccagttcatggggcgcacgggaccagctgggccttcatcctcctcttctacctcgtcttctatggtttcctcacggcatgttcagcctcaccatgtgggtaaatgcttgcagaaccggtctctgacatacccccaagtaaccaggatcgactggccacacaggcttgatgatcgaccagactgagaacctgttgtcttgtcacttgtgacttgaagctggtcagtgttcggaagtcacagtcttgacttcaagatcctccgcaaaaattgtgcgtcgggatattgcccgattgggtgaacaaaaagtgccctacgggccagtgtttgctggccccatttacacgccgtttaaaagccattggcacatgtttaaaaaaaacttcggataaacaaagatagag

SEQ ID NO: 594881 - DNA, 453 bp, Homo sapiens
gccgtccagtactttttgctgtgcccccaccagagcctaaaggatgatccatgggatcctagccacgccgggcatgggagccgctgggaacaagccggagctgtatgaggaagagaagttgttcaagaacgcccgggagagggagaagtacgacaccatgcctgatctgtatgcagggacaagacaatgcttgccctgaagaaggactacatcaaggactgagtctaccccagctagcaggtccagggctcaagaatcagctctattgacgaattctgccgcatgatcagcctggactgcccgctggccatgtagcggatcagggaggacctgcccatcaccatcaaggactacaagggcaacctcaaccgctgcatagcagacgtggtctcgctcttcatcacggtgatggacaagctgcgcctggagatccgcgcaatggatgagatccag

SEQ ID NO: 594882 - DNA, 159 bp, Homo sapiens
ggagtttgagatcaactccagcaacatagcgagacccctatctctaaaaaaatttaaaaattagccgagtgtggtagcacgcacctgcagtcacagctactcaggaggctgaggcgggaggattgcctgaacccggaagctgtaggatgcagcgatgct

SEQ ID NO: 594883 - DNA, 455 bp, Homo sapiens
tttctgggagggaagcgggccccaaagcaggccttttgatttttatttttttaaagcgaaattttaagaggttagattttatccaatttgtaggggttctagggattttttcaaaaatgcttggttgcctccactgttcccccctctgctcttggaggggatggggacaggggtggggtccaaacccctggaattttggatcctgatgtctttgttaaggccgctgaagaattatttttttttttttataataagggataacccccccttttttccttcctttcctctacccttttttgggttttgggttgggtggggccggccccctggggtttttttttgccctggccacttttaattgccctggcccggttgttcaaagtccaataactcccccttgttaaccaactggggtactgccccaagccgccctttttaatccgccttaccttaga

SEQ ID NO: 594884 - DNA, 626 bp, Homo sapiens
gatggctgctgagaagcaggtcccatggcggcggcggcggtggcggcggtggcggctgcggtggcggtggtggccgcggtggcggaggtggaggcccgatgcagaagatgatcgaccctacggacggttcgtaggcaatcaacgaattggggatagcgtgggttttgtgcattcttctgattattcaggtaatccaggacagctaggagggtaagcagcatgagacagtctgtcacgatggttactggggagcgaacgtggagcctgctatgactgctgcacgctcttacgatagatcctactcccagctttcaacctcatcggtgcaaatcgatgtagatctccgaacattcccgcatgcgagggaaacgaaacacgtgaactcttgcacggacgccttcgtagtgccgcgattccatgtcctgcgtaccttatgtccgtctctatcgtgttgtcatgcttgggatgtgttcgatgagtaacgcctggggagcgctgcgctgctcatgtgctgcttttgactcccacgggatgcgtccaggccagtgacccccccgtgatggcagtcggcttctcgacttgcctagtcttcgggcctacctgctttagctccgttcagcgcgttg

SEQ ID NO: 594885 - DNA, 461 bp, Homo sapiens
tctagaggatccctctgtgctgggaggagggggattggcaggtcataggacactagtggagggaaggtcagcagacaaacaagtgaacaaaggtctctggttttcctaggcagagtgtttggtgttcctggggtacttgagattagggagtggtgatgactcttaaggagcctgctgccttcaagcatctgtttaacaaagcacatcttgcaccgcccttaatccatttaaccctgagtggacacagcacatgtttcagagagcacagggttgggggtaaggtcatagatcaacaagatcccaaggcagaagaatttttcttagtacagaacaaaatgaaaagtctcccatgtctacttctttctacacagacacggcaaccatctgatttctcaatcttttccccaccttgcccccttttctattccagacaagaaccacacgccagcaaagaaccacag

SEQ ID NO: 594886 - DNA, 401 bp, Homo sapiens
ataatacctgtatacacattgaaagcacttaataagaataatgccagttgaaagtatacctgtctcatcagccgatcataaaataagctcctgtaaaaggcatagactcctcacacgtaaagactttgtgcgtcacagtcatgtgtccaacagttttacccattaaaaatacagccattcaagatatgtgtgcatcctttgcacctagaatccacttaaaaaacgtttgctcattaacctgtcttaaaacattattaaatgtaacacccctcagatgaaaccttcgcagaataacccatatcttatcttccatgtggctacagtcaaccttcagcaacagttcagcacccacatcttattcacagggtccagttcctaagtgttgcagattggcgcaaact

SEQ ID NO: 594887 - DNA, 305 bp, Homo sapiens
tggaagtattctggcctgctgcagtgagtgtgcaggctgacgctgcaactgtaactcgccatcgtggctggcgagccagtccagccccagtggctgagctgcctccaggtctgcagtctggcaaccaggtccagccgcactggcgggcggaatgaaaagcgtggctggggatcggcgcctgtgtcggcggcgatgcgcaacatcagcatggcttccgtgcggatgggcgcgccgccggcgtcgcgcagcggctcggtggccagctcgaagcggtgctcttccagggccgacaggatggcatcctt

SEQ ID NO: 594888 - DNA, 103 bp, Homo sapiens
gtgatgacgacaaggtaaggtataacgggctaaaggcttcccacattcatggcacgcaaacggtttctctccagttgtggatcctctgatgttgagcaaggtg

SEQ ID NO: 594889 - DNA, 425 bp, Homo sapiens
  misc_feature (25)..(25): n is a, c, g, or t
  misc_feature (33)..(33): n is a, c, g, or t
  misc_feature (60)..(60): n is a, c, g, or t
  misc_feature (63)..(63): n is a, c, g, or t
  misc_feature (162)..(162): n is a, c, g, or t
  misc_feature (301)..(301): n is a, c, g, or t
  misc_feature (347)..(347): n is a, c, g, or t
  misc_feature (377)..(377): n is a, c, g, or t
  misc_feature (381)..(381): n is a, c, g, or t
  misc_feature (425)..(425): n is a, c, g, or t
tttatttggcagctgctgcctcacncacagctnttgatatctaggaggactcttctctcncanactacctgtcaccatggcccaccgatttccagccctcacccaggagcagaagaaggagctctcagagatagcccagagcattggtgccaatggaaaggngatcctggctgcagatgaatctgtaggtaccatgtggaaccgcctgcagagtatcaaggtggagaacactgaagagaaccggcggcagttccgagagatcctcttctctgtggacacggccatcaaccagagcattggnggtgtgatccttttccacgagaccctctaccagaaggacaggcagngaaagctgtgcagagacatactcaaggagnaggngatcgtggtgtgaatcaagttagaccaaggaggtgctcctcttn

SEQ ID NO: 594890 - DNA, 546 bp, Homo sapiens
ggcgcacgtgctccatgggcctcattaactcgcaacagcgccacaatacggccgccgccacaaccggcgggcacatagataggccccctccgccccaccaatcggcaccggaatgaagatggggccccccaccgacgccaaccccccacaagaggttgggcccccgcgagcgtatcaccacccacgcccgcgttccacgccgagggggtaacaccaacaaacagcccgcgtcccccggagggtgcgaacgctcgggcaacattcttctcccccgggacaaaagtcttgacagtccgacaaaccacggcaccagacacagaggctggtacccaccacaccacacggaaccaggggtggatgcgccccacagaaccccgtggtagaaagaatgcagctgggcgcatcccaacgcacacccccgccctccccgtgggtacccagctcccccctatgcgccccgcccccgcggcccccaaaaacaggggccctccacgagagacctccccaggcagcaaaaaaattttaccaaaaccccccccacataac

SEQ ID NO: 594891 - DNA, 208 bp, Homo sapiens
tggggggggggcccccccccctttttttttcccccttttataaccccggggggcgcccccccccccgtttttttttttggcggggggggggggtttttttttttccccgggccccccttcccccctccccccttttttggggcccctttaacccgttttttttccaaaaccgggggggggcccgccccggtttcccccggttttttta

SEQ ID NO: 594892 - DNA, 980 bp, Homo sapiens
gggagaggagacgcatcatctccgctgactcgccgctcctacgtctcctcagagggagatgatggtgtggtgggcctggctcctggcctgcctgtctgggtcctggcacccgcctctccctggctctgaatgccccctccactccctgaccctgtggtgtgatttctccctgtgctggggcactcaatgctggcttccaaggcagcacccgggcccagtgcagctgggccatgcagcatgcatggcagcctccaatgcacctgcgtttgcccagctcaccatcgcagcacaggttcgctttcccgtggcaacagccaaaaccaaggctgctggcatgctgcagctgaaccagactgctgggccaacggagcccacccaatgctgtgccagacgtctaccagtgctgatgctgcgacgagctgctggctgctggctcgactcaactcatcctgccaccagctgccctggctggacggttgacgaggtgacaatctggtgcaccatggaccatgtgccacttgttgacgtgcacgaccgctccagagtgctgaaacccaaccctgcaggctggaacgccgatgaatcacgcctgtgctgcctagtagacatggcagcatgactgaatgcccaccctgtgcccgtctggactctggagcaggcaagacgggcgtcgcttgcgcaggagggcagcacccgggtccttggcaggccgcatccacgccggcaggcggcgccggggcactccagcgcagcacgctggccccgaccagccgcgcccaatgcaggaccgctttgcaccgccctggcccccagcgcccccggcccctaccacccggcgacggccgccttgcaacagcccgacttctgtcaaccgccagctacaatgaacgtgcgactgggcagcatccccagcacaccctgtgcagtgcacacccctgacaaagcgtgatacctggtcccaatcgctgaccgaccccatg

SEQ ID NO: 594893 - DNA, 91 bp, Homo sapiens
ccccccccccccccaggttttttttttttggtttttaaaagacgggttgggaaaaaaccccaaaaaaaaaaacttcccgtgggttccggga

SEQ ID NO: 594894 - DNA, 276 bp, Homo sapiens
attgtcctgtacataactggagagccttctaaggtctctcatcgctggctcagctacagcgtggctccggtccgcgtgctctctgctccacccgacttccattttggccaaatcaaccgcacccctaaatttctccgcacatttcctgccggctaggtcccagcatttcgagggtgagtgatggattctgtgctgtttgagagcaacgcctttgactactatgttagcactgaggagctgtggggaagcactccatatgcagcagtccaagtcgtg

SEQ ID NO: 594895 - DNA, 245 bp, Homo sapiens
aagatacccccgccagcccttaaccctatggtttagttgcccttttttaccttagagtgctgaattgggctaaatcgacccctgtggctaggagactatacactagcaatttaagtacctgccgtgcgacagcagaggcaggctgaagcatctagataccaggactgccctgatgacttgctgacaatcacgcatggcctatgacagagcagaccacacatgaggtgtctagggctgactgtaac

SEQ ID NO: 594896 - DNA, 212 bp, Homo sapiens
tttagatggagtctcattcactctgttacctaggataaagtgcagtggcctgatcttggctcactgcaacctctgcctcccaggttcaagggattctcctgcctcaggctcccaagtagctgggattacaggcacatgccactatgcctggctaacttttgtatttttagcagagatggggtttcaccatgttggccagggtggtgtcgacg

SEQ ID NO: 594897 - DNA, 339 bp, Homo sapiens
  misc_feature (48)..(48): n is a, c, g, or t
  misc_feature (94)..(94): n is a, c, g, or t
  misc_feature (96)..(96): n is a, c, g, or t
  misc_feature (107)..(107): n is a, c, g, or t
  misc_feature (116)..(116): n is a, c, g, or t
  misc_feature (133)..(133): n is a, c, g, or t
  misc_feature (138)..(138): n is a, c, g, or t
  misc_feature (141)..(141): n is a, c, g, or t
  misc_feature (144)..(144): n is a, c, g, or t
  misc_feature (174)..(174): n is a, c, g, or t
  misc_feature (257)..(257): n is a, c, g, or t
  misc_feature (275)..(275): n is a, c, g, or t
ccgggttccatgcccaaagggggaagcgcattccccaaccctcagccnctgcccgcccaggaaagccagtcattgccggttatgggcttccccncnaaaggcccttntgcagtggnagtgccacatccagttnttttnttntgntgctgctgtgtttagataattgaagagatntttgtgccacacaggattttttttttttttaagaaaaccctatagatgaaaaattactaatgaaactgtgtgtacgtgtttgngcgtgcaacataaaaatncagtagcccctaaggagcttgaattttggttcctgtaaaatttcaaattgatgtggtattaata

SEQ ID NO: 594898 - DNA, 364 bp, Homo sapiens
ttacttgtgctagtggcccagatgcctgctgagaggcagcgtagcagacgtccgggttcaatcccagctctgcctcttactggtggccttgggctagtggccttggcccctctgtgcctcagtttccccatccttgtgctgagagagatgaatggtggcctgcgtcaggccctcagggcggcccagcctgagtccggatggaggtgaactctgtggctgctcttggaatcttttctgggtgacttgttttctccttcacaagttcccaaatttccacgctggtcatgaattctatttcataaccagaaaaagcctgagagaccatcaaccacccagcccatgacccctagcagggacccactcg

SEQ ID NO: 594899 - DNA, 355 bp, Homo sapiens
  misc_feature (16)..(16): n is a, c, g, or t
tgggctggggaagagnggctgggatggggagagggaagaggtagggtgtgtcaagaatgaggaacagacacttctcaaaagaagacatttatgcagccaaaaaacacatgaagaaatgctcatcatcacgggccatcagagaaatgcaaatcaaaaccactatgagatatcatctcacaccagttagaatggcaatcattaaaaagtcaggaaacaacaggtgctggagaggatgcggagaaataggaacacttttacactgtgggtgggactgtaaactagttcaaccatggtggaagtcagtgtggcgattcctcagggatctagaactagaaatacctcttccccagcccag

SEQ ID NO: 594900 - DNA, 963 bp, Homo sapiens
gaagtaagaaccctctcgatatgacaggaatagcaaactggtaatattgccatgaaatgtggaagagtgttgtagctagatgctgatctgagaacatgccgtggagtgcatgccgaatagtgtgaagaatatgtgcaggaatagtatatgcacgactgttgaactatacacatcatccacgaaatagcttgcgtctatatgaaacatagaatggttcaatgggatccatcttgatctgtctcgagaatctggatgagtggcaaaatgaggagtagatggaacaagaatagtgctgctgacaaaatcctagaggatgggccatttagggtcttgacctcgattataagactatataggtagtgctaaaagaccatggatgtgtaagagatagatatgttgcttatgagctgagaagaattgcatagtgatgaggaggatgttgagtgctggggcgaaaggtatacaaacttagttgaaagtgttggtcaacaattgtaaaattgctctagaattgatgagatgaggtatacttggggaattggtatgtgcaaccaaaagatgtaggcattcattattatgttttgctgtagggctattcatatatatttgtcaaggatatagtttttcataaatggggtgtgagagtctggaatgtactagtgggtcgataagaagtatctgctgatatgagtactcatgtttggaagaggtatgaacgataatggtgcgtagggacacgtagcagggggatttcatcgatttcctaggatagaggttagcagtgatccggggttaaagagctttcgggggatgttccttttcagcaagaccttcgtgcgtggattttcatccccggcttcaacacagtccgatgcggggcatgcgcatctacgggaacgggctcggaccagactcaataaggtcgggtgttcacgcagcacaagatgaagcggagcccaaagc

SEQ ID NO: 594901 - DNA, 163 bp, Homo sapiens
gtcacgtaagatgcatgtacagttgcactcgacttccacatttgtattggcagggcacaaccatgattctcttcccgaggaaggtatcgctcaccattgtgaagaagagacaaagacggggcaacaagcagtggtgaatggggcctggtgacattcagggtac

SEQ ID NO: 594902 - DNA, 248 bp, Homo sapiens
  misc_feature (59)..(59): n is a, c, g, or t
acaagctcctcctcgccgcagcttgagaaagctgagtgcagcaacaaagacccagtgcngccaaaaatgaatgaatgcacgagtaaataaaggcttcctttagaaaaaaaatattgctttgcaagtccacctgtgaatatttgaggctccagttacagttcccatctgacagtgtactcttaagattctctaattgcccttaagagaatataattgtctctccccagtgatgaaacgttgaagggggt

SEQ ID NO: 594903 - DNA, 421 bp, Homo sapiens
agtatagatctgggatgcattgagatgcctcctataaagtagagactttcaaaattcatatttgaaaaacgatttactttaaaataatgaaattagttataaattagtaatctagaaaaacattatcatgataaaaatgctctcatttcaaagggcgtatcactaaatgcctcattatcttcagacctcaagtccggaatcgtcgtcgttgttttctgcgtgatacccagtttggaacttaggcaggagggatatttccttgaattatcaaggatattccatacagacttttaaaatgtcagtctcattaggagatggcactgagactttagcaaatagtgtagtatggatgcaggacaaactacacaacttattataaatgcattacacatatttacatagtggaatcctgcttgaatgc

SEQ ID NO: 594904 - DNA, 619 bp, Homo sapiens
  misc_feature (4)..(4): n is a, c, g, or t
  misc_feature (96)..(96): n is a, c, g, or t
  misc_feature (129)..(129): n is a, c, g, or t
  misc_feature (146)..(146): n is a, c, g, or t
  misc_feature (149)..(149): n is a, c, g, or t
  misc_feature (166)..(167): n is a, c, g, or t
  misc_feature (201)..(201): n is a, c, g, or t
  misc_feature (214)..(214): n is a, c, g, or t
  misc_feature (254)..(254): n is a, c, g, or t
  misc_feature (265)..(265): n is a, c, g, or t
  misc_feature (271)..(271): n is a, c, g, or t
  misc_feature (300)..(300): n is a, c, g, or t
  misc_feature (305)..(305): n is a, c, g, or t
  misc_feature (326)..(326): n is a, c, g, or t
  misc_feature (337)..(337): n is a, c, g, or t
  misc_feature (352)..(352): n is a, c, g, or t
  misc_feature (359)..(359): n is a, c, g, or t
  misc_feature (364)..(364): n is a, c, g, or t
  misc_feature (366)..(366): n is a, c, g, or t
  misc_feature (369)..(369): n is a, c, g, or t
  misc_feature (372)..(372): n is a, c, g, or t
  misc_feature (374)..(374): n is a, c, g, or t
  misc_feature (378)..(379): n is a, c, g, or t
  misc_feature (381)..(381): n is a, c, g, or t
  misc_feature (391)..(391): n is a, c, g, or t
  misc_feature (399)..(399): n is a, c, g, or t
  misc_feature (404)..(404): n is a, c, g, or t
  misc_feature (424)..(424): n is a, c, g, or t
  misc_feature (426)..(426): n is a, c, g, or t
  misc_feature (437)..(437): n is a, c, g, or t
  misc_feature (442)..(442): n is a, c, g, or t
  misc_feature (448)..(448): n is a, c, g, or t
  misc_feature (470)..(470): n is a, c, g, or t
  misc_feature (483)..(483): n is a, c, g, or t
  misc_feature (517)..(517): n is a, c, g, or t
  misc_feature (521)..(521): n is a, c, g, or t
  misc_feature (533)..(533): n is a, c, g, or t
  misc_feature (597)..(597): n is a, c, g, or t
tacnctacccgtttttttttctgtttttcagtccctctctcttcccacccccacaggcataccaacagggtcaatcttccttcatggtacctagtntaactgtctttttccttaggtaaatggctaaanatgtattcatgactgcngcngtaagggcatccacctnngtatctttacatactttgagacagtgtgataaanctctttcagcacngcagtctattcattcaaagtcatctaaccggataccttcncccacagctangaaagnatcccagtgtttccctagtttagagatgnagttnctgaaattgcgaaagctaaanggctgggactnagatccaggtcggtngttcagntttancnggngtncncgtnngnattacgaagngttttgangtatncctgtaggggcctgttctgncnccggacggccngggcngggtgncctttgggggttcttgggatgnctcagttgtgtgnctagggctgctcaggaggtggggtcgggcggatnttcncggacaagaggntacatcattcttagtttttagttttatataaacacccccatttttagttttatatgaccagatnaatatggttcacttttatttac

SEQ ID NO: 594905 - DNA, 133 bp, Homo sapiens
  misc_feature (37)..(37): n is a, c, g, or t
  misc_feature (62)..(62): n is a, c, g, or t
cgggcccaaactcgtgttatattatcgaggtggaaancagccatatgtattaggaggggaanctgaggcagaccacaggacggggctccagagggaggacaactaggcccagaaccccttctgtcgtcttctc

SEQ ID NO: 594906 - DNA, 1160 bp, Homo sapiens
gaggatgactatggagacccaggatgtctcaagaatgtatgtcccagaaacctgtggctgcttcaaccattgacagtttatgctgctgctggcttctgcagacagtcaagctgctcccccaaaggctgtgctgaaacttgagcccccgtttatcaacgtgctaccagagaggactctgtgactctgacatgccacgggggctcgacagccctgagagcgacatccattcagtggattccacaatgggaatctcaattcccacccacacgcagacccagcatacaggtttcaaggcacaaacaacaaagtgacagcggggcagatacacgtgccaagactggccagaccagcctacaggaaccctgtgcatctgactgtgctataccgaatggctggtgctccagaagccctacagctggagttccaggagggagaaaacccatacatgctcgagggtgacaaagactggaaggacaaggcctctggtacaagggatacacaattaacatatcccaagcaaactgggcaaagatccccaggacaaatactcccaaatgagggacatcccacacatttcatcacaatccccacaagtgcaaaacgccagaggtcaacaagagggtgaactacacaaatggacatcacggcaaaacaatagggcctatagaacgcacggtatcacttagaaatacccgaaaggccacattggtagcacacaagtcacacccgtggtaccccaaaggttgacccacatgcaaaatagaagagacaaggcctcaaataaaacccacaattggagagagatacacaatatagatcgggcatacgcccgcaaccaacgtttggcgaaacaataaggactgggaacacgcacagccaccaccacataggagaggggccgaggcaccaggcccaagacatgcgggagcacctgaagcaacgtacaaaacaattggcacgcaggcaccaaccacatgcccgcagacactatgccacgcgacccgaacaagacacaaacactaggaacacccgtacgagtaacagagcggcaagcgccaccacacatcattaggacagccacaacaccaagcgaaaacgcgatccaaaacgtgtgcaccggcagagcaccacacgccacagacaaagaaaaccaccccaga

SEQ ID NO: 594907 - DNA, 577 bp, Homo sapiens
ggatggatctcattggcattatgctgaatgaaaaaaggcaatctcaaaaggtcactgttaggttccaggtaggtgggacatggctttattcagcagtttcttcacactgtcggtgctgcatttatgcacctcacagaccataatggctcagaggcaggtgatgagccctcccacgttatggctacatagctgtgattatgtaatgcatgggattgtgcgcctgtgctccaatcccactgtgtcatactgtgcaggatgtgtacctcagcctatacttgactgcagcacagccattgtccttacaatcacatactgtaaggacagtatgtgattccatttatataatagtctcaaaaatgataaaaagatggagaactgattggtgctgtacaaaggttagcagtgttggtgaggggagttgtgactataaagaggtagcataaggaagatatttgtggtgatggaatagttccatttctggattgcacgtggtggttacaagaatacagacgtgattaactggcatagaattacacatatgctttgcaccaatgccaatttcctgatgtcggtatag

SEQ ID NO: 594908 - DNA, 178 bp, Homo sapiens
tctctcagcgtcaatggtctgttagtccccggccttcgcaatcggggttctgtgtaatatctaagcatttcaccgctacactacacattccaagaacttcacagatattcaagactaccagtatcaaaggcaatttctcagttaagctgaaacctttcacccctgacttaatagcccg

SEQ ID NO: 594909 - DNA, 184 bp, Homo sapiens
tgtgctggagagttcattaccctaaggacaataaaaataagggcttgaaagctggagtggcgggggtacacgacggaagtcccagctactggggatgctgagagaggaggatgcagtatgctatgatggtgccggtgaataaccacggcactacaaccggtgcaatatagtgagagcttatctt

SEQ ID NO: 594910 - DNA, 132 bp, Homo sapiens
  misc_feature (1)..(1): n is a, c, g, or t
ntgagtacagagtaggccaggacagcactgtggtgatggccagcaccccttgatgctgacttactctccaggtgcaaagccagcgccaggatgatcacacgcagctcgatggccagcaggaagaagcgtgta

SEQ ID NO: 594911 - DNA, 290 bp, Homo sapiens
atagacaccctgagtctaggatgatctttcaaagtggtcctgggttgagatttagggccctgcctttataccctagtgtgacagccactggatacaatgctctggaaagggagatgaccctggatggagtgccaaagcctttcccaagagggcttataataggattatctgctggcagcaattctagcagctgggacaataagtccattcctgacaggggatctgggtggcgcatcacagaatccattacgtaaaataggagtcaattttgaacatatttctgtggagga

SEQ ID NO: 594912 - DNA, 332 bp, Homo sapiens
ggctctttagatcatagttagtttaaagtctgttttatcagataccaggattgcaccccatgctatagagacacttaccatttgcctggtagatcttcctccatccctttattttgagcctatgtgtgtctttgtacatgagatgggtctcctgggtgcagcacactgatgggtcttgactctttatccaatttgccagtctgtgtcttttaactggggcatttagcccatttacatttaaggctaatattgttatatgtgaatttgatcctgtcattatgatgctagctggttgttttgctgccattaactgatgtagtttcttctaagag

SEQ ID NO: 594913 - DNA, 116 bp, Homo sapiens
aatgattgagctcggtaccaccagtctatgactgcgtctgcgtcatgtttgcctccattcctggatttcaaagaattttatacagaatcctgacgtgaacaaggagggatgagcat

SEQ ID NO: 594914 - DNA, 947 bp, Homo sapiens
agcctcttaaaagcagcaaaaacggcaaacaagaaagagagaaccacacgccgcttagtacattgtagtcctctaccagcaccccccgtgacgccggtacaaggggcaccggtggacccgccaattccgggagcgggtaacgtccctcccccgattttaggccgtacccaaaacggggggactaaacataccgccgtgccgtccgaacacacgcgaatgtggagaccccaaaaaaaaggggttcgtcgggccgccccaggtcgcgtgacccaacgcgtccgcaccgtgttcaagggcgccaaattctcataaatcagggtcatcggccacaagttatgccgccacccgacaccagaacccgtctttgcgggggtgggcaccccacaccaacatggaacccgcggtcattcaaacacacccccccgcggggggggaaacaaagtcgccgccaccgcgtccatggggaaacccgaccgggccaatccacaagggcgttaccacagggccaatgtaccagccccatcccgcgcccatctgtctcccacgaaatacaccattccttccacaccggcataatcagccgatgagccttcgcacccaagaagggcagtcacgagggccaacagagcacaccactggatagacaggcggctgcgcggttcaggctcagcaccacgggtggccccccagaccccacgcgaggagggggtgctgtttcaaaaagaggacgtactatgagacggaggggagcccctagcaccacgctcctcaatccgggggaaaacacgcggagaacaccctggtgcagatgtatttattgtccactcccacggcctgtcaccaggggcggtgctgaccaccaggtgggcagaaatgtcagcctatctccccctcgccaaccccatcctgtccggccccccccctaaccttgttaaaacacaaaaaca

SEQ ID NO: 594915 - DNA, 1273 bp, Homo sapiens
gcgccctccctcctgggctgacagcaccagggtgctcagacgcatccaccaggggagcagccacagaccatgatcccaggacaccacactggcccgggaccttgctggagggaggcagctcctccccgggagcccagagcttattcccaagccatgagtttggacgggggaggatggcctgggatggccactggtgcccaaggtgctgagctggtgatacatcctgagaagccagggcaccccaagcggaccccacacaggacctttctgcttgggatggtttcatccaccttggtggtaaaaccattgacattctgcagagggttttgcagaggacttactacgagagatcttggatgccaaagcccattcgacgtgaccctacattccacatggggttataacatagaaactccccacatcctctgacaggaacagagcccaagaggacttgggagaccatgggacaggcccatgggaaccgacatgaacaaccgaaggacacgaacaaccctcacccagagcagagccacagtggcattgaggcatcaccataggaggaaaacatagattagtagtagcatgagatacattgactagacacacaacgggagagttgatcattgcgcgcaagaagacaaacttgagatgagaagcaagacaccacttgggaacatcagatacaaaagcatgcatagacaaccatgaaaagcaacaggagccagaaccacaatcgggcccactatgaaacgcctggactagcattccctcccaagccgacactatatctcccacgggatttgacgtaccaatgaaccagaacacgaagtgttcaaaacgcactagagaaacgggagaacacgcaaggacacaacaaaggcaaccacgctgggagagtccccactccacccgaaaaaggaacaaggccgttggggaccgggggcccacgatacccaaagccaaaaaaaagaccaaggacgtcgccaagcaccacagcgtcaagcacggacaacgaggggcaccgcaccggcgctggtaggagcacagaaagaacatacaaaggatagcgccactggcacatcggacaacgcgcgagagggagagcacacagataaaccgaagtacaccatcgccacaataaacgaccagcagaccggacagggcccgaaccacataccgcacagagaaagcacaacagcgaacaaaaaccaaactgacaggcaccacgacgccacagcacgacgagcggaacaaaacagcgagcaggcgcggc

SEQ ID NO: 594916 - DNA, 972 bp, Homo sapiens
  misc_feature (617)..(617): n is a, c, g, or t
  misc_feature (627)..(627): n is a, c, g, or t
  misc_feature (629)..(629): n is a, c, g, or t
  misc_feature (631)..(631): n is a, c, g, or t
  misc_feature (634)..(634): n is a, c, g, or t
tgctagtatcatacctgaatgaggaaaaaatctgacaaagacctaatatctaaaatccataatgaacttaaacaaattaacaagcaaaaaccaaacaactctattcaaaaatgggcaaagtacatgaacagacacttctgaaaaaacatacatgaggccaacaagcatatgaaaaactgatcagccaggcgtggtgactcacacctgtaatcccagcaccttgggaggccaaggcgtgcggatcatgaagtcagaagttcaagaccattctggccaacatagtgaaactctgtctctactaaaaatacaaaacataatttagcccagtgtggtggtgtgcacctgtaatcccagctactcgagaagctgaggaccatcgttgaacgatggtcctcagctcaacgatggtcctcagctcaacgatggtcctcagctcaacgatggtcctcagctcaacgatggtcctcagctcaacgatggtcctcagctcaacgatggtcctcagctcaacgatggtcctcagctcaacgatggtcctcagctcaacgatggtcctcagctcaacgatggtcctcagctcaacgatggtcctcagctcaacgatggtcctcagctcnacgatggtcntnanctntgctgagggagtcaggggagctgggcgagagggtcgaaccagcaagggtggtgcaggtatcaggttctggtcaagcaggaaatggggagaagtggatagccggcgtacagggacgaggtggcggttggccgttagggcctttctcctttccggcagctccggctcggtgattaacttggaggaacctcggacaatatccttctcagagtcaaggtccatgacttgaaccgtggcgtacaactttgatctggctctgtgccgggccctgccaagctcttctgaaattcgatcgcgtgttgtgtcagcttcgagtccaggtcagtgctgccgtctccctg

SEQ ID NO: 594917 - DNA, 1166 bp, Homo sapiens
  misc_feature (326)..(326): n is a, c, g, or t
  misc_feature (408)..(408): n is a, c, g, or t
  misc_feature (475)..(475): n is a, c, g, or t
  misc_feature (508)..(508): n is a, c, g, or t
  misc_feature (571)..(571): n is a, c, g, or t
  misc_feature (881)..(881): n is a, c, g, or t
tcacacgtacgaaagcagaagaagggaggggcaggaaaagtgacatgggctaagggggtcttaacctggcttccggctctccacaggggtgacaaagctgggctgcgtgaactggtgcccacacgagctcggcgggcgccactgtggggtcaggctggtggtggtcttctggtgtggccgcggggacattggtggcacgaacaggacaactgtgctgtacagcggaagcactaatgtggcacaaagggagaggagcggttcctgtgcagaggaattcctcgtgtggttgaacggcacggtatcacacaatccacagccctctcctncactatctggcgcggacaaaaccacacacggaacatttgtacagtttgggcgcaacacttgtgtgtgtgagattgtgcgctntcttagggacgcaacacaaggggtttggacacggtgttttggagggcgagcgcaagcggttgggatntaaatttaaaagcaaacatgggtgcgcatctgnggatgtgcgattgggttgttaagattgcggggggtgcagcagcatctccgagagttgtgcacncagggatacttagggcggtctcgggcaaaaggttggttgagcaaacacacacggtctcccaagaggccccccaaggcagcaaaaagtagacgctcatctcccagaggggaatctccctgtgagagcttctccaagaggtgcgttcttctcagaccaggagtgtgccccctgggtccccaaacgttgtgagggcccctacaccttttggtctcacatctctgtgtaatatcgtctcccccatgtgacctgtggcgaatacttttccaaccgtgggttctgggtggtgtgcccgggcaggaatttcccaaantaatctcatggaaggccgtgtaaggtgtgatgcgagggcggtgggccaatctcatgggttgaaccctttgtgcatctggaaggcctaactgcgggccctttccgcgggaacttgttgtgaacctggggccaggaccgccgagttcccaaggagaactactatttcggtccttctagcaagcatcttcgggttcatctctccccacgggtgttgttcggggcctataggcttgtgctgtggcctaccttccttgggcctactctatccttcacgtggtttcccccg

SEQ ID NO: 594918 - DNA, 596 bp, Homo sapiens
tgctagtatcatacctgaatgaggaaaaaatctgacaaagacctaatatctaaaatccataatgaacttaaacaaattaacaagcaaaaaccaaacaactctattcaaaaatgggcaaagtacatgaacagacacttctgaaaaaacatacatgaggccaacaagcatatgaaaaactgatcagccaggcgtggtgactcacacctgtaatcccagcaccttgggaggccaaggcgtgcggatcatgaagtcagaagttcaagaccattctggccaacatagtgaaactctgtctctactaaaaatacaaaacataatttagcccagtgtggtggtgtgcacctgtaatcccagctactcgagaagctgaggaccatcgttgaacgatggtcctcagctcaacgatggtcctcagctcaacgatggtcctcagctcaacgatggtcctcagctcaacgatggtcctcagctgtattctgcagctacttgagaggctgaggcaagagaatcgcttggacccacgaggcaaaggttgcggtgagccgagatcacgtcatcgcactccaacctgggtgacaagagtgaaacttcatctc

SEQ ID NO: 594919 - DNA, 850 bp, Homo sapiens
gtcagagatctcaaactccgatgcccctggggccacgttatgttgtgtaaatggatgaatacaggcccttgagttgggagccatgacttcactttggactttcccagctgtggctggagatcaaagacatcgtgatgagagaaagttcgcacaatctagtcgggtaacagccactttccttgagtaccacagaagaagctgcggtggaggaactgggggtggagagtcacgggtccccgctctgacagctggaccgcttgccatacttcacgtgtgtagctaagttgctctgagtgtgggaattgcaggcctaatgaacagaagatctggagagaagccagatgagtaccagcactgtctgctaatgctgaagtagtcgtgcctgtaattttattgaagatatgctctgcgcgagacatattgagattcgaggacatactcacagagtctgcaggccaagacaaggtgcaggagccgaggcgttctgtgccccatggccgccatggtaggatccctgctgggagcagtgcactcgctgggagtcctaggctgcgtctgtcattgagggatgctgggcactgctgccgggtggccagggtatggggcatgtgcccagcaatgtggctccttggccccgctggccagtgtcctgggccccctggaccaggcgctgggcctggttgaagtggttttggttacaatggccttacaaataaaatgccagcttggcaggcatttgacaaccaaatagcacaaacatcactaccccacatacttataaacaaacaaatattcctcatcaatatatactcaactataaatactctacaccgcctcaagttacaccaac

SEQ ID NO: 594920 - DNA, 589 bp, Homo sapiens
  misc_feature (17)..(18): n is a, c, g, or t
  misc_feature (20)..(20): n is a, c, g, or t
  misc_feature (234)..(234): n is a, c, g, or t
  misc_feature (244)..(244): n is a, c, g, or t
  misc_feature (246)..(246): n is a, c, g, or t
  misc_feature (248)..(248): n is a, c, g, or t
  misc_feature (251)..(251): n is a, c, g, or t
aacgatggtcctctagnncncgatggtcctcagctcacgatggtcctcagctcaacgatggtcctcagctcaacgatggtcctcagctcaacgatggtcctcagctcaacgatggtcctcagctcaacgatggtcctcagctcaacgatggtcctcagctcaacgatggtcctcagctcaacgatggtcctcagctcaacgatggtcctcagctcaacgatggtcctcagctcnacgatggtcntnanctntgctgagggagtcaggggagctgggcgagagggtcgaaccagcaagggtggtgcaggtatcaggttctggtcaagcaggaaatggggagaagtggatagccggcgtacagggacgaggtggcggttggccgttagggcctttctcctttccggcagctccggctcggtgattaacttggaggaacctcggacaatatccttctcagagtcaaggtccatgacttgaaccgtggcgtacaactttgatctggctctgtgccgggccctgccaagctcttctgaaattcgatcgcgtgttgtgtcagcttcgagtccaggtcagtgctgccgtctccctg

SEQ ID NO: 594921 - DNA, 222 bp, Homo sapiens
cgtccgcagctcctggagaatacttgaagctagaaggggaagttggttcaaaattcacatcaatccgttacactagcgagactagatgtaatattactccaatttcccctccaagcctaccaattattcctccaaacatgggtccggtccacgttaaccccccccttctctcccaactttaccttctaacttcggtcaccaccaaaatttaatatgaatggg

SEQ ID NO: 594922 - DNA, 511 bp, Homo sapiens
  misc_feature (17)..(18): n is a, c, g, or t
  misc_feature (20)..(20): n is a, c, g, or t
aacgatggtcctctagnncncgatggtcctcagctcacgatggtcctcagctcaacgatggtcctcagctcaacgatggtcctcagctacttggggggctgaggtgtggagaattgttttgaacctgggacggcagaggttgcaataagccaagattgcaccactgcactccagcctgggcgacagggtgagactccatctcaaaaaaaaaaaaaaatgagtcgggtttggtggtgaacacctggttagtcccagcgtatcgcaataaggctgaggaatggatgatcgtttgagcccagggagatcgaggtgataaggagttataaggagttatgatcatgccattgcactcagagtggggtgcaagggagcaatgactgtgtctctggaagaaaagaggccaggcatgtggggtcaggtctggtaatcccggggactgtggagaggctgaggcgggaagatcatatggaggcaggagtccgaggccaggctggccgaagatgggtgaaat

SEQ ID NO: 594923 - DNA, 487 bp, Homo sapiens
cctactgggctcaagcaattctcccatctcagcctcccaagtagctgggactacgggcatgtgccatcatgcctggctaatttttttttttgtttgtttgttttggtagagacagggttcaccacgttgcccaggctggtctcaaactcctgtgctcaagtgatctgcccgcctcagcctcagcctcccaaagtgcaagggttacaggtttgagccaccatgcctggctagaaccacaagatttttacttaagttcaagaatcttatatctcacctaaggttgggagttcaagaccagcctggccaacatggtaaaaccctatctctactaaaaatacaaaaattagccaagcgtggtggcatgtgcccgtgataccacctactcgagaggctgggccaggagacttgcctgaacccaagaggcagaggttgcagctgagtcatgccactgcactccagcctgagcgacagagtgagactatctctc

SEQ ID NO: 594924 - DNA, 390 bp, Homo sapiens
  misc_feature (17)..(18): n is a, c, g, or t
  misc_feature (20)..(20): n is a, c, g, or t
aacgatggtcctctagnncncgatggtcctcagctcacgatggtcctcagctcaacgatggtcctcagctcaacgatggtcctcagctcaagtctctctctctctgctccctttttttttttggaaagagtgtctcgctctgttgcttaggcgggagtgcaggggccacaatcacggctcacggtaccctcaacctccccaggctcgggatgatcctcccgcttcaacctctcgggtggctggacggcggtcatacgccaccatcgccgggctctttttggtattttttggtacagatggggtttctctgtgttccccaggctgctctagaagctcggggttcaagctatctgcctatctcagcctcccaaagtgctggctttttgggcg

SEQ ID NO: 594925 - DNA, 662 bp, Homo sapiens
tgctagtatcatacctgaatgaggaaaaaatctgacaaagacctaatatctaaaatccataatgaacttaaacaaattaacaagcaaaaaccaaacaactctattcaaaaatgggcaaagtacatgaacagacacttctgaaaaaacatacatgaggccaacaagcatatgaaaaactgatcagccaggcgtggtgactcacacctgtaatcccagcaccttgggaggccaaggcgtgcggatcatgaagtcagaagttcaagaccattctggccaacatagtgaaactctgtctctactaaaaatacaaaacataatttagcccagtgtggtggtgtgcacctgtaatcccagctactcgagaagctgaggaccatcgttgaacgatggtcctcagctcaacgatggtcctcagctcaacgatggtcctcagctcaacgatggtcctcagctcaacgatggtcctcagctcaacgatggtcctcagctcaacgatggtcctcagctcaacgatggtcctcagctcaacgatggtcctcagctcaacgatggtcctcagctcaacgatggtcctcagctcaacgatggtcctcagctcaacgtatgagctgcggaccatcgttgacctgaaagacctagtggagactcctcaagagatagac

SEQ ID NO: 594926 - DNA, 899 bp, Homo sapiens
gccagaacgtcctgctcatcacactgataaccaacactgagcggcggcatcccggctttgaggccaccttcttccagctgcctaggatgagcagctgtggaggccgcttacgtaaagcccaggggacattcaagcgagccgccgtactacccaggccgactacccagcccaacattgactgcgacatgggaacagttgtaggtgcccaacaagccagcgatgtgaaggtgcgcttcatagattcttctacctgctggagcccaggctgtgcctgcgggcacctgcacccaaggactacgtggcgatcaatggggagaaatactgcggagagaggtcccagttcggcgtcaccatgcaagagcaacaagatcacagttgcgcgtgtccagctcagatcagtccctacgaccgacgaccggcattcttagacttgacatacctctccttacgactccagtgacccatgcccgggggcagttcacgtgccgcacaggggcggtgtatccggcaaggagctgcgctgtgatggctgggccgactgacaccgaccaaagggatgagctcgaactggcagtctgcgatgccggtcgaccaggttcacgtgcacaggaaacaagtcactgccaaggcccctcttctgggtctgagacagtgtgaacgactgcggagtacaaccagccgaggagacagggagtgcgagctagtgccggcccgaggaacccttcagaggtggtccacaatcgtggcaaagccgggcgtgctccgacacaaaggcccaggacggtggcacaaggtgacaggacaggactcgagcggggaccggggtcccgaacgaaggactacctagacacaacgggagcacccgtacagcccctgggataccaaactagaacttaacg

SEQ ID NO: 594927 - DNA, 906 bp, Homo sapiens
  misc_feature (288)..(288): n is a, c, g, or t
ggcctcccagtctccggagtcagaggtgagaccccaaggtttgccagtgacagaccagtgcaggcgtttctagtctgcacacgacgaagctgacgcggatcgcccggttcgctcctgtgccgtgagatctctgtcgcccgttgtgcatcgctgctgctggctagcccttacctgctccgatccatacgagcgcggccattcaaggccgacgtgcaacgagtgccggctgcctcgaagcgctccccagagtcccgcgtggtgcttgaagcaggctggtacgtctaagcncgctgggaagtccgtgctttcggtggtatctttgagaccgcgaccgttcgtccgccccgagggcgcataggaacccacggtcgtagcagaacccggtgtaaaacagcggctggatcccatgcttacccaagtggagcgccgcaaggctgaagcggcccccgggcgggttcaatggcacgccagaggagtaacaaaccccccggatgcgtgtcttcgggcccaaggagtcgacctagccatttcggcccaggcgccggccggaacgcgtcccttcgtccaccggcatttgccaagcggaacctgacggaggcgcgaaccggcacccctcatttggcgtttgacatagggggccggagagggtgaatcccgccgagggacagcgtgagggcacccgccaaagaaacttccgagagggaaacctggcaaagcgactggtggcacgaaccaggggtcgcggttgttagaacttgtggcacattccacgtgtaggttcccccccgggaagacttcctggcgttccccttgaaagtttgcgagacccgttaaagcagggacccttggagcttcgtcagggaggggcgccaagacggaaacgtgggcgggaatgaatacaactgg

SEQ ID NO: 594928 - DNA, 334 bp, Homo sapiens
tttttttggggggggggggggggcccccccccccccccttgtttaagggggatttttaaaattccggttggggggaagggttgcccccttttttttttccccaagcccccgggggttgttcccctaaaacccttttaagggggcccaattttttttttttaaatttaaggggttttttttcccgccctgggggggcccaaaaaaaggggttgtttaatttttttttggggaaaaaatttcccccaaggggggtttaaaaaaaaaaagttttttttgcccccaaattttttaaaacccccccgggttattttcaaaaaaaaaattttttttccca

SEQ ID NO: 594929 - DNA, 975 bp, Homo sapiens
  misc_feature (405)..(405): n is a, c, g, or t
ggcacgtggattcagtcgcgatgcccaaatcgcaatgcgcgacaggaaggtctccttaaccaaaattgccaatgaaaggcttgggaattgagacaaaagctggatagaacgagacttcggcaaatgtgctggacaccgtacaagtagcttttcatcttctctgtggccaacatgaggaacagtccagctgaaggatcatccggatagcgctctggagagcatcagctcggagtgttctttggctaaaacaaggtgatgatggtggtcttgggtcggattgccgatctgactgaactacaataggagcaataactgacactcacgggtcaagcaaatagggttcgagagcggtgacggtggggtctccgtgtctctagcacagatccgcgacaagagggatagganggtggaaagtgagtggttcaccgaaactagacacgaccatggactacgcccgagctgggaatgaagcagctatcatctgtgagcctggatccagggcccctggagcagttcccccactccatggagccacagctcaggcagctgggcctgcccaccggcctcaagagaggtgtggtgactctgctgtctgactacgaggtgtgcaaggagggcgatgtgctgaacccagagcaggctcgcgtcctgaagcttatggggtatgagatggctgaattcaaggtgaccatcaaatacatgtgggattcacagtcgggaaggttccagcagatgggagacgacttgccagagagcgcatctgagtccacagaaagagtcagactcagaagatgatgactcgaccgggatcgggactgaaggtctcctgggaagttctgggtctcactggaccatcacggatggtggccgccctctgagagagcccctttatttggctggcgctggacctgattggctggaccctgtaagaacacttgggccggccggggtccccggatcccgcttggaaccctg

SEQ ID NO: 594930 - DNA, 384 bp, Homo sapiens
gcatcccatgagagccttttctcacagatggacacttcacagttaagtgtcattagtatgttaaagctaggaacctacccaaaagtacaaactcagtttactacatgattcccaaggatttttaataaattgtgttaaattccttgctgaatttaaggtataatgtatatctatctattcacccatccaaccaaaccaaccacagattcttcactcaagaaaatcaggtaagcttggcatgatttgccgttttgcctttatgtttcttgctagtgcttttttataatatttattattttgttttagactgaggttttatgtcaaatctgtagttatcagcatatgacctttaccttttagacaacttgagaaatcttcaccccc

SEQ ID NO: 594931 - DNA, 151 bp, Homo sapiens
tgactagaggatcccccatctgtcattgaagtaagatgcttgaactggagtttagtgttacatttttcttgctttggttttttctgtggggacccgtgttatctgctattgaaacttctaaaaataacatgctgaagtacacatcagaaag

SEQ ID NO: 594932 - DNA, 873 bp, Homo sapiens
gcatcccatgagagccttttctcacagatggacacttcacagttaagtgtcattagtatgttaaagctaggaacctacccaaaagtacaaactcagtttactacatgattcccaaggatttttaataaattgtgttaaattccttgctgaatttaaggtataatgtatatctatctattcacccatccaaccaaaaaatagaaaaattagccaggcgtggtggggcacaccgtgtagtcccagtcgtactcgggaggctgagttgaaagaaccacttgaacccaggaggtgaaggttgcagtagtgagctgagatcgcaccactgccctccagcctggacaacagagggaaaaaaaaaaaattccaaattttttgtcaattccacattcatcaaccaggtctccttatatattcataaaattaactcccattataaatttcccttatcccacacacattattaaaccttgaacctacattttttccagagatttaatcataaaaattacacagcaagaatttcttccactactttagggaaatagctttcggacattataggataatgagggccccaacatttttaataagtttacagtatgtataggaaaccatactattttggtttcaccatctctgagagtgctatcttacttccctttccgtccccactttcctttttccctctctcttttccttccattccttcttcttaatctggggggcttcttaagtggctttatttcccttatgctttcccttgggttgcggccattccttatcctagtttataccttctcaatggtgagttccgggcgtctggggacaatgaaggtttgcgacctatttttagcccgcaggaattctgtggcg

SEQ ID NO: 594933 - DNA, 1408 bp, Homo sapiens
tctccccttcccccccttttcaccatttccccttcgggagggcggcttccccggggcagggggcaagagccgggtctcaccccgggctctcccgggacccgcgacgcggcccaagtgggcagacaagggaagcacccacaacacacacaacagaggagcatcaacaagcggaagcgcggcccctcaagagcacagggagagatcaacaacggcacacgaccttacagcgggaacgcgcaccccaagtacggacgcgaaaagacaggcacgccgagacgccccagaaccagaaaaggcgaccaagagcaagcacacagggggcacacagacagcccaccaacgggacaccgcggacatcaccacacaaaataccatccactatacaacaacacgacaggagccgcaaaagccagaacacaagaaccaggaaaccggggacctccaccgccaccacagacacacagtagccaaactaaaggcgcggatgggaaaacacgcgagcgccccgcgacggaggcaagccaccccgcgagggtacaacacaccaagcagaaagaagcggaccgacgaaaagaacacagtggcacacagcgaacaacagcagggaaagcgacaaagaacgagcacaaatacgccgacaaccacgacagacgcggagagccatacatggaccaacaagagagtggagagggagcacggcgcaacaaacaccacgaaaacgggaacaactatcaacagaccacacgagacacccaacgcgccaccagatggaacaaacgacacccaacaccagacgagcgcgacacacaaacaacgacaggacaaaagcaaggccaaaacaacaaccaagcaaaaatacacagacacaaaacgcgcaacaacgcaatgaaagaacaaaaacacaacacagcgaccacaacaagaaccaaagaaacgccacgcaaacagacaccaccaaaccacaatacgcacaccaaaacaacacacgaggaacaaagcacaacaacaacaccaccaacaccgatatccacacgcaaacgaaccacaaaccaaacacaaacacagaacacgcagcaacagcacacaaatgacacgaaaaagagacacagtaagcaaagagacgaagagcagcagaacaatacacacacgaatcaagaagaacaagacaggaagaaaaaagaacaatgacaagataccacgagcagcgaagacaaaccaatcgaccaagacaacgacgtaagagcagacaacacgatagacaatagaagacgacagcaaatagcagcacaactcacgcacctgatctcaccaaccaccgacgaacgaacacatcaaacacgatacacgactgcagagacgaggagaacatcatccacatgcactatcacataacgtctttcacctgacc

SEQ ID NO: 594934 - DNA, 403 bp, Homo sapiens
  misc_feature (12)..(12): n is a, c, g, or t
  misc_feature (355)..(355): n is a, c, g, or t
  misc_feature (365)..(365): n is a, c, g, or t
  misc_feature (396)..(396): n is a, c, g, or t
gacagtgtcttnccctgtcatctaggctggagtacatggtataatcatagctcactgcagtctcaacctcctggcctcaagcgatcctcctgcttcagcttcctgagtagctgggactacaggtgcatgccaccatgctcatctaattttttaatttcttgtataaattaggtctcactaattgtcccaggttggtcttgaactcctgggctcaagtgatcctccgacctcagcctctcaaagtgctaggattacagatgtgagccaccatgcttggcccccaaaacctactttttagtaagtattttgatgggacaaaggatatatgttacattaatttatagttttaatatcntaaaaaacantaaggatttaggaggaaaaggttattattantgggcca

SEQ ID NO: 594935 - DNA, 148 bp, Homo sapiens
  misc_feature (96)..(96): n is a, c, g, or t
  misc_feature (111)..(111): n is a, c, g, or t
ttgtcctgattgtctggtgtgtgatgctagtggtagaatcctgagtatttgagaaataaaatgtgcatatgtggggtatcctaagttgggtgatcnctctagagtctgacnctgcatgtgtcatgcaatgcttgtgcacttggcctgt

SEQ ID NO: 594936 - DNA, 1131 bp, Homo sapiens
cgcgagcattcggacgccactttcacaacacgctccactcgcgccggacacagggcagcagcgagcacgcgatttcccgcaacccgataccatcggacaggacttctctccgccctcacgcccaacgcgggcacgactcatctggcaaacactggctacagaacatgcttaactgcgaacatggatactgacagagccccactggcactactagccttcctgacacggtctactccactgtcaagaacacaagctttcccacgaacaactttggcgtctgcaatggcctgcgctttctacccgacgacgcacagacgctctgcccctgcaccacaacaccctaaggcacttgaaacacatctctaacagcttctgcccacgtcgggcccttaacgcttatgcccacccacttaggctggaacttttgaacgccaactgcaccctcacggcaatggtcgttaccttctgggaaaggacccatctgttacacaccaccgacaacttttccgaccacttgcgagcaaggcgaaaccgccgaccatgcccccaccttatgggcgccacaggccattgtacccttacttccaaacaagccacagctcatacctattccaataaccgcgtacgctctcggttttggacaacctcccgtttccctttccctgcttatccaaaccttgtgccttgtctccgcaccgtgcacaccagccccaccacacacacacagcgcattaggaccccccgtttctgcccacatcctaaccttgggcttggcgcccaccggattcccaacgtaggaacataacgacaacccactatctaacccacagaggccgtgcaccacaggcaaccggactcccccacacccccgctcaatcccacaccactgctggcctgcaaaccatccccaaaagcaagcggccatttcgcgcgccgcccgggccaacatttgcctgtataagcccgttaagcacaaacggggagaaaccccccatcgtacagcttggccaaagctgcaccccacagaacccgcagcacccgtgtacacacggggggcccaaacccgcgttcccaattcagggcgcgccacactccacggacaaaacacccacgccgcgccccattcaaccc

SEQ ID NO: 594937 - DNA, 291 bp, Homo sapiens
gtcgactctaagatcaggccaggcgcagtggctcgtgcctgtaatcccagaactttgggaggccgaggtgggcagaagacttgaggccaggagttcaagaccagcctggccaacatggtgaaacctgtctctactaagaatacaaaaactagccaggtgtgatggtgtgtgcctgtaatcccagctacttgggaggctgaggcaaaagaatcccttgagccagggaggaggaggttgcagatcgtgccactgcactcgtagccctgggtgatgagagtgagtctctgtctc

SEQ ID NO: 594938 - DNA, 209 bp, Homo sapiens
atgatcccaatgataatggagacagaaataggtgaaagacagacaggtacagtgtctaccctaaaaaagagagaagctcagtgattaatgtgccgaccatgtagtgccaaggcacatggagtcagatgtggaagtgtcaccagtgaatagcagaaggggcattgtgtgcaccctgtaagtgaggatcagtggcttggagtggttagggt

SEQ ID NO: 594939 - DNA, 294 bp, Homo sapiens
ggacgagcatcttacaggttggacattcttccttagagtaatgattttcaacatctttttttttggagacagagtctcgtctggtcgcccaggcgggagtgcaaaggggtgatctcggctcacggcaacctccgccggccgggttcaagcgattctccggtctcagcctcccgagtagctgggactacaggcgtgtgccaccacatccagctaatttggtattttaagtagagacggagtttcatcatgtgggccaggcgggtttcaaactcctgacctcaggtgatccacctg

SEQ ID NO: 594940 - DNA, 218 bp, Homo sapiens
ggccccacggttcggtaccacacggaggtgcgcgccgccccggcttcagcttgaggagctcagggtggccggcattcacaagaaggttgcccggaccatcggcatttctgtgtgatcccaggaggcggaacaagtccacggagtccctgcagaccaacgtgtcagcggctgaaggagtaccgttcaaacttcatcctctttcccaggaagccctcggt

SEQ ID NO: 594941 - DNA, 495 bp, Homo sapiens
  misc_feature (33)..(33): n is a, c, g, or t
  misc_feature (47)..(47): n is a, c, g, or t
  misc_feature (111)..(111): n is a, c, g, or t
  misc_feature (119)..(119): n is a, c, g, or t
  misc_feature (124)..(124): n is a, c, g, or t
  misc_feature (153)..(153): n is a, c, g, or t
  misc_feature (166)..(166): n is a, c, g, or t
  misc_feature (178)..(178): n is a, c, g, or t
  misc_feature (211)..(211): n is a, c, g, or t
  misc_feature (239)..(239): n is a, c, g, or t
  misc_feature (277)..(277): n is a, c, g, or t
  misc_feature (291)..(291): n is a, c, g, or t
  misc_feature (305)..(305): n is a, c, g, or t
  misc_feature (307)..(307): n is a, c, g, or t
  misc_feature (319)..(319): n is a, c, g, or t
  misc_feature (417)..(417): n is a, c, g, or t
  misc_feature (431)..(431): n is a, c, g, or t
  misc_feature (476)..(476): n is a, c, g, or t
tgactttaaaaaaagtttttattgtagtaaaanacaaaatttaccancgtgaccatttaagggtatagttcaatggcattaagtacattcaactttttgagcaaccgccancaccattnatcanccatctccgtttttttgttttgagagggngtttcactctgtngcccaggttggngtgcagtggcatgatcttggctcactgcaaccnctgcctccccagtccaagcaattctccngcctaagccacccaagtttctgggactacaggggtgcnccaccacgcccggncaattttttttttntntttttagtaganagggggcctcaccacaacggccaagctggtctcaaactcctggcctcaagtgacccgcccgcctcagcctcccaaagtgctgggacaacaggggttancaaccatgccaggncatcgtctcctgaactttttcatctgcccaaactgaaactctgtncccattaaacaataactcc

SEQ ID NO: 594942 - DNA, 1438 bp, Homo sapiens
  misc_feature (1003)..(1003): n is a, c, g, or t
  misc_feature (1023)..(1023): n is a, c, g, or t
  misc_feature (1027)..(1027): n is a, c, g, or t
  misc_feature (1039)..(1039): n is a, c, g, or t
  misc_feature (1041)..(1042): n is a, c, g, or t
  misc_feature (1045)..(1045): n is a, c, g, or t
  misc_feature (1054)..(1054): n is a, c, g, or t
  misc_feature (1064)..(1064): n is a, c, g, or t
  misc_feature (1080)..(1080): n is a, c, g, or t
  misc_feature (1084)..(1084): n is a, c, g, or t
  misc_feature (1093)..(1093): n is a, c, g, or t
  misc_feature (1096)..(1096): n is a, c, g, or t
  misc_feature (1099)..(1099): n is a, c, g, or t
  misc_feature (1102)..(1102): n is a, c, g, or t
  misc_feature (1117)..(1117): n is a, c, g, or t
  misc_feature (1123)..(1123): n is a, c, g, or t
  misc_feature (1126)..(1126): n is a, c, g, or t
  misc_feature (1133)..(1133): n is a, c, g, or t
  misc_feature (1135)..(1135): n is a, c, g, or t
  misc_feature (1150)..(1150): n is a, c, g, or t
  misc_feature (1153)..(1153): n is a, c, g, or t
tcggctcagagagccgcggttaatcggacgaggtccccgcggcggcggcggctgcccagtgacagcggcggcggtgccaggtcggccgtggtagcgtagggttgcgcggcccggaaacgcagagccggccaaagagcggcgcgacgtgagccggggccgtgcgcgaagagacctcgcgggcgcggagcgaaaggccggcgtgagtgagcgcggagacagtggccgccggcggcccaacccgtctatcccttcggccgccgccggcatgagccacatccagatcccgccggggctcacggagctgctgcagggctacacggtggaggtgctgcgacagcagccgcctgacctcgtcgaattcgcagtggagtacttcacccgcctgcgcgaggcccgcgccccagcctcagtcctgcccgccgccaccccacgccagagcctgggccaccccccgccagaacccggcccggaccgtgtcgccgacgccaaaggggacagcgagtcggaggaggacgaggacttggaagttccagttcctagcagatttaatagacgagtatcagtctgtgctgagacctataaccctgatgaggaagaggaagatacagatccaagggtgattcatcctaaaactgatgaacagagatgcagacttcaggaagcttgcaaagatattctccttttcaaaaatcttgatcaggaacagctttctcaagttctcgatgccatgtttgaaaggatagtcaaagctgatgagcatgtcattgaccaaggagatgatggagacaacttttatgtcatagaacggggaacttatgacattttagtaacaaaagataatcaaacccgctctgttggtcaatatgacaaccgtggcagttttggagaactagctctgatgtacaacaccccgagagctgctaccattgttgctacctcagaaggctccctttggggactggaccgggtgacttttagaagaatcatagtgaaaaataatgcnaagaagaggaagatgtttgnatcntttattgagtcngnnccnctctttaantcactagagntgtcagaacgaatgangatngtggatgtnatnggnganaagatctataagganggagancgnataatcncncagggtgaaaaggcnganagcttttacatcatagagtcggcgaaggagcatctgattagaagcaggactaaaatcaaaccaaggatgggggaccaggaggtcgagatgcccgctgcataaggggcagtacttggagagcttgccctggtcacaacaaaaccagagcgctcagcttatgcgttgggatgtcaaatgcctagtatggtggcacaacaatgagaggctccgggccggatggcatcgagaaggaatccaacaagaggaaacggcgaaacatgggccccaggctgaaccccgcaccgg

SEQ ID NO: 594943 - DNA, 184 bp, Homo sapiens
gtaccgcccgaagtcacaactcgaacatgcaggacaacggccggtgtggaggctcacgcctgtaaggccagctactcaggaggctaaggcaggacaatcgcttgaacctgggaggtggaggttgcagtgagccaagatcgtgcctttgcactccagcctgggcaactaaagcaaactccatctt

SEQ ID NO: 594944 - DNA, 1089 bp, Homo sapiens
  misc_feature (1064)..(1064): n is a, c, g, or t
tcggctcagagagccgcggttaatcggacgaggtccccgcggcggcggcggctgcccagtgacagcggcggcggtgccaggtcggccgtggtagcgtagggttgcgcggcccggaaacgcagagccggccaaagagcggcgcgacgtgagccggggccgtgcgcgaagagacctcgcgggcgcggagcgaaaggccggcgtgagtgagcgcggagacagtggccgccggcggcccaacccgtctatcccttcggccgccgccggcatgagccacatccagatcccgccggggctcacggagctgctgcagggctacacggtggaggtgctgcgacagcagccgcctgacctcgtcgaattcgcagtggagtacttcacccgcctgcgcgaggcccgcgccccagcctcagtcctgcccgccgccaccccacgccagagcctgggccaccccccgccagaacccggcccggaccgtgtcgccgacgccaaaggggacagcgagtcggaggaggacgaggacttggaagttccagttcctagcagatttaatagacgagtatcagtctgtgctgagacctataaccctgatgaggaagaggaagatacagatccaagggtgattcatcctaaaactgatgaacagagatgcagacttcaggaagcttgcaaagatattctccttttcaaaaatcttgatcaggaacagctttctcaagttctcgatgccatgtttgaaaggatagtcaaagctgatgagcatgtcattgaccaaggagatgatggagacaacttttatgtcatagaacggtaggagatggagctttgaaattgtgtggccacacttaatcggattcatgactcagggcagatgctttatcctattctgtattcagcccacagaggctaagggccaggtgaacaagcttcccaaagccttgtgagagtccacagcttgtccctctctaccagtgctgtcctgagtcctcagcacaactcatatttgaagagcaatcatttagagtagaaagtctcctttaggccaggcgcagtggctcatgcctgtnattgcagcactttgggaggccaagg

SEQ ID NO: 594945 - DNA, 431 bp, Homo sapiens
  misc_feature (17)..(17): n is a, c, g, or t
  misc_feature (391)..(391): n is a, c, g, or t
  misc_feature (396)..(396): n is a, c, g, or t
  misc_feature (416)..(416): n is a, c, g, or t
atgagagctgtgctgtnagtatggctttatggcactgtggtaatcatacgcagctgggaagttgagactatcggatagcaacagtgacccctttatccgcacagctatggcccagtgactgctgcagagtatcctaggtaaaagaacagctggtaaaattttggttatctcttaaattatattgaatacaaatagtatatgggccccctcatttcagctgcttagtgttgtaaaaattaattctatgagctccaatatttttgtttgctttttattgtggtaaaatagacgtaacacataatttaccattttaaccatttttaagtgtatacatcagtgggtattcacattggtacaatcctccattcaccatccatccccaggaaactcnttttnttcttcccaaactggaactnaccattaccaattaa

SEQ ID NO: 594946 - DNA, 149 bp, Homo sapiens
tggtgacctacctagcagcttcagtgatcttaaggtgtccattgagtctcatccctgcctttcccgctgcgtccaacagaacttgaacaactccgacttaacacatgactttgttcttccaaaaccacttttgcttgagggtcagtccc

SEQ ID NO: 594947 - DNA, 543 bp, Homo sapiens
gacgcttagtgctctctctctctgcctggttgtcactgcccgctctgtgcaggtcccgagccatcggctcggcatctccgccgccccccgggagcctggcccgtgagcccgccggagcgcgcactctcaggtcttcccgcggccctctgaggcttcgtcgttctctctaggccgcgggtccgcatctccgtccctggcgctcggcgactccctgcactctgagctctggcgctggacagcttgtcacccgtggtccccggctcaggtccccgttatccctcccctcctgggctgcgctagggggcgcggtccgactcatccccgcttcggcacggagcgtctccacaatggcttccctttaggtagagaacaagcagtctaggccaaggggtctagagaggatggtgaccccctggcgtttgtctgtcagggtctgcttgtcacacttaagatgctttgagttcagaaaggaacttgggcattccagacccctgggatgctctcgcaatgccagactatgttggtttctgctaggtactttgc

SEQ ID NO: 594948 - DNA, 117 bp, Homo sapiens
cggcaacgatgcggagttcttgggaattgtgggaaatatgattgcattttacttcgaaagtcgttcatacgtgtgaactcctaaagctttccagaactgcgaaggctagatcacacc

SEQ ID NO: 594949 - DNA, 739 bp, Homo sapiens
  misc_feature (25)..(25): n is a, c, g, or t
  misc_feature (85)..(85): n is a, c, g, or t
  misc_feature (89)..(89): n is a, c, g, or t
  misc_feature (92)..(92): n is a, c, g, or t
  misc_feature (96)..(96): n is a, c, g, or t
  misc_feature (163)..(163): n is a, c, g, or t
  misc_feature (174)..(174): n is a, c, g, or t
  misc_feature (193)..(193): n is a, c, g, or t
  misc_feature (195)..(196): n is a, c, g, or t
  misc_feature (199)..(199): n is a, c, g, or t
  misc_feature (202)..(202): n is a, c, g, or t
  misc_feature (248)..(248): n is a, c, g, or t
  misc_feature (250)..(250): n is a, c, g, or t
  misc_feature (252)..(252): n is a, c, g, or t
  misc_feature (292)..(292): n is a, c, g, or t
  misc_feature (304)..(304): n is a, c, g, or t
  misc_feature (330)..(330): n is a, c, g, or t
  misc_feature (349)..(349): n is a, c, g, or t
  misc_feature (364)..(364): n is a, c, g, or t
  misc_feature (380)..(380): n is a, c, g, or t
  misc_feature (396)..(396): n is a, c, g, or t
  misc_feature (412)..(412): n is a, c, g, or t
  misc_feature (420)..(420): n is a, c, g, or t
  misc_feature (425)..(425): n is a, c, g, or t
  misc_feature (451)..(451): n is a, c, g, or t
  misc_feature (456)..(456): n is a, c, g, or t
  misc_feature (474)..(474): n is a, c, g, or t
  misc_feature (586)..(586): n is a, c, g, or t
  misc_feature (701)..(701): n is a, c, g, or t
gccccaaccccaccccatcccaggngtatttacagtgggctgaagttaatccatacaactcagctgaaaaacagttacatctggngtgngancctngggggaactggggggggggggggggggaagacacaaaatgctaccactaaaatgggggaggcatggnaacctcagggnggttcttttcacccctgtngnncanggncagggcaaagacaagggggaaggaaaaccataaagccaaagtctgngngngaaccactcaactgagcacaggctgtagcttctccaagangggtgcaagggngaaacattctttcgcttccttctgcngggaaatcattgccctggngtgccagccagtggnaggcacaacctttcanaagttcaagggatgcnggctagagaagggggnattctggnttgcngcctcctctcagaaccctctcctcancccanagcctgcctcctggtgtnttttttcctccaaactctctttacctaacctctcttcatcagaaggcaagcgggaatctgttccgggtttcagtagagtgggagaaaggacaggcaaaggcacagatatttnggcgagagtcaagctacttctggcccttgcatgtcccttattcaggaatagtgggccccgacgactggcactccgactctcaactctggttttgggagaacattagaggctcttnagaggctccccacatcagtgtgcctttcctgaatcctt

SEQ ID NO: 594950 - DNA, 351 bp, Homo sapiens
  misc_feature (272)..(272): n is a, c, g, or t
tcccctcccaagacccagccgccgccgttgagggctgagtccttgctgtggatgtgccagtgtccccaccaacaccaggaatttagaccttttcctgcaccactctcttatcctgggggctctgttacactaatttgaataaactctcccccttctttgcaacttcccagcaacaataatgattttcctggcaggccgtttcctggtccctaattccttttccaagaaactgttaaacaaggttaaaaaaaattctgttttaaaaacccggncccctaacccccccctaaggtaaaaaaacacaagtgtttttttgtgtcccaaaaaaaccttttatccccctggaaaaaa

SEQ ID NO: 594951 - DNA, 1382 bp, Homo sapiens
  misc_feature (66)..(66): n is a, c, g, or t
cggtgcgacgacgacgacgacacactcggacacacgacgacacacactgggacgtgacaaccgagncagacgccacgacgacgacacacgacggacacgacgacctgacgtgtgaacggacgacgacggaccacaggggactgacctgacgacgaccacgacgacgacgacgacgacgacgacgacgacactgacgaccacgacgaccttaacggacacgacgacccctgatgacgctctgaccaagataacaacgactgttggaccacgacaaccacgacacacgacgtgggacgacgacgacgacgacgacgggacgacgacactgacgtgacgacgacgacgacctgggaacgacgaccaagacgactcacgacgtggacgaccagcagacaccgctgacgacgtcggagagccgacgaccgctacgtcgatacaacagagaacgacgacgacgacgacgacgaccgacccgccaacgacgaccaaggacgacgaaaacgacgaccgaccccaccgtcggcgacgtgaaccaccgagccgacaggaagaccgacgcacatacggaccgaccaacatcacaagaacggaagacacccagacacgacacacaccggacgaccaagacacgcgacaggctggagccagaaccatcgccccatcacggcacgcacaggcaaaaacaaaacacaaagaacaccgcaacagaaacgcatgcaaaccacacacacagaaccgcccaatgacaaacagccccgaagaaacacagataggccccacgtaaaggacagaagaggagacgaatgaacgaccaagcaccctcccccaagacccaagaacgatgacagacacaatccgacaccaagagaagacggtccatcccaacaaaacgaaaccaaagggcatccaaccaacagcgcatggacgcaccccgaaacgcaagccgcacacgccgcaagcacgagcacagaaaaacgaaacccacgcggccccaagaggcaacaacgaaaaccagcagcaaagcaagcggcacagccgagacacacacccaacacacaatccacagcaaacaacaatacacaggacacacacgaacaacaccaaacacccagggaacacgcgacgcagaaacccccgaaccacacggggcaacaggccaagacgggaaagaggacacatacaccagaagccaacgcgggcaacaaaaaaaaaacacaaacggaaacagccgaaacacaagaaaccagcgcccccaccaagacgcacgaccaggacccccgaaaataaccaaaagatacacccaagaaagaacgagcaaaactccccgagaaggagagaagcagcaccacacaccagacagacaacacagaaaacagagaaac

SEQ ID NO: 594952 - DNA, 435 bp, Homo sapiens
tgggttaaaacagattctttaaatacaaggaatacaaaagcagtggaaatagtacccccagcgattacacagcttggaacaagtgaaactagggttaccaaacagctattttaataatagcatctacggggtcgggaaagggatgtaccaataaataatcggtagacgcatcagcgagaaacactccatttacttaatcacagaaaagggtggatctggctacatagttttctctcaagtgtcttcattcttcagaatcctccgaggcttacgaaagtgtcatcaatcttcaaaatcattctaaccattggtgtggcaagaagaatatcgtgtggcttttggccaatcaaggttctctatgacagtgcgtgtggcttcatatcattggtcccctggtgcaaacagtcgatgccaagagcagggttcatctccttc

SEQ ID NO: 594953 - DNA, 191 bp, Homo sapiens
gttcccccgatagccgacagacactcaaactcaagctagtgaatgtgaactcttctcttgactaccctatattctccctttgccagaaaagaacttcaccaattgtgctgaaacaaaaatctgctaatcatgtgagattcctctctttccttcaaggtcccctgttccctcccctgtcgggctagtcgggg

SEQ ID NO: 594954 - DNA, 361 bp, Homo sapiens
ttaagaaagtaaaaaaaaaaaaaggaggtagccggtaaattatttaagggactggtggggctacacaggcctctgtcacaattactcaattctgccagaaatacgggacgggcccaggcagggtgccattaaacttttatttacaaaaataggcagggggccagatttggcccccggggtttggccccctggccaatcccctggttctaggacctccaaggtcttttcggggccaagaaatgtaacccaatttttcttccatttaaaccaatatatggattcttgggctggttgggtgggagggtacgcactgggggtcccagatgtctcagattccggaaatccatgggccataaagctg

SEQ ID NO: 594955 - DNA, 169 bp, Homo sapiens
tcacccatcgttggacatgtccgctaaagtggttaccggtgggcttcctctcattcccatcactctatctttcttcatcatgtcccgcagcacgcccgctctttccccatttgccccaaacaccaacttttcaaaaaatcaagcagctccataattttcccttacactt

SEQ ID NO: 594956 - DNA, 1567 bp, Homo sapiens
  misc_feature (286)..(286): n is a, c, g, or t
  misc_feature (1384)..(1384): n is a, c, g, or t
tgccggcctccttgtattaggcgccccgacggtggtgtgtgcgccgacgacgcatacgaccgctggcgttttccgcccgagagacgtgtgttgtgtgtgggagcccctccctcgatatgttggtgtggcccccccgcgaccagcgagtgtgttcgcccacgggagccaccagagcccgccgcgtggggggcgcccccttatacgctccgccccgcgggcaggttgaccacgggagctgtctcctgacttcgtgtgggcccggaccaccacatgatattgtggcgcnccccgcccggtgtgacaatctgctcttctcgtgccttctgtagtggggagtatcggcctcgttttgccccacgtgtggagccacgaggcgcttgtgtttcctggttggagagccccacggaggggaagtgctacccccccacagtaggcctttctggccttgttgggaagaccccacaggccccacaagcccccacagaaattttggggtggaaaaaatacgtgggaagcccccgtgcggggcccccattagggttgagaaataaagacccatagggcgccttttgtggcgtgggcccgccttcggtggtgggttgacgcccccgttgggggtggacacaccgttgggtgtttccccccccagcagcggagattgttcacaacattgtgcgcttggcccccaacattttggcggccgagacgccacggtcctccagaggagccgcacaagatgcgcgcaagggccactttcccacaaggttgtgttgtgtgtgggacgatgtagtgtgcgtccgccccccacaacgctcgcgcgctgttcacacaggggtttgcggcgactttcacaacgctgtaaccacaacggccccttctcgcagcaccacttctgtgtgggtgggcccctctggtgtgggaagaggagccactctggggcccacacaacagggtggagacaacagaagagagagcctctgtgtgttgcgcactactgcgtcgtgagagcctctacactacgcgcccacacgccccacttttggctttggagaggctctctctggggcgtctcgcccctctgggagccccacacacacgtgtgttgagccgctctgatagtgtgattagtgcccgccacagacgtggtgcactctttggtgttacacactgcggtgacacgctgtgggttagaagggcgatatgcgagaggagacgcgctgaggatttctcacagagggcccccctgagaagagatatatggcctgcccccttgagagagaaggaattattgaaggagaggtttgtgtttgtgaatttcttgtttgaaaggaagaagggtgaaggaaagaaggagaggaataactaattatacccatctcctttntggccctgccagcatagtcatagctccccagaatattccagcttccagctttaactgcaccagacactttaaagcttttctggtttagattgtgtttccacttggtgatcatgtcttttcccaagtgtaccctgtcaatatttttcccatcatatctccaagtaaagtccattaaccatccca

SEQ ID NO: 594957 - DNA, 100 bp, Homo sapiens
tcgaagatggcggttggctctggttgctccgaccccgagtggctcagccctggctcccctggcggcggagcccccttctcccgccgctggcggcagcagg

SEQ ID NO: 594958 - DNA, 174 bp, Homo sapiens
tgtgcttggtcaggtacacctcagtaggtgtctcatgatgatagcaggagggtatctgaaggctctaacactttggcatactgggggctctaccaacatgatcttatgatggctctggagatgtgctctccacagatttcagcacagacttcatctgagcagcagggaaagaca

SEQ ID NO: 594959 - DNA, 236 bp, Homo sapiens
  misc_feature (3)..(3): n is a, c, g, or t
tgntgggattacaagcgtgagccactgcacctggccctaatttttgtatttttagtagagatggggtttcaccatgttggccaggctggcctcgaactcctgaccttgtgatttgcctgcctcagtctcccaaagtgctgggattatatatgtgagccaccgtgcctggctgaaatttttattaagtaaaacgtaagttcacttgctcattgccacagtcaaagaactaccatgtt

SEQ ID NO: 594960 - DNA, 87 bp, Homo sapiens
gcggccgcctactactactactactgctcgaattcaagcttctaacgatgtacggggacatgaataaagcaataaaatttgattgtt

SEQ ID NO: 594961 - DNA, 417 bp, Homo sapiens
  misc_feature (250)..(251): n is a, c, g, or t
  misc_feature (371)..(371): n is a, c, g, or t
tttgtggttagtaagtttaattcaaccattatacccagttctgcctcataaaaaattaacaaaatgttcctatcaaaattgtattatcgctgggtggtggttgcacatgcctttaatcctagcacttgggaggcagaggcaggcggatttctgagttcgaggccagcctggactacagagtgaattccaggacagcccgggcgacacagatgaaaccctgtctcaaaaaaaacaaaacaaaacaaaacannaaaaaagtattataatgtaagggcaggtttccttgctctgacacagtgatagaaaaatattgggcaccagatacactttaaaaaaagttttaatgcttaatgtaaggtgacaattgtatnttactgggatttagctgggcactaatttacagattcacactctgag

SEQ ID NO: 594962 - DNA, 182 bp, Homo sapiens
  misc_feature (90)..(90): n is a, c, g, or t
  misc_feature (92)..(92): n is a, c, g, or t
cgacatggggtatgtacctggatgatgacttcttttgctttatattcctcttgcagggccttggggagtgcgcacacaaacgccttggangntgattacatggagtacagaggacaggcaaacaggactctcgtcagaagagacgtgcaatatgagacctttgtgactagattaaatatatc

SEQ ID NO: 594963 - DNA, 868 bp, Homo sapiens
ggtggccggtcggcactcgaggctcgtgcgcccatgcggccagctcgctcgcgcctcggcgtctgtccttccagcttgcgcgtagttgagctgaggcggtgtgtgtgcggggagttgcaatgtgcaatcgcccggtggccgggtgcgttgtccgcttgacctgtatgggccaaccgctgcggcgatggtccgtgctgtgggtaggagagcatacttggtggcctcgtatgtgcgaagtggggggttgatagctaacagcttcacttggcctcgaaggacataagttcctcagttcgtcagggactcccccggaagtaagctctacgagatcttactgatggtagccgagaatggggcaaagaaggccattatcgggtggcgtaggtaacaagtagtatcgacgcttatgcgggcatgttattcgggtccctggcatggacggcccgtgaataaagctccttgcatttgcattcaggatgacttgaaacgcgatgggttaatcggccttatcatgggggtacgagcattaattcatttgggggctcttcagaccaggaagtggcagccagggaacggaatggaacattgcctgggggaataagagacgaagggccggagtaggactaaactagttggaaaggctagtggaattgggttccaacaaagtagtagacttggaatgggggcgcttgcactggctagaagcaaagagattattccttcgggagaccgggtattgtactacgaggcggaagagaagctattagtcctactggtaataacctgggccctttttacccactacactggcagaaagcaaggacacgtggaggtcagcttgcaggttccaggttggttggggtttccg

SEQ ID NO: 594964 - DNA, 378 bp, Homo sapiens
ggtactggaggatctctagagtgacaggctccagcgttaacgatctttggatggtcagcgcgggtgctcacgtgtcgacggaacttggttcagggaggcatgcaccgcggtggtgaatacacgtcgaccaggctccatgtttgcgttattgggtggtcagcacggtgctcacgtgtcgagcggaacttgtccagggaggtatgcaccggcagtggtgaatacacgtcgagctgcgggcatgcctgcctgctcgtggtactggagtgatcctctacacgtcgatccaggttccagtcttaaacgagtatttggcaggtcagcaccggtgctcactgtgtcgaccggaacttgtacatgggagggcatgcacctgcacgt

SEQ ID NO: 594965 - DNA, 116 bp, Homo sapiens
tggttagtgatgttgagcatctgaaaaaatgctaatttttcatacatatcttttctggtgaggtgtctgttctaaatttttgctcaatgtttcttgcaatagttttcttattgttg

SEQ ID NO: 594966 - DNA, 575 bp, Homo sapiens
  misc_feature (444)..(444): n is a, c, g, or t
  misc_feature (453)..(453): n is a, c, g, or t
  misc_feature (457)..(457): n is a, c, g, or t
  misc_feature (520)..(520): n is a, c, g, or t
acattctttctcagttttatagatccctcaacaccaaaaaatccccagaccttttttctagattattcttacatatgcattagattttatttacctaaatcataagatattaggtatagaatttttaccatacttacaaaatcataccctgcagctgggagaaaggcaaaagaagaaaaagagaaagagaagattgaaagaagaggaagggatagaaagcagaaaggtttctgctataaaggagacacaaaagaaagagatgaaaagggtgaaaaaaatgaggtggactaatagatataagtgtgctcacagagcatcaccatgtccttattttccaagcttcacaatcagaacccccacccacccatcctacagtcaaaacacttcaggcaagagatcaactgggcttttttattcctcatttaatgatactgatcactcttnctgacggtngcangacaatgatgatgggctgggtccagagtcgcagcctcctccctctccagaagctacccatctntgtaagaggccacagacaaacacgttcccttattgtgcatcccctctttggggct

SEQ ID NO: 594967 - DNA, 393 bp, Homo sapiens
ggggggaaaaaatggttgttatttagcggtccgtcgcaccagtaagcaggggaaccggtccctcacctgtttctggccagcatctccgcccacctccgttattgggcccaggggcccatgccggtattttaatttatttgtaagataggctcctggtgcccacctttggaagtgagcggcagcccagctcaggagtttagcaagcctggcacatagtagccccgtctcgctaaaaatttaaaatttagcctggcatggtggcggacgcctgtgatcccagctactcgggaggctgaggtaggagaatcgcttgaacccaggaggtggaggttgcagtgagccgagatcgcgccactgaactccagcctggcaacagagcgagactccatctca

SEQ ID NO: 594968 - DNA, 559 bp, Homo sapiens
  misc_feature (466)..(466): n is a, c, g, or t
ggcagtttgaatcgcgcggtgcgacgaaggagtaggtggtgggagtctcaccgtgggtccggattagcctttgtctcttgccttgcgttgcttggatgcttcagcgtgaattcgaaattgtgcttggcggtaagtgctggaaatggactccgggaataggccaatgactaataggtggttttccctgcatctgcaggagagctcggctttgcatagttcccaggtgggacggcagatattcaatcgcatccatcgctaaagatgctgaggtacggaagcaggtccatggtgacgttgatgggacgctgtatctgcacgcatgatgataccagtcagcagtccaataccgtgggatgtaccttcgacgcgctagaagggatagcttgcaatttggcgatggaaatgcgatccataaatgactttgacaggtcaaagcagtatttaccaccttcggtcgacgtttgcnaacgtttgcgtatgtacgtgtgaggatggaagaaatcggggatttcttgatcgatttcaagggcatgaataaattgggctggtgttgggtggg

SEQ ID NO: 594969 - DNA, 209 bp, Homo sapiens
aaacagtgccactgctactgccaccagtggaattcatcacagagatattcacggctcccaccccatctcttggctatcggtttttgtggggcttctccagcttgagaccctccgcgctcacgctgggaagcgcgggaataaccctcaggataccctgaatgacatgccacagacgaaccatgtcctgcataggctgctggctggcagct

SEQ ID NO: 594970 - DNA, 112 bp, Homo sapiens
gcccagacaagtggggtccccgcaagtgaggcactgtgttaagacaggttctgttccccatgccgcgcaactgggtgagagcctccagtagaggttgtcagacgacccaata

SEQ ID NO: 594971 - DNA, 218 bp, Homo sapiens
gggccagtacggatgtgtgtgtgtgtttttttttttcgagagggggtctccctatatggccaaagcgggtgtcaaactcccaggtgggtctctctccgctctccctctttctctctctttctctcaccggtctcctcctctctcttgggagttttaagcccgggctctaaaccgggttaccctcggttctttccttaaattatgcttatcgggtgtca

SEQ ID NO: 594972 - DNA, 1735 bp, Homo sapiens
ggagagaggagaactagctgagttgttgtgtatctatttctcttctctgattgcacaaggtccccgagtgagggctttacttttaactttcttgacatattcacaggtaccgagggcgaatcacttggtcactctcgttgagtgccgcagatagtccgcggacaagagccggtggccgctagcgcgcggcgccatgtacagcgtccagcacaagcgacagggtgtgtcggacaagttgattcatgtactcctacgagtggaatgaatcccggagccgtcttctcccctgttcttcaataaagaggggtactccggaaggtggctcagtgaccgggagtcgggagtaaggggtggaggtggcccagcattcccaggtgtcttgcagctggagacacgtgatgcgtccgcgtgtcatgtggggggggccacggatgggcattccacccggttggggaaaaagaagagatagtcgaactatatcgaggcgacgagcgctgagagctcgctctataacagaccgcgctgttggccacgggctcagggggccctcgcacgcgagggcctaatctcactgggaggtaaacccctggtacttggcgaacgtccaagctggggaatatctccacgaggagcagagagaataggcccagcgggtagggatccccgaggggccacgaccctgtgctaccatagagcgtcgaaccaagttgcgcagaggcccaactccccgtaggaggggcagcctccaacgcaaaagggggcaacaacactggacccgaggggggggccacacgtaccgcggaagagcacccccatgccagcgaggagtgtcgaaacacctcatgaaggactgccgggtggggcaagcccctcagtgcggccacaaagcagagttgctcgggactccctaccaacagtgtggcagaacaccgcaattaagggaaacgcgagtgcttagacagtcgggtggaccaacattgcctaggcccaagcgggcacacaggcactagagagctcccccgggaggccccatatcagaaatcacacagggggaagcattgccacaaacgcgaggcccgacacacggggggaagagaagagccccccgaggtggagcccaaccaccgcgccacgaaaccgtcgcaaggacacccccaggagggtgaacaaccccgggggggggcactgctcagaaaacggcagcgggcgcacgtatcccccggaacataattggcgagcacccaatgttgtccaatgagcccatataaggcgcccccccataagcgcgggctacccgtgtgccgcaagagacagccctgccaatgcgcccaaaaatccctgctaggcacacacacacggggctccaatggcgttagacacggcccacgtgcctaagacaataccggggtacccgagaccgcatgtcccaccccattcaaagcgggcgcacacacacggcatcgaaccccacacaacagcgccacccaacacggtagcgagaagccgccacaccctcgcatacgaacaaacacacagtagagaaacgggtgcaccaacatgagcaggtgactactacaccccaaactgcgcacgcgacccagcacctccgcacaaccccgcccccgtcctcaaacgacacacaaataccaagcgcaaccccaacacacccccacgccgcacaacgaatcggcagccataaaaaagaacaacacaacaaagacacgcacagtcacca

SEQ ID NO: 594973 - DNA, 823 bp, Homo sapiens
gcaacatgattaacagacttgacctaggagcacatgacctaagcacctaagagtatatatatgtacattttcaaaaatggaaaccaatacattctctgaccatggtggaatctggctagaaagcagtaataaacagaaatctgtatatgttggaaaaagtaaatctcaatggaaatcagaaaatatttggaactgaaattggtgatgaaaatactatatatggaaacttgtgggatatattatagctaaagctgtgttagaggaaatttagagccttacataaatacatatattataaaaggaaaaatattaaaagttaatgaactaagcatccatctccagaggtgtggaaaaacaacagcaaattaaatgcaaagaaagttaaaagaggtgaggccgggtgcggtggttcatgcctgtaatcccagcacttgtgggaggccaaggtgggtggatcacctgaggtcagaagttcgggaccagcctggcaacatgggaaaccccatctctactaaaaaaagaaacatgaacaacaaaaaaaaggaaacaaaatattagcatcaaaaatatcaactaggaccaaatctaagtgaaacctgaaactattcctttatgattagtccatttgtgctctttttaaaataaatttcatctctcgaggaggtttgccggtcatccaggttgggttggaggatgaaatcaggccagagtttgacttcctggtcagggactcccactaagcctaaatgtccacggggttcaggtgacccagccgattttatcatcggggggccaacgctgccggccccccgtgcagatcccg

SEQ ID NO: 594974 - DNA, 687 bp, Homo sapiens
ctcaaaaaagatctgttggtaggcaatgggaaggtgcattcatgtcatcctgcaggaggaattctccacgagttttgagcagcctcggttttcccaccacctccaaatcatggaagaaacagggtaagagcaaagacaaggtggctgtggccgatgtccaccctctcgtggcgtcccttctcttctctcctccttgagcagggagaccatcggggtgcaacctggccggggcggggaggaggtgcagggcattgccagagcgggcctgtccatgggcaagggacagcgacctcctgggccaggacatgtgagagctacgcaggcctgggcccggcgtggcggaggtgcgcgacagcggccagaagagggcgccagagtgccaggagccgcccgcggaggagcccgcaccggccccgatacccagctccgcgccacgcggacccaccgagcccgcgctcagacgccccagctccgccgagaggccgctcgcgccgtgtcctttctcttccccaagttcaggcagagtccccggagccatggccagcccttccagcagctccgaagccactggcaagccccgaggcagggatggccggcccagaagggagaaggaggaggacgtcccttccgaagagaagaggctggggctgtaactggaaaggggaagcgcacagcccgagggactgc

SEQ ID NO: 594975 - DNA, 229 bp, Homo sapiens
aggaccccggccgaggctgggcggtgagtctccagcccagctttcatggctggagcggggacgcagctcgatctccagctccggcatcgtgcgtctcaggtctgtgatctccgtctggctgggcctggatcatttctgtgtgggaggccacctcttggttcagctcctcagtctggctgaagaaccaggcctcgacatcccggcggttcttctccgccagggcctcgtg

SEQ ID NO: 594976 - DNA, 339 bp, Homo sapiens
  misc_feature (31)..(31): n is a, c, g, or t
  misc_feature (167)..(169): n is a, c, g, or t
ggaatttttaaaattttttggggggcccccngggggggcccccccaggggggcaccccccctttttccccctttttatttgggcccgaatttaaaccccccttttttttagggggtaagtggggttggggggccccccccccccccggggtttggggattaaaaaannntttttttgggggggtttttttttttaggggggtttttttttcccccccggggggggggcccctttttttttaaaaaaacccccccccgggggggggggggtttttttttttcccttttttccccccccccggggggttttccccctttttagggggggggggggggccca

SEQ ID NO: 594977 - DNA, 956 bp, Homo sapiens
gaggtggcagctggaaccgcgcactgcgacgggaacacgtaccgctgtcttgggtcaggttcgccgagtcgcgggagccccgctgtgcagtcggaggaacacgtgcgccatcgagtaatccattgagacaacccattctgcaccaccttgcttgagtccattggcatccgtgtacaatcaagtgcaacagaagattcttcaattcgacataacatgggatggcattcgaacgcatcatggagcgcttgaccatgtgatcgatcagcagttcttcctgggcaacgcagacccatatcggaaattagtgaatgcagttttcggggctgcaagcacacacaggaatattgcaacacactattctacattcggcacatgctccaccgcaagccaccaccgcacactatagcacagctgccccgctcctcacaggcgcttgtcatcggctgctcaataccctttgccgagcgtcacacttacaaacagggatggtagcccgccagcgcattgctggcgtataggaaccttctcgtggccttggcaattgcgggattgcaattgccatgggtggtagagacacagggtataagggacgcgaagcaaatcccacggcaagcacaccatttaaacagcccccttgagtcgtagagctcctgtcgtgcaaatcctttggttcaacttacgccattccacattggcccacttacccgcagctgcttgcgcagtctctccgcaatccagtcaacaccgtacgcccagagcacccaacgagttctcacaatcgagacacgcaaacttcccagcgggcagccggtagcgcacactatgtggccgccacgccccatccctcacgcacagcacggccgaacatctctggcacactaccagagcttcaacacgctcgcgggcggtcatcacccctcaggagagcatcacttctcgcacgcgaaaaagaatcg

SEQ ID NO: 594978 - DNA, 428 bp, Homo sapiens
cagcagtggtgtcagcgagaagaattgcttgacagtcaggaggtgggaggttgcagtgagtccagatcgcaccactgcactacagcctgggtgacagagtgcaggctgtctcaaaaaaaaaaaaaagattatgggccagttggtggcttgcccccttcttgtgccttatgattgggcccctgttgatttcctcagccacttctcttgtggtgccccagtgcttttggtctgcactgggccttcttggatctcgggcttaacttttgctgtccccactctctgccgaggacacatttccctttgtgtatttcccatcggttatactaacctagtaaatccctggtgtccccatttggtttctcatgtcaaccagtatttcctgagggcagtcttccctcagcaccgagggtcccggagctcggaatcgg

SEQ ID NO: 594979 - DNA, 226 bp, Homo sapiens
cgcgtaccagttgcggttcaccgtgtggcgtaggtccggctgcgagggtgctgcactcgtgtggtggttaccactcccactgacttccctgctttcttggcccgattcgtcacggagactacctctgttgccggcgtgtcggtgttgcacgtggttaaacgcgggcggctgcactcaatgccaatggtctggaagttgcccttgaccccgcaactggtacggcggg

SEQ ID NO: 594980 - DNA, 355 bp, Homo sapiens
atcaagcagaagggaattcacatgtattccatgtgcacagcattttggatagtctactaatggtataatataagtatcatatttgttttcattttgaaatatatttggggggatgcccaagcctgctgtacaaactacagtaagaagtgattctcacttggtgttagatgcccttttgattcttaaactatgagaagtaaagcgcgtggttttgtggcttttagttgtaacagagaacaatcatatcaagaaccagagccatattttagttattcttgtgccgaatagtatttcccaaaagtctatgaaaaaataaaataacaagcataagggtactttttaataacccatccta

SEQ ID NO: 594981 - DNA, 288 bp, Homo sapiens
agcatgtctacgccgtgtagaggagggcatattgcgagggctgatacgtgtgccaccttggagaaatgtgccacgtgctcccagttccatactggagcggattctgcgggctatggggaaggcctaccagcctggctgcttcacctgcgtggtgtgtcaccgcggcctcaacggcatccccttcacagtggatgctacgagccagatccactgcattgaggactttcacaggaggtttgccccaagatgctcagagtacggtggggccataatgcctgagccaggtca

SEQ ID NO: 594982 - DNA, 333 bp, Homo sapiens
cgctatcgccggtgccgagccgattccgttgtatcgcccggaagtgccgatctattcagtggacatccccgctgcgcaggtcatgacgttgcaagccctgggtaccttccatgaacgccagggcgagcaaagcctgctgaccgggaccggtgcaatgccggcaggttggggccgcgcctacggcagtgacttcaacaagagctggtcgggcacgggggcgcccagttttgacggcacgtccaggggcttccaggtgggccatgacctctatgccagcgaaaccagtggcgggcagactcaacgctttggcctgtttatcggccagagtcgcct

SEQ ID NO: 594983 - DNA, 2885 bp, Homo sapiens
  misc_feature (2854)..(2854): n is a, c, g, or t
gagcggggggcccggaagtggtccctgtagaaccactgtggcaccgctactccgtgccgcgcccgtcgagcattgcgttgctgcattgcgccccaccgactccactatgttgaagaaattcgacaagaaggatgaggagtcaggtggaggctccaacccattccagcaccttgagaagagtgcggtactccaggaggcccgtgtatttaatgaaactcccatcaaccctcggaaatgtgcccacatcctcaccaagattctttatctcataaaccagggggagcacctggggaccacggaagcgaccgaggccttctttgccatgaccaagctctttcagtccaatgatcccacactccgtcggatgtgctacttgaccatcaaggagatgtcttgcattgcagaggatgtcatcattgtcaccagcagcctaacaaaagacatgactgggaaagaagacaactaccggggcccggccgtgcgagccctctgccagatcactgatagcaccatgctgcaggctattgagcgctacatgaaacaagccattgtggacaaggtgcccagtgtctccagctctgccctcgtgtcttccttgcacctgctgaagtgcagctttgacgtggtcaagcgctgggtgaatgaggctcaggaggcagcatccagtgataacatcatggtccagtaccacgcactagggctcctgtaccatgtgcgtaagaatgaccgcctagccgtcaataagatgatcagcaaggtcacacggcatggccttaagtctccctttgcctactgcatgatgatccgggtggccagcaagcagctggaagaggaggatggcagccgtgacagcccactgtttgacttcatcgagagctgcttgcgcaacaagcacgagatggtggtgtatgaagccgcctcggccatcgtcaatctgccaggctgcagtgccaaagagctggccccggctgtgtcagtgctccagcttttctgcagctcacccaaggctgctctccgctatgctgctgttcgtaccctcaataaggttgccatgaagcatccgtcagctgtgacagcttgtaatctggatctggagaacctggtcacagattcaaaccgcagcattgccacgctggccatcaccaccctccttaagacgggcagcgagagcagcatcgaccgcctcatgaagcagatctcctccttcatgtcagaaatctcggatgaattcaaggtggtggttgtccaggccatcagtgccctgtgtcagaaatatcctcgcaaacacgccgtccttatgaacttcctgttcaccatgctgcgggaagagggtggctttgagtataagcgcgctatcgtggactgcatcatcagcatcattgaagagaactcagagagcaaggagacagggctgtcacatctgtgcgagttcatcgaggactgcgagttcacagtgctggccacccgtattctacatctcctgggccaggaggggcccaagaccaccaatccctcaaagtacatccgcttcatctataaccgagtggtcttggagcatgaggaggtccgggcaggtgctgtgagtgctctggcgaagtttggagcccagaatgaagagatgttacccagtatcttggtgttgctgaagaggtgtgtgatggatgatgacaatgaagtaagggaccgagccaccttctacctaaatgtcctggagcagaagcagaaggcccttaatgcaggctatatcctaaatggtctgactgtgtccatccctggtctggagagggctctgcagcagtacactctagaaccatcagaaaaaccttttgacctcaagtctgtgcccctggccacggcgcccatggcagagcagagaacagaaagtacccccatcacagcagtcaaacagcctgagaaagtggcagctaccaggcaggagatcttccaggagcagttggcagcagtgccagagttccgcggtcttgggcccctcttcaagtcctcgcctgagcccgtggccctcaccgagtcagagacggagtatgtcatccgctgcaccaaacacaccttcaccaaccacatggtttttcagtttgactgcacaaacacactcaatgaccagaccttggagaatgtcacagtgcagatggagcccactgaggcctatgaggtgctctgttacgtgcctgcccggagcctgccctacaaccagcccgggacctgctacacactggtggcactgcccaaagaagaccccacagctgtggcctgcacattcagctgcatgatgaagttcactgtcaaggactgtgatcccaccactggggagactgatgacgaaggctatgaggatgagtatgtgctggaagatctggaagttactgtagctgatcacattcaaaaggtcatgaaactgaacttcgaagcagcctgggatgaggtaggggatgaatttgagaaggaggaaacgttcaccttgtctaccatcaagacacttgaagaggctgtgggtaatattgtgaagttcttgggaatgcacccttgtgagaggtcagacaaagtgccggataacaagaacacccacacgttgctcctggctggtgtgttccggggtggtcatgacatcctggtgcgctcccggctgctgcttttggacacagtgacaatgcaggtgacagccagaagtttggaggagctgccagtagacatcatcttggcatctgtgggataagaggccagcctgcataggacctcatacccttccccaacactacctggaagttgtgccttcctcatgaaactggcagaaaccccttcccaagcttctggatgtcacctgcatcgtcactgtgtncaaaagcagcagactggagcgcaccaggatg

SEQ ID NO: 594984 - DNA, 3014 bp, Homo sapiens
gagcggggggcccggaagtggtccctgtagaaccactgtggcaccgctactccgtgccgcgcccgtcgagcattgcgttgctgcattgcgccccaccgactccactatgttgaagaaattcgacaagaaggatgaggagtcaggtggaggctccaacccattccagcaccttgagaagagtgcggtactccaggaggcccgtgtatttaatgaaactcccatcaaccctcggaaatgtgcccacatcctcaccaagattctttatctcataaaccagggggagcacctggggaccacggaagcgaccgaggccttctttgccatgaccaagctctttcagtccaatgatcccacactccgtcggatgtgctacttgaccatcaaggagatgtcttgcattgcagaggatgtcatcattgtcaccagcagcctaacaaaagacatgactgggaaagaagacaactaccggggcccggccgtgcgagccctctgccagatcactgatagcaccatgctgcaggctattgagcgctacatgaaacaagccattgtggacaaggtgcccagtgtctccagctctgccctcgtgtcttccttgcacctgctgaagtgcagctttgacgtggtcaagcgctgggtgaatgaggctcaggaggcagcatccagtgataacatcatggtccagtaccacgcactagggctcctgtaccatgtgcgtaagaatgaccgcctagccgtcaataagatgatcagcaaggtcacacggcatggccttaagtctccctttgcctactgcatgatgatccgggtggccagcaagcagctggaagaggaggatggcagccgtgacagcccactgtttgacttcatcgagagctgcttgcgcaacaagcacgagatggtggtgtatgaagccgcctcggccatcgtcaatctgccaggctgcagtgccaaagagctggccccggctgtgtcagtgctccagcttttctgcagctcacccaaggctgctctccgctatgctgctgttcgtaccctcaataaggttgccatgaagcatccgtcagctgtgacagcttgtaatctggatctggagaacctggtcacagattcaaaccgcagcattgccacgctggccatcaccaccctccttaagacgggcagcgagagcagcatcgaccgcctcatgaagcagatctcctccttcatgtcagaaatctcggatgaattcaaggtggtggttgtccaggccatcagtgccctgtgtcagaaatatcctcgcaaacacgccgtccttatgaacttcctgttcaccatgctgcgggaagagggtggctttgagtataagcgcgctatcgtggactgcatcatcagcatcattgaagagaactcagagagcaaggagacagggctgtcacatctgtgcgagttcatcgaggactgcgagttcacagtgctggccacccgtattctacatctcctgggccaggaggggcccaagaccaccaatccctcaaagtacatccgcttcatctataaccgagtggtcttggagcatgaggaggtccgggcaggtgctgtgagtgctctggcgaagtttggagcccagaatgaagagatgttacccagtatcttggtgttgctgaagaggtgtgtgatggatgatgacaatgaagtaagggaccgagccaccttctacctaaatgtcctggagcagaagcagaaggcccttaatgcaggctatatcctaaatggtctgactgtgtccatccctggtctggagagggctctgcagcagtacactctagaaccatcagaaaaaccttttgacctcaagtctgtgcccctggccacggcgcccatggcagagcagagaacagaaagtacccccatcacagcagtcaaacagcctgagaaagtggcagctaccaggcaggagatcttccaggagcagttggcagcagtgccagagttccgcggtcttgggcccctcttcaagtcctcgcctgagcccgtggccctcaccgagtcagagacggagtatgtcatccgctgcaccaaacacaccttcaccaaccacatggtttttcagtttgactgcacaaacacactcaatgaccagaccttggagaatgtcacagtgcagatggagcccactgaggcctatgaggtgctctgttacgtgcctgcccggagcctgccctacaaccagcccgggacctgctacacactggtggcactgcccaaagaagaccccacagctgtggcctgcacattcagctgcatgatgaagttcactgtcaaggactgtgatcccaccactggggagactgatgacgaaggctatgaggatgagtatgtgctggaagatctggaagttactgtagctgatcacattcaaaaggtcatgaaactgaacttcgaagcagcctgggatgaggtaggggatgaatttgagaaggaggaaacgttcaccttgtctaccatcaagacacttgaagaggctgtgggtaatattgtgaagttcttgggaatgcacccttgtgagaggtcagacaaagtgccggataacaagaacacccacacgttgctcctggctggtgtgttccggggtggtcatgacatcctggtgcgctcccggctgctgcttttggacacagtgacaatgcaggtgacagccagaagtttggaggagctgccagtagacatcatcttggcatctgtgggataagaggccagcctgcataggacctcatacccttattgaaaaacaattaggaatcattgcagatttttttttattctgctcccacctcccacccgggactacttgctggtgacttttttttttttttttttttaaataggggatgattttagcttgtcctaaatcttgctgtccacccttccaggaaagggacattgtaaatgaataaaacattctcaactcctcttgaatctatcccccaagaaaccatcttatccctgtaataaatcagcatgtatttattgaa

SEQ ID NO: 594985 - DNA, 724 bp, Homo sapiens
  misc_feature (15)..(15): n is a, c, g, or t
  misc_feature (18)..(19): n is a, c, g, or t
  misc_feature (21)..(21): n is a, c, g, or t
  misc_feature (39)..(39): n is a, c, g, or t
  misc_feature (41)..(41): n is a, c, g, or t
  misc_feature (92)..(92): n is a, c, g, or t
  misc_feature (130)..(130): n is a, c, g, or t
  misc_feature (145)..(145): n is a, c, g, or t
  misc_feature (176)..(176): n is a, c, g, or t
  misc_feature (361)..(361): n is a, c, g, or t
  misc_feature (371)..(371): n is a, c, g, or t
  misc_feature (384)..(384): n is a, c, g, or t
  misc_feature (448)..(448): n is a, c, g, or t
  misc_feature (474)..(474): n is a, c, g, or t
  misc_feature (540)..(540): n is a, c, g, or t
  misc_feature (551)..(552): n is a, c, g, or t
  misc_feature (554)..(554): n is a, c, g, or t
  misc_feature (573)..(573): n is a, c, g, or t
  misc_feature (597)..(597): n is a, c, g, or t
  misc_feature (618)..(618): n is a, c, g, or t
  misc_feature (652)..(652): n is a, c, g, or t
  misc_feature (658)..(658): n is a, c, g, or t
  misc_feature (681)..(681): n is a, c, g, or t
  misc_feature (685)..(685): n is a, c, g, or t
  misc_feature (691)..(691): n is a, c, g, or t
  misc_feature (695)..(695): n is a, c, g, or t
atacggctaggtagnggnngngtggtggagattaggtcnangcgcccgcccagaggcaggcagtccgcgagcccagccgccgctgtcgccgncagtagcagccttcgccagcagcgccgcggcggaaccngggcgcaggggagcngagcccggccccgcacagcccagcccagccnagccctactccctccccacgccagggcagcagccgttgctcagagagaaggtggaggaagaaatccagaccctagcacgcgcgcaccatcatggaccattatgattctcagcaaaccaacgattacatgcagccagaagaggactgggaccgggacctgctcctggacccggcctgggagaagcnagcagagaanagacattcacggnatggtgtaactcccacctccggaagggcggggacacagatcgagaacatcgaagagatcttccngggatggcctgaaagctcatgagtgnctgcgtggaggtcatgcttcaggtgaacagcttgagccaagccagagcgaggcaagatgagagtgnacaagatctcnnangtcaacaaggccctggatntcatagccagcaaaggcgtcaaantggtgtccatcggagccgaanaaatcgtggatgggatgtgaagatgaccctgggnatgatntggaccatcatcctgcgctttgncatncagganatcnccgtggaagagacttcagccaaggaaggg

SEQ ID NO: 594986 - DNA, 2449 bp, Homo sapiens
gagcggggggcccggaagtggtccctgtagaaccactgtggcaccgctactccgtgccgcgcccgtcgagcattgcgttgctgcattgcgccccaccgactccactatgttgaagaaattcgacaagaaggatgaggagtcaggtggaggctccaacccattccagcaccttgagaagagtgcggtactccaggaggcccgtgtatttaatgaaactcccatcaaccctcggaaatgtgcccacatcctcaccaagattctttatctcataaaccagggggagcacctggggaccacggaagcgaccgaggccttctttgccatgaccaagctctttcagtccaatgatcccacactccgtcggatgtgctacttgaccatcaaggagatgtcttgcattgcagaggatgtcatcattgtcaccagcagcctaacaaaagacatgactgggaaagaagacaactaccggggcccggccgtgcgagccctctgccagatcactgatagcaccatgctgcaggctattgagcgctacatgaaacaagccattgtggacaaggtgcccagtgtctccagctctgccctcgtgtcttccttgcacctgctgaagtgcagctttgacgtggtcaagcgctgggtgaatgaggctcaggaggcagcatccagtgataacatcatggtccagtaccacgcactagggctcctgtaccatgtgcgtaagaatgaccgcctagccgtcaataagatgatcagcaaggtcacacggcatggccttaagtctccctttgcctactgcatgatgatccgggtggccagcaagcagctggaagaggaggatggcagccgtgacagcccactgtttgacttcatcgagagctgcttgcgcaacaagcacgagatggtggtgtatgaagccgcctcggccatcgtcaatctgccaggctgcagtgccaaagagctggccccggctgtgtcagtgctccagcttttctgcagctcacccaaggctgctctccgctatgctgctgttcgtaccctcaataaggttgccatgaagcatccgtcagctgtgacagcttgtaatctggatctggagaacctggtcacagattcaaaccgcagcattgccacgctggccatcaccaccctccttaagacgggcagcgagagcagcatcgaccgcctcatgaagcagatctcctccttcatgtcagaaatctcggatgaattcaaggtggtggttgtccaggccatcagtgccctgtgtcagaaatatcctcgcaaacacgccgtccttatgaacttcctgttcaccatgctgcgggaagagggtggctttgagtataagcgcgctatcgtggactgcatcatcagcatcattgaagagaactcagagagcaaggagacagggctgtcacatctgtgcgagttcatcgaggactgcgagttcacagtgctggccacccgtattctacatctcctgggccaggaggggcccaagaccaccaatccctcaaagtacatccgcttcatctataaccgagtggtcttggagcatgaggagcctgccctacaaccagcccgggacctgctacacactggtggcactgcccaaagaagaccccacagctgtggcctgcacattcagctgcatgatgaagttcactgtcaaggactgtgatcccaccactggggagactgatgacgaaggctatgaggatgagtatgtgctggaagatctggaagttactgtagctgatcacattcaaaaggtcatgaaactgaacttcgaagcagcctgggatgaggtaggggatgaatttgagaaggaggaaacgttcaccttgtctaccatcaagacacttgaagaggctgtgggtaatattgtgaagttcttgggaatgcacccttgtgagaggtcagacaaagtgccggataacaagaacacccacacgttgctcctggctggtgtgttccggggtggtcatgacatcctggtgcgctcccggctgctgcttttggacacagtgacaatgcaggtgacagccagaagtttggaggagctgccagtagacatcatcttggcatctgtgggataagaggccagcctgcataggacctcatacccttccccaacactacctggaagttgtgccttcctcatgaaactggcagaaaccccttcccaagcttctgtattgaaaaacaattaggaatcattgcagatttttttttattctgctcccacctcccacccgggactacttgctggtgacttttttttttttttttttttaaataggggatgattttagcttgtcctaaatcttgctgtccacccttccaggaaagggacattgtaaatgaataaaacattctcaactcctcttgaatctatcccccaagaaaccatcttatccctgtaataaatcagcatgtatttattgaa

SEQ ID NO: 594987 - DNA, 1801 bp, Homo sapiens
  misc_feature (5)..(5): n is a, c, g, or t
gcggncgcctactactactaaattcgcggccgcgtcgactgcgggaagagggtggctttgagtataagcgcgctatcgtggactgcatcatcagcatcattgaagagaactcagagagcaaggagacagggctgtcacatctgtgcgagttcatcgaggactgcgagttcacagtgctggccacccgtattctacatctcctgggccaggaggggcccaagaccaccaatccctcaaagtacatccgcttcatctataaccgagtggtcttggagcatgaggaggtccgggcaggtgctgtgagtgctctggcgaagtttggagcccagaatgaagagatgttacccagtatcttggtgttgctgaagaggtgtgtgatggatgatgacaatgaagtaagggaccgagccaccttctacctaaatgtcctggagcagaagcagaaggcccttaatgcaggctatatcctaaatggtctgactgtgtccatccctggtctggagagggctctgcagcagtacactctagaaccatcagaaaaaccttttgacctcaagtctgtgcccctggccacggcgcccatggcagagcagagaacagaaagtacccccatcacagcagtcaaacagcctgagaaagtggcagctaccaggcaggagatcttccaggagcagttggcagcagtgccagagttccgcggtcttgggcccctcttcaagtcctcgcctgagcccgtggccctcaccgagtcagagacggagtatgtcatccgctgcaccaaacacaccttcaccaaccacatggtttttcagtttgactgcacaaacacactcaatgaccagaccttggagaatgtcacagtgcagatggagcccactgaggcctatgaggtgctctgttacgtgcctgcccggagcctgccctacaaccagcccgggacctgctacacactggtggcactgcccaaagaagaccccacagctgtggcctgcacattcagctgcatgatgaagttcactgtcaaggactgtgatcccaccactggggagactgatgacgaaggctatgaggatgagtatgtgctggaagatctggaagttactgtagctgatcacattcaaaaggtcatgaaactgaacttcgaagcagcctgggatgaggtaggggatgaatttgagaaggaggaaacgttcaccttgtctaccatcaagacacttgaagaggctgtgggtaatattgtgaagttcttgggaatgcacccttgtgagaggtcagacaaagtgccggataacaagaacacccacacgttgctcctggctggtgtgttccggggtggtcatgacatcctggtgcgctcccggctgctgcttttggacacagtgacaatgcaggtgacagccagaagtttggaggagctgccagtagacatcatcttggcatctgtgggataagaggccagcctgcataggacctcatacccttccccaacactacctggaagttgtgccttcctcatgaaactggcagaaaccccttcccaagcttctgtattgaaaaacaattaggaatcattgcagatttttttttattctgctcccacctcccacccgggactacttgctggtgacttttttttttttttttttttaaataggggatgattttagcttgtcctaaatcttgctgtccacccttccaggaaagggacattgtaaatgaataaaacattctcaactcctcttgaatctatcccccaagaaaccatcttatccctgtaataaatcagcatgtatttattgaa

SEQ ID NO: 594988 - DNA, 800 bp, Homo sapiens
ttatcatgcttggctcaagactgcatcatttctgagggtctctttggctactgagttgggggcaggagacgatactgtatccgaggagcctcctgcatgtcctgctgccctgagctcactcaagctaggtgacagcgtgtgaatgctgccaccatgaatgaggtatctgtcatcaaagaaggctggctccacaaacgtggtgaatacatcaagacctggaggccacggtacttccttctgaagagtgatggatctttcattgggtataaggagaggcccgaggcccctgaccagaccttaccccccctgaacaatttctctgtagcagaatgccagctgatgaagactgagaggccacgaccaacacctttgtcatacgctgcctgcagtggaccacagtcatcgagaggaccttccatgtagactctccagatgagagggaagagtggatgcgggctatccagatggtcgccaacagtctgaagcagcggggcccaggtgaggacgccatggattacaagtgtggctcccccagtgactcttccacatctgagatgatggaggtagctgtcaacaaggcacgggccaaagtgaccatgaatgacttcgattatctcaaactcctcggcaagggcaccttcggcaaggtcattctggttcgagagaaggccactggcgtattatgccatgaagatcctgcgcagaggtcatccattgcaaggatgagtcgccacacagtccagagagccggtctgcaatacaggccccctcttaagcctcaagttgcttcagacctgacg

SEQ ID NO: 594989 - DNA, 365 bp, Homo sapiens
  misc_feature (237)..(237): n is a, c, g, or t
  misc_feature (282)..(282): n is a, c, g, or t
agcggattgtgggcagaggggcgggggttgggaagatggcggctcccagcctcctcaactggaggcgagtttcttccttcacggggccggtcccccgcgcccggcacggacaccgagcggtggccatccgggagctgatgatcatctttggagggggaaatgcagggccatcgctgggatggatgcttgcatcagtctacaaacagcggctaccgaaatcacgtgggtttctagcancagctgttagaaggacgatatcgcctccatgggctgtgctgcccnatggactttgtctgtgactggtaccatgaactattacgtattctggggggacactgggttcgacactacttgggaaaggacta

SEQ ID NO: 594990 - DNA, 653 bp, Homo sapiens
tttttttttatacaggttgctcaagctaattttattctttcccaacaggattccatttgtggaaaattattcaagccttttagaaatgtgtgcgcacgcaagaaaaacgcggacttacgcaggaacggggagtttggggaagaagcttcctcctgtggttttgactttagggattgaaggcttccgaggcgtgctgtgccagaacaagtggagtctcaccaacgcagaacaaacacgtgtttctctctgtgaattagaggatgttcccaccattttctcaaggcgtgttctacgttacaagtttcaccacaggtctcccttctttgcgagacgagttgagtctcacgtcttaaccctaatatattctcccccatccaaaaggcgggtttgcgtgaaacgtttcgttttgaaacatatgtgccaagtgccctccacacacttttccaaaaccactcttgttattatcacaacgtgtgtctcacaccccaaaccttggggctaatgtgaagaccaccacattcacaatattcacaatttgaaccacattttgaccgggcgtgcttttgtgccacgatcacgacagcgtgtgggttttagcgacacgcttgttgccaccttgcccgggcctattgaccttgcaatgtgcgcacaaa

SEQ ID NO: 594991 - DNA, 354 bp, Homo sapiens
cgtcgccgggagggttgctgcgcggaagccagcgacggtgctggggtgatgtcgacctttgtatgacaacgatcccgacaagatggaaagaggatatgtggttgtcgacacgcggtatgccgagtggcgaacgaggtggcccaaggtggtgaccgagtgcgacactcaagccgccgctggtctggtcaaggagtactactccaccatgccaagtggtcggcagaagtactcgggttcgcagttcgaggcgattgccgcgcgcaacccagacctcaacagcatcgacacagcggacatcgtcgccgtttctatgctcagcgtcgacgttcccggtcccgcagcactgcgtctgtc

SEQ ID NO: 594992 - DNA, 1813 bp, Homo sapiens
gagcggggggcccggaagtggtccctgtagaaccactgtggcaccgctactccgtgccgcgcccgtcgagcattgcgttgctgcattgcgccccaccgactccactatgttgaagaaattcgacaagaaggatgaggagtcaggtggaggctccaacccattccagcaccttgagaagagtgcggtactccaggaggcccgtgtatttaatgaaactcccatcaaccctcggaaatgtgcccacatcctcaccaagattcttcatctataaccgagtggtcttggagcatgaggaggtccgggcaggtgctgtgagtgctctggcgaagtttggagcccagaatgaagagatgttacccagtatcttggtgttgctgaagaggtgtgtgatggatgatgacaatgaagtaagggaccgagccaccttctacctaaatgtcctggagcagaagcagaaggcccttaatgcaggctatatcctaaatggtctgactgtgtccatccctggtctggagagggctctgcagcagtacactctagaaccatcagaaaaaccttttgacctcaagtctgtgcccctggccacggcgcccatggcagagcagagaacagaaagtacccccatcacagcagtcaaacagcctgagaaagtggcagctaccaggcaggagatcttccaggagcagttggcagcagtgccagagttccgcggtcttgggcccctcttcaagtcctcgcctgagcccgtggccctcaccgagtcagagacggagtatgtcatccgctgcaccaaacacaccttcaccaaccacatggtttttcagtttgactgcacaaacacactcaatgaccagaccttggagaatgtcacagtgcagatggagcccactgaggcctatgaggtgctctgttacgtgcctgcccggagcctgccctacaaccagcccgggacctgctacacactggtggcactgcccaaagaagaccccacagctgtggcctgcacattcagctgcatgatgaagttcactgtcaaggactgtgatcccaccactggggagactgatgacgaaggctatgaggatgagtatgtgctggaagatctggaagttactgtagctgatcacattcaaaaggtcatgaaactgaacttcgaagcagcctgggatgaggtaggggatgaatttgagaaggaggaaacgttcaccttgtctaccatcaagacacttgaagaggctgtgggtaatattgtgaagttcttgggaatgcacccttgtgagaggtcagacaaagtgccggataacaagaacacccacacgttgctcctggctggtgtgttccggggtggtcatgacatcctggtgcgctcccggctgctgcttttggacacagtgacaatgcaggtgacagccagaagtttggaggagctgccagtagacatcatcttggcatctgtgggataagaggccagcctgcataggacctcatacccttccccaacactacctggaagttgtgccttcctcatgaaactggcagaaaccccttcccaagcttctgtattgaaaaacaattaggaatcattgcagatttttttttattctgctcccacctcccacccgggactacttgctggtgacttttttttttttttttttttaaataggggatgattttagcttgtcctaaatcttgctgtccacccttccaggaaagggacattgtaaatgaataaaacattctcaactcctcttgaatctatcccccaagaaaccatcttatccctgtaataaatcagcatgtatttattgaa

SEQ ID NO: 594993 - DNA, 2708 bp, Homo sapiens
gagcggggggcccggaagtggtccctgtagaaccactgtggcaccgctactccgtgccgcgcccgtcgagcattgcgttgctgcattgcgccccaccgactccactatgttgaagaaattcgacaagaaggatgaggagtcaggtggaggctccaacccattccagcaccttgagaagagtgcggtactccaggaggcccgtgtatttaatgaaactcccatcaaccctcggaaatgtgcccacatcctcaccaagattctttatctcataaaccagggggagcacctggggaccacggaagcgaccgaggccttctttgccatgaccaagctctttcagtccaatgatcccacactccgtcggatgtgctacttgaccatcaaggagatgtcttgcattgcagaggatgtcatcattgtcaccagcagcctaacaaaagacatgactgggaaagaagacaactaccggggcccggccgtgcgagccctctgccagatcactgatagcaccatgctgcaggctattgagcgctacatgaaacaagccattgtggacaaggtgcccagtgtctccagctctgccctcgtgtcttccttgcacctgctgaagtgcagctttgacgtggtcaagcgctgggtgaatgaggctcaggaggcagcatccagtgataacatcatggtccagtaccacgcactagggctcctgtaccatgtgcgtaagaatgaccgcctagccgtcaataagatgatcagcaaggtcacacggcatggccttaagtctccctttgcctactgcatgatgatccgggtggccagcaagcagctggaagaggaggatggcagccgtgacagcccactgtttgacttcatcgagagctgcttgcgcaacaagcacgagatggtggtgtatgaagccgcctcggccatcgtcaatctgccaggctgcagtgccaaagagctggccccggctgtgtcagtgctccagcttttctgcagctcacccaaggctgctctccgctatgctgctgttcgtaccctcaataaggttgccatgaagcatccgtcagctgtgacagcttgtaatctggatctggagaacctggtcacagattcaaaccgcagcattgccacgctggccatcaccaccctccttaagacgggcagcgagagcagcatcgaccgcctcatgaagcagatctcctccttcatgtcagaaatctcggatgaattcaaggtggtggttgtccaggccatcagtgccctgtgtcagaaatatcctcgcaaacacgccgtccttatgaacttcctgttcaccatgctgcgggaagagggtggctttgagtataagcgcgctatcgtggactgcatcatcagcatcattgaagagaactcagagagcaaggagacagggctgtcacatctgtgcgagttcatcgaggactgcgagttcacagtgctggccacccgtattctacatctcctgggccaggaggggcccaagaccaccaatccctcaaagtacatccgcttcatctataaccgagtggtcttggagcatgaggaggtccgggcaggtgctgtgagtgctctggcgaagtttggagcccagaatgaagagatgttacccagtatcttggtgttgctgaagaggtgtgtgatggatgatgacaatgaagtaagggaccgagccaccttctacctaaatgtcctggagcagaagcagaaggcccttaatgcaggctatatcctaaatggtctgactgtgtccatccctggtctggagagggctctgcagcagtacactctagaaccatcagaaaaaccttttgacctcaagtctgtgcccctggccacggcgcccatggcagagcagagaacagaaagtacccccatcacagcagtcaaacagcctgagaaagtggcagctaccaggcaggagatcttccaggagcagttggcagcagtgccagagttccgcggtcttgggcccctcttcaagtcctcgcctgagcccgtggccctcaccgagtcagagacggagtatgtcatccgctgcaccaaacacaccttcaccaaccacatggtttttcagtttgactgcacaaacacactcaatgaccagaccttggagaatgtcacagtgcagatggagcccactgaggcctatgaggtgctctgttacgtgcctgcccggagcctgccctacaaccagcccgggacctgctacacactggtggcactgcccaaagaagaccccacagctgtggcctgcacattcagctgcatgatgaagttcactgtcaaggactgtgatcccaccactggggagactgatgacgaaggctatgaggatgagtatgtgctggaagatctggaagttactgtagctgatcacattcaaaaggtcatgaaactgaacttcgaagcagcctgggatgaggtaggggatgaatttgagaaggaggaaacgttcaccttgtctaccatcaagacacttgaaggtaaaatcctgggaatgccatctctggcctaattactgttcaagatctttggctactattgaagtgctcatcccttttctctccaaggatccagggccatgtctggagcacatatgtcaaatgccacttcattaaaagcccttcagaacatgggggagtggtggtggcacaaagggcagataagatggcttaacaatattgggattt

SEQ ID NO: 594994 - DNA, 475 bp, Homo sapiens
gtaacgtcaaaggcagcagggtcagcaggtggcggaggcgaggcatgtcggtttccttgtcgtggtgttgtcgaagggttccatggcacgggccaggctggcttcggagagttcgcccaggtggctgttgatcaggcgcccatcggcttggtagaacaacgtagtcggcaaggccatggaacccacggcctggccgaggcggccgctggcgtcgaacagcacgttgtcgaggttcaggccctgggtggccaggtaagtgctgacgctttgcatgctttcggcctggttgacgaacaggaagggtcaccatcggggcgcatgcgctgggcgttttccagcaccggcatttcgcgtcggcacggcgggcaccaggtggcccagaggttgatcaccaacgggccgccttgataatccgcccagttgcaccaccatcagccaattggcaattgcgcagggtgatatcccggcagggcgc

SEQ ID NO: 594995 - DNA, 243 bp, Homo sapiens
aaacttaggaataactagtcattgctctctaaaaagaacagacctaaaaataaagcagcagcccataatacttactatgccagttcttttagcatttggttatttaaaccggcagtccctaacctttttggcaccaggtactggtttcacggaagacactttttccactgacaagtgtggggatggtttggagatgaaacggttccatctcagatcatcagtattagattctcataagcgggg

SEQ ID NO: 594996 - DNA, 1874 bp, Homo sapiens
gagcggggggcccggaagtggtccctgtagaaccactgtggcaccgctactccgtgccgcgcccgtcgagcattgcgttgctgcattgcgccccaccgactccactatgttgaagaaattcgacaagaaggatgaggagtcaggtggaggctccaacccattccagcaccttgagaagagtgcggtactccaggaggcccgtgtatttaatgaaactcccatcaaccctcggaaatgtgcccacatcctcaccaagattctttatctcataaaccagggggagcacctggggaccacggaagcgaccgaggccttctttgccatgaccaagctctttcagtccaatgatcccacactccgtcggatgtgctacttgaccatcaaggagatgtcttgcattgcagaggatgtcatcattgtcaccagcagcctaacaaaagacatgactgggaaagaagacaactaccggggcccggccgtgcgagccctctgccagatcactgatagcaccatgctgcaggctattgagcgctacatgaaacaagccattgtggacaaggtgcccagtgtctccagctctgccctcgtgtcttccttgcacctgctgaagtgcagctttgacgtggtcaagcgctgggtgaatgaggctcaggaggcagcatccagtgataacatcatggtccagtaccacgcactagggctcctgtaccatgtgcgtaagaatgaccgcctagccgtcaataagatgatcagcaaggtcacacggcatggccttaagtccccctcttcaagtcctcgcctgagcccgtggccctcaccgagtcagagacggagtatgtcatccgctgcaccaaacacaccttcaccaaccacatggtttttcagtttgactgcacaaacacactcaatgaccagaccttggagaatgtcacagtgcagatggagcccactgaggcctatgaggtgctctgttacgtgcctgcccggagcctgccctacaaccagcccgggacctgctacacactggtggcactgcccaaagaagaccccacagctgtggcctgcacattcagctgcatgatgaagttcactgtcaaggactgtgatcccaccactggggagactgatgacgaaggctatgaggatgagtatgtgctggaagatctggaagttactgtagctgatcacattcaaaaggtcatgaaactgaacttcgaagcagcctgggatgaggtaggggatgaatttgagaaggaggaaacgttcaccttgtctaccatcaagacacttgaagaggctgtgggtaatattgtgaagttcttgggaatgcacccttgtgagaggtcagacaaagtgccggataacaagaacacccacacgttgctcctggctggtgtgttccggggtggtcatgacatcctggtgcgctcccggctgctgcttttggacacagtgacaatgcaggtgacagccagaagtttggaggagctgccagtagacatcatcttggcatctgtgggataagaggccagcctgcataggacctcatacccttccccaacactacctggaagttgtgccttcctcatgaaactggcagaaaccccttcccaagcttctgtattgaaaaacaattaggaatcattgcagatttttttttattctgctcccacctcccacccgggactacttgctggtgacttttttttttttttttttttaaataggggatgattttagcttgtcctaaatcttgctgtccacccttccaggaaagggacattgtaaatgaataaaacattctcaactcctcttgaatctatcccccaagaaaccatcttatccctgtaataaatcagcatgtatttattgaa

SEQ ID NO: 594997 - DNA, 2123 bp, Homo sapiens
gagcggggggcccggaagtggtccctgtagaaccactgtggcaccgctactccgtgccgcgcccgtcgagcattgcgttgctgcattgcgccccaccgactccactatgttgaagaaattcgacaagaaggatgaggagtcaggtggaggctccaacccattccagcaccttgagaagagtgcggtactccaggaggcccgtgtatttaatgaaactcccatcaaccctcggaaatgtgcccacatcctcaccaagattctttatctcataaaccagggggagcacctggggaccacggaagcgaccgaggccttctttgccatgaccaagctctttcagtccaatgatcccacactccgtcggatgtgctacttgaccatcaaggagatgtcttgcattgcagaggatgtcatcattgtcaccagcagcctaacaaaagacatgactgggaaagaagacaactaccggggcccggccgtgcgagccctctgccagatcactgatagcaccatgctgcaggctattgagcgctacatgaaacaagccattgtggacaaggtgcccagtgtctccagctctgccctcgtgtcttccttgcacctgctgaagtgcagctttgacgtggtcaagcgctgggtgaatgaggctcaggaggcagcatccagtgataacatcatggtccagtaccacgcactagggctcctgtaccatgtgcgtaagaatgaccgcctagccgtcaataagatgatcagcaaggtcacacggcatggccttaagtctccctttgcctactgcatgatgatccgggtggccagcaagcagctggaagaggaggatggcagccgtgacagcccactgtttgacttcatcgagagctgcttgcgcaacaagcacgagatggtggtgtatgaagccgcctcggccatcgtcaatctgccaggctgcagtgccaaagagctggccccggctgtgtcagtgctccagcttttctgcagctcacccaaggctgctctccgctatgctgctgttcgtaccctcaataaggttgccatgaagcatccgtcagctgtgacagcttgtaatctggatctggagaacctggtcacagattcaaaccgcagcattgccacgctggccatcaccaccctccttaagacgggcagcgagagcagcatcgaccgcctcatgaagcagatctcctccttcatgtcagaaatctcggatgaattcaaggtggtggttgtccaggccatcagtgccctgtgtcagaaatatcctcgcaaacacgccgtccttatgaacttcctgttcaccatgctgcgggaagagggtggctttgagtataagcgcgctatcgtggactgcatcatcagcatcattgaagagaactcagagagcaaggagacagggctgtcacatctgtgcgagttcatcgaggactgcgagttcacagtgctggccacccgtattctacatctcctgggccaggaggggcccaagaccaccaatccctcaaagtacatccgcttcatctataaccgagtggtcttggagcatgaggaggtccgggcaggtgctgtgagtgctctggcgaagtttggagcccagaatgaagagatgttacccagtatcttggtgttgctgaagaggtgtgtgatggatgatgacaatgaagtaagggaccgagccaccttctacctaaatgtcctggagcagaagcagaaggcccttaatgcaggctatatcctaaatggtctgactgtgtccatccctggtctggagagggctctgcagcagtacactctagaaccatcagaaaaaccttttgacctcaagtctgtgcccctggccacggcgcccatggcagagcagagaacagaaagtacccccatcacagcagtcaaacagcctgagaaagtggcagctaccaggcaggagatcttccaggagcagttggcagcagtgccagagttccgcggtcttgggccctctgcagtcctcggctgaagcccgggcctcgccgagtcagaaacaggaagatggcaacgctgcaacaaacacacttcacaacacatgggatcaggagactgcacaacacaactcaatgacagacttgggaagc

SEQ ID NO: 594998 - DNA, 772 bp, Homo sapiens
  misc_feature (1)..(1): n is a, c, g, or t
  misc_feature (78)..(78): n is a, c, g, or t
  misc_feature (90)..(90): n is a, c, g, or t
  misc_feature (155)..(156): n is a, c, g, or t
  misc_feature (159)..(159): n is a, c, g, or t
  misc_feature (170)..(170): n is a, c, g, or t
  misc_feature (173)..(173): n is a, c, g, or t
  misc_feature (180)..(180): n is a, c, g, or t
  misc_feature (191)..(191): n is a, c, g, or t
  misc_feature (224)..(224): n is a, c, g, or t
  misc_feature (253)..(253): n is a, c, g, or t
  misc_feature (273)..(273): n is a, c, g, or t
  misc_feature (330)..(330): n is a, c, g, or t
  misc_feature (334)..(334): n is a, c, g, or t
  misc_feature (382)..(382): n is a, c, g, or t
  misc_feature (395)..(395): n is a, c, g, or t
  misc_feature (400)..(400): n is a, c, g, or t
  misc_feature (467)..(467): n is a, c, g, or t
  misc_feature (525)..(525): n is a, c, g, or t
  misc_feature (557)..(557): n is a, c, g, or t
  misc_feature (587)..(587): n is a, c, g, or t
  misc_feature (743)..(743): n is a, c, g, or t
ntccaaccctctgagtattgtgtttcttttgctcctggagtcctcttgcagctttatattcttgtatatatctcaggnggcagccccagncattatatccccaaagggcgtaggtattagtaaaccttttgctggtcattctttgtccgaatgcnnatngaacacaattnttnagccctntttttcatttnatgatggtcattagtatttaaaaattaagcctnatttgcttattgaaaataaaaacaaaaanacacacaaaaaaaccttgcngataataaatatcgcttattcacttattttaaacgaagtccaattttattcactctnaatntccttgcagtccattgtataccttctcgcactgacccttgtttcagtngctgtttgttacnttctnttgcttcctctgttaactgttcttttggaaaatccacatcaaaagtgattatcaaagagcccttganattgttgttgtaaaagttggggagcccttcccctttcttccatagcttcgctcctggnctggtgatcttatcccgggaaatatgtacctngtgaccatccaagttagtcatatccatctnaaagccaaccagtgactcaactaatgagattgtcacatttgtgtacaaatcatctcctctcctttcaaatattgggtgcttgaaaactttgattcggaaccgtaaatctccaggctccccatccacgtgagggtcaccttctccaataaaggggtnctccatgccgtctctcaccccaggctcta

SEQ ID NO: 594999 - DNA, 2389 bp, Homo sapiens
gagcggggggcccggaagtggtccctgtagaaccactgtggcaccgctactccgtgccgcgcccgtcgagcattgcgttgctgcattgcgccccaccgactccactatgttgaagaaattcgacaagaaggatgaggagtcaggtggaggctccaacccattccagcaccttgagaagagtgcggtactccaggaggcccgtgtatttaatgaaactcccatcaaccctcggaaatgtgcccacatcctcaccaagattctttatctcataaaccagggggagcacctggggaccacggaagcgaccgaggccttctttgccatgaccaagctctttcagtccaatgatcccacactccgtcggatgtgctacttgaccatcaaggagatgtcttgcattgcagaggatgtcatcattgtcaccagcagcctaacaaaagacatgactgggaaagaagacaactaccggggcccggccgtgcgagccctctgccagatcactgatagcaccatgctgcaggctattgagcgctacatgaaacaagccattgtggacaaggtgcccagtgtctccagctctgccctcgtgtcttccttgcacctgctgaagtgcagctttgacgtggtcaagcgctgggtgaatgaggctcaggaggcagcatccagtgataacatcatggtccagtaccacgcactagggctcctgtaccatgtgcgtaagaatgaccgcctagccgtcaataagatgatcagcaaggtcacacggcatggccttaagtctccctttgcctactgcatgatgatccgggtggccagcaagcagctggaagaggaggatggcagccgtgacagcccactgtttgacttcatcgagagctgcttgcgcaacaagcacgagatggtggtgtatgaagccgcctcggccatcgtcaatctgccaggctgcagtgccaaagagctggccccggctgtgtcagtgctccagcttttctgcagctcacccaaggctgctctccgctatgctgctgttcgtaccctcaataaggttgccatgaagcatccgtcagctgtgacagcttgtaatctggatctggagaacctggtcacagattcaaaccgcagcattgccacgctggccatcaccaccctccttaagacgggcagcgagagcagcatcgaccgcctcatgaagcagatctcctccttcatgtcagaaatctcggatgaattcaaggtggtggttgtccaggccatcagtgccctgtgtcagaaatatcctcgcaaacacgccgtccttatgaacttcctgttcaccatgctgcgggaagagggtggctttgagtataagcgcgctatcgtggactgcatcatcagcatcattgaagagaactcagagagcaaggagacagggctgtcacatctgtgcgagttcatcgaggactgcgagttcacagtgctggccacccgtattctacatctcctgggccaggaggggcccaagaccaccaatccctcaaagtacatccgcttcatctataaccgagtggtcttggagcatgaggagcctgccctacaaccagcccgggacctgctacacactggtggcactgcccaaagaagaccccacagctgtggcctgcacattcagctgcatgatgaagttcactgtcaaggactgtgatcccaccactggggagactgatgacgaaggctatgaggatgagtatgtgctggaagatctggaagttactgtagctgatcacattcaaaaggtcatgaaactgaacttcgaagcagcctgggatgaggtaggggatgaatttgagaaggaggaaacgttcaccttgtctaccatcaagacacttgaagaggctgtgggtaatattgtgaagttcttgggaatgcacccttgtgagaggtcagacaaagtgccggataacaagaacacccacacgttgctcctggctggtgtgttccggggtggtcatgacatcctggtgcgctcccggctgctgcttttggacacagtgacaatgcaggtgacagccagaagtttggaggagctgccagtagacatcatcttggcatctgtgggataagaggccagcctgcataggacctcatacccttccccaacactacctggaagttgtgccttcctcatgaaactggcagaaaccccttcccaagcttctgcgggactacttgctggtgacttttttttttttttttttttaaataggggatgattttagcttgtcctaaatcttgctgtccacccttccaggaaagggacattgtaaatgaataaaacattctcaactcctcttgaatctatcccccaagaaaccatcttatccctgtaataaatcagcatgtatttattgaa

SEQ ID NO: 595000 - DNA, 185 bp, Homo sapiens
tttttttggggggtttttggggtttttgcccccccccccccccccccccccctggggggtgggggcgggggcttcccccccgccaaaaaattttttttgggccgggggccccccttccccggcccttttttttcctgggggggggggggttttttttttattttaaccaaggggttttcctttta

SEQ ID NO: 595001 - DNA, 524 bp, Homo sapiens
gtctaacaggcgctactgaagtgtagtgaatagtttatcaatcaggtttttgcagtaagcttgtcttcccgtctggttccccgagagcttactgagccctgggcccgaagcacgggccgggcatagatttcctcttccacaagctgccgcttggctgggcaccttgaagcatcagggcgtgaactcaaactagatgtgggcagggagagtgttgcttacctgccctgctggggcagggttccctgaaactgggttaattctttatagaaatgtgaacactgaattgatttgaaaaaatactaatacagattacaaatacttaatcataataataactacagaaaacaagtttacatgtatataggtcttgaagtgagtgaagtggctgctttatatgggtgggcttaattaggctttgggtagaagagattgagatgggtactctaatcaaaaataaggtttggtagtgggaccagaaattacttacctgacatccaccccaataccccctcatccgggggggg

SEQ ID NO: 595002 - DNA, 1770 bp, Homo sapiens
gagcggggggcccggaagtggtccctgtagaaccactgtggcaccgctactccgtgccgcgcccgtcgagcattgcgttgctgcattgcgccccaccgactccactatgttgaagaaattcgacaagaaggatgaggagtcaggtggaggctccaacccattccagcaccttgagaagagtgcggtactccaggaggcccgtgtatttaatgaaactcccatcaaccctcggaaatgtgcccacatcctcaccaagattctttatctcataaaccagggggagcacctggggaccacggaagcgaccgaggccttctttgccatgaccaagctctttcagtccaatgatcccacactccgtcggatgtgctacttgaccatcaaggagatgtcttgcattgcagaggatgtcatcattgtcaccagcagcctaacaaaagacatgactgggaaagaagacaactaccggggcccggccgtgcgagccctctgccagatcactgatagcaccatgctgcaggctattgagcgctacatgaaacaagccattgtggacaaggtgcccagtgtctccagctctgccctcgtgtcttccttgcacctgctgaagtgcagctttgacgtggtcaagcgctgggtgaatgaggctcaggaggcagcatccagtgataacatcatggtccagtaccacgcactagggctcctgtaccatgtgcgtaagaatgaccgcctagccgtcaataagatgatcagcaaggtcacacggcatggccttaagtctccctttgcctactgcatgatgatccgggtggccagcaagcagctggaagaggaggatggcagccgtgacagcccactgtttgacttcatcgagagctgcttgcgcaacaagcacgagatggtggtgtatgaagccgcctcggccatcgtcaatctgccaggctgcagtgccaaagagctggccccggctgtgtcagtgctccagcttttctgcagctcacccaaggctgctctccgctatgctgctgttcgtaccctcaataaggttgccatgaagcatccgtcagctgtgacagcttgtaatctggatctggagaacctggtcacagattcaaaccgcagcattgccacgctggccatcaccaccctccttaagacgggcagcgagagcagcatcgaccgcctcatgaagcagatctcctccttcatgtcagaaatctcggatgaattcaaggtggtggttgtccaggccatcagtgccctgtgtcagaaatatcctcgcaaacacgccgtccttatgaacttcctgttcaccatgctgcgggaagagggtggctttgagtataagcgcgctatcgtggactgcatcatcagcatcattgaagagaactcagagagcaaggagacagggctgtcacatctgtgcgagttcatcgaggactgcgagttcacagtgctggccacccgtattctacatctcctgggccaggaggggcccaagaccaccaatccctcaaagtacatccgcttcatctataaccgagtggtcttggagcatgaggaggtccgggcaggtgctgtgagtgctctggcgaagtttggagcccagaatgaagagatgttacccagtatcttggtgttgctgaagaggtgagtctagccaggggccctaatggggacagtgttcccttggacccaagcagctttcctttgtctttatttttttttaactgaaaagggagagaaaagttatacagctactgattgtag

SEQ ID NO: 595003 - DNA, 464 bp, Homo sapiens
  misc_feature (322)..(322): n is a, c, g, or t
  misc_feature (335)..(335): n is a, c, g, or t
  misc_feature (418)..(418): n is a, c, g, or t
  misc_feature (442)..(442): n is a, c, g, or t
atgattggttattgtgtctggtaagtctttgaacattcaacagccagacatttgtgttttatttcatgatgttccagtcaagttccaaagccctaacacagttaagctggctcagactccaggttctagtaaaaagttggaattaatgttataaggaagtattaaaacactgaaacatttctccagaaccagcaagtaagggatatgtatgtatttatgctcagttttagttggcctaaagcagagttgaatgggctttctaaatagctaggcctgcaggtacctgccactactcccatcttcagaggtatataagggagantgtgtagcagttngaggcttttgctgtttttaaaaaagccttatgaatcagcagcacatcgggaaaaataggctcacatagtacctgggttttccncaagtaagccaagggcatgatttnctgtggtacattttatttaaca

SEQ ID NO: 595004 - DNA, 455 bp, Homo sapiens
gatcatcacgtcacaacattatgacagcacgatgtgcatcacacacatcatgatatcaaacaaaatccgtagccttctcaatacttcaagccaactaggctagataatagtgacaatcggcatcaacctaaccccacctagcatttcttcacatctgcatgcacgctttcttcacagcaatactattcatatgctccggatccattatccacagcctcaatgacgaacaagacatccgaaacataggcggactgtataaagcaataccattcaatgacactgcatggaatccactgccatcaagtcggtgacgcattttaccatgctgcatggaatccactgcattcattcgggatccatatagccatgctgcatgtaatgcactgcgtttactcgggatgcattttaccatgctgcatggaatccactgcattcaatgacactgcatggaatcc

SEQ ID NO: 595005 - DNA, 232 bp, Homo sapiens
cggcggtctatagcttcagatgctcggacacgcgcccatccagattcgatatgttgggcgtgcatatggtccatcagtgtcctcgcgaatttgcaggttcctcagcaccgtgcccagctggcccacagtttcaggctgcgggagctcacagaagcgcctccgggcattgtatcctgggaggccgtggtccctgctgcgctccttgtacagatgcaggcaggtccagcccatt

SEQ ID NO: 595006 - DNA, 140 bp, Homo sapiens
cggacagtctcgaatggtactggttgaacattgtttgttggtgtatatgttgtaattgagattgctcagcgctatctcgaaatggttacatgaaaagatgctcagccgggcatgatggctcaacatacgtaatcccagca

SEQ ID NO: 595007 - DNA, 610 bp, Homo sapiens
ggacgcgtgggtcgatccatgcgtccgatctagtgttagtataagtaccatgaattgatttctcctccgtcataatcctgcgtcagattatgatattgaactgatccgattaacagtccaatatctactatcaaccaacaagtcattattaccctcacatgtcgaacgccagacacatgagtcggagtgctcataaggaaaggttaaacaaagtaccaggatactcggaaaatctgtggaccccgtccctgcttgtaccaaaaatatcacctctagcatcaccagtattacgaggacagccggctgcccaggtgatccacatgttaaacggaacgcggtaccctatactcgtgacagaggtagactataactcacttgtaccttatacatagggacctgtatgaatggctccacgagggttcagctgtgcctcttactttgaaccgagtgaaattgacctggccgatgcaagaggcgggactctgacagcggaggaagacgagaagaccctatggagcctttagattgacttaatgcacaaacagttatgctagctaaagcacatgaggtacctatactaacaaacctggctttgaaacatcctcggttg

SEQ ID NO: 595008 - DNA, 312 bp, Homo sapiens
tccgtggcagccctgcccgtttgtaagtttcaggtggtgattccgaaatcctaagcctgccttgcacctggttaaccgcactgctgcccctggcctcaccggcctcaggaaacggtggggcccctgcatttcggggtggttttgggaatcccaggccctaggggtcccatttgctcaggaagtgggtatcaaatttaggtgggggtgtcaaaggaggcaaaagggtcccaacttcggtcaggactttggtgggatttccccctcggcagggtccctgcccagtaactgctcaataaaggctgtgtgtgtgga

SEQ ID NO: 595009 - DNA, 128 bp, Homo sapiens
gcctggtcccaggaactggcaatctaacaggatggcaagtggttttgaaacatatatcctccagcattcagtccagggggagccacggaaaccatgttcttgcttaagccattaaagtcagagatgaa

SEQ ID NO: 595010 - DNA, 183 bp, Homo sapiens
gaatagtttaaaatctagcttacataaaaatagtatttcacaggctgggtgcggggctcacccctgtaatcccagcactttgggaggccgaggcgggcggatcaggaggtcaggagattgagatcatcctggctaacatggtgaaaccccatcgctactaaaaatacaaaaaaaaattagcca

SEQ ID NO: 595011 - DNA, 400 bp, Homo sapiens
cgtcgacttcgaaatggctgcaaatgcctcacaatcgtagtgcaaggcaaggaggagcaagtcacatcttacatggatggcagcaggcaaagtaagagcttgtgcagagtttttttaaaactacaaaatctcgtgagacccattcattatcatgagaagagcatgggaaagacctacccccatgattcaatcatgtcctttcgggtccctgacacaacacttggaaattatgagaactacgagatgagatttgggtggggacatagagccaaactatatctttccatgcctggccactcccaaatctcatatcttcacatttcaaaaccatcctgccttccccatagcaccccaaactctcgtcgacgcggccgcgaatttagtagtagtaggcggccgc

SEQ ID NO: 595012 - DNA, 310 bp, Homo sapiens
cactcgagctcggtaccatctcgaaagtgtgcactggcggcatctgtgggcggactcttcagtctacgatgtcttctgggtatgtggaccaatgtgatggtgacagtgggcaagtccttcgaggcaccaactaaaagtggtgtttccccaggatctgctggagaaagtgctcgatagaaacaactttgccatgctgggactcggagatgtcgtcattccagggatcttcattgccttggtgctgcgctttgacatcagttaggaagtagttaaaaaacgcgacttcctttttcacttcctcaattttctc

SEQ ID NO: 595013 - DNA, 134 bp, Homo sapiens
acctccaaataccgttaaactgaacctcggtgccatgcttcttcgccttggcctccccccagcccctcctccccttcctgcacccgtacccccgtggtctttgaataaaatctgagtgggcggcaaaaaaaaaa

SEQ ID NO: 595014 - DNA, 109 bp, Homo sapiens
ggagacgacgtgtcagacataggcacctcggaaaggggagggaaaggagggaggacaaggtaatcagcctcggacctaaggtggctgagggagagactgaatttggtgt

SEQ ID NO: 595015 - DNA, 869 bp, Homo sapiens
agcgacgtgaattagtattgtgaagaagggaagctggggcaggtaacacgcagagccagccacgtggaacggtctgtccgccggtctgatacccgcttgccgggcttctagtgtgacaagtcttggacttaacggagacttcctgtgggttgccattgatcgacacgatctcgttagactcttgattttatcaggatgagggtgagtttgccaaacggtgataaagaaaatgcagccaaccaggctcccgtctcacttaacgagagttctacacttaagtaagcactaaacttcttcctgacgaaactgacatccatcagttggtcttttggagttctgcaaggtgagtttccaggtgcacagcgccagcaaaccagggcgcctgcaggcatcagcgcacagcgcagctgccccatcgacgattccactgacaagggactggagacgaacaaacttcattgtccacgcgggtgagacgcaggagttggggccaccaagtggagtttccagacagacagttatatggggatcacaaggcaaattgtccaggcattggggaagattggacccagatggttcaatacaccagtgggagttgccaatacccaccacagatgccggtgaagcacaatgaaggggacgcaaatttggaggcctgctccgcataatagcgaaggtcgaatgggacccccatggagggaatggactcagccaaacataaacaggaggcattgggacccaaagttagtacccccaattgggatacaccgcggccaacccatttcaggcaggaccaccgcgagcacaaagtggtgacccattggggagcccatcaacaagcggtgagctgaaccgtatgcgaccacaaa

SEQ ID NO: 595016 - DNA, 167 bp, Homo sapiens
  misc_feature (15)..(15): n is a, c, g, or t
  misc_feature (43)..(43): n is a, c, g, or t
acatgtgtccgaaancagagctctcacggtgaatgtgcagggnagctactgggacttttctgataccgtaggtctggtttgcagggaggacctgagaatccactagcaagggagtttctttttaaaacattttgttaatttttttgagggagtcttgctctgttgtc

SEQ ID NO: 595017 - DNA, 702 bp, Homo sapiens
tcaatggcttgactatggaagctatttcttatccatctaatagtttattgcaggtgtttctggtaggtggggattggggttgtggccaagggactaggcatatggataattcctaccttgcctttttcttcaccttcacaatgcccatccttgtctcttttccatccctttcgttgtctgtcccttttgttggactctctgcctccatgcctttcattttgccatgatgaacaattgcctcccttgtcttctgctgtagggccatgccgctcacgtctttgctcagatacaaaattccttgcacacagcactgaacccgtctgaggagcccaacaccgtcttattgtctgcctgtctgctcctgtcaccctatccacacccactttactcaagccctggtctcttcttgccccgccaccttatgcctgtactttcgacccttaacatccccttctccaatgcgcgcacctcctcacttggccttttacacttccgcctgattctcttgggcacacaatatcctcttttactaccttcttttattccaattcattgtcatcaacattttgtgcctttttgttcatcgttaacgtgcgttttccccgcacatccacctgctttccgccgctttcctccagaccactatcaattgttagctcatatcttttcctcgttctttttcattttcttcactcatcaaat

SEQ ID NO: 595018 - DNA, 542 bp, Homo sapiens
  misc_feature (413)..(413): n is a, c, g, or t
  misc_feature (463)..(463): n is a, c, g, or t
tcacgcttatacttcctaattgtcactttttacctatgcaatctgttccttctaaccttccagcttctggtagccactattttactctcgacttctatgaggtcaatgtttttagattccacatatgagtgagatcatgtggtatttatctttctgtgcctggcttatttcatgtgatataatgtcatccaggttcatctatgttgctgcaaatgagaggatttcattattttatgattggatagcattatgatcccagtagtgggactgctggatcataggtagttttagttttaattgttgaggaagcattatactgttttccataatggctgtactaatttatattacattcccactgacacagtgtatgagttatctgtttttcatcatcaccacatttgatatctttngtcatttcgatagtagccattctaagcagggtgtggtaatatctcatttnggttttgatttgcatttccctgacgattatgggtgttgagcattttttcatatgcctaatgggcattggtatttttttc

SEQ ID NO: 595019 - DNA, 613 bp, Homo sapiens
  misc_feature (21)..(21): n is a, c, g, or t
  misc_feature (33)..(33): n is a, c, g, or t
  misc_feature (35)..(35): n is a, c, g, or t
  misc_feature (537)..(537): n is a, c, g, or t
  misc_feature (545)..(545): n is a, c, g, or t
  misc_feature (549)..(549): n is a, c, g, or t
  misc_feature (552)..(553): n is a, c, g, or t
tgagtcggtacctcagagctncctgatggtaanancattcccttggttcacaatctactaccttccacagcagcccaggcgacactgaaaccacactcttacctgacgacaccataacctcaggcctcgtggaggcatctacacccacccacagcagcactggctcgctacacacaacactgacccctgccagctccacaagcgctggccttcaggaagaatctaccactttccagagctggccaagctcaagtgacacaacaccttcacctcccggcaccacagcagcccctgttgaagtatccacaacctaccacagccgcccgagctcaactccaacaacacacttttctgccagttccacaaccttgggccgtagtgaggaatcaacaacagtccacagcagcccaggtgcaactggaacagcactcttccctacccgctctgcaacctcagttcttgttggagaacctacaacgtcacccatcagttcaggctcaacggaaacaacagcgttacctggcagtaccacaacancaggcctnagtnagnnatctaccaccttctacagcagcccccccgctgctgaaatgcgggatccttagagtcaccc

SEQ ID NO: 595020 - DNA, 89 bp, Homo sapiens
gtggaggaggagagcagcgtggttagctaaggttattgctttttgtggcaaatctaattaaatgacaggaatctcttcaaaaaaaaaaa

SEQ ID NO: 595021 - DNA, 773 bp, Homo sapiens
  misc_feature (199)..(199): n is a, c, g, or t
  misc_feature (555)..(555): n is a, c, g, or t
ggggcctttttttccaaatacgcgcggggggagggattatccactctaatttccacctcaccccccacatacacctcccggatcgaacatgccataggcgtatccgaacataacggaccagcgcctcaccccttaacccttgatgcatacgggaccaaacgtccttcacttttacgagaagttcagcgggtatcaaatnaggcaacaggatatttcctaaaaatctatgaaaaagtaccaccctattcgtaacaaaactcatgggaggtttataggttaagggctcaaaccttcctagcctggcgaatgactgggcgccttgatccacttcactccgccgtgtaattccccacaaaccctgaaagtgcctttatcaaaacaaccactggaccaataacggagaacattcttggaacatacggaaaaacactctacagggcactttattatttcacaacccctgaggccggccgtaaaccatttctccattctaagggaggggtttaaccctaaatctcgttcctggaaaaattacgtattcactaacaaaaccgntctcccttcgcctttgtacccctaactgcttaatgaaagaaacaactggaagatgccccccaactccccgactagggaaaccttacccttttccaggttaagggattcgaactgaagcgcgcttaccaaaaatgttatccaagaaaaaaggggggaccccactaaattcccacccggggggccacccattttccacttgcgttcaagacccccactcc

SEQ ID NO: 595022 - DNA, 424 bp, Homo sapiens
cctagttttagaagtttcaatagcagcccaggctcaacggatacaacactgttacctgccagcaccaccacctcaggccccagtcaggaatcaacaacttcccacagcagcccaggttcaactgacacagcactgtcccctggcagtaccacagccttatcctttggtcaagaatctacaaccttccacagcagcccaggctccactcacacaacactcttccctgacagcaccacaagctcaggcatcgttgaagcatctacacgcgtccacagcagcactggctcaccacgcacaacactgtcccctgccagctccacaagccctggacttcagggagaatctaccgccttccagacccacccagcctcaactcacacgacgccttcacccgcaatgtgctattgaaacttctaaaactagg

SEQ ID NO: 595023 - DNA, 147 bp, Homo sapiens
caggtagactaacccagtagacctccaggtagacctaacccaggtagacctaacccaggtagacctaacccaggtagagaacgcctgctgtaatctacactgttgctgggacaatcatctgtcactcatccaacacagttatataca

SEQ ID NO: 595024 - DNA, 390 bp, Homo sapiens
  misc_feature (239)..(239): n is a, c, g, or t
tgttgagccttggctgctgtgggaagacacaacattgacccctgccagctccacaagcgctggccttcaggaagaatctaccactttccagagctggccaagctcaagtgacacaacaccttcacctcccggcaccacagcagcccctgttgaagtatccacaacctaccacagccgcccgagctcaactccaacaacacacttttctgccagttccacaaccttgggccgtagtgagnaatcaacaacagtccacagcagcccaggtgcaactggaacagcactcttccctacccgctctgcaacctcagttcttgttggagaacctacaacgtcaccagggtagactgttcaacctgttcctgctccgcctccactatagcagatggt

SEQ ID NO: 595025 - DNA, 286 bp, Homo sapiens
  misc_feature (184)..(184): n is a, c, g, or t
  misc_feature (187)..(187): n is a, c, g, or t
  misc_feature (190)..(190): n is a, c, g, or t
  misc_feature (196)..(196): n is a, c, g, or t
  misc_feature (204)..(207): n is a, c, g, or t
  misc_feature (213)..(214): n is a, c, g, or t
gctggtccagatagaggagacactgctaggtgtaaggagaagatggttaggtctacggaggctccaggatgggagtagttcccttccctggcccacacaaagccagtattgtgccttcccagcaccaccagcctcatcccttggtcaacaatctacaaccttccacagcagcccaggcgacacnganacnacactnttacctgnnnncaccannacctcaggccccctcctaatactaactacctgactcctacccctcacagtcatggcaagccacgccacttat

SEQ ID NO: 595026 - DNA, 1244 bp, Homo sapiens
  misc_feature (187)..(187): n is a, c, g, or t
  misc_feature (1008)..(1008): n is a, c, g, or t
ggagcgcgcccgtcagacagctgctccacagtcatgttcttgaggctctccagagatcttgatggactctttcaactcccggaagctcttgaggtggcccgtgtggacgtcagcagcaaggtggaggtggtgtgggctgacaactcaaagaccatcatcctgccccagcacttgtacaacatagagnctgatgattgaggagatcagactacgacttcgcgctagaaggcagcaccacgcggggcatcctcggatgtaatgggaacgatgatagtgacagagtgggagacggatcaatggagctggtggacggacgagcaccccaacgtatagaggagccccccatcccacccctggagcaggcggtggagccctgaggacaacgggagtggtgatcaggggaacgaggcatgacagcaagcatgacgtccagaggaggctggcggctcaatggacatagaccccatggagacgaggctgatggaaacaggctggcaaaggacgggccagcccaatgagcttgcccgcgtaggtgaacagaggccatcaccagatccctcggcaccagcctctaagtaacattgactagtggagccagctgctgacggagctcgcgctacctctccgactgttggaagcctgagcaagccaaattcgggagaagactgtctcttggcatgcacatcacgaagctcactggataaacctcaagaagactggacaaatggtcgggccattggcaccagtactggaagacgatcggccgcggtgccggacgacccatctgtcgggagtgacagcgacggagatgggagcacccgtatcgcagtgttgccgggcaaaccctgacctgttcttcatggaggacccaccttcggtatttccttcaagagctagcacctgacacagattgactgggaataacagtttagagtagtccaaatatgccagtatgcaagtagatagaatggctcgcaggaacctacttggaacgacacggtagggtcntcattcttcttcttactagagttcgttagtcaacatcaaacagaagcaaacaagaacgcgagccgcagccaaatgatcaaagagaaatgcagacaaaaagaccacgtagagcgcaagagagagagaagatacaatacaaaggagaaacacagaaaacagggccagtagaaaggaagaaatgagaaatcacaacaaacaacaacgacaatacaacaacaaaagatcaacaaaagact

SEQ ID NO: 595027 - DNA, 3862 bp, Homo sapiens; identical to SEQ ID NO: 532394
  misc_feature (21)..(21): n is a, c, g, or t
  misc_feature (33)..(33): n is a, c, g, or t
  misc_feature (35)..(35): n is a, c, g, or t
  misc_feature (305)..(305): n is a, c, g, or t
  misc_feature (3786)..(3786): n is a, c, g, or t
  misc_feature (3794)..(3794): n is a, c, g, or t
  misc_feature (3798)..(3798): n is a, c, g, or t
  misc_feature (3801)..(3802): n is a, c, g, or t

SEQ ID NO: 595028 - DNA, 126 bp, Homo sapiens
ccgaatcgcacgacttacatcctacattactattctgcctagctaactcaaatctacgaacgcactcacagtcgcctcataatcctctctcatggacttcaaactctactcccactatgaagcttt

SEQ ID NO: 595029 - DNA, 869 bp, Homo sapiens
cttcttctgcactcctggatcctgatgactgcccaaagaaaccccacagctgtggcctgcacattcagctgcatgatgaagttcactgtcaaggactgtgatcccaccactggggagactgatgacgaaggctatgaggatgagtatgtgctggaagatctggaagttactgtagctgatcacattcaaaaggtcatgaaactgaacttcgaagcagcctgggatgaggtaggggatgaatttgagaaggaggaaacgttcaccttgtctaccatcaagacacttgaagaggctgtgggtaatattgtgaagttcttgggaatgcacccttgtgagaggtcagacaaagtgccggataacaagaacacccacacgttgctcctggctggtgtgttccggggtggtcatgacatcctggtgcgctcccggctgctgcttttggacacagtgacaatgcaggtgacagccagaagtttggaggagctgccagtagacatcatcttggcatctgtgggataagaggccagcctgcataggacctcatacccttccccaacactacctggaagttgtgccttcctcatgaaactggcagaaaccccttcccaagcttctgtattgaaaaacaattaggaatcattgcagatttttttttattctgctcccacctcccacccgggactacttgctggtgacttttttttttttttttttttaaataggggatgattttagcttgtcctaaatcttgctgtccacccttccaggaaagggacattgtaaatgaataaaacattctcaactcctcttgaatctatcccccaagaaaccatcttatccctgtaataaatcagcatgtatttattgaa

SEQ ID NO: 595030 - DNA, 3711 bp, Homo sapiens
  misc_feature (36)..(36): n is a, c, g, or t
  misc_feature (135)..(135): n is a, c, g, or t
  misc_feature (3635)..(3635): n is a, c, g, or t
  misc_feature (3643)..(3643): n is a, c, g, or t
  misc_feature (3647)..(3647): n is a, c, g, or t
  misc_feature (3650)..(3651): n is a, c, g, or t
cggtgcatgatgtgatctggatctgagctggtctcnggtctggcgtcgttactaagtgacacaggctcaacagtaaacaccagtatggaggtaatacaacttctgcatccacacccagttcaagcgaccttttancacctttagtgactatggggtgtcagtcacatttatcacgggctcaactgcaacaaaacacttccttgacagctccacaaactcaggccacagtgaggaatcaacagtatcccacagcagcccaggtgcaactggaacagcactcttccctacccgctctgcaacctcagttcttgttggagaacctacaacgtcacccatcagttcaggctcaacggaaacaacagcgttacctggcagtaccacaacagcaggcctgagtgagaaatctaccaccttctacagtagccccagatcaccggacacaacactctcacctgccagcacgacaagctcaggcgtcagtgaagaatccaccacctcccacagccgaccaggctcaacgcacacaacagcattccctggcagtaccaccatgccaggcgtcagtcaggaatctacagcttcccacagcagcccaggctccacagacacaacactgtcccctggcagtaccacagcatcatcccttggtccagaatctactaccttccacagcggcccaggctccactgaaacaacactcttacctgacaacaccacagcctcaggcctccttgaagcatctacgcccgtccacagcagcactggatcgccacacacaacactgtcccctgccggctctacaacccgtcagggagaatctaccaccttccagagctggccaaactcgaaggacactacccctgcacctcctactaccacatcagcctttgttgagctatctacaacctcccacggcagcccgagctcaactccaacaacccacttttctgccagctccacaaccttgggccgtagtgaggaatcgacaacagtccacagcagcccagttgcaactgcaacaacaccctcgcctgcccgctccacaacctcaggcctcgttgaagaatctacgacctaccacagcagcccgggctcaactcaaacaatgcacttccctgaaagcgacacaacttcaggccgtggtgaagaatcaacaacttcccacagcagcacaacacacacaatatcttcagctcctagcaccacatctgcccttgttgaagaacctaccagctaccacagcagcccgggctcaactgcaacaacacacttccctgacagctccacaacctcaggccgtagtgaggaatcaacagcatcccacagcagccaagacgcaacgggaacaatagtcctacctgcccgctccacaacctcagttcttcttggagaatctacgacctcacccatcagttcaggctcaatggaaacgacagcgttacccggcagtaccacaacgccaggcctcagtgagaaatctaccactttccacagtagccccagatcaccagccacaacactctcacctgccagcacgacaagctcaggcgtcagtgaagaatccaccacctcccacagccgaccaggctcaacgcacacaacagcattccctgacagcaccaccacgccaggcctcagtcggcattctacaacttcccacagcagcccaggctcaacggatacaacactgttacctgccagcaccaccacctcaggccccagtcaggaatcaacaacttcccacagcagcccaggttcaactgacacagcactgtcccctggcagtaccacagccttatcctttggtcaagaatctacaaccttccacagcagcccaggctccactcacacaacactcttccctgacagcaccacaagctcaggcatcgttgaagcatctacacgcgtccacagcagcactggctcaccacgcacaacactgtcccctgccagctccacaagccctggacttcagggagaatctaccgccttccagacccacccagcctcaactcacacgacgccttcacctcctagcaccgcaacagcccctgttgaagaatctacaacctaccaccgcagcccaggctcgactccaacaacacacttccctgccagctccacaacttcgggccacagtgagaaatcaacaatattccacagcagcccagatgcaagtggaacaacaccctcatctgcccactccacaacctcaggtcgtggagaatctacaacctcacgcatcagtccaggctcaactgaaataacaacgttacctggcagtaccacaacaccaggcctcagtgaggcatctaccaccttctacagcagccccagatcaccaaccacaacactctcacctgccagcatgacaagcctaggcgtcggtgaagaatccaccacctcccgtagccaaccaggttctactcactcaacagtgtcacctgccagcaccaccacgccaggcctcagtgaggaatctaccaccgtctacagcagcagcccaggctcaactgaaaccacagtgttccctcgcagcaccacaacctcagttcgtggtgaagagcctacaaccttccacagccggccagcctcaactcacacaacactgttcactgaggacagcaccacctcgggcctcactgaagaatctacagccttccccggcagcccagcctccacccaaacagggttacctgccacactcacaaccgcagacctcggtgaggaatcaactacctttcccagcagctcaggctcaactggaacaacactctcacctgcccgctccaccacctctggcctcgttggagaatccacaccctcacgcctcagtccaagctcaaccgaaacaacaactttacccggcagtcccacaacaccaagcctcagtgagaaatcaaccaccttctacactagccccagatcaccagatgcaacactctcacctgcaaccacaacaagctcaggcgtcagcgaagaatccagcacatcccacagtcaaccaggctcaacgcacacaacagcgttccctgacagcaccaccacctcaggcctcagtcaggaacctacaacttcccacagcagccaaggctcaacagaggcaacactgtcccctggcagtaccacagcctcatcccttggtcaacaatctacaaccttccacagcagcccaggcgacactgaaaccacactcttacctgacgacaccataacctcaggcctcgtggaggcatctacacccacccacagcagcactggctcgctacacacaacactgacccctgccagctccacaagcgctggccttcaggaagaatctaccactttccagagctggccaagctcaagtgacacaacaccttcacctcccggcaccacagcagcccctgttgaagtatccacaacctaccacagccgcccgagctcaactccaacaacacacttttctgccagttccacaaccttgggccgtagtgaggaatcaacaacagtccacagcagcccaggtgcaactggaacagcactcttccctacccgctctgcaacctcagttcttgttggagaacctacaacgtcacccatcagttcaggctcaacggaaacaacagcgttacctggcagtaccacaacancaggcctnagtnagnnatctaccaccttctacagcagcccccccgctgctgaaatgcgggatccttagagtcaccc

SEQ ID NO: 595031 - DNA, 165 bp, Homo sapiens
atcctggggcgtgtcgcacacctctcctcttctgtgacaagcacaccgaaatccatcatcagatccggtgggccttacctttagatacatagctcatcttctcaagattccaggctggtctaagatataatccactctctccggggctagggcaagagcctcgtg

SEQ ID NO: 595032 - DNA, 3576 bp, Homo sapiens
  misc_feature (21)..(21): n is a, c, g, or t
  misc_feature (33)..(33): n is a, c, g, or t
  misc_feature (35)..(35): n is a, c, g, or t
  misc_feature (305)..(305): n is a, c, g, or t
  misc_feature (3543)..(3543): n is a, c, g, or t
tgagtcggtacctcagagctncctgatggtaanancattcccttggttcacaatctactaccttccacagcagcccaggcgacactgaaaccacactcttacctgacgacaccataacctcaggcctcgtggaggcatctacacccacccacagcagcactggctcgctacacacaacactgacccctgccagctccacaagcgctggccttcaggaagaatctaccactttccagagctggccaagctcaagtgacacaacaccttcacctcccggcaccacagcagcccctgttgaagtatcnacaacctaccacagccgcccgagctcaactccaacaacacacttttctgccagttccacaaccttgggccgtagtgaggaatcaacaacagtccacagcagcccaggtgcaactggaacagcactcttccctacccgctctgcaacctcagttcttgttggagaacctacaacgtcacccatcagttcaggctcaacggaaacaacagcgttacctggcagtaccacaacagcaggcctgagtgagaaatctaccaccttctacagtagccccagatcaccggacacaacactctcacctgccagcacgacaagctcaggcgtcagtgaagaatccaccacctcccacagccgaccaggctcaacgcacacaacagcattccctggcagtaccaccatgccaggcgtcagtcaggaatctacagcttcccacagcagcccaggctccacagacacaacactgtcccctggcagtaccacagcatcatcccttggtccagaatctactaccttccacagcggcccaggctccactgaaacaacactcttacctgacaacaccacagcctcaggcctccttgaagcatctacgcccgtccacagcagcactggatcgccacacacaacactgtcccctgccggctctacaacccgtcagggagaatctaccaccttccagagctggccaaactcgaaggacactacccctgcacctcctactaccacatcagcctttgttgagctatctacaacctcccacggcagcccgagctcaactccaacaacccacttttctgccagctccacaaccttgggccgtagtgaggaatcgacaacagtccacagcagcccagttgcaactgcaacaacaccctcgcctgcccgctccacaacctcaggcctcgttgaagaatctacgacctaccacagcagcccgggctcaactcaaacaatgcacttccctgaaagcgacacaacttcaggccgtggtgaagaatcaacaacttcccacagcagcacaacacacacaatatcttcagctcctagcaccacatctgcccttgttgaagaacctaccagctaccacagcagcccgggctcaactgcaacaacacacttccctgacagctccacaacctcaggccgtagtgaggaatcaacagcatcccacagcagccaagacgcaacgggaacaatagtcctacctgcccgctccacaacctcagttcttcttggagaatctacgacctcacccatcagttcaggctcaatggaaacgacagcgttacccggcagtaccacaacgccaggcctcagtgagaaatctaccactttccacagtagccccagatcaccagccacaacactctcacctgccagcacgacaagctcaggcgtcagtgaagaatccaccacctcccacagccgaccaggctcaacgcacacaacagcattccctgacagcaccaccacgccaggcctcagtcggcattctacaacttcccacagcagcccaggctcaacggatacaacactgttacctgccagcaccaccacctcaggccccagtcaggaatcaacaacttcccacagcagcccaggttcaactgacacagcactgtcccctggcagtaccacagccttatcctttggtcaagaatctacaaccttccacagcagcccaggctccactcacacaacactcttccctgacagcaccacaagctcaggcatcgttgaagcatctacacgcgtccacagcagcactggctcaccacgcacaacactgtcccctgccagctccacaagccctggacttcagggagaatctaccgccttccagacccacccagcctcaactcacacgacgccttcacctcctagcaccgcaacagcccctgttgaagaatctacaacctaccaccgcagcccaggctcgactccaacaacacacttccctgccagctccacaacttcgggccacagtgagaaatcaacaatattccacagcagcccagatgcaagtggaacaacaccctcatctgcccactccacaacctcaggtcgtggagaatctacaacctcacgcatcagtccaggctcaactgaaataacaacgttacctggcagtaccacaacaccaggcctcagtgaggcatctaccaccttctacagcagccccagatcaccaaccacaacactctcacctgccagcatgacaagcctaggcgtcggtgaagaatccaccacctcccgtagccaaccaggttctactcactcaacagtgtcacctgccagcaccaccacgccaggcctcagtgaggaatctaccaccgtctacagcagcagcccaggctcaactgaaaccacagtgttccctcgcagcaccacaacctcagttcgtggtgaagagcctacaaccttccacagccggccagcctcaactcacacaacactgttcactgaggacagcaccacctcgggcctcactgaagaatctacagccttccccggcagcccagcctccacccaaacagggttacctgccacactcacaaccgcagacctcggtgaggaatcaactacctttcccagcagctcaggctcaactggaacaacactctcacctgcccgctccaccacctctggcctcgttggagaatccacaccctcacgcctcagtccaagctcaaccgaaacaacaactttacccggcagtcccacaacaccaagcctcagtgagaaatcaaccaccttctacactagccccagatcaccagatgcaacactctcacctgcaaccacaacaagctcaggcgtcagcgaagaatccagcacatcccacagtcaaccaggctcaacgcacacaacagcgttccctgacagcaccaccacctcaggcctcagtcaggaacctacaacttcccacagcagccaaggctcaacagaggcaacactgtcccctggcagtaccacagcctcatcccttggtcaacaatctacaaccttccacagcagcccaggcgacactgaaaccacactcttacctgacgacaccataacctcaggcctcgtggaggcatctacacccacccacagcagcactggctcgctacacacaacactgacccctgccagctccacaagcgctggccttcaggaagaatctaccactttccagagctggccaagctcaagtgacacaacaccttcacctcccggctccggcgctgcgggcntgtgggtggcagaaatagggtaccgacgctcga

SEQ ID NO: 595033 - DNA, 3469 bp, Homo sapiens
  misc_feature (23)..(23): n is a, c, g, or t
  misc_feature (3393)..(3393): n is a, c, g, or t
  misc_feature (3401)..(3401): n is a, c, g, or t
  misc_feature (3405)..(3405): n is a, c, g, or t
  misc_feature (3408)..(3409): n is a, c, g, or t
tctagaggatccctggcgagtgnatggctgcaacagtcttacctgccggctctacaccctcagttcttgttggagactcgacgccctcacccatcagttcaggctcaatggaaaccacagcgttacccggcagtaccacaacaccaggcctcagtgagaaatctaccactttctacagtagccccagatcaccagacacaacacacttacctgcccgcatgacaagctcaggcgtcagtgaagaatccaccacctcccacagccgaccaggctcaacgcacacaacagcattccctggcagtaccaccatgccaggcgtcagtcaggaatctacagcttcccacagcagcccaggctccacagacacaacactgtcccctggcagtaccacagcatcatcccttggtccagaatctactaccttccacagcggcccaggctccactgaaacaacactcttacctgacaacaccacagcctcaggcctccttgaagcatctacgcccgtccacagcagcactggatcgccacacacaacactgtcccctgccggctctacaacccgtcagggagaatctaccaccttccagagctggccaaactcgaaggacactacccctgcacctcctactaccacatcagcctttgttgagctatctacaacctcccacggcagcccgagctcaactccaacaacccacttttctgccagctccacaaccttgggccgtagtgaggaatcgacaacagtccacagcagcccagttgcaactgcaacaacaccctcgcctgcccgctccacaacctcaggcctcgttgaagaatctacgacctaccacagcagcccgggctcaactcaaacaatgcacttccctgaaagcgacacaacttcaggccgtggtgaagaatcaacaacttcccacagcagcacaacacacacaatatcttcagctcctagcaccacatctgcccttgttgaagaacctaccagctaccacagcagcccgggctcaactgcaacaacacacttccctgacagctccacaacctcaggccgtagtgaggaatcaacagcatcccacagcagccaagacgcaacgggaacaatagtcctacctgcccgctccacaacctcagttcttcttggagaatctacgacctcacccatcagttcaggctcaatggaaacgacagcgttacccggcagtaccacaacgccaggcctcagtgagaaatctaccactttccacagtagccccagatcaccagccacaacactctcacctgccagcacgacaagctcaggcgtcagtgaagaatccaccacctcccacagccgaccaggctcaacgcacacaacagcattccctgacagcaccaccacgccaggcctcagtcggcattctacaacttcccacagcagcccaggctcaacggatacaacactgttacctgccagcaccaccacctcaggccccagtcaggaatcaacaacttcccacagcagcccaggttcaactgacacagcactgtcccctggcagtaccacagccttatcctttggtcaagaatctacaaccttccacagcagcccaggctccactcacacaacactcttccctgacagcaccacaagctcaggcatcgttgaagcatctacacgcgtccacagcagcactggctcaccacgcacaacactgtcccctgccagctccacaagccctggacttcagggagaatctaccgccttccagacccacccagcctcaactcacacgacgccttcacctcctagcaccgcaacagcccctgttgaagaatctacaacctaccaccgcagcccaggctcgactccaacaacacacttccctgccagctccacaacttcgggccacagtgagaaatcaacaatattccacagcagcccagatgcaagtggaacaacaccctcatctgcccactccacaacctcaggtcgtggagaatctacaacctcacgcatcagtccaggctcaactgaaataacaacgttacctggcagtaccacaacaccaggcctcagtgaggcatctaccaccttctacagcagccccagatcaccaaccacaacactctcacctgccagcatgacaagcctaggcgtcggtgaagaatccaccacctcccgtagccaaccaggttctactcactcaacagtgtcacctgccagcaccaccacgccaggcctcagtgaggaatctaccaccgtctacagcagcagcccaggctcaactgaaaccacagtgttccctcgcagcaccacaacctcagttcgtggtgaagagcctacaaccttccacagccggccagcctcaactcacacaacactgttcactgaggacagcaccacctcgggcctcactgaagaatctacagccttccccggcagcccagcctccacccaaacagggttacctgccacactcacaaccgcagacctcggtgaggaatcaactacctttcccagcagctcaggctcaactggaacaacactctcacctgcccgctccaccacctctggcctcgttggagaatccacaccctcacgcctcagtccaagctcaaccgaaacaacaactttacccggcagtcccacaacaccaagcctcagtgagaaatcaaccaccttctacactagccccagatcaccagatgcaacactctcacctgcaaccacaacaagctcaggcgtcagcgaagaatccagcacatcccacagtcaaccaggctcaacgcacacaacagcgttccctgacagcaccaccacctcaggcctcagtcaggaacctacaacttcccacagcagccaaggctcaacagaggcaacactgtcccctggcagtaccacagcctcatcccttggtcaacaatctacaaccttccacagcagcccaggcgacactgaaaccacactcttacctgacgacaccataacctcaggcctcgtggaggcatctacacccacccacagcagcactggctcgctacacacaacactgacccctgccagctccacaagcgctggccttcaggaagaatctaccactttccagagctggccaagctcaagtgacacaacaccttcacctcccggcaccacagcagcccctgttgaagtatccacaacctaccacagccgcccgagctcaactccaacaacacacttttctgccagttccacaaccttgggccgtagtgaggaatcaacaacagtccacagcagcccaggtgcaactggaacagcactcttccctacccgctctgcaacctcagttcttgttggagaacctacaacgtcacccatcagttcaggctcaacggaaacaacagcgttacctggcagtaccacaacancaggcctnagtnagnnatctaccaccttctacagcagcccccccgctgctgaaatgcgggatccttagagtcaccc

SEQ ID NO: 595034 - DNA, 3864 bp, Homo sapiens
  misc_feature (21)..(21): n is a, c, g, or t
  misc_feature (33)..(33): n is a, c, g, or t
  misc_feature (35)..(35): n is a, c, g, or t
  misc_feature (310)..(310): n is a, c, g, or t
  misc_feature (318)..(318): n is a, c, g, or t
  misc_feature (323)..(323): n is a, c, g, or t
  misc_feature (325)..(326): n is a, c, g, or t
  misc_feature (332)..(332): n is a, c, g, or t
  misc_feature (336)..(337): n is a, c, g, or t
  misc_feature (352)..(352): n is a, c, g, or t
  misc_feature (355)..(356): n is a, c, g, or t
  misc_feature (367)..(368): n is a, c, g, or t
  misc_feature (377)..(377): n is a, c, g, or t
  misc_feature (391)..(391): n is a, c, g, or t
  misc_feature (407)..(407): n is a, c, g, or t
  misc_feature (418)..(418): n is a, c, g, or t
  misc_feature (421)..(421): n is a, c, g, or t
  misc_feature (511)..(511): n is a, c, g, or t
  misc_feature (3788)..(3788): n is a, c, g, or t
  misc_feature (3796)..(3796): n is a, c, g, or t
  misc_feature (3800)..(3800): n is a, c, g, or t
  misc_feature (3803)..(3804): n is a, c, g, or t
tgagtcggtacctcagagctncctgatggtaanancattcccttggttcacaatctactaccttccacagcagcccaggcgacactgaaaccacactcttacctgacgacaccataacctcaggcctcgtggaggcatctacacccacccacagcagcactggctcgctacacacaacactgacccctgccagctccacaagcgctggccttcaggaagaatctaccactttccagagctggccaagctcaagtgacacaacaccttcacctcccggcaccacagcagcccctgttgaagtatctacaanctaccacngcagncnnggctcnactnnaacaacacacttccntgnnagctccacaanntcaggccanagtgaggaatcaanagcatcccacagcagnccagatgcaanggnaagtggaacaacaccctcatctgcccactccacaacctcaggtcgtggagaatctacaacctcacgcatcagtccaggctcaactgaaanaacacgttacccggcagtaccacaacaccaggcctcagtgagaaatctaccactttctacagtagccccagatcaccagacacaacacacttacctgcccgcatgacaagctcaggcgtcagtgaagaatccaccacctcccacagccgaccaggctcaacgcacacaacagcattccctggcagtaccaccatgccaggcgtcagtcaggaatctacagcttcccacagcagcccaggctccacagacacaacactgtcccctggcagtaccacagcatcatcccttggtccagaatctactaccttccacagcggcccaggctccactgaaacaacactcttacctgacaacaccacagcctcaggcctccttgaagcatctacgcccgtccacagcagcactggatcgccacacacaacactgtcccctgccggctctacaacccgtcagggagaatctaccaccttccagagctggccaaactcgaaggacactacccctgcacctcctactaccacatcagcctttgttgagctatctacaacctcccacggcagcccgagctcaactccaacaacccacttttctgccagctccacaaccttgggccgtagtgaggaatcgacaacagtccacagcagcccagttgcaactgcaacaacaccctcgcctgcccgctccacaacctcaggcctcgttgaagaatctacgacctaccacagcagcccgggctcaactcaaacaatgcacttccctgaaagcgacacaacttcaggccgtggtgaagaatcaacaacttcccacagcagcacaacacacacaatatcttcagctcctagcaccacatctgcccttgttgaagaacctaccagctaccacagcagcccgggctcaactgcaacaacacacttccctgacagctccacaacctcaggccgtagtgaggaatcaacagcatcccacagcagccaagacgcaacgggaacaatagtcctacctgcccgctccacaacctcagttcttcttggagaatctacgacctcacccatcagttcaggctcaatggaaacgacagcgttacccggcagtaccacaacgccaggcctcagtgagaaatctaccactttccacagtagccccagatcaccagccacaacactctcacctgccagcacgacaagctcaggcgtcagtgaagaatccaccacctcccacagccgaccaggctcaacgcacacaacagcattccctgacagcaccaccacgccaggcctcagtcggcattctacaacttcccacagcagcccaggctcaacggatacaacactgttacctgccagcaccaccacctcaggccccagtcaggaatcaacaacttcccacagcagcccaggttcaactgacacagcactgtcccctggcagtaccacagccttatcctttggtcaagaatctacaaccttccacagcagcccaggctccactcacacaacactcttccctgacagcaccacaagctcaggcatcgttgaagcatctacacgcgtccacagcagcactggctcaccacgcacaacactgtcccctgccagctccacaagccctggacttcagggagaatctaccgccttccagacccacccagcctcaactcacacgacgccttcacctcctagcaccgcaacagcccctgttgaagaatctacaacctaccaccgcagcccaggctcgactccaacaacacacttccctgccagctccacaacttcgggccacagtgagaaatcaacaatattccacagcagcccagatgcaagtggaacaacaccctcatctgcccactccacaacctcaggtcgtggagaatctacaacctcacgcatcagtccaggctcaactgaaataacaacgttacctggcagtaccacaacaccaggcctcagtgaggcatctaccaccttctacagcagccccagatcaccaaccacaacactctcacctgccagcatgacaagcctaggcgtcggtgaagaatccaccacctcccgtagccaaccaggttctactcactcaacagtgtcacctgccagcaccaccacgccaggcctcagtgaggaatctaccaccgtctacagcagcagcccaggctcaactgaaaccacagtgttccctcgcagcaccacaacctcagttcgtggtgaagagcctacaaccttccacagccggccagcctcaactcacacaacactgttcactgaggacagcaccacctcgggcctcactgaagaatctacagccttccccggcagcccagcctccacccaaacagggttacctgccacactcacaaccgcagacctcggtgaggaatcaactacctttcccagcagctcaggctcaactggaacaacactctcacctgcccgctccaccacctctggcctcgttggagaatccacaccctcacgcctcagtccaagctcaaccgaaacaacaactttacccggcagtcccacaacaccaagcctcagtgagaaatcaaccaccttctacactagccccagatcaccagatgcaacactctcacctgcaaccacaacaagctcaggcgtcagcgaagaatccagcacatcccacagtcaaccaggctcaacgcacacaacagcgttccctgacagcaccaccacctcaggcctcagtcaggaacctacaacttcccacagcagccaaggctcaacagaggcaacactgtcccctggcagtaccacagcctcatcccttggtcaacaatctacaaccttccacagcagcccaggcgacactgaaaccacactcttacctgacgacaccataacctcaggcctcgtggaggcatctacacccacccacagcagcactggctcgctacacacaacactgacccctgccagctccacaagcgctggccttcaggaagaatctaccactttccagagctggccaagctcaagtgacacaacaccttcacctcccggcaccacagcagcccctgttgaagtatccacaacctaccacagccgcccgagctcaactccaacaacacacttttctgccagttccacaaccttgggccgtagtgaggaatcaacaacagtccacagcagcccaggtgcaactggaacagcactcttccctacccgctctgcaacctcagttcttgttggagaacctacaacgtcacccatcagttcaggctcaacggaaacaacagcgttacctggcagtaccacaacancaggcctnagtnagnnatctaccaccttctacagcagcccccccgctgctgaaatgcgggatccttagagtcaccc

SEQ ID NO: 595035 - DNA, 284 bp, Homo sapiens
  misc_feature (35)..(35): n is a, c, g, or t
  misc_feature (84)..(84): n is a, c, g, or t
tccctaatcccctggcaaccactttaaaaaaaaanttaggttcagggggtacatgtgcaggtaaactcgtgacaagggggtttnttatacagattatttagtgacccaggtactaagcctagtacccaatagttacttttttggtcctgtcccttttcccaccctccaccctcaggtaggccccagtatgttattcctttgtgtccatgttatttcactcccacttgtgagaacatggaatatttggtttcctgttcctatgttagtttgttaaaggataatgg

SEQ ID NO: 595036 - DNA, 3862 bp, Homo sapiens; identical to SEQ ID NO: 532394
  misc_feature (21)..(21): n is a, c, g, or t
  misc_feature (33)..(33): n is a, c, g, or t
  misc_feature (35)..(35): n is a, c, g, or t
  misc_feature (305)..(305): n is a, c, g, or t
  misc_feature (3786)..(3786): n is a, c, g, or t
  misc_feature (3794)..(3794): n is a, c, g, or t
  misc_feature (3798)..(3798): n is a, c, g, or t
  misc_feature (3801)..(3802): n is a, c, g, or t

SEQ ID NO: 595037 - DNA, 596 bp, Homo sapiens
tggtgctgtagaggtgtaaaacagtggccaatgagctactgcagagaagcgacgaggagggcaggctccacggggggatgcagctgtggctctgaacaaggggcccgcgaggcaggccaaatgctgtgcccactaggtgcagccactcctgggggctgtggggaagacacccctctgcctgggccatggccagctctaggtggattctgattcactgtcaatgctgggttgctcccgagccctagatgttcccatggaaggaaggagtttgcctgaaggtccagatgttggtgtgcatggaatggttcgggcagactgaaccaacaggtgtcggaggtgttcaatacagtggcccaagagctactgcagagaagcgacgaggagggccaggctccacggggggatgcagctgtggctctgaacaaggggcccgcgaggcaggccaaatgctgtgcccactaggtgcagccactcctgggggctgtggggaagacaccccctgcctgggccatggccagctctaggtggattctgattcactgtcaatgctgggttgctcccgagccctagatgtcccatggaacggggggatctct

SEQ ID NO: 595038 - DNA, 708 bp, Homo sapiens
agcgggaggaagcggaagatggcggcggcggcctgggaggcctgtgaggagagcggcggctgcgagggcggccgatggcggccgggaggcgccctcgtgacacttgctgggtctgttaggtgctgcgactgctggcgaggcatgtcaggagcactgtggatgccctgcagctcctggggcccggtgcccaatcggctggcggctggctggccctggccccacgcagcgcgggccttcgcaccccacaagtctcagaccccaaacccccatcatcgaacgtgcagcgacctggctcattccacagcgctggttcttcaaagatggcgtgtcaccatattcgcaggctcttcccgacccgaccttccgcacgtctcttcgaggttcttcgtgctgcgtcaaggcccatgtttgtgctcttcgtcctggcctacatccacatcgtcttctcccgctcgcccatcaactgcctggagcatgtgcgtgacaagtggccgcagtgagggcatcctgcgtgtggaagtgcggcacaactcgagccgagcgcccgtcttcctacagttctgtgacagcggcggccgcgggagcttcccgggcctggccgtggaaccaggcagcaacctggacatggaagatgaggaggaggaagagctgaccatggagatgtaagggaacagctccatcaagatagagctggacatcgagcccaaa

SEQ ID NO: 595039 - DNA, 1518 bp, Homo sapiens
tctaatagcctgtatgtctagattacagaactattcaaagaagctcacagactggcttacatgggacaacacctgttctgacaaactaactggctaaagctaccggcactataacatctcacatgacgcactactccaaactttttcatctacttatcgcttctgttctatatgattgcctattaacctatatgctacatcctaagcaatgcacctgtatatagatgccgttaactcccagccacaggcatactcccaacatgctactctcaagcaagctaatgccagagccacacctataaccgtgaaccatcaccaatgacagcaacgaatatgtacaaaatcatatcctctctacacacgcacacctcaaggctcaacctcacacctgctgatcactcctaacactcactcccgcatcctccactaggcccgcttctttcaaccattcttctccttgatttacaattgctgctacctccatccccctgtcctcacgccaccactctcccctcttcttaccaccctctacacctgggctacggcgcctccccaccacctcctctccaccttcacaccctccctggctctccactctctaccttaccccgatcccctccaccgctacccgcaccactctccctctcctcctccccgcctctccctccacctctcctactcctctccgcacacgcacttcaccacatggcccctacgggcacacacgcccttctccgctcctctacctacttccctccgcccaatctctacaacacttgcgcgcttccgcgcggcaacccccagcccgtccttgcaccctccctccacccccccactgcctctcgtgtctttaccttgcgccccccccctcccttctatccctcccttcaccctctccgcccacacccgcatcacctcatctctctaccctcacccgcccctcacgcaacccacacaccctctcccccccccaccggccccccaccacttcacccccccttggcgcccgcaccccgcccggccgatctcgccttctggctcccctttgatttaccccttacgtggcaccccaccgcctatatcccccagacaatacgcttacctgttctacaaacccaacattgggccacccgcccactattcactagggcaacacactatatccaagggctatatcatcaaactcaacacacactacagtcacaacacaataaagtatcaattaatacaagacgaagtacagtagggaagacccagataacaacaggataatataacgcgagcatgatacattcgacgcatatacaaatcacagctttacactatggagtcgcctatcaaccacacgcgtaacaccacataccgcaaatcacaacgcgcacgacaatgacatcaccgccaccctaccacaactcggaccctatccccgctacccgccgcgactaccaccccagcccctccacacccacccgctcgacacacacacgtcaccaccaccagccccacccttctcccacc

SEQ ID NO: 595040 - DNA, 115 bp, Homo sapiens
ggatgatcaaaaagggatggcgagtcgcatgtccggcgcatggcgcggggatcgaatcactagtgaattcgcggcgctgcaggtcacatatgggaagctccaacgcgtagatgca

SEQ ID NO: 595041 - DNA, 224 bp, Homo sapiens
attggtagttctgaacgttagatatttttcctctccattggggttcaaaaggtacctaagtatatgattccgagtggaaaatagggggacagacatcaggtatttggcagtctttcccattttcattttgtgtttgactttttaatataaatgcgggagacgtaaagcattaattgcaagtcaaaatagtttcagtgaacaagtttcagcggttcaactttata

SEQ ID NO: 595042 - DNA, 673 bp, Homo sapiens
  misc_feature (1)..(1): n is a, c, g, or t
  misc_feature (53)..(53): n is a, c, g, or t
  misc_feature (207)..(207): n is a, c, g, or t
  misc_feature (213)..(213): n is a, c, g, or t
  misc_feature (220)..(221): n is a, c, g, or t
  misc_feature (235)..(235): n is a, c, g, or t
  misc_feature (244)..(244): n is a, c, g, or t
  misc_feature (278)..(278): n is a, c, g, or t
  misc_feature (294)..(294): n is a, c, g, or t
  misc_feature (300)..(300): n is a, c, g, or t
  misc_feature (321)..(321): n is a, c, g, or t
ncttctatgagactggagagattccccgaagaatctggatgtcatgaaggaancatggttcagccagaggaaccggctgctgagattactaggaagctggagaaaccggagaagataccgctttaagaaggaaagaaacggctggctgcacttgccctcgcgtcttccagaaaaccgccgtagtactcccgaggagtgtgaggagangagtgnaaaaccnnaaagaagaaaagcnaaagccccnggaggttcctcaggagaatggaatggaagacccntctatctctttctccnaacccnagaaaaagaaatctttttccnaggaggagttgatgagtagcgatcttgaagagaccgctggcagcacccagtattccccagaggaagaagtctacaccccaggaggaaaccagttaatgaccctgaggaggccaggcccaccagaagtggctcccagaaaaagaggaaattctcccaagaggagcccggtcagccgtgggcctgaagaggcggctggccagagcagctcccagaagaagaaaaagttccataaagcatccccggaagattagaatgccaatggacattctctgggaggtggggcataccatagaccccaggtgacatttccccccctgtgccgtgttcccccaattaaaaccaattcaccaga

SEQ ID NO: 595043 - DNA, 258 bp, Homo sapiens
gatccggtgtataacgcgagtgacacactagctcatatcacctatctgtggagtatctgccacacttcagaggcacttttctgttcaaataccaacccccaaaggatgtttaccacacagtgttgactgtaatgcaccactacgaagatacatgtgtcaaagatatttctaagaatgccagtttatatatgaataaggattttcctccttttcaaaaggatatgttcacaaaactgaggtatgtaatatgctctatgg

SEQ ID NO: 595044 - DNA, 133 bp, Homo sapiens
caaaatggtaccaacacggagaatcccttaagaacctgaggaggcgcaacattaaaagctacgattatcgccttagcaaggatgtaccatgcctatcagtatgccagcctgctatcctcctacttatacccaa

SEQ ID NO: 595045 - DNA, 577 bp, Homo sapiens
agtgtccgaggatccccgagtctgagatgtgttaggaaacagatacaaagatgagatacaggaggaatagagagaacaaggccaagattgaagatgagaaaacagatgaagaaggcacgaagaccccaaaggaatacctgaatttcggcttaactgttatgaagaatgttgacttgcccagtgctatggtatcaggaacacgctaaacctatgctgaagcactagacagatatcgaagtgaagtactcagatgctggccagcctatgagtatagacttagaatttcactttgaacccaatgaatattttacaaatgaagtgctgacaaagacatacaggatgaggtcagaaccagatgattctgatcccttttctttagatggaccagaaattatgggtcgtacagggtgccagatagataggaaaaaaggcaagaatgtcactttgaaaactattaagaggaagcagtaaacacaagggacgtgggacagttcgtactgtgactaaaacagttatccaatgactctatactttaagtttcatgcccctacctgaagtacctagagagtggagatct

SEQ ID NO: 595046 - DNA, 565 bp, Homo sapiens
  misc_feature (99)..(99): n is a, c, g, or t
  misc_feature (105)..(105): n is a, c, g, or t
  misc_feature (112)..(113): n is a, c, g, or t
  misc_feature (127)..(127): n is a, c, g, or t
  misc_feature (136)..(136): n is a, c, g, or t
  misc_feature (170)..(170): n is a, c, g, or t
  misc_feature (186)..(186): n is a, c, g, or t
  misc_feature (192)..(192): n is a, c, g, or t
  misc_feature (213)..(213): n is a, c, g, or t
cgaaagctatacaggagagatgctatacctggaacgttattgctgggatgtattaacctgtactcacggattgttcggctgtccttccctttgcgagangagtgnaaaaccnnaaagaagaaaagcnaaagccccnggaggttcctcaggagaatggaatggaagacccntctatctctttctccnaacccnagaaaaagaaatctttttccnaggaggagttgatgagtagcgatcttgaagagaccgctggcagcacccagtattccccagaggaagaagtctacaccccaggaggaaaccagttaatgaccctgaggaggccaggcccaccagaagtggctcccagaaaaagaggaaattctcccaagaggagcccggtcagccgtgggcctgaagaggcggctggccagagcagctcccagaagaagaaaaagttccataaagcatccccggaagattagaatgccaatggacattctctgggaggtggggcataccatagaccccaggtgacatttccccccctgtgccgtgttcccccaattaaaaccaattcaccaga

SEQ ID NO: 595047 - DNA, 1134 bp, Homo sapiens
  misc_feature (723)..(723): n is a, c, g, or t
gcccaatagggcgagacgagcagggatgcgccggcgggaggatgggtgtgcgcggtgcgatctctgcgatcagtgtttccatgtgcgtcccatcgggcatcagtccactgtctatcccagggacacggcatcgcttcctctgctgacacgcacacatctacgtcagggtctccatctccatcttccatacaccctgtcctgcttatatgtccccgtctacgcacgcacgggtgcatcctgtcgcgagggcagtgtgacctccaagcttagacgcgcatgcgttgctcaaccgcatggtgctccgtcgagcacatatacacgcaaggaggacccataccgagctgcgagtactgcgtcgcaaacgcttgggtgagtctgcgctatgtggtcagagggggaccacaaggcctgcgacgcgaccgatgcagacggaactggctcatatctgacgtccatgattgtgagctcagagctgagggagacctgggtcagaaggaacatcacatgtgtatgcacagcacaacgaggatgaggggaccgtgtggattgacggcggtgccctagctgtgtcgcaaggaacctctcacgggggcaaacttgctcgcgaacgggtaggcttgcagatggggtacgcgttgggggtggaaaattcgcccacaggaaagttcgaattgccaggccttgcaacaggtcacggctagagcagggacggttcgcagaacntgatatccggaaagcaccctccaatactcttgttgggtccaccaagtgagacgtgaccgagagcggcgcacgtgatggcgacttcagaatgcacagccccttggaaggcggcccccaattggggccacccgattgacttaagaacgcgacgaacctaaacctattctgggtggcaagagaaggcggggcttgcacaaccagcgcgcttagggatgggcatatagtgagcacacccaccctgtggtgaccatccctgggcgggaatacccgggaggccagacaaaggtgtacccactttagtgggtatgaaacgccccaacgacaggccccttcccccggggcactccgcaaatggggacaaccgtccgtaccagccaaacaagcgcccatgggcacagccgccacactatc

SEQ ID NO: 595048 - DNA, 299 bp, Homo sapiens
cgccgctcgacttgttgtcgtcgtgtcatccgcccgcgcatcgcaggcatagcgtctgcgaattgcttcagagcgcatccggcgatgacatttacgctccgagggcggccactatcgcgtggtcgaagagcgatgcaaggtaattccaaatacccgaaaagtatgcgaatccctgtaaattaaagggtccagcggaatcacgcggcgcggcgcgcaggccgattcgcgggagagcaagcggaaattcgctctcggtcatcggcgccggttggtgcgagccgagcgcggcttgggagtcc

SEQ ID NO: 595049 - DNA, 477 bp, Homo sapiens
tgtgtaccacccccagggcctcctgttccgagactgaatgtgggggccaaactgcagaactgacgaaggagagaggaagtagtgcggggcctggatgtggatggtctggttactagttgcacacaactgcctggcagacaagccatggacttggaccaaggatgtccgtgagtgccctggctgcaagtggaacagctctccaagatggtctctgaagcacaactgagggcagatgaggcaaaacaaagtgctgaagacattctgttgaagacaaatgctaccaaagaaaaaatggccaagagcaatgaggagctgagaaatctaatccagcaaatcagaaactttttgacccaggatagtgctgatttggaccgcattgaagcagttgctaactgaagtattggaaaatggagatgcctaggaccccaaagaagttaccgaacttgacaggaagatatacggtgaacgagttggaag

SEQ ID NO: 595050 - DNA, 407 bp, Homo sapiens
  misc_feature (78)..(78): n is a, c, g, or t
cgtgagtcgatctaaggtcccccctcatcagtgggctcagaaggaggggacctcattatccaggatgtcttctgagancctgtttggaactgttccccccaaggcaggagctgggagactggcttcaaagggggagccagagggctgagagacattgctattccatggtctccggctcctctttctggggtgctgatggggcacagagggggaatttcaaagcattctgtggcatttactcctttttcttgtaaacaaaaagggtttggggttggggggcttccccaaaggtcctttttaaagggggggccaacttcaaggaacccttccttcaacccaaaggcttaagaacaaagttctccagttttttcctaattcctaagtagcttggagtccagcgaaccctc

SEQ ID NO: 595051 - DNA, 501 bp, Homo sapiens
  misc_feature (226)..(226): n is a, c, g, or t
  misc_feature (232)..(232): n is a, c, g, or t
  misc_feature (444)..(444): n is a, c, g, or t
tggtctgtcttgcttgtaggtgcgtcacaccagcagcccctgcatcgcttcgcgcaaattcccggaatcggcactggctggttcgaagctcggtccacaaacacatggacaaagcgccccgccgcacacgcctcctgctcgcccgccttgaataccgccagctcatactgcaccgagctattgcccagcttgcccacccgcagaccgacctcaatgcactcggganaagcgntcgaggcgaagtaatcgcaggccgaactcaccacaaaccccaccacctcaccgtcatgaatatccaacccgccctgttcgatcaggtaggtattaacggctgtatcgaagaagctgtagtaagtgacgttattcacatggccgtaggcatcgttgtcgtgccaacgcgtggtgatcggttggaagtggcggtaatcgtcgcgcacaggcgtngagtcaggcatcggcaagtctcaacaaagttgatccaattgagcagggacccactcg

SEQ ID NO: 595052 - DNA, 118 bp, Homo sapiens
  misc_feature (13)..(13): n is a, c, g, or t
  misc_feature (19)..(19): n is a, c, g, or t
  misc_feature (96)..(96): n is a, c, g, or t
ttggactaaaganacagantctgaaatttattgtgataatttgtatgtcttttgtcttgcaatttaatgccaaaagtttgccatgtgccttaaacntattactatatattttcccctt

SEQ ID NO: 595053 - DNA, 227 bp, Homo sapiens
  misc_feature (12)..(12): n is a, c, g, or t
  misc_feature (53)..(54): n is a, c, g, or t
  misc_feature (56)..(56): n is a, c, g, or t
  misc_feature (60)..(60): n is a, c, g, or t
  misc_feature (183)..(183): n is a, c, g, or t
  misc_feature (218)..(218): n is a, c, g, or t
tcaagtgagccnccagccttggacctccccaagtgctgggattaactgtaacnngntganttatgactttttaaacaggatttgagcagtacattggaacactgcattactttcattataattaggatgttcaaaaagctatacaactatagctctctacaggacacaactgaatgttaaggnctaaatctgcaagtatatgctctaaatatgatccngggacattt

SEQ ID NO: 595054 - DNA, 470 bp, Homo sapiens
taaattaaaagccaaattgtacctcatttatgcatgttttcaagaattcagtttttaagattgtatgaactttttttcacaccacaaaatcaccaacaattatttgttgagattattttaactttgggatgctggaaagagaggagacaagtaaagataatggtccctgcccttgaagaatatggagacagcacttatttacccagaacaggttgagaatgataaataattgtgtgtaattgcgaccaaagctggattgtgtcccagcaagtatctgctaaaagatctttccatgcagcaggaaaagcaagtacaaaggctgtgatgtgggactgtgagtttcacagttgagaaccagcgtggaagccagtggggctgaaagcagaggaatacagtgggtgagtaggtggtaggggagggctgttgattcctaagagagctgctttaagggtaatgtataaccatgtaat

SEQ ID NO: 595055 - DNA, 247 bp, Homo sapiens
cgaggaattaacttccagaaataaacccgagaactactccttcttgcaagttaaagaagaccttcttaaatgatgagatatattgcccgcccgaaaccgccgttcctttggcctcccatgccgtccaggcccaggtatggaggattaccataaagagataactaaggccggcacccggcaaatgatgggcccctaccccggctgtattggacccccaaccacaaggaccggggagaagacctgcctg

SEQ ID NO: 595056 - DNA, 120 bp, Homo sapiens
cccccaaaagggggtttccccttttgggggggggggtggtttcccccctttttttgggggttaccccttaaaaagggggggggctttttcttttaaccccccccttttttttttccccca

SEQ ID NO: 595057 - DNA, 496 bp, Homo sapiens
tctaaaaataaatggaacttaagtgtctatcaaagatggtgtggcagattactgtgaaaagaggagactgttcagcaaaaggatctagaaatagtgattattgataagaaaaaaaattaaaatgtccccctgccatgcacattacacaaaaataactctatatagtttaagatctttatgtcaaaagcaaaacattaaaacatggaataaaataaatgtggatttcctcctgcttcggagtagggaagggcttaacaaagagacataaccttaaaaaatatgtaaaaattagaataaaattaataaacttgggttcatcaaaagacccctttaaaaagtaaaacaaaaagcaagctataatctggggaacatatttgccacacatataatggaaaatgaatcaggaatatataattgactaaggatcaaaattttacatcaagagattccaaagaatgcctacaaattaataacaaatctgactacggtcacaccc

SEQ ID NO: 595058 - DNA, 191 bp, Homo sapiens
ggcaaatagaagccgggtagagagtgtttgtagatcaccccctccccaatagagctaaaactcacctgagttgtaagaaactccagttgacacagaatagactacgaaagtggctttaacagtatctgaacacacaatagctaagacccaaacagggattagataccccactatgcttggcccttatcgag

SEQ ID NO: 595059 - DNA, 331 bp, Homo sapiens
ggaccgagtggagcatgttgtgagacatgtgtacttcccatcctgccacatggccactttgttcatgggcttattgggcgacgatgggtggcttggaaaagaggctgagtggtgtcctcagaacaggtcatcctatccactcaataattaaactcctcctctgctgaggtcacccgttggtgagcactcacatgggatacaaatgtcttcacagattttggccactcagagaggtccatccacatacctcttctccaaatttctttgtcaccaattttctaatcatgcttctttgaagtccctgacctttcccttctcgcctccttccctg

SEQ ID NO: 595060 - DNA, 139 bp, Homo sapiens
agacactccagcctggctgacagagtgagactcggtctcaaaacataaagagaaacctgcatcccaacacaggccgggcaaccgcgacactggctatgcagaagcagggcacgtggccactgtcatctccactcagcct

SEQ ID NO: 595061 - DNA, 111 bp, Homo sapiens
acccgcatacttcttgctagatcaatccggtggtacgacgatgttgctggatcacgccgaataaccatgacagatctttgtggacgacgtatgtggggtaccgaagctcga

SEQ ID NO: 595062 - DNA, 210 bp, Homo sapiens
  misc_feature (193)..(193): n is a, c, g, or t
aggatatacttgggtctccaaagattattcttctttatattattaatttattattttttagagactggggtctcactctgttgcccaggccaaagtgcagtgctgagggcatagctggctgcaacctcaaactcttggggctcaagatgatcctccgtgcctcagcactttagaagtagctagagaagtacanggtatggcaccattggc

SEQ ID NO: 595063 - DNA, 263 bp, Homo sapiens
actacttatttatattaatagtttacctgcattatttatgaaaactgtgagtcatcatgtaaagttatttccctgtcaaccattttatagcctgtgaatatcagatatataggtgagtagaaaccttaagattaactatatggttatattactaaataattcagtatttaactgtttgcattaaaacagtattaacgtcttatttatcaaaaattacacaaagcaggaaaacttacccaagccaagatcaattctgtgtaggg

SEQ ID NO: 595064 - DNA, 374 bp, Homo sapiens
ttcagagacattggccgcagttttgcagaggtgggtggatccttatgaaccgcaccggccgcgccctgaccctgtgctgcctgttgcttcttcagcccctgctgggcttggcggagggcggtaactcggtgctgattccggcgacgtgccgctgcaccttgaacgttcagcctgaagacctggcaaacgccctcaaggcctgtgagcagacggcaaccgcgggggatgcccaggcgcagttcgaactgtgcgagtaccactacacgcaaacgccaaaaaaactcgacatagccctggactggatccagatggcttcgctgcaaggccaggctgatgcccagtatcgcctgagcgccatgttcttccatggtgaa

SEQ ID NO: 595065 - DNA, 1721 bp, Homo sapiens
  misc_feature (48)..(48): n is a, c, g, or t
gaggaggtggtagaggaggtttccaaggcagtggagattatggtggangagggggttatggtggaagagggggctcatggtggaagaggctatggagatccatatggaggaggtggtggtggtggtggtggtggtggtggaggaggtggatatagaagatactaaaaactataaaaattagatagcagtgcttgcttctttatagatacattagaaatagtgttccaaataacatacttgaatatcatctttgaagtaaacaccatgttagactccctggtgataccactcttgaattggttaatatgtaagaacattgttttttattaccagttgatctctcaaatgaagtgatgactttttccatattctgtgtacccttgagcatgttgtgtctttttaaaaaacaaaaaaaagaacaaaaattattttttaaaatgtaaatatttattaccatcagacttggaaaatggaaagtattttattgtcatgattgaatttagattgttacctgtattttgttcaggtttgagacatataaaagaccccacctgtaatagaaaggaatatagacccttgcctcacctgtattgctgtggatgtgtttgtgggtttttcattcgattttacaaaatagggaaaggcacttccagttgtatttagtaggcagttgttgtgaatcatttttttctcttataggaggagattcctctctagccatgtttctgttaaagtttcattaattgaagcccaagtttactttttactgtacatacttattttctaattggatttgaaatcagcatgattttgtttgacaaagcaaagtttaagattgaggtcagaaatactttaatggagcaaagacacataccaactttacatgacggtgtgagaaatagtcctataaactggtctcttcatcatttatgctctcactttagatatccaaatattaaaaggcaggctgacctgtatcacacagaattaaggcagtaattttctgcttcagtagatcaagggtagggctaaggcatcctgtggtaattctgattcacagctagatttgggaaacacaaagttagggaatggctatatgtgatttgctagttggagcagtcaaagtcttagctatcaagagttgtgaatttgaatcatggcactaggtcaggggtgctatggattgaaatgaccttagttctcaaggagtgatttgtcctcatttgtcaaatgaggaatgagacacttaccatcatctcaggttgtttcttaaagacctaaatacaaatacaatttgttaaaaacttacagagggcctattttgaatgctttaagatgtaggccaagtaatgtatttttctcttagtgtagaaagttaagagaaaaagagctggtaccataaattttttcaatcttagtgtaaaatctgtatctcattgtaggcttctggtcaatacctatacataacaacttaatgtgatctaaccaactcaactgatagaaagctgaattgttcccagtggacaagtggtatttgatgtttagcaggtttttttgttgttatttttttggtaaactctgtggtaaaatctaaaataatgttaaaaccctaaaagtaactattgaatattctgtaatcttagacatgtatttttcaagctaaccctttgaagaaatgtgttcaaggtaggaaaatataaaattttttggttatttgtaaa

SEQ ID NO: 595066 - DNA, 3713 bp, Homo sapiens
cagcgctgctccccgggcgctcctccccgggcgctcctccccaggcctcccgggcgcttggatcccggccatctccgcacccttcaagtgggtgtgggtgatttcctggcggggggagcagccaggtgagcccaagatgctgctgcgctcgaagcctgcgctgccgccgccgctgatgctgctgctcctggggccgctgggtcccctctcccctggcgccctgccccgacctgcgcaagcacaggacgtcgtggacctggacttcttcacccaggagccgctgcacctggtgagcccctcgttcctgtccgtcaccattgacgccaacctggccacggacccgcggttcctcatcctcctgggttctccaaagcttcgtaccttggccagaggcttgtctcctgcgtacctgaggtttggtggcaccaagacagacttcctaattttcgatcccaagaaggaatcaacctttgaagagagaagttactggcaatctcaagtcaaccaggatatttgcaaatatggatccatccctcctgatgtggaggagaagttacggttggaatggccctaccaggagcaattgctactccgagaacactaccagaaaaagttcaagaacagcacctactcaagaagctctgtagatgtgctatacacttttgcaaactgctcaggactggacttgatctttggcctaaatgcgttattaagaacagcagatttgcagtggaacagttctaatgctcagttgctcctggactactgctcttccaaggggtataacatttcttgggaactaggcaatgaacctaacagtttccttaagaaggctgatattttcatcaatgggtcgcagttaggagaagattttattcaattgcataaacttctaagaaagtccaccttcaaaaatgcaaaactctatggtcctgatgttggtcagcctcgaagaaagacggctaagatgctgaagagcttcctgaaggctggtggagaagtgattgattcagttacatggcatcactactatttgaatggacggactgctaccagggaagattttctaaaccctgatgtattggacatttttatttcatctgtgcaaaaagttttccaggtggttgagagcaccaggcctggcaagaaggtctggttaggagaaacaagctctgcatatggaggcggagcgcccttgctatccgacacctttgcagctggctttatgtggctggataaattgggcctgtcagcccgaatgggaatagaagtggtgatgaggcaagtattctttggagcaggaaactaccatttagtggatgaaaacttcgatcctttacctgattattggctatctcttctgttcaagaaattggtgggcaccaaggtgttaatggcaagcgtgcaaggttcaaagagaaggaagcttcgagtataccttcattgcacaaacactgacaatccaaggtataaagaaggagatttaactctgtatgccataaacctccataatgtcaccaagtacttgcggttaccctatcctttttctaacaagcaagtggataaataccttctaagacctttgggacctcatggattactttccaaatctgtccaactcaatggtctaactctaaagatggtggatgatcaaaccttgccacctttaatggaaaaacctctccggccaggaagttcactgggcttgccagctttctcatatagtttttttgtgataagaaatgccaaagttgctgcttgcatctgaaaataaaatatactagtcctgacactgaatttttcaagtatactaagagtaaagcaactcaagttataggaaaggaagcagataccttgcaaagcaactagtgggtgcttgagagacactgggacactgtcagtgctagatttagcacagtattttgatctcgctaggtagaacactgctaataataatagctaataataccttgttccaaatactgcttagcattttgcatgttttacttttatctaaagttttgttttgttttattatttatttatttatttattttgtgacggagagagattccatctcaaaaaaacaagttattaaaaatgtatatgaatgctcctaatatggtcaggaagcaaggaagcgaaggatatattatgagttttaagaaggtgcttagctgtatatttatctttcaaaatgtattagaagattttagaattctttccttcatgtgccatctctacaggcacccatcagaaaaagcatactgccgttaccgtgaaactggttgtaaaagagaaactatctatttgcaccttaaaagacagctagattttgctgattttcttctttcggttttctttgtcagcaataatatgtgagaggacagattgttagatatgatagtataaaaaatggttaatgacaattcagaggcgaggagattctgtaaacttaaaattactataaatgaaattgatttgtcaagaggataaattttagaaaacacccaataccttataactgtctgttaatgcttgctttttctctacctttcttccttgtttcagttgggaagcttttggctgcaagtaacagaaactcctaattcaaatggcttaagcaataaggaaatgtatattcccacataactagacgttcaaacaggccaggctccagcacttcagtacgtcaccagggatctgggttcttcccagctctctgctctgccatctttagcgctggcttcattctcagactctggtagcatgatggctgtagctgtttcatgggccccttcaaacctcatagcaaccagaggaagaaaatgagccattttttgagtctccttcatagacttgaataactctttttcagagcttctcacagcaaacctctcctcatgtctcctcatgtcttattgttcagaaatgggtaatgtggccatttcaccagtcactgccaacaacaacgaggttcctataattgtctctgagtaaccctttggaatggagagggtgttggtcagtctacaaactgaacactgcagttctgcgctttttaccagtgaaaaaatgtaattattttcccctcttaaggattaatattcttcaaatgtatgcctgttatggatatagtatctttaaaattttttattttaatagctttaggggtacacactttttgcttacaggggtgaattgtgtagtggtgaagactcggcttttaatgtacttgtcacctgagtgatgtacattgtacccaataggtaatttttcatccattaccctccttccgccctcttcccttctgagtctccaacatcccttataccactgtgtatgttcttgtgtacctacagctaagcttccacttataagtgagaacatgcagtatttggttttccattcctgagttacttcccttaggataacagcccccagttccgtccaagttgctgcaaaatacattattcttctttatggctgagtaatagtccatggtacatatataccacattttctttatccacttatcagttgatggacacttaggttaattccattcaatttcattcaatttaagtatatttgtaaggagctaaagctgaaaattaaattttagatctttcaatactcttaaattttatatgtaagtggtttttatattttcacatttgaaataaagtaatttttataaccttaaaaaaaaa

SEQ ID NO: 595067 - DNA, 1667 bp, Homo sapiens
  misc_feature (48)..(48): n is a, c, g, or t
gaggaggtggtagaggaggtttccaaggcagtggagattatggtggangagggggttatggtggaagagggggctcatggtggaagaggctatggagatccatatggaggaggtggtggtggtggtggtggtggtggtggaggaggtggatatagaagatactaaaaactataaaaattagatagcagtgcttgcttctttatagatacattagaaatagtgttccaaataacatacttgaatatcatctttgaagtaaacaccatgttagactccctggtgataccactcttgaattggttaatatgtaagaacattgttttttattaccagttgatctctcaaatgaagtgatgactttttccatattctgtgtacccttgagcatgttgtgtctttttaaaaaacaaaaaaaagaacaaaaattattttttaaaatgtaaatatttattaccatcagacttggaaaatggaaagtattttattgtcatgattgaatttagattgttacctgtattttgttcaggtttgagacatataaaagaccccacctgtaatagaaaggaatatagacccttgcctcacctgtattgctgtggatgtgtttgtgggtttttcattcgattttacttttttctcttataggaggagattcctctctagccatgtttctgttaaagtttcattaattgaagcccaagtttactttttactgtacatacttattttctaattggatttgaaatcagcatgattttgtttgacaaagcaaagtttaagattgaggtcagaaatactttaatggagcaaagacacataccaactttacatgacggtgtgagaaatagtcctataaactggtctcttcatcatttatgctctcactttagatatccaaatattaaaaggcaggctgacctgtatcacacagaattaaggcagtaattttctgcttcagtagatcaagggtagggctaaggcatcctgtggtaattctgattcacagctagatttgggaaacacaaagttagggaatggctatatgtgatttgctagttggagcagtcaaagtcttagctatcaagagttgtgaatttgaatcatggcactaggtcaggggtgctatggattgaaatgaccttagttctcaaggagtgatttgtcctcatttgtcaaatgaggaatgagacacttaccatcatctcaggttgtttcttaaagacctaaatacaaatacaatttgttaaaaacttacagagggcctattttgaatgctttaagatgtaggccaagtaatgtatttttctcttagtgtagaaagttaagagaaaaagagctggtaccataaattttttcaatcttagtgtaaaatctgtatctcattgtaggcttctggtcaatacctatacataacaacttaatgtgatctaaccaactcaactgatagaaagctgaattgttcccagtggacaagtggtatttgatgtttagcaggtttttttgttgttatttttttggtaaactctgtggtaaaatctaaaataatgttaaaaccctaaaagtaactattgaatattctgtaatcttagacatgtatttttcaagctaaccctttgaagaaatgtgttcaaggtaggaaaatataaaattttttggttatttgtaaa

SEQ ID NO: 595068 - DNA, 1755 bp, Homo sapiens
aggagaaaagggcgctggggctcggcgggaggaagtgctagagctctcgactctccgctgcgcggcagctggcggggggagcagccaggtgagcccaagatgctgctgcgctcgaagcctgcgctgccgccgccgctgatgctgctgctcctggggccgctgggtcccctctcccctggcgccctgccccgacctgcgcaagcacaggacgtcgtggacctggacttcttcacccaggagccgctgcacctggtgagcccctcgttcctgtccgtcaccattgacgccaacctggccacggacccgcggttcctcatcctcctgggttctccaaagcttcgtaccttggccagaggcttgtctcctgcgtacctgaggtttggtggcaccaagacagacttcctaattttcgatcccaagaaggaatcaacctttgaagagagaagttactggcaatctcaagtcaaccaggatatttgcaaatatggatccatccctcctgatgtggaggagaagttacggttggaatggccctaccaggagcaattgctactccgagaacactaccagaaaaagttcaagaacagcacctactcaagaagctctgtagatgtgctatacacttttgcaaactgctcaggactggacttgatctttggcctaaatgcgttattaagaacagcagatttgcagtggaacagttctaatgctcagttgctcctggactactgctcttccaaggggtataacatttcttgggaactaggcaatgaacctaacagtttccttaagaaggctgatattttcatcaatgggtcgcagttaggagaagattttattcaattgcataaacttctaagaaagtccaccttcaaaaatgcaaaactctatggtcctgatgttggtcagcctcgaagaaagacggctaagatgctgaagagcttcctgaaggctggtggagaagtgattgattcagttacatggcatcactactatttgaatggacggactgctaccagggaagattttctaaaccctgatgtattggacatttttatttcatctgtgcaaaaagttttccaggtggttgagagcaccaggcctggcaagaaggtctggttaggagaaacaagctctgcatatggaggcggagcgcccttgctatccgacacctttgcagctggctttatgtggctggataaattgggcctgtcagcccgaatgggaatagaagtggtgatgaggcaagtattctttggagcaggaaactaccatttagtggatgaaaacttcgatcctttacctgattattggctatctcttctgttcaagaaattggtgggcaccaaggtgttaatggcaagcgtgcaaggttcaaagagaaggaagcttcgagtataccttcattgcacaaacactgacaatccaaggtataaagaaggagatttaactctgtatgccataaacctccataatgtcaccaagtacttgcggttaccctatcctttttctaacaagcaagtggataaataccttctaagacctttgggacctcatggattactttccaaatctgtccaactcaatggtctaactctaaagatggtggatgatcaaaccttgccacctttaatggaaaaacctctccggccaggaagttcactgggcttgccagctttctcatatagtttttttgtgataagaaatgccaaagttgctgcttgcatctgaaaataaaatatactagtcctgaca

SEQ ID NO: 595069 - DNA, 1927 bp, Homo sapiens
  misc_feature (48)..(48): n is a, c, g, or t
gaggaggtggtagaggaggtttccaaggcagtggagattatggtggangagggggttatggtggaagagggggctcatggtggaagaggctatggagatccatatggaggaggtggtggtggtggtggtggtggtggtggaggaggtggatatagaagatactaaaaactataaaaattagatagcagtgcttgcttctttatagatacattagaaatagtgttccaaataacatacttgaatatcatctttgaagtaaacaccatgttagactccctggtgataccactcttgaattggttaatatgtaagaacattgttttttattaccagttgatctctcaaatgaagtgatgactttttccatattctgtgtacccttgagcatgttgtgtctttttaaaaaacaaaaaaaagaacaaaaattattttttaaaatgtaaatatttattaccatcagacttggaaaatggaaagtattttattgtcatgattgaatttagattgttacctgtattttgttcaggtttgagacatataaaagaccccacctgtaatagaaaggaatatagacccttgcctcacctgtattgctgtggatgtgtttgtgggtttttcattcgattttacaaaatagggaaaggcacttccagttgtatttagtaggcagttgttgtgaatcatttttttctcttataggaggagattcctctctagccatgtttctgttaaagtttcattaattgaagcccaagtttactttttactgtacatacttattttctaattggatttgaaatcagcatgattttgtttgacaaagcaaagtttaagattgaggtcagaaatactttaatggagcaaagacacataccaactttacatgacggtgtgagaaatagtcctataaactggtctcttcatcatttatgctctcactttagatatccaaatattaaaaggcaggctgacctgtatcacacagaattaaggcagtaattttctgcttcagtagatcaagggtagggctaaggcatcctgtggtaattctgattcacagctagatttgggaaacacaaagttagggaatggctatatgtgatttgctagttggagcagtcaaagtcttagctatcaagagttgtgaatttgaatcatggcactaggtcaggggtgctatggattgaaatgaccttagttctcaaggagtgatttgtcctcatttgtcaaatgaggaatgagacacttaccatcatctcaggttgtttcttaaagacctaaatacaaatacaatttgttaaaaacttacagagggcctattttgaatgctttaagatgtaggccaagtaatgtatttttctcttagtgtagaaagttaagagaaaaagagctggtaccataaattttttcaatcttagtgtaaaatctgtatctcattgtaggcttctggtcaatacctatacataacaacttaatgtgatctaaccaactcaactgatagaaagctgaattgttcccagtggacaagtggtatttgatgtttagcaggtttttttgttgttatttttttggtaaactctgtggtaaaatctaaaataatgttaaaaccctaaaagtaactattgaatattctgtaatcttagacatgtatttttcaagctaaccctttgaagaaatgtgttcaaggtaggaaaatataaaattttttggttatttgtaaatttattttttgtgtgtttatatttaatgaaaagatgtaatttcatttgtgatagctgaaaaaaaggctttccataattaagaaaatacctttatcagtagctatgaactctgaaaaataatttttaaaaacttttaagaaaaaaactacttgagtaaaatatttcaagagttgtttaaaaatcttctttaaaacctttaaaaaaaa

SEQ ID NO: 595070 - DNA, 980 bp, Homo sapiens
  misc_feature (48)..(48): n is a, c, g, or t
gaggaggtggtagaggaggtttccaaggcagtggagattatggtggangagggggttatggtggaagagggggctcatggtggaagaggctatggagatccatatggaggaggtggtggtggtggtggtggtggtggtggaggaggtggatatagaagatactaaaaactataaaaattagatagcagtgcttgcttctttatagatacattagaaatagtgttccaaataacatacttgaatatcatctttgaagtaaacaccatgttagactccctggtgataccactcttgaattggttaatatgtaagaacattgttttttattaccagttgatctctcaaatgaagtgatgactttttccatattctgtgtacccttgagcatgttgtgtctttttaaaaaacaaaaaaaagaacaaaaattattttttaaaatgtaaatatttattaccatcagacttggaaaatggaaagtattttattgtcatgattgaatttagattgttacctgtattttgttcaggtttgagacatataaaagaccccacctgtaatagaaaggaaaaaaaaaaaaaaaaaaaaaaaaaaaaaaaaaaaaaaaaacaaccaaaaacaaacaagaaaaaaaaaaaactaaactcaagcgcaggaacaagccacgaaaaaaaaagacaacacaagcaaaaacacacaaaagactataaaaaaaacagaagacggaggcaggggcagccaagaaagggtaacagacagagtgagacacacaaagcctagagaaagaggaaaaaactaagagaagtaactagcgaagcagagagaagaaataaccaaaagaagaggcacagcgcgccaacagacagagacagcgaggagggaccgcaagcaccaaggacagaacgaggaaccacactatcacgggtacaaaacagacaagaacacaacaacggacaaaccaagcacaacacaaagaacgtacg

SEQ ID NO: 595071 - DNA, 2252 bp, Homo sapiens
aggagaaaagggcgctggggctcggcgggaggaagtgctagagctctcgactctccgctgcgcggcagctggcggggggagcagccaggtgagcccaagatgctgctgcgctcgaagcctgcgctgccgccgccgctgatgctgctgctcctggggccgctgggtcccctctcccctggcgccctgccccgacctgcgcaagcacaggacgtcgtggacctggacttcttcacccaggagccgctgcacctggtgagcccctcgttcctgtccgtcaccattgacgccaacctggccacggacccgcggttcctcatcctcctgggttctccaaagcttcgtaccttggccagaggcttgtctcctgcgtacctgaggtttggtggcaccaagacagacttcctaattttcgatcccaagaaggaatcaacctttgaagagagaagttactggcaatctcaagtcaaccaggatatttgcaaatatggatccatccctcctgatgtggaggagaagttacggttggaatggccctaccaggagcaattgctactccgagaacactaccagaaaaagttcaagaacagcacctactcaagaagctctgtagatgtgctatacacttttgcaaactgctcaggactggacttgatctttggcctaaatgcgttattaagaacagcagatttgcagtggaacagttctaatgctcagttgctcctggactactgctcttccaaggggtataacatttcttgggaactaggcaatgaacctaacagtttccttaagaaggctgatattttcatcaatgggtcgcagttaggagaagattttattcaattgcataaacttctaagaaagtccaccttcaaaaatgcaaaactctatggtcctgatgttggtcagcctcgaagaaagacggctaagatgctgaagagcttcctgaaggctggtggagaagtgattgattcagttacatggcatcactactatttgaatggacggactgctaccagggaagattttctaaaccctgatgtattggacatttttatttcatctgtgcaaaaagttttccaggtggttgagagcaccaggcctggcaagaaggtctggttaggagaaacaagctctgcatatggaggcggagcgcccttgctatccgacacctttgcagctggctttatgtggctggataaattgggcctgtcagcccgaatgggaatagaagtggtgatgaggcaagtattctttggagcaggaaactaccatttagtggatgaaaacttcgatcctttacctgattattggctatctcttctgttcaagaaattggtgggcaccaaggtgttaatggcaagcgtgcaaggttcaaagagaaggaagcttcgagtataccttcattgcacaaacactgacaatccaaggtataaagaaggagatttaactctgtatgccataaacctccataatgtcaccaagtacttgcggttaccctatcctttttctaacaagcaagtggataaataccttctaagacctttgggacctcatggattactttccaaatctgtccaactcaatggtctaactctaaagatggtggatgatcaaaccttgccacctttaatggaaaaacctctccggccaggaagttcactgggcttgccagctttctcatatagtttttttgtgataagaaatgccaaagttgctgcttgcatctgaaaataaaatatactagtcctgacaaaaaaaaaaaaaaaaaaaaaaaaaaaaaaaaaaaacaagaataaaaaaaaaaaaaaaaaaaaaaaaaaaaaataggaggggacgcgcgcagcgagcgcaccagacgaaaaacagatcataaaaaacacacacgggggggacgcgcggcgcgcccaaccgagggacacagcacacacaggagcgagctcgaaaccggggcgcacgcgcagagcaacatccggcggcgcaacaaacaaacaaggggcaggcgagggaaaacctccccaccccaacaaaaaaaaaaagaccacccgcgcggcgggaaaacacaagcggcgcggtgtgctctcacaaaaacaaaacccacccaaagaagagagcgagcactgagcggggcgaaccaacagaggagggagtactataacaaccaccagacgaaggaacgacacaaagagagaaccaacgcagcacaacatgaaacagatagcaacccccaccccccccgagcagggaacgac

SEQ ID NO: 595072 - DNA, 317 bp, Homo sapiens
  misc_feature (25)..(25): n is a, c, g, or t
  misc_feature (28)..(28): n is a, c, g, or t
tggtatccccagaggcagccttcgnttnatccaagctttctatttaggagattcaagccatctccctgactaccaattaatgtgtttgttaatgctcggcttacagagttgcataaatgtcagtgatctgttccaatcctgtttttttctgtaagttaattttaatgcataattttgcagaacacaaggttttccaaagcatgtatatagtattacagtagaaatgtatatattttggggggggtcttctatttatcaggcatttttaagtaatggggaatttaggatgtggaaggaaaaccagggtaaaaaaattt

SEQ ID NO: 595073 - DNA, 1208 bp, Homo sapiens
cagcgctgctccccgggcgctcctccccgggcgctcctccccaggcctcccgggcgcttggatcccggccatctccgcacccttcaagtgggtgtgggtgatttcctggcggggggagcagccaggtgagcccaagatgctgctgcgctcgaagcctgcgctgccgccgccgctgatgctgctgctcctggggccgctgggtcccctctcccctggcgccctgccccgacctgcgcaagcacaggacgtcgtggacctggacttcttcacccaggagccgctgcacctggtgagcccctcgttcctgtccgtcaccattgacgccaacctggccacggacccgcggttcctcatcctcctgggttctccaaagcttcgtaccttggccagaggcttgtctcctgcgtacctgaggtttggtggcaccaagacagacttcctaattttcgatcccaagaaggaatcaacctttgaagagagaagttactggcaatctcaagtcaaccaggatatttgcaaatatggatccatccctcctgatgtggaggagaagttacggttggaatggccctaccaggagcaattgctactccgagaacactaccagaaaaagttcaagaacagcacctactcaagaagctctgtagatgtgctatacacttttgcaaactgctcaggactggacttgatctttggcctaaatgcgttattaagaacagcagatttgcagtggaacagttctaatgctcagttgctcctggactactgctcttccaaggggtataacatttcttgggaactaggcaatgaacctaacagtttccttaagaaggctgatattttcatcaatgggtcgcagttaggagaagattttattcaattgcataaacttctaagaaagtccaccttcaaaaatgcaaaactctatggtcctgatgttggtcagcctcgaagaaagacggctaagatgctgaagaggtaggaactagaggatgcagaatcactttacttttcttctttttccttttgagacagagtctcactctgtcagccagactggagtgcagtggtacaatcatggctcactgcaacttcgacctcccaggctggtctcttgaattcctgtgctcaagccatccttccacctcagcctcccagagtgccaggattacaggcatgagccaccacacccagccaccacttttctt

SEQ ID NO: 595074 - DNA, 779 bp, Homo sapiens
cagcgctgctccccgggcgctcctccccgggcgctcctccccaggcctcccgggcgcttggatcccggccatctccgcacccttcaagtgggtgtgggtgatttcctggcggggggagcagccaggtgagcccaagatgctgctgcgctcgaagcctgcgctgccgccgccgctgatgctgctgctcctggggccgctgggtcccctctcccctggcgccctgccccgacctgcgcaagcacaggacgtcgtggacctggacttcttcacccaggagccgctgcacctggtgagcccctcgttcctgtccgtcaccattgacgccaacctggccacggacccgcggttcctcatcctcctgggttctccaaagcttcgtaccttggccagaggcttgtctcctgcgtacctgaggtttggtggcaccaagacagacttcctaattttcgatcccaagaaggaatcaacctttgaagagagaagttactggcaatctcaagtcaaccaggatatttgcaaatatggatccatccctcctgatgtggaggagaagttacggttggaatggccctaccaggagcaattgctactccgagaacactaccagaaaaagttcaagaacagcacctactcaagtaagaaatgaaaggcaccctagagatgttccagccccaaagatatttgaataggttggactcgggcaccaatctagcaagtcctacggaagttgtataaagctgaaaatactgaagcatttcccaaatgggaaatcctaaact

SEQ ID NO: 595075 - DNA, 1596 bp, Homo sapiens
  misc_feature (1270)..(1270): n is a, c, g, or t
tggtattggtttgggttttggtttttgaaatggacctcttggctcagctcatctccaggcgtggagtgtgcaggtggcacgatattctgtggtccccgtgcaaccttctgtgccctcctggggtttcaagtgtgattctcttcaccaagcaggagcgggccccttccctcacgcggagccgcttggcacgtggacaggccttcgggagaagggtcagggcttgaagcggtccttttccttctgtgggcacccctgggaggggtgcctccccattgggctttccctcaagattatgcaccattcttcgggggctccagcttggccatgggcctggatatataagagttttaaacaatggctgggcgccatgtccacccatattcccctatattattatggaatctttttacacaaatgtctctgagacctctttggaaacgcttttcaggggcgccctcagagggggagacacgttttggtatacacatgtcacaacaagaagcggctctgggcctttctaacctctctctgagatctctcttctttccaccacaatcttggatctttcctgagaaattactatactattcagagatattctgggcgcaaaaattgagcaccctgtcgggcgcccacatatactatccccctctttcttattgagacatctccagcgctattacacgctttgatactaaccttgggcgcagggtgtccagagagacatacccctgagtgtttcacacaaacgcggtggttcctttcacacctcttttctccacaccccgaatgcggggtctcaaaaagtcgtttcctacaggatatgtagtcctctgggtattacgccaacggtttgggcggcaccattacaatttaaaaacccgttccctgagaacctgtgggcatcgacaccccttgttctccagtcgccggcccacacccttggtagggccccaccagcaagggggtctctacactcgtgcttcgccccctgtctccccactttgggcgagcgccctttggtgcacacgctcggtgcaacccctttcctgttgccgcggggcacccaccccttataaagggcgctgtcgctacgggggtcctcttgggtactaacaccccctgttgactagggagcggctgctatgttgcgacccactctctcccgtgtgcgctgctgcacatacacacaaaggggggagcgacccccacgacaaactggttggccgcacgatcacttcatgctcgctccaacgaggaggagaccttncacccgagctgatcagtcagaccgttctcacagaaacactgcgcagcacatagcggcaaaaagcaaataataggcgacacatagcaaattaaacgaccaacaaacagcataaacaaaaaatacaattagataacagacaaagacgataaaatataagacgacatcgaccaccaacaacagagaatagagcagcaagaactaatacacatcaaccactagataacaacgtcacgtacgatcctcgccccgcggcgccaccatcgctcccacctcatcaccacactaaccatcacaaacacacaataacaacaaaaacaccacgacaa

SEQ ID NO: 595076 - DNA, 461 bp, Homo sapiens
ggacccggatgcacactgcaacaagcaaacttcagatttcaaataaacacttgggccaaacagtattaccagatacatcagtttatcaaactctaatttcccatgatttgcctggcgtggtggctcatgcctgtaatcccagcactttgggaggcagagcggagcggatgacctgaggtcgggtgttggagaccagcctgaccaacatggagaaaccccgtctgtactaaaaatacaaaattagcaaggtgtgctggcgcatgcctgtaatcccagctacttgggaggctgaggcgggagaattgcttgaacccgggaggcagaggttgcagtgagccaagatcgtgccatcgtactccagcctgggcaacaagagtgaaactccatctcaaaaaaaaaaaggttatacaattatgaacccagaaaaaacaaaataatcttggttaatgtgcctttttttg

SEQ ID NO: 595077 - DNA, 997 bp, Homo sapiens
cctccgatacaatgttggtcacagtcatacgtccaaggtagctcgacagattataagccgtggttacgtttagtctgctcgcataagcactagcgtatcgtctgctaacggtccatcgcatacagtgcatgagaaagagtgtgccgcaagattatgtgtgaatagtcgtaaaatgctaaggatcagagtgtttcgctatgcacatcgcatggccattctcgtacagtggcatgtattaaatacgtagagaacgtagctgcctttgctacatgaacatgtttggcttccaaaattggaactaggtctgtgtagacacaatctcaaactctaacaggaacacactgccaggaacaagtccagttatcgcaacgaaggaccaggtcatatagttggcatcgtacttagcataggtatttattgcgcgccagtgcagcgtcctcaggaaaccatggagttgtacgacaaggcccctccagagtaacatgggtgattcagttgtcttgtctaatggcacactcaaacccaggtaaaagcccatagtgactcgtagaccaaggtactggctcatgtgcatgactaggtcattcgtcgacccataaccgggtgttcacgaacttccctaccccttgtcgtgtgcacatgtcctagagacaacctcattgaagcatcctgccgacctttcgaatcagttgagacaatcaatttttagtacagactcaacaattgtcttccccaattcaatcgagttaggcatgtggtgcgactcgaagggacgaaaggcccaagctttcaccccttcagccaggcaaggtggcccttccctggcacaagattcacggaaatcccccaacggtactcgatggttgaaagttcaaatgccaggacccccagacaaatagcatcaggctttgttcctttggggcaagcaactgggtcaaaaccctaaaagaaagactcttgagggaaggcttgggctttgccctgaattgtgaaatcc

SEQ ID NO: 595078 - DNA, 192 bp, Homo sapiens
tgcagcttcttgcccgtctgcacaagctgcaaaagaccctttgcacggtgcgtatcctttcccgttggggcttccactgacccggaggcgtcctagatgtagtagagcggcacctcgccacacagggtgctcacggtcatgaccaggaaggacgggtcccctccggagggtgctgagcctgaatctcgcccc

SEQ ID NO: 595079 - DNA, 663 bp, Homo sapiens
acatatttcactaaagacaagttttgggctggatgcggtagcttacacctataatcccagcactttgggaggctgaggtgagagggtcacttgagcccaggagttctagacaagcctgggaaacatagcaagatctcatccttacaaaaaataataatggtgtgtgctgaagtcctagctacttggggtggtttgagggcaggaggattgtttgaggttgaggggaagttggagggttggcaaggtggaacttaatggatatttaaccaattggaattcccaaggttgggggcaacgcaaacattggaggaaccgtggtttttcaaagaaataaaacacaaaagttgtttggcttaagagattaatgggcgggttggacatgtggtgcacatttggagaaggttttgggaacccggggggaaacttttaaagaggtgggcttttgtaaagaagtataaatctccgggggtgtcctgcaacattgtttgaaaacacctgtgggtgcccgattgggggcgattataaacgcggcgcgtttaatatgcaaccaattggggatgttggggagaaggggggcgtttttcaccaattcaagaggggatttggggggtaatgggtgggtcaccatttcggaaagggggtgttccccccagaaattggggg

SEQ ID NO: 595080 - DNA, 101 bp, Homo sapiens
cggtgaaactgacgtggtaggcgagtgtatgggacgggatgagcggactggggaggcggcacggtgggccagctaccatctatcttccattgatgtggctg

SEQ ID NO: 595081 - DNA, 351 bp, Homo sapiens
taggccagggtggggcccccccaaatgggctcaggaagccccagggtgccctcagagaaaagccctccctttcagttgccaaaagctgcatcaggggaatgcggcaaggcacacagggttttggcagcccctggggattgggcgctgcccctgggaggggaaagcctggccagggctggtgttgggcccggagcagcattttccggtgctatcctcccctcccccccctcacagctcaagccaagtccagcggccgcagttttcccctttccccactccctttttatttggggtttttacttttgcctgggtttgctctttagccaataaaccgtccttgtgtgggagtca

SEQ ID NO: 595082 - DNA, 146 bp, Homo sapiens
ctagttatccaaatggtacttatataccggagtcagtaagttcacaatcatgggagattattccgacgcctggtctgatatgaatctagcacttcagggtgacctgaaaaatcagaatagatgtaggaatagaatggggtcacctc

SEQ ID NO: 595083 - DNA, 529 bp, Homo sapiens
atgtatgggcagcgggagataatgcctgccctgttgatggacatgtcgagcgcagcacaagccctcgatagcttaccaaaaggcactcaggtgattgctagaaaccaagtacgccttgcagaagtctggatggatgaatacaaggaaatcttttataggagaaatacagatgcagcaaaaattgttaaacaaaaagcattcggtgatctttcaaaaagatttgacataacaacaccgccttcagtgtacaaattttacatggtatctagaacaacatttatccagaggtgtatgtgccagaccttaatcctgttatatctagatacattaaaaagcgttggtcagcctctatgtctggatgttggagaaaacaatcaaggaggcaaaccattaattatgtatacatatcatggacttgggggaaaccagtactttgaatactctgctcaacatgaaattcggcacaatatccagaaggcattatgtctacatgctgctcaagggtctcgttccagctaaaggcatgtac

SEQ ID NO: 595084 - DNA, 220 bp, Homo sapiens
ggtgtacacgtaataccatcatccttgccctttagtggaggattttatattttgatgtaccgtgtgtcgcggctgaagactgtgtcgtaacactcgcacagtgtatagagaaagtaatattgaccataggaacaatgttttaaagtaatccgttgaatattttcatgaaaatccaggttgattttgcctgagcataagtaggtcttcatcaataacctct

SEQ ID NO: 595085 - DNA, 508 bp, Homo sapiens
tagggaaatatctatgttgaggctgtcctcagtgctgatcctcgtcggggggaagtaggtcaggaacttgttcatgaggtcgaagccttggtctgagagcagagccccgaagcgcttggggaggtggttgtaggggtgctcgctgaaggtcatcttcttgagtggtgggagctcgctgtagccgggccagattttctcactaggggtccccagatccttgaacaccttgtggatcggatcgatttctgacttcccggggaacagaggcttctgagtcagcagctccccgaagatgcaagccagggaccatatgtccacggccgtggagtattccttggcaccaagcagcagctctggggcgcggaaccacagggtcaccacgagcggggtgtaggccttcagaggggatccgtactcccgcgccagaccgaagtcacccaccttgaggatgccggcgtggctcagaagcaggtgggacgtcttgaggtcacggtgcaggatccagttg

SEQ ID NO: 595086 - DNA, 316 bp, Homo sapiens
ggtaatgatatagttgtgttagaaataactccggccaggaggtggctcatgtctgtagtcccagcactttgggagactgaagtgggctgatcgcttgaggtcaggagttcaagaccagcctggcaacatggtgaacccctctctctactaaaaatacaaaaattggttgagcgtggtggcgggcgcctatcatcccagctactcgggaggctgaggcaggagaatcacttgaacctgggaagtggaggttgcattgagcccaagaattgtgcccacttgcattccaagccttgggttacaagagtgagactgtccc

SEQ ID NO: 595087 - DNA, 294 bp, Homo sapiens
ccgcattccagtcgcagggcctgccccatccacatgcaccactgcccactcccaggtgcaggtggcgcatggctggcatgcaggccccccatcgcatgtgttcccagccagccgcacgggcaggtgtgcctggcgcagccgccgtggccagggccccatgtttctcagcagggccctgtcccccagccctgggcctgtcccatcctctgccattgctatgttcctgcttggtgggcatcctcgtcagcagtctgcaccatgccaggccatgccacagcttgtgacacatggcct

SEQ ID NO: 595088 - DNA, 1022 bp, Homo sapiens
ttatgaaaatcatttagttgacaaggtgcctatgccatgttaaattttctttaagtaatttaacaacagattggctaatttaaaataataaatgaaaaaaaaaatcttaccagcagttggtaaaggtctggaagtcacagttttgggcattcctttagttcaggtctctgtcgtcgtccaacgtacacttaaattttggtgccgagcagggagtataaccggcagttaagtgaaaagaaaatccagcgcctccccctccaaaaaaaataatagaaaataaactttctattttttataatagtttagtgggttcgttatttaagaaccttgttcaaagggggtctttgtttaacctgttgtgatattaccctgtgtgtccaagttcagacgaacggaacattcatccgccttttgggaatagctgtggttaaggctggttgttggccacctccgtcggccggagtaatgtgtcacagctatcagaacagtggcttcatcagaaatggtgcataaatctttgcaccaacactcttgggcgggtccggcatggtgtgaaataccttttagtaagtttcactgactcccaagggtactttgatgtagggcttcggaaacatcaacatttcggacaatgccctccccaaagtggtcatacaggttcttatggagggcccgatggaattgctggtagcgttttgaattagaagagttctggggccctagattcggggggcatacaagtgttgaagccgtctccaagacatgagaagtggtggacgctttctttcgtttaacactctttatactttgcatatagaccaatgtgccctgggttggtaacacagattgggcatacatggggaggaagaacgtgctctagcgggccaagggggaatttaagcctacgcgtgggtgagagttgcgtttcccagacgactgggtcctaaccagcaggttcggctcagacgaggaggaggggataaaacccaggcagggcgaaagactatagaggcgtgatcaat

SEQ ID NO: 595089 - DNA, 955 bp, Homo sapiens
gtccaaggcaggcggtcaactgcgacgcgccaccgtagagagaccacccggtagtggaaggcccgctggctgctacaacttcaggaacctggaaaagggccacccctgctacgcgccaggcatcatgaaaatgcggtgatgagtgggcatggtggcgtgacctggtgaacgggagggacaatgcagatgatgacctgctggctcgctcctggcggagacggaccggtgggcccagggctggctggtgttactggctccgccacgtctagtggaaggacggtagtagggagggaaagactcaagataccaaagacgggaggctctttccttccttcccaaacctgcctaccgcttctctaggccctggctggctccagagcactttattcttctgattcgtgcgggctgggcggggcacacaggggtggaggttgagcctggtctccatccaggcactagcatttcagccattctcgagcaaacatgtctggaggtgcccggaatggccaagggcaactgcaaaaggtagaatgcgcggtgcccttgcacgatggctcccaagagtgggcgagcagagaaggggagtggcctggaggcgcgaggcatgtacaggtagcaggggatcccgtgctgacagaccgtgacacctcccaggaacactttgcgccagcctgggacgaagattcacccacggagcatcggaatgcaggaacaagacggccacactcccatcacgggatgcacttcatacgatacgtgaacagtgccgaacttacggtaggcacccgtggcccaaggcaaagataggaagcttctggacgcaggaattgcccggagcttacttcggcaatggggcatcatacgtgcgagcgtatatcctagtacagacgggcgaggacacccagggtcctcgaatgttgatgtgcacgacactacggaatagcggttaataccc

SEQ ID NO: 595090 - DNA, 194 bp, Homo sapiens
ggcacgagattttattagtgcttgagagaatcttaattgtaggattgggttcaacctcacacaaggaaaaggattttttaccacttttttttatataggatataagggtgaaggaaccccctttaggtccttgaaatatgtggtacattaatatgccttgtttaattcacagaaatttcccaaaccttgtacta

SEQ ID NO: 595091 - DNA, 165 bp, Homo sapiens
  misc_feature (15)..(15): n is a, c, g, or t
aagaaacccgagacnccaactaatcccagaacagctaaaaccaataaagaaccaaaacttcacgaccactttcctgaggaccctgctgagtgctcatgacaccaatactgacaattgtagcggtaatacatacaatgatttaataagcctatgctactggacaca

SEQ ID NO: 595092 - DNA, 342 bp, Homo sapiens
  misc_feature (2)..(2): n is a, c, g, or t
cntgagacgacttgagactggcatgtctagagatgtgcatccctggggcctggtggtgggcggtgtgtccagtggtcagtgagagtgagggcagtggttactgtttgggataatcaagaatggcactagaacgaatatgtgctaacataacaattatcataaagtgaaaagaaaatagaaaagggaccatcaacagaggtggatgacaaccaggggtccatggggaatacgagggagaatgattatatataagcagatgaaaaatgaaacaaatcagacagaggtcttgtccaggacatctgagcagacattgtcccttgtccaaggtcttcatcttgcagg

SEQ ID NO: 595093 - DNA, 161 bp, Homo sapiens
atctacaggctccggaataactcctcatattgtgactaagactccggataatctagaaccattgggatacataagtctgatctgagctatgcatatcgattggtttcctatggtttgaatcgtgtgagcacaccagtatattctaacaggtaggaactagg

SEQ ID NO: 595094 - DNA, 130 bp, Homo sapiens
gggttgttgggatgtggctcactaaatttgcatgcatgaatgtgcaatttcaaacagcatttttgctcacttcacagtgtttttcatttgtttgcattcctcaaccaagcacaccctgtgtacctgagct

SEQ ID NO: 595095 - DNA, 884 bp, Homo sapiens
tgcaccacgctctggtctcaggtcgcatagtgtgggagcaatgtgtggcgccgttgggtgacatacacggtgtctcaaggaggtttcctcttgggttcccccaggaaggcacccgcttccgttggtcgtccggtgccctgcccgccgctttagaggtcgcgcctccgacacgttcctacgaggtggggccttcccccgccgcaccatgctacaaaccccgcgtcgcaccccggtagtgggccgtactcctacccgtaggtccaatagtgtgaccgacttcttccgtcgcatgggcagccacgttgtgacgagcccccttctggcgatgcatgttgtaccgcccctcctcttttccccgggtaattttccccccaattttcaagactccccctcgagcatatgccccctaatatctctttatgtcttacgctcacccccacggtagtctgatctcttggtgatggatgtagaacaagaaaacaacatggtaacctgtgtttttttcgtggtaattgatgcccaatgaatatccctcctgcgcgcagcgttcaattttcatggattcaccacaccggcatcaccacccggtcttattggagaaaaaccttttatcttatgccgtctctgataaaataaatagcatgtaatcccacaagatgatttttatagttatacagccacccacccacaaaataggagtgccaacaacaggtatcccccctatgcaatcactcctgttgttttcatcatgcccctttctcttttgagagaaagcctgagacattttggtcccccttctccccacaacccctatattttcccctaatgcgcggccctagttttaaactttttcccttcttggagaaaaagccccccacaaaaca

SEQ ID NO: 595096 - DNA, 886 bp, Homo sapiens
ccgagctcatgatttatttgcctcttctgcagtagctttaccgtgtgaactagttgacagccctgtgccctttgttgaccactttttgggcccaaagatgccacgggttctctttctaaaagcccttgtgattccggcgcgtgtgccaaaagctctcccgtcaaaaattcctaattagcccgttgataccccctgcgtaatcggcgctccccacaatagcgttcacgcggtatttccttgtaaaacgccgccccccaatttttgggccgaggatctctctctcccgagatgcccgcaacacctcgtcacccgcgtatacctctccgaccggggttgtcccccccatttcgacgggcccagctactggtcggaaaaagttccccgcaccctgtttttaggagatctgggtcccccgacgaacgccccttttggggaccactttactacgggtccccgcaatagttttgacccgttgttagaccacttacaacagtggtgtggggaaatgatactaatctcggcgtgaccaccctttgcgccatgtaaaggtatcgccccctaattagggacacagcatagtaaaaaggtgctgacccggtaccccacccgttgatcatttttactgcggtccccatttcagacggcgaaacaattttgatagtataataaagacattcatttggagggccacgcagagcatctcgggaatatacgtctaaaccgtgtggtccctcaatagattccccggggggtcctggtttcccctctcgtcctagtggggaatacacaatcccactttgtatgcgagatatcatcatggccccccaagggagataaattggcaaaacgtttcccaaaataaaagtaaaaacccaaccacaataac

SEQ ID NO: 595097 - DNA, 262 bp, Homo sapiens
  misc_feature (172)..(172): n is a, c, g, or t
cccgatggctgctatcaggagagagtcaaaaggcagcttgccagaagaataatgaggacatctaggagatgggtctgaggaggggcaaagaaacctcacagcatccaggaaagtgacttcagagagacactcccatcagatgagcagaaactgcctaatgaactcgtatgtntgtatgggaggcactgtggtggtggccaggcagagcatccttactccacattgagtccctgccagtttatagacatttacctgttaggtc

SEQ ID NO: 595098 - DNA, 929 bp, Homo sapiens
ggcctgtcctgacaggaaggtggtgcatctacgtggagtgtggacatgtttgtgcctccactgttgatactgctggctgcaatgtacctgcaccctgtgacctctcatgggtgaactctgttcaacccctgtgtgggactgaatgatgcccttcgacttccccaatggtggtgcttgcccacgctggcttcacttctgcattgcagcctttgagtgagtgtggggtaaattcgtcagtggcaccggatcctgcctgtctctgccatccgctccggataccactacgtctgcctgctggaacgaggccaaccaacctgctgtgcctgccggccctgctcatctacaccgaagcctcggactacattcctgacgaccaccaggactatgctggaggccctgatcaaccccattaagcacgtcagcctgatggaccagagggcccggcagctggcctgccctcattggggagagtgaggctcaggctggccaagagacgtgccaggacacccagtactcgagcaggctgggaggtactcaggctgtccttcaaaatcgtccaagcccccctgccccgcatgtaccacactcaccgccgaaccgacttccctcacccccacatacgctctcaccgctccatctctcctactctaccacttcacccccacgcccctactgctttctcctctctacccccacacacccacccgcctccccccttacccacaacccccccttctctcccgtcccccctcatattaccaatccttccccctccccctccacataacaccctactccccaccccccccctacatccccactctctcccccaccctccccccctctcctttctcccctcccacccacatcattctcccccaccctctctatcccacaccctacacacctctcacaccaacctccctacc

SEQ ID NO: 595099 - DNA, 313 bp, Homo sapiens
tgaaagttgttcaaagccaaaataagtttagatatcaaaatcattccagctctgcttttatctatactggatttggtagaaaactaatttgaaagagaatttaattttcttaaaattccatatatatatatatatatatatatatatatatatatatatatatatataaatataaatatatatatatatatatatataaaaatatatatatatatataattgtctttaattgtattcaggatttattttaataataaccgatttggaccattttgaacattccctgtgttaaaattcatatgacttcctttta

SEQ ID NO: 595100 - DNA, 131 bp, Homo sapiens
tcccccatcgatggggttcctggaaggtggaagcctccctgtttttactcccttgcccagtcttcccccacggcgcgtggattacctactcgcattagttgactcccataatctgtcttgtaaatctatgt

SEQ ID NO: 595101 - DNA, 825 bp, Homo sapiens
gagagtcttcctctgtcaccaggctgcagtgcagtggcatgatctcggctcgctgctaactccgcctcctgggctcaagcgattctcctgccttggcctcccgagtggctgtgattcctggtgcacaccaccacacccagctaagtttgtatttttggtagaggtggggtttcgccatgttggccgggatggtctcgatctcttggcctcccaaattgctggaattacaggtgtgagctgctgcgcccagccttctattttattttattttattttttgagacacggttttgctcttgttgcccgggctggagtgcagtggcgtgatctcggctcgctgcaatctctgcctcccgggttcgggcggtttttctgcctcggctcccgagtagctgggaattgcaggcatgcaccactagacttggctaatttgtattttggtagagatggggtttctctatgttggtcaggccggtctcgatcttctgacctcaaagtgatcctcccgcttgttctcccaaaattaacttgttatcaggtatatcgttgcaaaatatttctatcctgtagagttttagaaatttgttctcttgctgtgaagaagcagtttacttgatacaatcccacttgtggtattcaccggtcgtgcttagctgttgatggcatatcaaaacattcattgccaggaacagtatccaaggttttaccatatgttcgtcaggagtctaaggttaggctacgtgtagtctcccatttgcgtcacttggggatagggaaacgccaagcgtacacttgccgggcaaggtgcggcctgttcccagctcgg

SEQ ID NO: 595102 - DNA, 150 bp, Homo sapiens
atgattgagataacatattccttacacacattggaaacatatcaatataggcagctaaatatgtgttaaagttacagcggaatacatatagaggatatatagggagcaaaatcaaattatgttctgctctcagagttcataaaaccccca

SEQ ID NO: 595103 - DNA, 400 bp, Homo sapiens
acccagcccaaattggaaaatggcccccttccatgcaagccacattggaaaaggaaagcattttggtttttcaaaatttaacgctgtgccttggcagggcacaataaccttgttgaaatcccacctgtcagaacgcctaggggtttgtaccgggttggcttgggcctataactttttaggaaaccctcccccccccttgtattccacccttggattgggggcccctcccttgggaaaggtttccccatgggcctgccccaggagacagacaaaaaaggcagcagggggccttttttgttaagaaaggggtttggccctccctccttcttttttgtttttaaaagcccggggggggggggaaaacccccccccctcctgcaataaaataggagcttgggca

SEQ ID NO: 595104 - DNA, 633 bp, Homo sapiens
aatttgtggtgattctgaaaataagacaacaataaagtttggtacattgattgactctttgacaaaagatttctctgtagttcgtatggctatttgacagcattttactcgcagtagaacttctttcaaaattggagtcagtcatctcaaacttggcttctgctttatcaactaagtttatggaatgttctaaatcctttgttgtgattttgacgatgttcacaacatcttcaccagaagtagattccatctcaagtatccactttcttttctcatccatgagaaataactcctcgtctgttcaagtttgatcatgacattgaagcaattcagccaccacttctaattcttttgttgcttccaccacatctgcagttacttcttctactgaatccttaaacctctcgaagtcatccgtaagagtcaaaatcaatttctttcaaactcctgttgatactgacatttggactccctctcatgagtcaaaaatgttcttaatagcatctagagaggggattccattcccgaagacttttaatttacttttgacggatctatcagatgagtcacttttttttacaccttacagccttattaaaggttcttatttaagtaataagaacttgaatgtaa

SEQ ID NO: 595105 - DNA, 730 bp, Homo sapiens
tctccctgtccccctcccatgtctgtaatggcccccccccggagttaccgctgaatgggaatatactccccctttagcttccctattcccccattttcccctttttgctgacagagaatctttttaaacagacccttaactgtgctatctcacgtttgtgtccgtacatctttgtggaccccccaaaaaatactcccaacacggggggggacccacccccacagcgatgttccacgccgtgctatacccgttctggttgcaccctctcaacgcttcccctttgcatccctcattaacagaatctttcgctctttttctgcgttacacacaatgtgttgctttttcctcacccccctccctgtagtctctcgctctgtttattatcgccactcttgaataagcccacttttatgtggtcctataaacgcttgctttctattaagacagtttatacctccgcgaattttgcccaaacacccaccacaaagcttttttttctcccctccagaacctacgaccccctttgttcgtgaacctaacactagctggtctcagcatgactactctttgctggcctcttgaaagagcacttatcaactttcacccgaattatacttctcccctctggaataataacagcctctactcgccatggttacatgttgttatctattggcaatcactttggtaccacacaccacgacccattttaaaaacgcacaacataaca

SEQ ID NO: 595106 - DNA, 164 bp, Homo sapiens
atgtcggcggaggtgagttcggtctgctggtcaggtcgaggagcttctgcttgatctcgtccttgttgggcaggtgactgatggcgtcgtccattttggtcttgtagtcggcctgcacggtcgggtctttgaacagttcgccaatctgctcctgcaccgccttg

SEQ ID NO: 595107 - DNA, 374 bp, Homo sapiens
agaatataaatggaaaacccctagaagaatacttgccttttcctttttcctaggtgcacattaattagaacaagattaaagggcatgggtcaggtgaggtggctcatacctgtaatccccagcactttgggaggctgaggcgggaggattgtttgaggcccaggagttcaagtccatcttgggcaacataatgacaccccccaaattaaaaaaaaaaatagccgggcatggtggcatgcactgagtccaagctacatgggggactgaggtaggagggttgcttgggcttaggaggtagaggctgcagtgagctatgattgtcccgctgcattcaagcctgcatgacagagcaagaatttgtctcaaaaaaaaaa

SEQ ID NO: 595108 - DNA, 153 bp, Homo sapiens
cggcccgaaatcctaatacgcaactcataacttaatggggcattattatgtcagtatttagaaacatatgcaggccttgtttgcttcttgaaatggcctcatcccaccatcccctccttctccaccacgttgagttagcggtttcggggtatg

SEQ ID NO: 595109 - DNA, 556 bp, Homo sapiens
  misc_feature (19)..(19): n is a, c, g, or t
  misc_feature (65)..(65): n is a, c, g, or t
  misc_feature (77)..(77): n is a, c, g, or t
  misc_feature (81)..(81): n is a, c, g, or t
  misc_feature (88)..(88): n is a, c, g, or t
  misc_feature (99)..(99): n is a, c, g, or t
  misc_feature (111)..(111): n is a, c, g, or t
  misc_feature (115)..(115): n is a, c, g, or t
  misc_feature (124)..(124): n is a, c, g, or t
  misc_feature (128)..(128): n is a, c, g, or t
  misc_feature (134)..(134): n is a, c, g, or t
  misc_feature (142)..(142): n is a, c, g, or t
  misc_feature (148)..(148): n is a, c, g, or t
  misc_feature (186)..(186): n is a, c, g, or t
  misc_feature (188)..(188): n is a, c, g, or t
  misc_feature (206)..(206): n is a, c, g, or t
  misc_feature (222)..(222): n is a, c, g, or t
  misc_feature (232)..(232): n is a, c, g, or t
  misc_feature (240)..(240): n is a, c, g, or t
  misc_feature (289)..(289): n is a, c, g, or t
  misc_feature (293)..(293): n is a, c, g, or t
  misc_feature (383)..(383): n is a, c, g, or t
  misc_feature (447)..(447): n is a, c, g, or t
  misc_feature (553)..(553): n is a, c, g, or t
tggggggaggatgatgganaatgctcccctatgtcttgtatgaaacaactcggagtaaagtgtgntggtaaatctgnaatncccatgntaaataaaaantgtagaggaaantaanatatatagntagntattgntaaaactnaaaatnagaccacgttcgataaagcttctttaaaaggaatatananatgtatttgtaaacacanacaaaaagggaaaacnaaaaaatatncaaaaatntatcaaggggatcaaggccgttaagaaacacacaggtaatctcccactnactnagctggggaatgatagaactacgtgaacacaccatacttcaatgctgcagagcatgcacgggagacacaatgaggccccctccttggganagttgagaaaggcaggaggaagggcaaaggaagtgaggctgggcgggaaagcttgagcccaganacccaggtgaaagagcaacatctatctgttgcttcctttcttaaaaatgaagtggagaaaatactgaagatttgtggacaactaacagtcaagacatgtttctgtnaaa

SEQ ID NO: 595110 - DNA, 226 bp, Homo sapiens
ctttgtacagtacgccatctcactgaacacgcagggaatcagtggcgtaggttgggacagtgactgaaatcagcgcaacttatattcctaggagggcttagctacaaatgccctgacatgactttgtccataggttgcattgagtcatggctaggtacccacctaccattggcgcatgctgactccactggcagtcgtgcgtgcttctctccagctgcgtgtcctc

SEQ ID NO: 595111 - DNA, 499 bp, Homo sapiens
gagtgttagtttccaaatatggaggattttttcagagatctttctgttattgatttctaattgaattctattgtgggcatataattactttgtatttaaaatatatgaaaactttttaattaccaaatattgtttatgttggtaagtattttgtgtgtattttaaataaatgcatattctgctatttttgcttagagtgttctataaatatcaaccagatcaaattgatggatagtattgttcaagtcttttgtaaaagccttacagattttccatctacatgtattatcagatattgaaaatagggttttgaaatctctgactgttatagtggacatttctattccaccttgcagttcttttttttttttcatcatatactttgaaattctgtcttaagtacatacacatttagagttgttatgcaatcttgatgaatgtactttattattattatgaaatgacctttatctatgacaatattcttcattttgaagtc

SEQ ID NO: 595112 - DNA, 382 bp, Homo sapiens
taggtcgcacctaacgtacgtcggaagaatactacccgacttagggtgattatctagactatactttttgagatgcagctttcgcacttgttgcccaggctggagagcaactggtgcgactctaggctcactgcaaaattcgcctccgaggttcaagcgattccccgtgtcctcaaactcccaagcagctgtgatcacaagcatgcaccaccacaaccggctaaccctgcacttctcgtagagacggggcctctccatgttgcccaggctgatctcgaactcccaacctcaggtgatccacccacctttgcctcccaatgtgatgggaccacaggcgcgagccaccacgcccagcacaggatgatttatcttagccagatgg

SEQ ID NO: 595113 - DNA, 165 bp, Homo sapiens
gatcgagctcggtaccatggagaccaggctgagggtatgtgcactgcgctacagccgggccgcagcgcatctcagggcaggtggcaagatcctcactttcgaccagctggccctggactcccctaagggctgtggcactgtcctgctctccggtcctcgcaaggg

SEQ ID NO: 595114 - DNA, 432 bp, Homo sapiens
agacataatcccaggctggctgcagactgacaatataagaagctctattttcgctatcatgggttccttggggcacaccaagagtctaccaaggcatactttttcaggcgcctattatataaaaatgcttggcttaacatcacggtgaacaataccaaactgatgaatgcgtttcaaagcttggaacagattaagcatatattcccgtacttcttgaaaggaaagagaattcagaatgtccaaaaacgactcatgctccagatatggcatagcaataactacatgatcattcttcctaaagcagtatttaactcccatgacattatcttgccccccagccactgttaggcactgaagttcagctgcaattcttataggatgacttgttggaatcaagtgttttagagcaattttctcttcaggtcctacttg

SEQ ID NO: 595115 - DNA, 295 bp, Homo sapiens
gcccaaacccactccaccttactaccagacaaccttagccaaaccatttacccaaataaaggataagccgtaaaaatttaaaccttggcgaattatgataagtgaccccataggaaagtatgaataatttataaaccacggatgattattagaagggtataccccataactcttgaagaatgaagttatactagagataacgtttgcacgagagagcccgccaaagttaaaactcgcgataatacgagatgcgtctttatgcaaggagacagtcgactgaaaacagacaaacgct

SEQ ID NO: 595116 - DNA, 451 bp, Homo sapiens
tatctagagatccccggcgcacagcttctcagctatgtgtcttccgccggaaagatattaacaccactgaccagcaatatcactgtgctagtgacatgggctcaggcatgaaccgtatgcaccattgtgaactaccagatggtgaagactaaggaagctgggatgcagccagagctgcagatccggggagtaggatttgaccgtaccctggggggcctgtcagattgagctccggcttcgagaacgtcctgtctgggcttctcaatgagcagcgtcaatggtcatagagcctaggatggtgctggggaaaccccgcgtgccctggccaagctgtgtgcgttaggcctgcgtcggtttcccaggcgttctctgggcctatgctgatcgcgttggccatattgaaggcctgatgggtgatgtggacttcaaggctccagttcccggtgtggca

SEQ ID NO: 595117 - DNA, 651 bp, Homo sapiens
ttgaaatgtgttggaaacgtcattatgagatctgccttaccgaaactgtcgattattacgtaacgcatggcggaagcccacctatagcagcataaagtgcctgcgacgtctcagtctgtttagcgagtggaaacacagtaagaaacactgacctggtttgacattaaggattttgggtctggaggactcaggagaggaaagtgctggggctgcttcccagtgtcaccactggtgttgggaaccctgcatgtaaacatggtcggactcaatcctcaactgctggcagtcagccttctcaaccatacctcagggccaagtggaactaaacattttagctttttcaacactccaaacctacgcgggcataaactcgagaatcttctgccatttacttagtttttctattcagacttctgagtttctcatacatacattggttggttttcctcccaattcagaaagggtaactgggtaggtttcacatgtatctttccaacatgtcacgaaaggctggattaaagatgtgagacgcgtgatattcatcctaatgcagctaagtgtatggacaagggccacttggcctttcttcagaagatgaggttcaacagaaggagaagaacagctgtgctagtgtcagcactgggcatgcag

SEQ ID NO: 595118 - DNA, 631 bp, Homo sapiens
  misc_feature (273)..(273): n is a, c, g, or t
cccacggggtgtccaccgtggagaccccacgctgggggcgcccacgtggcacaacggttctcgccgcccctgtggggtcctcgcgcccctactgcgacacgcggtgtccccccgtgtcgcgctcacgcgcacgagtgggcgcgcgcctcagccgccggtggcgcacacacgcgcgcgcgtcgaccccctggcatggtcccgtcccacaccgagcgtgcacagccagagagatttcgcaagaggcccccacacccggtgcgcccagacgtctcncggagcctcaggacacacacaccagacgccagatggccacagagccccacaccggggcattctctccgatggacccatgagtgcgctctcttccgcggagagaccttttccctgcccacgcccaccgcacgcacacaccgcggagagaagacctgaactgtctctcttggctgcatcttcccgaccctggcccagagagggctttttctgtgggatgggccctgggcacgcggccctttcctcgtcacgtgccggcccacccaccagcaggccccccaccccccggcagcccggcagaggacgggaggagacccgtcccccaccccgccgtacccagaaataaaggcttcttgtgctt

SEQ ID NO: 595119 - DNA, 1018 bp, Homo sapiens
  misc_feature (408)..(408): n is a, c, g, or t
  misc_feature (533)..(533): n is a, c, g, or t
  misc_feature (571)..(571): n is a, c, g, or t
  misc_feature (911)..(911): n is a, c, g, or t
  misc_feature (936)..(937): n is a, c, g, or t
cgggattataggatcctgtcgccctacaggcgcgatgccggcagcgccggggcgaggcccgaggtggccggggcccgtggaggcgccgccgtcgccgctttcctggttgctgtctccgggagtgctggggccctttgagccggctcgcgtgggagcctgcagcccggtgcggagaggaaggcggtcgggtgtgacagcggtccgtgttccgggtccttgcggcggtcggcgtgcgggtcgtgccggacagtcgccttgggcgacggttgagccggtcgtcgtaggggcgcgtgtgtccgtgtgtgtcctcccgttgcgtgacagttcttcattcttcctttctttcgtgctccctttggtgcgcccctgtggccgcagttcctgcgatgtgcggcccccgtagttcgntgttagagatcggtatgcgcgtgatgtgtcccttggtgctgcgatgcgtggccgggttcaaatacgacgggtgttggggggttcttcttatctttcgggcccgccactttcccgctttggaaggnttccgacccatattgtctttcttctcgcggatatcttncctatcttctcctttaaaagagagcgccctatagaggttgcacgaggcacgttgggcttggcattacgagggcctacgtgcgcgttggcttgtaatggcacttaaggtcggaaaagccggaggtttgttacgcgcccctttcggagtaccccgcctctacgttaagaaacctatttgcgcccggaatgctgcaatcctttctatcccgcgtgtagattaagcgacgagtgctttataagcgggcgacgacgatcgtgagacacgcgttaggttcatacagcttcgttatccccctgaacatttacgcccgagggcttcagttaagcagcaacggagggcntattgtggtgcgcagagtacggaannttttttcgccccgcaagtgcagccttacaagatactcccagttggttatatttggtatccgatccgccctttcgcccccga

SEQ ID NO: 595120 - DNA, 104 bp, Homo sapiens
ctagaggatccgttgaaaattagcgacggggagcagcacctgcactggaagaggttgaacagaagctggcatgctggccctgactctgactcctcccactagga

SEQ ID NO: 595121 - DNA, 1132 bp, Homo sapiens
ggctgctgtgcctgatgcctcccgtgccgtgcctggctggcctgcggggaacagtgcgtggctgctcggggtggctgctcgcgggtgtgcggggggagttccggttccggttctttgtgcggctgcatcggcggctccgggaagatggctggccgggcgggtttccagtctgtgtgctccaatgctggctgtgctgccggagcctcaggaggggcgggcgcggctgctgccttgggcccgggcggaactccggtggcctcctgtgcgaatgggcccggctccgggtcaaggggctgtaccgctccctcgatgcccggagcgtgctatcctgagaccaggtatgttgccagtgcagccgaatgacacctcgagggagcttccatgggaccccctggctatggggggaacccttcagtccgacctgggctgtgccagtcagggatggatcagtcccgcaaagagacctggccctcagcgagattccagcaggtccagcagcatagcggtccaaaatcgaaaccacaattgcacagaagcacagaagatggcttgacaaaattcttacctcaaaaggattcgtgaacttggtaccagaatcacaggcctatactggactctcttggcttttgacaaggaaactggaccagactatcatgaggaaacggctagatatccatgagggcttgaaacgtccccattaaggcaaaagaaggaagctggaagttattcagtactaacactttcaatcccggtaaggtcgatgctgaagattgggacaaggacacagtgagtccctgggacgcatcgggacacaagagcgtccttgaggattacgctgtgtcaaatatgtgtgcgaagaacaaggagggagtcctagttcagattaaagagtacagtagcgaaagaaccggtggcacgcgacatcgtatttgacaaacaaacactatgtggcaaaacggcaaagagccgcgaatacagaagaacagcaactagtaagaagggggagacagaaaaaacgaagcaagacaaagtagaggttagcgcgcagtatagttaacgaacacaaacatagtggagtcaagtacgaactagcacgacaattaaacaagaacatacgaagtatataggtagt

SEQ ID NO: 595122 - DNA, 959 bp, Homo sapiens
  misc_feature (96)..(96): n is a, c, g, or t
  misc_feature (98)..(98): n is a, c, g, or t
  misc_feature (170)..(170): n is a, c, g, or t
  misc_feature (175)..(175): n is a, c, g, or t
  misc_feature (199)..(199): n is a, c, g, or t
  misc_feature (201)..(201): n is a, c, g, or t
  misc_feature (204)..(204): n is a, c, g, or t
  misc_feature (208)..(208): n is a, c, g, or t
  misc_feature (215)..(215): n is a, c, g, or t
  misc_feature (217)..(217): n is a, c, g, or t
  misc_feature (226)..(226): n is a, c, g, or t
  misc_feature (241)..(241): n is a, c, g, or t
  misc_feature (246)..(246): n is a, c, g, or t
  misc_feature (257)..(257): n is a, c, g, or t
  misc_feature (288)..(288): n is a, c, g, or t
  misc_feature (290)..(291): n is a, c, g, or t
  misc_feature (293)..(293): n is a, c, g, or t
  misc_feature (296)..(296): n is a, c, g, or t
  misc_feature (298)..(298): n is a, c, g, or t
  misc_feature (300)..(300): n is a, c, g, or t
  misc_feature (303)..(305): n is a, c, g, or t
  misc_feature (307)..(307): n is a, c, g, or t
  misc_feature (319)..(319): n is a, c, g, or t
  misc_feature (323)..(323): n is a, c, g, or t
  misc_feature (381)..(381): n is a, c, g, or t
  misc_feature (950)..(950): n is a, c, g, or t
attggagttcccgagaagcatggctgagggaagcttcagcgtgcaatcggaaagctacagtgttgaagacatggatgagggtagcgacgaagtcgngngaggaagagatggttgaaggcaacgactatgaagaattcggtgcgtttggtggctatggcaccctcaccatnctttnacatccatatcctcagagccttcngnatnttgntgtccantnccttcgctntcttatcgaattatnccctntggaacttggnaaacccttgttcttgcccataccctttgttnanncnttncntnttnnntncggaaacacttnccantgatgacggctcgcccttttcttccaacgtagcccgcgccgcctgcctccaatccgtncggctcgggtccgctgccgccgctgtcccgtactcgtccttcagtcatggtggtcgctagctcaccggtgtggccacgccgcatgtctcatgtgagaggatacccagcccacgacctacgccgccgaggctcaggggcccacccctgagccaccccttgcttctccgcagacctcccagatgttagtcaccagtaagatggctgcccccgaggctccggctaacctccgcacagtcccagacaggctccccggcccaggaggctgctactgagggccctagtagcgcctgtgctttctctcaggctccgtgtgccagggaggtggacgccaaccggcccagcacagccttcctgggccagaatgatgtcttcgatttcactcagccggcaggtgtcagtggcatggccttcccgcgccccaagagacctgccccagcccaagaggctgccacagagggcccagtgctgcctctggtgtgcccagacgggacctggcagggaggtggcagcacccggccaagaccacaagtcggggaagcgctggcaaaatcggtgggtgagctcaaatnttgtgcaca

SEQ ID NO: 595123 - DNA, 1026 bp, Homo sapiens
taactagcgtagtcttcttctagagcctctctagtgaccatccgtcgctagtgatgtgatttcacgttccgactccatacatgcaatctcgtcactacatagagcctatctaggcaacataataggcatataccaatgattgagcgagtatagcaagaaacaaacggcacataccagggacccagcaacatatcagctgtttccgaaaatgggcattcagtactaatcgagtgattgaatacacttagtttcattgaccttcaagaacgatttttatgtctattgccagcgaattgttgtcttcgaaggccttttcacctacctcacaagtctgtagacgctcgcatagtcgcgctcccatattctgcagggagtgagcttgaggtcctgcaacctacgtgcaagtgccatcccctcggcgtatagatcccccttagaagcttctgaggtctttaacaacatgcgatacttacatccgcagtcaaaaggaggtttgcagaatacaacctagaggatctagtcgcgtagagtcctgaaagtaccaataatcaatcctgaaaacacagagtaagttcagtgctactgggattattctgaacaatattaaaccctgtgcgtctctattggtaacaccctctgtagcatatggttcaaagaatgtaccttggacgtgtacctcgttacagccaatttttacagactgggatcctaacggcgtccaagcatttccggccgctagcccaacaggcaattcccatagttgacttttcaactgctcagtgagttggcgacaaacgtttgcgcatcaacggtaatcttgcttccaatgccggccaacatcgtaatatgtgcagcaattcaacacgtccatatataggatcaactttgtgggttttcctaaaacccaggcggccaatgagtacttgccattatgggatcacccttttgtttcgacctaatatcgtgaatgtttcccactcgccttggatgagggggcttccaaccgaaggcaaacacctttaaacc

SEQ ID NO: 595124 - DNA, 111 bp, Homo sapiens
gagaatagtgttaatgtcattaaggagagaaggaagagaagtaagccgagggcgtctttgattgtgtagtggccccaggttgtgctggttgtgctgggtccggttgtgctg

SEQ ID NO: 595125 - DNA, 510 bp, Homo sapiens
acaaggacacctctttatggctgtaaaaaaaggggggtaacaagttcccgggacagtggagaagggacactatccctaaatccagagggaaaccagaaaaatttatagttatcaaacagaaggaaaggcgggggcagaaacagaagcgtgggcctataagaatcagaaaaattttcttccgtgctcataacccaagcccagaagtttcttggccccaagtttcaacgtgccaagaaataccaccctttcacccgcgacatccttccataagcataccaaaaatttcaacaagcgggtgcgagggtgcaaaatttcagggggggaagggggtgcagggaacgcaggggcgtggtgcccaagcccaggtgcccatcgtgctatacaccctgtgagaggataaccacagtgtgcctttcaccacttctgtgacacagctgtgaataccttccagggggaaggggccgggaacacagtgctcaggcgtgcgggcagccagcccacctcgtgact

SEQ ID NO: 595126 - DNA, 166 bp, Homo sapiens
agaaagggctgaggggtgctgctgaaatacataatcactgaagtggccccagataacatggctttggtatggcgggattacctaagagtaggagtaggcgatggggagggaattaggacagctagtgatatcatgactgtaaatgaaaggaagctgggaagtcctg

SEQ ID NO: 595127 - DNA, 759 bp, Homo sapiens
  misc_feature (242)..(242): n is a, c, g, or t
  misc_feature (271)..(272): n is a, c, g, or t
  misc_feature (280)..(280): n is a, c, g, or t
  misc_feature (307)..(307): n is a, c, g, or t
  misc_feature (317)..(317): n is a, c, g, or t
  misc_feature (392)..(392): n is a, c, g, or t
  misc_feature (430)..(430): n is a, c, g, or t
  misc_feature (434)..(435): n is a, c, g, or t
  misc_feature (468)..(468): n is a, c, g, or t
  misc_feature (476)..(476): n is a, c, g, or t
  misc_feature (485)..(485): n is a, c, g, or t
  misc_feature (509)..(509): n is a, c, g, or t
  misc_feature (519)..(519): n is a, c, g, or t
  misc_feature (594)..(594): n is a, c, g, or t
  misc_feature (596)..(596): n is a, c, g, or t
  misc_feature (623)..(624): n is a, c, g, or t
  misc_feature (627)..(627): n is a, c, g, or t
  misc_feature (648)..(648): n is a, c, g, or t
  misc_feature (660)..(660): n is a, c, g, or t
  misc_feature (666)..(666): n is a, c, g, or t
  misc_feature (671)..(672): n is a, c, g, or t
  misc_feature (684)..(684): n is a, c, g, or t
  misc_feature (687)..(688): n is a, c, g, or t
  misc_feature (702)..(702): n is a, c, g, or t
  misc_feature (704)..(704): n is a, c, g, or t
tgctaaggggctgttgaatacttggtgcagtgaagcgtttacccttggtttatgtgattatcatggcattcccgaaagaagaatgtatttatgtatggttgcagatcaaagagacagtgtggcataccaatgataatgcaacttcatgtgatgtgtggaggatacgggatacaggacatgcctaagatatgagccatatcgccccagcatttgcatgagcagtgtagcttcgtagtgaaaantctaaagaatccacagcagtgtggtagtnngagggaantaggagtacaaagaagttataccatgnagagtacttnatgtggctgtgatcagggaaaatacaagggtttacagatggtacccgagaactgaagagatgggagcaaaatttngtgtgggctttaacgtttgaaaagactgacctctccanttgnngtataatctgcttccagctgttgactttgaaantgatttanttgaatcangctgcaaagtaatagccctaccanttatgtctgngggatgaagatgaacctcgattccttgaagaagttgattaccagtgcagaaagtaatgatgagtagatatgagtngntgaaaatgtaggagattatgaaccttnntgntcagaagagacttctgatcgnattatcaagatnctactngagcnntgcactctgtanggnngataatgaatttgntnattccgaagttggacacggtcaacggcggcaaaacaagactggcggtggtcaaaa

SEQ ID NO: 595128 - DNA, 789 bp, Homo sapiens
ggcctccaaagtttagattaaaggaatacctttggggtgggcgtggccttttcttttttcccaaagtggtttaatatctggaatccagtgaagaaatttgggggtggtttctctctcttcaaaaggacccctcagggtctaactccaaagaaaatagagaaaaatgcctaaagcccttcgagaagggggagaaaagagaaccaaaaagggcagagggttctaaagctctaataaggaagaaagagggtttcaaaataggggccaagggtgctattagaccccaatgtcttggtgtccaacaatccttcctggcttctttgcttcctcccttttctttcattttgagacatgtattgggtgcctattgtataccaggtattgtgctaagggctttcatattctttatttatccttaatgaaacagtagtgtgaataaaggtgtgtagcaagaagaacttcccatgggatttgtgagaaaaagacagaatgactctaggtctgagcgtggtggctcacacctataattctagcactttggggaggctggggcaggaggatcacttgatcctaggagttcgagaccagcctgggcaacatagcaagacgctgtctctacaaaaaaaatttaaaaattaggtgagcatcatgatgcatgcctgtggtcccagctatttgaagggctaaggtggaaggatcacttgagcccgggaggtcaaggctgcggtgagccatgatcatgccaatgtactccagtccaggcaacagagtgagaccctgtctccaaaaaaa

SEQ ID NO: 595129 - DNA, 239 bp, Homo sapiens
  misc_feature (177)..(177): n is a, c, g, or t
actctagatggatccctcgaagaggaaggtggccacgttcagccctaactgaaacggtaaccagccctaggaagcccgaaggagcctcagtggtggcgtccgatgcgctgagagttgagggtgccccgcttcacctgcagaggggccgttcctgtgctcgaacccggcaccttccgnaaaatggcggctagcagagccagcgctaggcgggagtctccgcaggatcctctgtcctgtac

SEQ ID NO: 595130 - DNA, 772 bp, Homo sapiens
  misc_feature (44)..(44): n is a, c, g, or t
  misc_feature (61)..(61): n is a, c, g, or t
  misc_feature (70)..(70): n is a, c, g, or t
  misc_feature (78)..(78): n is a, c, g, or t
  misc_feature (88)..(88): n is a, c, g, or t
  misc_feature (93)..(93): n is a, c, g, or t
  misc_feature (95)..(95): n is a, c, g, or t
  misc_feature (111)..(111): n is a, c, g, or t
  misc_feature (122)..(122): n is a, c, g, or t
  misc_feature (126)..(126): n is a, c, g, or t
  misc_feature (160)..(160): n is a, c, g, or t
  misc_feature (168)..(168): n is a, c, g, or t
  misc_feature (172)..(172): n is a, c, g, or t
  misc_feature (177)..(177): n is a, c, g, or t
  misc_feature (186)..(186): n is a, c, g, or t
  misc_feature (193)..(193): n is a, c, g, or t
  misc_feature (204)..(204): n is a, c, g, or t
  misc_feature (233)..(233): n is a, c, g, or t
  misc_feature (242)..(242): n is a, c, g, or t
  misc_feature (304)..(304): n is a, c, g, or t
  misc_feature (364)..(364): n is a, c, g, or t
  misc_feature (441)..(441): n is a, c, g, or t
  misc_feature (443)..(443): n is a, c, g, or t
  misc_feature (453)..(453): n is a, c, g, or t
  misc_feature (542)..(542): n is a, c, g, or t
  misc_feature (600)..(600): n is a, c, g, or t
  misc_feature (675)..(675): n is a, c, g, or t
  misc_feature (702)..(702): n is a, c, g, or t
  misc_feature (767)..(767): n is a, c, g, or t
accagttcttcactcttcttggctggctcaggtaagctgttggnggccgtggagggctganaaataagcngcccaggntggctaagtngagangnattcatgctatccggncttccactganaggnccacggaccttgctctaggggaaaaaataaaaanaaattagnagcnaagtnatgaatcanattttgnattcacgccanagtattttcttaggagaaaactggctggntgcaaaaanacaaaactaaccctacagcctaccagttggaacccccacctgcgggtcaactggtgcttcanatctggcttcaaaagtgtttctgtatcaacggagactttagaggaaaggattctaaattnaaagagacctgggtgcctacattaatttgcaggcttttttattttcatcagctttactgattgattatgattgaaantnttgctctgangcctggactgaagtgcgatgtgcgatcttggctcactgcaacctccacctccggggtttaagcgattctcctgcctcagcttcccaagnagctgggattacaggtgtgtgccactacacccagctaatttttgtatttttagtaganacggtgtttcaccatattggccaggctggtctcgaactcctgacctcaggtgatctgcctcagcctcccaaagtnctgggattcatgatccactgcatccanccccttaatgaacttttacaagaaaagaacaggaaagtattcttactgttttccaggtagaaganagaca

SEQ ID NO: 595131 - DNA, 882 bp, Homo sapiens
agcggggtgattaagcttgctgctgcgtgacagcggagggctatgaaaatggcgcagtggggcccggagctgtcacccctgactcgactgcagcttccgattctcctggtgacgtgcgcctacaggaaccaccccagtggtcagctgccgcgctgttgctagtgcaacatgcgtgcgagctcagatcagcgtggcggtggagggagaacgtggagttttggaaggttcagtggtgctacagtggtgcacagtgcccactgactgcatgctgggactgagaccatgtactcgcgatcctggagccgctatctggggcagtggcagccctacggctatcgtcattcgagtgccatagcacagtggaggacttggctgatgaataagtttgctcgctcaacgaacgcgtgtgccactaagtgcgcgtgtggagatgacgtgccttcccgtagaccagtgccctgtccggggagacttaagtgctctgtcaggacactggagggacaactcaggtattgtggtacacactgacagtgcttgtgttccctaacacggatggagagctttgtggctgtgcctttgcacgttcattgctgtacggcatcttggccggagggttggtgctgcccattgccccagactggcccacgtaagccccgaggtcacagtgtctacagagcataccttggcagcactgcctgactcaacgcggtgtccgcctttcttgcacagtgccaagcaacgattttggtacattcgaggagccttgagaaccttgccaagccttgactctatctagcagccttcaagcgccagactcgaagattagctggacttgtggacctggggtccgagtcattgacacccagaacggcagcgcgacca

SEQ ID NO: 595132 - DNA, 586 bp, Homo sapiens
acatagtgatacgggtacggtacacttccgtgaagaacatgctagaccggattgttcgttgactggggtgctatacgtctgaccatagtgagtaactttgctaacgaatcaacactgctgagcgcaaggatgtcgtcactatactccctacgtaagggtactctgctaaagactatcgtgattatgtcagctgcattcatgaatgacattcgaattcagagaagattaccagtccagtagcgttatcatcttatacaagactgcaagaaggaagagaaggaggacgggccggaagcagaacaatatactgcttcgcatggaggctcttcaggcctaggcgtccacgcgcagactttatctgagagtagatctcgtggaccacctatagggtagaagtgcgtgatagctaaggggagcgtacggggagctgctgtccaaccatatcgaggtcgacctcgaggcctcaccaggtctggggcatgggggtatctatgagaatcgccttcgggcgcgtacctgtcttgtagattgtgcacctgtagtgcgtgtatttatccttccaagtagacatctaggggccctcgaa

SEQ ID NO: 595133 - DNA, 232 bp, Homo sapiens
  misc_feature (22)..(22): n is a, c, g, or t
  misc_feature (45)..(45): n is a, c, g, or t
  misc_feature (187)..(187): n is a, c, g, or t
  misc_feature (231)..(231): n is a, c, g, or t
ctcctaacctcagcctcccaantagctgggattacaggcacctgncaccatgcccggctaatttttgtaattttagtagagacagggtttcaccatgttgcccaggctggtttcgaactcctgacctcaggtgatccacccgcctcggcctcccaaagtgctgggattacaggcttgagccccgcgnccagccatcaaaatgctttttatttctgcatatgttgaatactnt

SEQ ID NO: 595134 - DNA, 108 bp, Homo sapiens
aaccatgtcgtgactggcacacccctgccggttcatcagggacaaacggcattgccgccgcctgaggcgccgccgtataaatcaaaccaaggggaattccattatgtt

SEQ ID NO: 595135 - DNA, 217 bp, Homo sapiens
attcacagcccctaacagaaaatagctccactaagtccaaactctacacactaggcttagagctgcaatcaccacatctgtacgcagcagtctgcgcccttacacaaaatgagctcaaaaacgactcgtagccttctccagttcaagtcacctaggactcataatagttacaatcggcaatcaagcaaccacacctagcatgcctgcacatctgtcc

SEQ ID NO: 595136 - DNA, 721 bp, Homo sapiens
  misc_feature (103)..(103): n is a, c, g, or t
ataccatgaagaggagctcagacagctcttaccacatgatacaagagccggctggtggaagagtggggaccagaaagagaatttgctgaagaggagaaggaanaaaaaaaacaccaaaaaaaaaattaaaaaattccacacacacaaaaaaacctgcgcgtgaggggggaggaaaagcagggccttttaaaaagggcaatcacaacaactttcggctgccaggatgccctttgcttggggctgagaggatttctgtgggcaagtggctgggatcatagtgagagagttcccccaccccaaggatcccgaaggggcgccaagcgcggggccccgaatggtccgctccgtgtgcgctggccgccctcccaaaggattgtacccaactctcagccagagatggtggaggccgtcaagaagcacatttttaaaccattgctgcccttgaacgaagagacccgattgtcacccagccggtacccaaggacggcgcttctgaacgcgatcagaaagcttcccgtgggccaaagctcggggacgcaccgggctcctgctggagcacagcaggctgccctggcccggagggcccgcctcttgccctgccctcctgccgcgcccctcggccactcctcacgtcgccgcctcgtgccgcccgacgaccctgcctcccagattccaggcagccgtgcccgcccgccgcccgtgcagctgccccctaagcccg

SEQ ID NO: 595137 - DNA, 214 bp, Homo sapiens
  misc_feature (90)..(90): n is a, c, g, or t
  misc_feature (107)..(107): n is a, c, g, or t
  misc_feature (176)..(176): n is a, c, g, or t
  misc_feature (189)..(189): n is a, c, g, or t
gaaaatacaaggattagccaggcgtggtggcatgcacctgtggtcccagctactcggaggcctgaaacgggagaatcgcttgggcccggnaggcggaggttgcagtnagcagagatggtatcacttcactccagtatgggcgacacagcgagactccatttaaaaaaaaagtaaantaaaattgaatgnaaaagatgcaaagactggaaagatt

SEQ ID NO: 595138 - DNA, 141 bp, Homo sapiens
aggtcgactctagcagagatcttactgacaaccacagcagcaacacggatagtaatgatagccattgctagcatctatggcaaagcttgctcagtgctaaattaattatgttacatcctactcaacaaccctaagaggtct

SEQ ID NO: 595139 - DNA, 209 bp, Homo sapiens
actttaaaggatccccaatcgtcaggctctagggctcagataaaggcccattgaaatggtcaacgtccatccgtgatcagccccatcgcctcggcccgcgtggccgggttgcgcataatcccgcgcaccgcggaggtcaccgtccggtcccccggcttgcggacccctctcatttccatgcacatgtgctcggcctcaacgaccacgat

SEQ ID NO: 595140 - DNA, 180 bp, Homo sapiens
accaccacaaaacaaatacttcccacgtctcaggagccaccccagtgtggtcgggggacctccagtgttaacagctggctgcaggggccacagcccatctgtagacacagacccctgctcctgagacaccagccccaggagagcctccgtctccagctgtggggggtgggtggagagcgg

SEQ ID NO: 595141 - DNA, 489 bp, Homo sapiens
  misc_feature (24)..(24): n is a, c, g, or t
  misc_feature (127)..(127): n is a, c, g, or t
  misc_feature (172)..(172): n is a, c, g, or t
  misc_feature (278)..(278): n is a, c, g, or t
  misc_feature (310)..(310): n is a, c, g, or t
  misc_feature (320)..(321): n is a, c, g, or t
  misc_feature (327)..(327): n is a, c, g, or t
  misc_feature (337)..(337): n is a, c, g, or t
  misc_feature (355)..(355): n is a, c, g, or t
  misc_feature (374)..(374): n is a, c, g, or t
  misc_feature (382)..(382): n is a, c, g, or t
  misc_feature (386)..(386): n is a, c, g, or t
tgtggggagcgggttgatgtccancctcagaacttctggaactgcttcttggtgccggcagccttggtgaccttgagcacgttgaagcgcactgtcttgctcagaggccggcactcgcccactgtcncgatgtcaccgatctggacgtccctgacgccgggggacaggtgtncagacatgttcttgtggcgcttctcgaagcggttgtacttgcggatgtagtgcagataggtctcggcggatgacaatggtcctctgcatcttcatcttggtcaccncgccagatagggtccgccctcggatgggcccntttcccgtgnnggggcntttcttgtcnatgtaggtgccctcaatngcctccttgggtgtcttgnagccccgnccgntgtcttgttgtccgcgggacttctccttgcccgtttctccccgccggcccctcttcttgttttgtagtatggtcggctgcttttggttggcacgctctgtctg

SEQ ID NO: 595142 - DNA, 325 bp, Homo sapiens
  misc_feature (242)..(242): n is a, c, g, or t
gtctccgcagccaccagcaccaacgactccttcgagatacggccggcccccaagccagttatggagaccatccccttgggggacctccaggcccgggcgctggccagcctccgcgcaaactctcgaaattctttcatggtcatccccaagagcaaggcctccggggctcctcctcctgaggggaggcagtccgtggagctgccaaagggagacctgggcccggcctccccgagccaggactncggatcccagccgtgctgaggggaaatggggtgcgcctgcctcggggaagagccctgggggaggttcgagcacatggggcagt

SEQ ID NO: 595143 - DNA, 175 bp, Homo sapiens
agatgctgaagacctgtgagcactacaggaggaaacgcgagacgtggtgagactagactccaggcacacaggcgaagaggcaagagggtaggacacgaagccacaaagctacttgggttcctccttcttctcgtaaggctttttctgcttctgctgcatgatctccgagtccctc

SEQ ID NO: 595144 - DNA, 401 bp, Homo sapiens
atattgttactttaagtcacaggaatctgtgttgaaatgactgtccctttatctagttcccatcagaaagtatttactgagttctctttggtggcatattactctactagattaacagaataaaataatgaagaataatcaacatattttctcctctataggcattaacggtttaatagttaagatagttatgtaaattcatccacgtaattttcaggatcctatgtgtactcactcttcccacgatttgttatctacttccgttccttccgctatcctggccaagctcccttcacacactttcacctttttgtcccacaaattcacaaatagcgtacattagttatgtgcagtttttttgtgtataaataagacctcattgaagctgggaacaatattaa

SEQ ID NO: 595145 - DNA, 125 bp, Homo sapiens
gttcatgtgaggggatggcggtgctggaagaggaagatctaggtggatggaaagtgaatatgtttccaaggatatccaatgtctcccacaagaaggttgttcttccactcgtgcagcgccgtcag

SEQ ID NO: 595146 - DNA, 406 bp, Homo sapiens
actggatatcagagcccagatgctccaggtctctagagaccacacgttggaatcactcagaatactgcctgaccaggcgggctctgtggtactgtctggggagtcaaaaaagccttcagtgcctggccgctgtggttcacacctttactcccagcacttggggaggccgaggatgggcggatatgtggtcaagagatagagaccactccgggccaatatggtgacacccccatctcgacctaaaagtacaaaaattagggccgggcgcggtggctcacgcctgtaatcccagcacttggggaggccgcggcgggcggatcacgaggtcaggagatcgagaccatcctggctaacacagtgaacccccgtctctactaaaaactacaaaaaaattagccgggcgtgg

SEQ ID NO: 595147 - DNA, 101 bp, Homo sapiens
aaacatctccgccttactcatttacgccaaccacccaactatctataaacctagccatggcccatccccttatgagcgggcgcagtgattataaggctttc

SEQ ID NO: 595148 - DNA, 444 bp, Homo sapiens
cagccatctgtgacacagaaaccctgggggaaaatctccataacagaacgtatagagcgaggcatcgatagacagcatcacgggtcagaggctactggaggctcaggcctgcacaggtggcatcatcaacccaaccacgggacagaagctgtaactttaggacgcagtatcacagggtgtgattgaacaagacatagccaccaggttagaagcctgctcagaaagccttcataggcttcgagggtgtagaaggggaagaagaagatgtcagcagcagaggcagtgaaagaaaaatggctcccgtatgaggctggccagcgcatcctggagttccagtacctcacgggaagtctagtagaaccggaagtgcatgggaggataagcaccgaagaagccattcggaaggggtaaatagatggccgtgccgcacagaggctggaagac

SEQ ID NO: 595149 - DNA, 381 bp, Homo sapiens
gcatgaaaagcaagcgggggccgcatggtgagatggctgaatggctacgcgtgtaacgagccattacccacctcaacaacaacttacatgtgtgggcagcagctgaatgtctgtgtctccaagcagccagccatcatgcctggtcagtcatacgggttggcagacgggtcttgcagttaccaagacttcagtgaatcccggaacaatcggttctccaccccagagcaggcagacaagaaccgcatacagaaccccagcaacgtgctgcacttacttcaacgccccgctgggggtgaccgaggacgaacttctttgagatctgcgatagagctgggagtgaagcggccatcttctgtgaaagtattctacaggctacaagtg

SEQ ID NO: 595150 - DNA, 436 bp, Homo sapiens
actccttgtaaagactgtagaagaaagcgcaacaatccatctctcaagtagtgtatcacagtagtagcttccaggtttccttaagggacaacatccttaagtcaaaagagagaagaggcaccactaaaagatcgcagtttgcctggtgcagtggctcacacctgtaatcccaacattttgggaacccaaggtgggtagatcacgagatcaagagatcaagaccatagtgaccaacattagtgaaaccccccatctcttactgaaaggtgcaaaaaattaagctggggtgtgttggcaacatgcctgtagtccccaggtaactgagaagggtgaggcaggaaaattgtttgaacccgggaggcaaagggtgcagtgtggttaagatcatgccaccacaatcccgcctgggggccaaagcgggattgggttaaaaaaa

SEQ ID NO: 595151 - DNA, 140 bp, Homo sapiens
ttcaccggcctgatcctgtcggtggcgccgatcgacatccaggtgcatgacacctattacgtggtggcccacttccactacgtgctggtggccggctcgctgttcgcgctgttcgccggcacctactactggctgcccaa

SEQ ID NO: 595152 - DNA, 317 bp, Homo sapiens
aaacgtcgtcatgtgtcatggcatctgtacatgtacatattggcagaacaaagcctgcactgaaatacagcaaaatttcagaggggttacttctgggtggtgggatactggttggtgatttttcatttcttcttaagttttactgtactcttcaaaatgtctaaaatacttctgagctctttttccaagcagagcaacagtaataaatatcattttgtaaaaaggctgagtgcattggcaggagactggacttcttatcctggtttgactaccacttgctattagaccacaggcttgtcaccttagatgtcgagagt

SEQ ID NO: 595153 - DNA, 262 bp, Homo sapiens
tggttggacactagtttggaatagaacgatagctattggggaggggaatcatatcggaatttaacatcataaacctacacatattgtagatgaataaaagattaattataaatacaaaaccataaaggtggaagaaaatatgaacattgagaggactttctaaagattaaagataggaagataccacaaaacaaactcaatatatttgactgcataaaattaagaacctctgtgctgtaaaacataaaatgccaaaagaaaa

SEQ ID NO: 595154 - DNA, 810 bp, Homo sapiens
ctgaggattagggagacacagatggagagaaacaaagaccttagaagctgaagggtgaatgctgggagtggatgcccagggagagagagtcctcagtgaaaaggccccagaggacctgaaggagaagaaggagaagtgtgtgatgtgagaatgtgcaatgcctggaaagagcgaaagaaagaatgtgtgtgtgatgtgctccatgtcccatttggtggtgatggtggggcaaggcatgcagccagcctgaggctactccctctcctggtccccacaggatggatgtgagaactggggctgatggagtgaagaagaagaaacttgcctgatgtgatggagagtgagtgaatgattgaatgggtggaagaagaagatgagtgaagaagaagaagagtgatgatgaatgggcccgcgctgaatgagatgctgcctgaaggagtgagtgatgaagcggatcccaaaccggagaaagacagaaaatggggcatcagtgcagttgaagaccccatgccaaagcataggcttggagagttgaggagggcctctactgaggcctgggagagttgagggtgttgggggagcagcaaaaggtccaagacaagtccattcaaccttgggttcccctgcgtcttggagaccctgacagcaaaaagattggcaacacactatattaacgtccccaagcacatctaaatttccagacatctacaggacagaatgggcacataccagcgttcaagtatgacagttagtccgactccagagcttgtcacgatataagtcttcaatggacccaatagtcgagataga

SEQ ID NO: 595155 - DNA, 216 bp, Homo sapiens
  misc_feature (113)..(113): n is a, c, g, or t
cccgaccgcctcgagggctgaatgacgcggggggccgtatacatgtaacctcacaattctgtaaaacacgatttcttgaaggtaaagtcatggggttttgcacgcattcccgntatatgctgtgtccccccctacaaggagcacttacgtcatagtgccagtcttccgtcctgtctaagcaccgcgcagtaacagacaacctcgcccgctggcgcc

SEQ ID NO: 595156 - DNA, 176 bp, Homo sapiens
aaaagggggtggccccttggggggggggggggacccccccccccccgttgccgccctttttaaagagcccctcccgggggttcccccttcccagggttcctttttttacccccccccctttggtttttttcccccggggtaattttcccccaaaaaaggggggggtttttttttta

SEQ ID NO: 595157 - DNA, 248 bp, Homo sapiens
cctttttaaggcagttccgttaagggtttttgtttttaaacttttttttgccatccatcctgggcaaaatgcggtgtaaaatatttgttttaaaattcaaggccccaaaaacaatgtttgggggaaaaaaaagaaaaaatcatgccagctaatcatgtcaagttccctgcctgtcagattgttgaaaaaacccttttgtaaataactttttttgagaaggaaataaaatcagggggaattgaccccta

SEQ ID NO: 595158 - DNA, 444 bp, Homo sapiens
gcgtcgattgtgcatagaatattatactgatattaacagtcacgtcctcttcaactttaatcagaattgctgaaagctactaaatatcaaatatgtctaaataaatccagttttattacttgcagacataaagaaactggaaataagccaagaagaagttgccccatgaaggccctcagcagtctggtttcaggaatggatcagaatgtgttctaggccgggcgcggtggctcacgcctgtaatcccagcactttgggaggcccaaggtgggcagatcacctgaggtcaggagttcgagaccagcctggccaacatggcaaaaccccgtctctactaaaaatacaaaaattagccaggcatggtggcgtgcgcctgtaatcccagctacttgggaggctgaggcaggagaatcttgaggaaggagaatctctaggaggcagtgg

SEQ ID NO: 595159 - DNA, 347 bp, Homo sapiens
atcaagacaaataagaagaccggaaaagcaatgataaatctaatacagcaaggacacaggacagcaaagggtggaggcaacagtgtcataagatgaccctccttcagctaaggcagccatggactggctggctggacaagaattccagggcaccttcattacagtgtccttggccactagaagacctgcattcatacacggcggtggacgtggaggtgggcggcgcggccgtggcggctatcgcggtcgtggcggctttcaagggacgacgtgacgaccccaaaagggggggatggggttggccctactccgtcctgcggaaatatgatcttggccgcaacggtcac

SEQ ID NO: 595160 - DNA, 396 bp, Homo sapiens
tgtacaccaatgcttgtagcaacatttattcataatagcccaaatgtccatcaacaggtgagtagataaacaaaatgtggtatatacatgcaatggaatattagccttaaaaaggaaggaaatcctggcacatgccaccacttggatgaagttgaaaacattatgctaagtgaaacaagtcagttacaaagggcaaatattgtataattccacttacatgagtacttagcgtagtcaaattcacagacacaaaaagtataacagtggtcccaggggctggtggaaggagagactggggacctattgtttaatgagtagagagttttaaggtgatggttgtagagcaatatgagtgtatttagagccactgagctatacacattaaaaacagaaaat

SEQ ID NO: 595161 - DNA, 798 bp, Homo sapiens
  misc_feature (135)..(135): n is a, c, g, or t
tctgttgggccccgtccgtattttcctcgggttcattcccccgccgcgtgggtggccccaggtcgtcgttcccggattgcgctgagtgtctgctgacgccctcgttgcccccccccgttcgctgcagggccctgngtttgcctcccacaaaccgcgggtaaacgtcccgtcggtccgcccccatagggccgctcactgtgctcgtccgtgcgccgctatctgaatccgcgatagtgtctcgccccagctttatgaagacaacggggtgtgttgttcttccgcccacagcggggcgatcccccaatctgcctgccactttgatgtcgtgagcaatatgcctctcccgcggggtgtctgccccccaagcatggatcattccacacgattcttctggccacatctggagcgaaacttcttctttagagaacaactagttcgtgaacccccacttgttctgctagacaatctttccactgctgtctatcgtccatctctgttgacaccattcaaattctgctcgtccccttcttataaattaccgcagttgatacattttccctcccccagtctgcaaaaaagtggtcacccgtgtctcgtccccagatgtcttgtcccagatgccctcttgtgtgtctttagagagttggaccccccccctctctctgggtgttacacatatggtttgggacgctcacataggacgtagatgtggcggtggtgccaaacaccagactgggtggggagaccccaataaacccagggcggatatcacccccagattttcatcaaacatgtacc

SEQ ID NO: 595162 - DNA, 125 bp, Homo sapiens
gggagttggaggctgcagtgagctatgatcgcaccactgcactccagcctgggttacagagcaagacgcccgcctcttaaaaataagtaaataaactggccgggcacggtagctcacgcctgtaa

SEQ ID NO: 595163 - DNA, 363 bp, Homo sapiens
gtcgagatacggaagaacacgatcgacagaaagttttcacaaaaggaatggcacaacacaacccaggacctaatcctcttatgagggtcaccaactggctaggaactctctggattacctccccacctctgtccttctatctgccctttacatattgaatcaggtctaaagaattagcactgccccttacaggggtagggatggggacaagctggagggggaatgtgagtcatcagaagctggctatgttttctaactggtagatggtcttcaaaccttttaagccacacaacccatcagtaaaaactgttagacaatgtacccctgaaatatatgtatttatttttaaattatttacatgta

SEQ ID NO: 595164 - DNA, 84 bp, Homo sapiens
gcctcggacaccgccatatattattgtgcgagaggttcgaagtccggtggtttcttgccatactatgactactggggccaggga

SEQ ID NO: 595165 - DNA, 237 bp, Homo sapiens
caggaggctaggaccccagtattgaggttgggtgcctgggaggaccccaccacctacagcccttcataccagctctgacgctagaagtccccttcctcctatttttggcaagccgtcccatgggtaaagggcaaatggggctaggtgctcttggcgggttccctggtcctcaactctaccacccatccgtctccccaagtggctggcagctagactaatgtacattccgtggatttc

SEQ ID NO: 595166 - DNA, 134 bp, Homo sapiens
tagccgtatatagactcaaaatctattctcaaaactaagcttttagtcatcgccatatgctttcagttacatcctgtttatctgaaatgttacttaaagtttagtttgtctctccgtacagataggctcctaga

SEQ ID NO: 595167 - DNA, 257 bp, Homo sapiens
  misc_feature (251)..(252): n is a, c, g, or t
gctccgggccttggaatccctacgcgtcccttttggtttagcacgatgagctcaatcggcactttggtatttccctttcagcctctacattctcttctgacggaagagtttttaaagtttaatattctattaaggcttttgaaaatagtagctatttgggattcagataacaaagattgggttgtcccttggggagaaaaattaggcctctaaactttattaaagaggggtccaacaaaagaccttttaanntttta

SEQ ID NO: 595168 - DNA, 128 bp, Homo sapiens
tgttgggattacaggcatgagccaccacacccagccaagagatacttcttgaatagttttattctgtaatctacttgaaatataagtgaactttttgtttatttggaatgcttttcttgggaatattt

SEQ ID NO: 595169 - DNA, 358 bp, Homo sapiens
acagagacatgaatacatgaacactcataccacttcatactcacagaatgacaccctgaatagccagggacacacatacgcaatccgtatccaccaatgaagatcactgcatgttgccccgatgctggcagaggagttgagacgcacactcatcgagttgctcctcacagataactcccagatatagcccagggggcactgacagtaatgcgtgttgccagacattgatgcagacacctgagtgctggcacaagtgtacaacaagcacacctctcctggaggctgctatgtcacaagagacatagggcacgtcacaataggcaccagcccatccagatggaggcacccgcgaagtaga

SEQ ID NO: 595170 - DNA, 470 bp, Homo sapiens
  misc_feature (96)..(96): n is a, c, g, or t
  misc_feature (147)..(147): n is a, c, g, or t
  misc_feature (154)..(154): n is a, c, g, or t
  misc_feature (161)..(161): n is a, c, g, or t
  misc_feature (177)..(177): n is a, c, g, or t
  misc_feature (184)..(184): n is a, c, g, or t
  misc_feature (191)..(191): n is a, c, g, or t
  misc_feature (256)..(256): n is a, c, g, or t
  misc_feature (276)..(276): n is a, c, g, or t
  misc_feature (278)..(279): n is a, c, g, or t
  misc_feature (311)..(311): n is a, c, g, or t
  misc_feature (314)..(314): n is a, c, g, or t
  misc_feature (320)..(320): n is a, c, g, or t
  misc_feature (323)..(323): n is a, c, g, or t
agcgggttcaagggggtacggaaaagccggggaggggactcggtccggggccggagaccgacggcaacagcggctcaggacccacgctgcccccancctcccgagcaggcgcccccatggccgacccgctgattccttcactcggcnatgctcncgctggnccctgcggctgctttnggacacngagcccncccagggggagtcagtactgagcagcttccgaagccgggaccccgaagagggtgggggcccaggnggcctggtcgtgggcggggngnnaggaggaagaggaggaggaagaagaagaggcnccntgtgtncgnctgggatgaggaggaggatggtggcgtgttaccggccacaagccgacaaggatcgacctcttgatcccttggtccctatgactccacccacgttccatcccgagcggcctccgaccatggcacgctggaaggccctggctcaacgac

SEQ ID NO: 595171 - DNA, 1554 bp, Homo sapiens
  misc_feature (1041)..(1041): n is a, c, g, or t
gttctggttgtgtgcttggttgtgtctcttggcaccctattgggtgctcttctctcttttttttgctcccgcccagcgtttgtgtggcccccctccttttgtgtgtggtatctcatctgctggtttcccagggtggtggcccccccccttttttggggggctcccctcttggcttgtttcttctcgacgctccttctgtgtgccactatgtttgtccctctgccgggaccacctttttccaccgtgttgttctacctgtggccctcttggttttccccccccttttccccgtggtgtttcgtgtgttgttgtttcacccggggggtgtcgtcgctcttacagattctccgttgggtgacctcgggttttgctccccccaggtgtctggagtcgcgtgttccccccacggtggttcccccgttctccagttggtgtgtcccccccgagaggtgggccctcttgtggacttttctctcttctggctgtgtcccccactggcgtggtgaattcacgcgggccctttttctttgccctatcccccacctaggggcccaagttttttggccccccttgttcgttttctttgggcaccagagagccccccccgacgcccctcttctggggcccacctatgtgggcccggctgtcgcacactctaggcgcggcttttgatagagccccccacaatagttgtgtggtggtgctcccccgtgaagtgggcgcacgcgcagcacccctctggtgtgatacgcccttgtgcgccccccccttgtctcagagagaggggtgtgtccctctcgcgcttgggagagccccccccaccctttgggctttgtctccacactctgggcgcacccccccccctcagaggtgttgtctttgtgcccttcgagcgcccccacacactctgagccgtgtttcttgtggcccacactcgagtctgagagagacctctgtgagagctcgtcgttgtgctctctttttctctctcacgcgcggcgagagaaatatataagagagtggtggagagacaccgcgcgnaaagagtgttgctctgtagctctctctctaaagatagtgttgtgctcgcgctctttgtggctctttttgcgcgctctgtctctcctcacaagagcgccccctcgtcccgcgtgtctcccacaggctgttcacgcagctctgctctgtggctctatgtgaaagctctctcgtgtgaggaaagctcctcgcgggtgtttggagagcaccacacctcacctctcttctgtggcacaccacttcccgcactctctaactctctggccacacacatcacggcccacacgtccacaccccacgccctcaccacattgccacgcagtgtttgtgcacaaaagggcttaatatttgagcccttttgaactggctggagagccctttcaaagcccctgggagatgttccccccggcaccctgggtcccctgagcccgctccccctttccctacaggggtaggcctttcacctggtttatgaagctcgagtttcccttataaaaatgttatagaatccccaaa

SEQ ID NO: 595172 - DNA, 338 bp, Homo sapiens
tctccgacaatttgaagcttcaccaatacccttcactctaaaatagagggcctgacattccaagttttatataagcagacaggatatgacaggttggctcctccacaggaagagccttgttggctggcaaggcaagccgaggaactcctgttgccaaaataatcagtcaataaaaaatatctagcaatgacaagagatgaaattaggtttttaaagtccttgtttgttgtcataatcaggctcaagaatttaaagaaaaacatgaacataggaaggaaatgaaagaaagatacggtaactatagacctcaatgtaaattttagttaaaatgtcgacgc

SEQ ID NO: 595173 - DNA, 973 bp, Homo sapiens
  misc_feature (627)..(627): n is a, c, g, or t
atcccctagccgcccattctatgtgagccccatttcgccccacatatatattcttccggccaacacccggtttccactctgcctgtgcccatccccctatggtcaaacgctcttccctctatgcacgttctccgtgtcttattccctcctatggcatttcctatggcttcgtccacataccttaagagcgctttccgtacaatacccacagaacagaactcagttaaaacagctttggactatctccggccagtgtaatacccctctggtggttactcctccccccagatgatcttgttgactgattgcgaccaccctccatcctcgatgcacgtccttattactaaaccgccgcgcgtgtctctactacggggatgctcctccagctcgacgcgtaccaagcatactggggccccccacatggtgcgccgtgaacatctagtgggatacatccgcggttatacggggcgcgcgtaagaaaatgtttgtcaagactctacgcaacacgaccgttgcccgccgctcgtattctgctttagatcccacggcagacacacttggacagtctcctctgtgcactttgcaccgcactccaggggtaggtcatcccgcggttcgtgcgccccnctattgttagaagaaatagtcatcactgtcacccaagagggtgctgttgaaggtactgagggatgtctccccccccactagggtgtgtttcaacacgatagctctatctctccggggagctgtcttgcagcaggccccacttattcacgccgcagtcacacccgcccggggggttaatcacacgggcgccaatactgtgaaaaattatgcgagcacaaacaccacacaatgtttcaatgcccgcgctgtgctcaatgaatagttcccccgctcaatacttatgtataaaagggcgcccgcgttttcccattacccccccttcaccccctttgcgccccaacatgca

SEQ ID NO: 595174 - DNA, 909 bp, Homo sapiens
  misc_feature (896)..(896): n is a, c, g, or t
agcgggtcagcgaggagtgaggaggaggcgtggcatgtgggcctatggttgcttggcgagtgcagtccggcccggtactttatgatcagtaggatagcctgtgatcgctctcattcccttgaaccactcatgggttcagggctgctgctcgagagggacatgcgcgcgggaggaagtcacagtgcacgttgctctctgcttcgacattgacaacgctttttcaatgaacatgtccggtatgtcagagcactcgaaggccagggccgcaaccttgtgagtcacctaccacgctgtgacacaatgccgccagctggcggcgggaatgccggcgcggcagaagcaggtttaactcttagcttcgatttatctgtgagttagtgggcttgttcgctagatctcagcggtgactggacagcgtgcacatttattttcagaatgtggacccgaagaagcttgctgagacgcgtatggggttctcccctgtgcagggctagcccatgactgcaagaccacagggactctgcggggagactccttccggcacttattccccaagggattcttgaccgtggggaccatacctttgtgaacgcgatgtgccaactgtttcacatcatacacgttgtgcaccaaaaacgtgacagagcatggaagctttatggtacctcatgtgacgatgtagccatggttgtggtctcccaaagaaggaccgttctcgatttgtgacagaactcttgttgtgtacccagccgctcttgcttgacaagcactggtgtatccccgtggttgcaagcgttggctaaggggaattcacagctggagctttgacctcacattcaagagcgttcctttgaatccttcggtaacgacattctcgatgagagcccttcctcacncaagtgtgtaccc

SEQ ID NO: 595175 - DNA, 147 bp, Homo sapiens
atggcgtgagaccctaataactcagggagaatgcaaggaagagtctagatgcacatttgtaattttctctgagtcctccctaaaagctttgtttagttttgtttctgtttttggccaccctgcgagatatggagttcccgtcccagg

SEQ ID NO: 595176 - DNA, 424 bp, Homo sapiens
caggggcctaatgtagagtatgtggctggttgaaatacatggctgtgtgttctgctattgaccaaacctctatgtacagggctcaataatgaacatcatatgtaaccctggcaactcaaattataaacgcgtaataggaggacaaatataaagatgtctggtttgtgtttttataatgtacctgacattatacttgtgctttatgtttatacccatatgaggtgaaagtaatgtcatagatctgtctgtaaacaatgaaaagagcagaaaatgaaacatatgatgataatgtcactaaagagctagtgatggagggtacatggctgttagggtgtgtgagctcaccgttgccatgtcgatggatgcagtggcttcatccataatgaggagtcgacgcgaccgcgaatttagtagtagtaggcgg

SEQ ID NO: 595177 - DNA, 1052 bp, Homo sapiens
gcacgcctgtaatcccagctactcgggaggctgagtccggagaatcacttgagcctagaagttgccgtgagctatgatcatgccacactgtactccagcctggatgacagagtgaaaccctgcctctacaataaacacgacacacatacgacggcagactgtggtggctcacgcctgtcactcccagacactttggtaggccaaggcgggtggatcacctgcagatcaggagttcacaaccagcctgaccacgcatggtgacaccctgtctatactacaaataccaaaaacttacgccacgtgtggtggtacacgcctgtaagtcccacgctactcgggacggctgacgtcacggacgacatcacttgacacctgggacggcggaggtcgcacgcgagctgagcatcgtaccacgtgcacatccagacctgggatgacagagcaccaaccctcatctcaacacaaaccacccagcaaggcaccaacacatagacaaagccacaacaggaccacacccgaacggccatgcatcggcgcaaccacacatgcccgcgagcacgccgggataccccgggaataccacgttggcaccagagacgacgtgcacgaggcaccccgtgaccacactcgccactggcatggccatacgccaatggctgaggatggcggcacgaaccccagagaaagccggagcgcacagggccccaacaacggcagggcccacgacaccttggggacgcatcacgggacccaacaccagggaccccacggcccaagcgacaatccgcggacaaacccacggacggaccgggcgaacggagcactcgagccagagccatacacaaacaagggaaaccagtccagcgacaccgctgtgaggacgagcggacaccgaacaaccccgcgaaggggaacgaggccaccgtagagcgagaccggcctgggaccagaatcggccctgccgcgcacagacacggcacccgagagggtacaggggaagtcggaggggggacagaggagcgacgaccgagacaggcacggcgacaagccac

SEQ ID NO: 595178 - DNA, 1054 bp, Homo sapiens
tacacattgccagcatgtcccgttgagttttaattgcctcatgtggctgtggactttatgagtcaatcatttgtaggctccagatatatgcacgctagattttatttttttacaaagtgcatttacacgctttatggtagtcctgtatattatcaagaatccatggagggtttgggtcagtacagctggtgcaggatcctcacggcagaaacagtggagttatcacatttgagttaggtttgaaatggcaccccaggacttatgggccatgcctataacttgtatagcctacgttcagtgagcaaagacttagtgacgcagactctgtgtatgccacagtactataggctacagctctggacaaagagataacagcacaagaccagtggtttactgtgcctactcaacggagtgtgtacatatctatatagaccagatactggaaacctggaccctgagatgggagacacggagacagatgaaaggagtccgtgataacgtaaccaagagctgcctgcatggttatgcagtatcactgatataaggagacgccccacagagctaaagcaattagatagtaatcacgagacggacctttagtgacctccatatgacgttcatcttctagctctgcagatagcaacaacagctcttagcaatctgaacgtaagcttgagggcatccactcctctactgatacacactgtacattgcatttacccaaacattggcaaataagcgaagaacatatgaacacaagaatggacattgagatatctatccctgaaggaaacaaagtacggaagtacctgacacatgtattttgaacatacgtagacacatgcatagagcaaaattagggccctaggccacagagtgggcaacgagaaacaagacatgggcacaacaaggcgaaacacaaacagcaagcaatagaccgaaaggaagagccatagaccaggagaggcgaaaaaaagacagagaacacaaacacaaaaacagagaacaaagtgcaagcgagaaaccaacagaagagacgaaagagcacaacaag

SEQ ID NO: 595179 - DNA, 152 bp, Homo sapiens
gtgcacatcagcttaaaatctgtcatcccatgcagacaggaaaacaatattgtataacagaacacttcctgagtagaagagtttctttgtgaaaaggtccagatttagactaaactaatgttaccaaaagtattcaactgttgggatcttgt

SEQ ID NO: 595180 - DNA, 314 bp, Homo sapiens
tccggtgctgtgcgtgaacacaaatacagatatagtccctcgtaggacgtgaccaatgcaagtatatgacgctggactcgacaacacttcagcttatacttagaactcataggctcttgatttgcccccaaaaatatttttccttgtccttatttaaatgcccaactaccaacacaaaaagggaaaacatacacggctttaaatgtacatgtttcaagtcagtgtcttgttaacaaaaaaggtagcattttcttcactttggccattgttaaagatgcaggcatagagccggacctgttagactagcatgtatt

SEQ ID NO: 595181 - DNA, 343 bp, Homo sapiens
  misc_feature (150)..(150): n is a, c, g, or t
caaactcaaagatccacctgcccctgctgggtgctgggactaaaggcctgcaccacacgcctgactggtgaattgtcttctaattctaaatctggtactaagtgctctaagaaagctcaagaggctcactggtgttgtggtggcccaggncgtcagtagtgccgtgacctccagcaagcgtatggcctggcagtggagactgactaaccctaaggaactgtgtttcttactggcctggaactcactacatagaccagactggcctgaagaatcagagatctgcctgcatgtgcctccagaggtttcccctcgttgatgtgctcatagatcgcgtctgcgcccc

SEQ ID NO: 595182 - DNA, 386 bp, Homo sapiens
cccctccccccaccccacaacagtccccagagtgtgatgttccccttcctgtgtccatgtgttctcattgttcaattcccacctatgagtgagaacatgcggtgtcaaacaagactttttaaaaaattgtggtaaaatacacataacataaaatttactgtcttaaccattttttactgtacagttcagtagtgttaagtatattcacattattgtgtactatattttcagaacttttacatcttgcaaaactgaaactctgtacccattgaataattcctcactccctctccccaccagcccctggtaaccactattctacttcctgtttttgtgaggttgactacactgtatatctcatataagtaaagtcatatagaatttga

SEQ ID NO: 595183 - DNA, 104 bp, Homo sapiens
tgctgccaagtgttcaatgccctggacaactacaagcaccactaccacacactgcacagaaatgtttgctccttttgcaaccagaccttcccttccagacacct

SEQ ID NO: 595184 - DNA, 886 bp, Homo sapiens
gcctctagcctcccaaggtagctgggactacaggtgtgcaccagccacacccagttaattttgtatttttagtagagacagggtttcaccatgttggccaggcgggtcttgaactcctgacctcaagtgattcgcccaccttggtgtcctaaagtgctggaattacaggtgtgagtcactgcacctggccttgtcgagtctttaaaagatcattattttgaattgctttttctggtaaataggtaggatttccatatcatatctatgtgtaatcggtaaagttattcgtgatttccttatgcatagtgtggatcaacaattatcactgtgtcctgttaacactcgttttcatacttggtactcctggcattcgatgtcgtgtagcatcatggatgagatactaactggcgtacttcccatttatatctacgagtgctaacttctcatagtaggctttcacctgcacgtgtggtccttagtgtgctagttgagaagggtgtagtaattctgtttccagataatgtgaagatggtatagtctctcgttcagcgttgtatcaacagtatttaatgttgggagtaactttgtttaacctcagtggcctaggtatgtgaaagtttgtagcagtaatggataggttgtaatggcgaagggcttttttggagtcctcctattttcattgtgtcccacaatgaagttacttagcatgagataatgcttgtgtagtatgatatggctataggcggtacaagggtctgcgttcaagttgcagtgctaaaggcagtgggcgctggggggttaaagccaatgatgaactattggcctgggtttgagaataatgtgcaggtggaattgggggggttcagacatttatggttccctatga

SEQ ID NO: 595185 - DNA, 112 bp, Homo sapiens
gaaacggccatctacaatccaaggagagaggcctcagaacaagccaaccctgcagataccttgatctaggcatccagaattgtatgaaaatacatttttggtatttaagcta

SEQ ID NO: 595186 - DNA, 292 bp, Homo sapiens
tccttggcgtggagggctgagacttggctccctggtggcttgtccggggcctaaggcacaatgcgggctgcgctcagtatgctggcaggcaactcatcggcctgtgtgcggtgcaaggagggttccgaggcactccgctccatcttggcgagtgaccgttgcagcagctcaattgtcgcctggatctgggggaagaggggccgctcctcccgctgtaacttgaggctgtcagacagcaggcgccgcatgcccttggtgcagctgctggccattttgctgacgtccggggaca

SEQ ID NO: 595187 - DNA, 307 bp, Homo sapiens
  misc_feature (75)..(75): n is a, c, g, or t
  misc_feature (271)..(271): n is a, c, g, or t
  misc_feature (288)..(288): n is a, c, g, or t
  misc_feature (296)..(296): n is a, c, g, or t
gcccaaagctgcatgacactgatattatttcccccttaaatcagctcacattttaatgttaacatttttaaaagnaaatatgtcaataacttaattggaaaatcactaataagtagaaagtaacaaaataagataaataaaaacgttactaatttttagctaaatactcttgtctgctggaaacactaggcctgaacctttttatttggcccccccggcttttttttaatttttaaaaaggcagttagcaagtgttagttgaagacaagcnccaagctgagaatttgncctggctntaatcagaatt

SEQ ID NO: 595188 - DNA, 149 bp, Homo sapiens
tggtcattcagtgtgcctcctttataacactcactatattgatttattgactgtgcatcatttgaagatgaaaatttgttctgggtcactgggtagtttcaacattttgtgtcgacgcggccgcgaatttagtagtagtaggcggccgc

SEQ ID NO: 595189 - DNA, 954 bp, Homo sapiens
  misc_feature (310)..(310): n is a, c, g, or t
  misc_feature (421)..(421): n is a, c, g, or t
  misc_feature (502)..(502): n is a, c, g, or t
ggtgacaagtagggtttcatcgtgttgcaacggcagctctgtgtgcgttgacgtgcatctagcggtgtccgcttagtactgggttgccaatttgcagcctcgtcgtggaaagcagcaagtgtcacgacgtggccatcacacgaatgagggatggtgggtgcaagccaccaagactggaggaagtctgcgtcgatgagcgagatgccgtgatccattcagcgagcttagaggaaagtgctatcttcacgaggtcgcgtcaccctgagcccccacccaagccaatcaagcgattcgaatgtcttgggagtcntcgtgttatatagtcctcaaagtgcaaagagtgacgagatccagtgcgaggcaataagatgcagtctcctcgtcctgccgctcggatgggctcgctaggatagacaagctnttacactccgaggttcattggatgtctctcaattacctttaacgcgacgcgctagcgtttcttcatctagttatccatgcnactacctctgagaacgtttgggggggagtacaggcacgacgacccttctcttcgtgtggtcttgtaaggcaccctcatccactctcgacgtgcttcgtacgcctctgtttgatcgcttgctccttcggacgccttcatgaagacctccagtgctcgttgcctcgcgtgggaagcacgacggccgggctcagagatgtagcgcggtggaggcagcagtgtggcgtgcctagcttctcgaacgaattggaagctcccctctgtggggggtggcttgctttggcgctgagtgcgtaggtgcatagggaaagcgagtcccgcgtcttggtccgctttgtgcgcgggattgagctggttgtgggtgttgggcggttgccctccgtccccatgcgttgctttggcaggcctttgtgggcgttgcctgtggcgtgggggccgagccctgttggtgggga

SEQ ID NO: 595190 - DNA, 334 bp, Homo sapiens
ctctagacggatcaccctccacgtgcgactatcgaaaaattgatcccatagagataattactgtataggcagctctggaaaatgaaaagaggcttgggctttgttgctttcgatgaccatgatcctgtgcataaaatcgtattcgcaggaataccataccatcaatggtcataatgcagaactaagaacggctttgtctacaccagaaatgcaggatgtcccagagttctaggactggaacgaggagcgcaactttggctttgggcgattcacgcggtggcggtggaaatttcggaccaggaccaggaagtaactttagaggaggatctgatgg

SEQ ID NO: 595191 - DNA, 326 bp, Homo sapiens
atagtacgcgctcaatagatacttgattgttgaatgactactctctctttccactctgggaaacctaggcttctgacattctgcgtgaccctgcatttctttctggagcccattccatttgtccagttaatacttgctcttaaaaatctccaagaagctgcgtctccagaacccatttagaaccaaccagatgctgagcacacatgtagatcatggccatcatgctaagcccgtagtggcagaaggtagtgggtagacgtcactatctagggggggccggtattttccattctgtccatttcccatcccagctttcacgggggtgc

SEQ ID NO: 595192 - DNA, 411 bp, Homo sapiens
cacgagggctcgcgcatgcttttcaattttgcggtgcgtttcatcaggctttccacaagggaaaaatcatggctttcaaaagccttagcacccgcttttgaaaggttatcgagctctttgtcgatcgactgcgccagcaagtcgcaagctgcggtcatgctcaggtcgcccgcgccagcgcctttgtctggaggcgggacagtccctgaggatggtgtcagtgctggacttgctgccgggttttgcgatgaagcagatgatttggttgatacaggtgttgaaggtagcgcttgcgccggcgttgcagctgccggacttgcttgtgttgatgcaggggcttggttttgacttgtggcccgtctcatgcgcccgcttgtactctgttgcgggcgcggtgcttctgtagcaagg

SEQ ID NO: 595193 - DNA, 138 bp, Homo sapiens
tgattctgacggatcccagccatcgaggacagtgatgattcttccaagcccgcaggagtcgccgttaaacacctactgaaaaagttgaaaagaagccacgtcatcaaactgtgactaacggctgaattaaaccaactt

SEQ ID NO: 595194 - DNA, 1005 bp, Homo sapiens
  misc_feature (9)..(9): n is a, c, g, or t
  misc_feature (63)..(64): n is a, c, g, or t
  misc_feature (86)..(86): n is a, c, g, or t
  misc_feature (99)..(99): n is a, c, g, or t
  misc_feature (179)..(179): n is a, c, g, or t
  misc_feature (234)..(234): n is a, c, g, or t
  misc_feature (278)..(278): n is a, c, g, or t
  misc_feature (291)..(291): n is a, c, g, or t
  misc_feature (299)..(299): n is a, c, g, or t
  misc_feature (371)..(371): n is a, c, g, or t
  misc_feature (383)..(383): n is a, c, g, or t
  misc_feature (387)..(387): n is a, c, g, or t
  misc_feature (394)..(394): n is a, c, g, or t
  misc_feature (435)..(435): n is a, c, g, or t
  misc_feature (439)..(439): n is a, c, g, or t
  misc_feature (448)..(448): n is a, c, g, or t
  misc_feature (454)..(454): n is a, c, g, or t
  misc_feature (479)..(479): n is a, c, g, or t
  misc_feature (508)..(508): n is a, c, g, or t
  misc_feature (522)..(522): n is a, c, g, or t
  misc_feature (574)..(574): n is a, c, g, or t
  misc_feature (598)..(599): n is a, c, g, or t
  misc_feature (601)..(601): n is a, c, g, or t
  misc_feature (649)..(649): n is a, c, g, or t
  misc_feature (806)..(806): n is a, c, g, or t
  misc_feature (913)..(913): n is a, c, g, or t
  misc_feature (941)..(942): n is a, c, g, or t
  misc_feature (944)..(944): n is a, c, g, or t
  misc_feature (999)..(999): n is a, c, g, or t
ccggaaggngtccccttactcccatggggcacctcgatacgcgagctgccctgccctgactcnnttctcagcacccatcttacggnagttggccctggnctcagacccttgggttcagatcccaggccctcctcctactcactgtgagaccctagcgcgagtcccttagctcgggagcntaattcctgcttcattaacatgggggtaagtttaactattctagctagatggttncggaagggatcagttctactaattctcaatgttggcagtgcatnacattgcaaactncctgcctntggctccagagtctgattagaatcaataagggtggggcctgaaaatactacatcctaaatttcgcgagaagnacagtgtctagnatanccctatntctccatctggggttactgtcactctcaggaagaaataatnagcncattattcnttcaancaggaaaagagatgtccaggtgcanagcttggggccccagaaagtaaccacggnggtcaagatgcagnaacccgtcagtgtccagggcatggcctcacacacatccgaggttttcaaggnccatgaagtgccatggcaagcatnntngcctgagggttaggagagctggatctcaggctgcaactttaggctganttcggtgcgtcatcttagacaaatctggtgagctctgagggctggggtaaggttgagaaactgtgggctcctcagggtgggggggtgcttagagaagatggggcctctgagtcctcagactggggggtcttcatcgggttcagcatcctccccaggnccaagccctgccagcctcttgctggcctcccatagccgatgggctgcccggtcgtctcgggcagctggaggcacctcttccacatggcagtgggcaaaatatctccnactgaggggctcgatgcctcttgtaganncnatacaggggtgtctgggcacccctcttggtgccggaggacagcaaagccaatggntgaaaa

SEQ ID NO: 595195 - DNA, 372 bp, Homo sapiens
  misc_feature (304)..(304): n is a, c, g, or t
tgagatggagtctcactctgtcacccaggctggagtgcagtgtcgcgaccttggctcactgcaacctccacctcccaggttcaagcaattctccccacctcagcctccaaagtagctgggattacaggcatgcgcaatcatgcccagctaatttttgtaattttagtagagatgggttttcgcttagtagagatggggtgtttgccaggctggtcccgaactcctgacctcaggtgatccgcccacctcggcctcccaaagtgctggggttacaggcataagccaccaagcccggccgaccttnttctatttttccattctcctttccaaagccatggccatgcgttcctgtgttacagtggcataaacaca

SEQ ID NO: 595196 - DNA, 306 bp, Homo sapiens
tggagacggggttctcacattcatcagaggatgtacgggctgcgacgttggggccggacggggcgccttcctccgcggttatgaccaggacgcctacgagggcaaggattacttcgccctgaacgaggacctgagctccgggaccgcggcggacaccgcggctcagatcacccagcgcaagtgggaggcggcccgtgtggcggagcaggacagagcctacctggagggcctgtgcgtggagtcgctctgaagatacctggagaaggggaaggagacgctgcagcgcgcggacccccaaaagagata

SEQ ID NO: 595197 - DNA, 652 bp, Homo sapiens
tcgcccacgcgtccgcggacgcgtgggtacaaggactaaagtgggctctaagatctaagatggcccggcgcggtggctcccgcctgtaatcccagcactgtgggaggccgaggcgggcggatgagtagaggtcgggagtttgagtccccgtctctagctaaaaattatcaagaattaagccgggacaaggtggcgcatgcctgtaatcccaggtactcaggaggctgaggcacggagaatcacgtgtgaaacctgtgggagggcacgaggggtttggccaaggtgggaacgccccgggaagcacttgtgtggccacgtgtgcgaccttcccaaaggccctgtgaaggcaaaccaagaaaaggtcaaaagagtcctaattctttaaacacagacgaccagcaacgaccgagaagaggagaccgtttaaagtgaatgccccccaaaattcccgttttagcgggggcgcttttggggcgccccaaggagtgaagtgggccacagcgggccttttcaacaggcaaagaacaagccaggggtgtgggggccacccccccacccgctgcgtgggggaaggacacaccccccaccatgtggggggcgaggctgcgactaacataaacaccgcggggcgaacgttctgcggccgcactca

SEQ ID NO: 595198 - DNA, 117 bp, Homo sapiens
gaaaaacgtggtaggcatagctatgcatgcttcaggagcatttgctggttattcagcagctatgagtggaggtttctcttctgaagagtaaacagaaccacaggttttcgctattaa

SEQ ID NO: 595199 - DNA, 574 bp, Homo sapiens
ggtaccgtcacgttgatacaccagtagcatggcacatgtatacatatgtaactaacctgcacaatgtgcacatgtaccctaaaacttaaagtataaaaaaaaaaaaaaaaaaaagacaccaccattcaaaacacaaaaagctacagagggtccgggcaacggaaaagcatcaaaaccaagcggtggtatgtcaaccgggttttatgatggcatttcttggatgaagacaaccccagaaaaagagagggtcatattcctttacctcaaaggggggggaatctggtgtcggggacctacattattcaccaccacatacaaacctggagaaagcaaagtcttcaccagcagatgccaaaggggttccttggtctttacagactagctcggtgcttcacaagagtgggggctgggtgtcccacttggggaacctggttaaaccaagaacccacgagggagccatcgggtgtcaataccctttcctacaacctggcttttttacaagggtcaggggagtctggggcgcagaccaggccgggagatggttcccgggttcaaaaattcaggcaatttctgt

SEQ ID NO: 595200 - DNA, 390 bp, Homo sapiens
cggaagatggacctctgcaacaagtaacactttaatatgggcttctttaactttgtaatatgcatttaagtttcctccatatcttttcatggcttgatagctcatttcttttcaacgcggaataaatttccatttcctgaatataacacggtttatttatctactcactattaaaaaacacttggggctggggcatggtggctcacgcttgtaatctcagcactttgtgaggctgaggcgggtggatcacctgaggtcaagagtttgagaccaggctggccaacatggtgaaaccccatctccactaaaaatacaaaaattagcaggcatggtggcgtgctcctgtaatccaagctacttgggaggctgaggcagaattgcttgaacctg

SEQ ID NO: 595201 - DNA, 681 bp, Homo sapiens
tggagaggagaagaggaggaggaaagggggaaaggagagaaggaaaaggggcgaaagaaggagggagaagaagaaaagaaaaaggaaggaggaggggaagggaaaggagaggaaggagaaaaagggtgagggaagagagaaaggggagggagggaaggagaagggggaaaagaaaaagagagagggaggggagagaggaagaaggggggagagggagggaaagggggagggagggaaaaagggagaggggaaagggggggggaaagggagggagagagaaaggaaagggaagaggaaaaggagggggaaagagaagggaagaagagggagaaaggaggagaggaaggcaaggggagggaggggagaggaaggaggggaaggagggggagaaagagaagggagaggaggagggaagcagggaaaggaggggaggaaagagggagaagaagggagaggagaaaaagggaggggggagaaggggaaaaggaggagagaagagcagagaggggtaagggggaaggcgggagggggggaaaggggaggagaggaggaggggagaaagaagagggaggagagagggggaggaggaggtggagaagtagggatgtctagctcacacaatctctactactctactactactctactactatatatactatatatatactatactatata

SEQ ID NO: 595202 - DNA, 180 bp, Homo sapiens
aaaccttatgcctgtgccctcatccagccagacctgcgagtctacaggaatacgtccagcagatagcggatgccctgcactatctgcagaacgtctctggatacctcttcgtcaggttggttcagccagccacccctaccttatcagagcgccatccttgtcctgcgcactccagtcata

SEQ ID NO: 595203 - DNA, 890 bp, Homo sapiens
  misc_feature (29)..(29): n is a, c, g, or t
  misc_feature (126)..(126): n is a, c, g, or t
  misc_feature (140)..(140): n is a, c, g, or t
  misc_feature (142)..(142): n is a, c, g, or t
  misc_feature (148)..(148): n is a, c, g, or t
  misc_feature (331)..(331): n is a, c, g, or t
  misc_feature (339)..(339): n is a, c, g, or t
  misc_feature (344)..(344): n is a, c, g, or t
  misc_feature (347)..(347): n is a, c, g, or t
  misc_feature (376)..(376): n is a, c, g, or t
  misc_feature (409)..(409): n is a, c, g, or t
  misc_feature (424)..(424): n is a, c, g, or t
  misc_feature (453)..(454): n is a, c, g, or t
  misc_feature (470)..(470): n is a, c, g, or t
  misc_feature (501)..(501): n is a, c, g, or t
  misc_feature (507)..(510): n is a, c, g, or t
  misc_feature (514)..(514): n is a, c, g, or t
  misc_feature (517)..(517): n is a, c, g, or t
  misc_feature (553)..(553): n is a, c, g, or t
  misc_feature (580)..(580): n is a, c, g, or t
  misc_feature (585)..(585): n is a, c, g, or t
  misc_feature (591)..(591): n is a, c, g, or t
gcccgctcctcctccccagccatggcgtncaggttcgcgggcttctgctacatgctggcgctgctgctcactgccgcgctcatcttcttcgccatttggcacattatagcatttgatgagctgaangacgtgattacaangnaatccntatagaccaggtgtaataccctgaatccgcccttgtagctcccagagtacctcagtccgacgctttcttcgtgtgtcatgtttccttgtgcagcagagtggcttacactgggtctcaatatgccccgtcttggcatatcatattggaggtatactgagtagaccagtgatgagtggccaggantctatgancctanaancatcatgaatgcagatattctagcatatngtcagaaggaaggatggtgcaaattagcttttnatcttctagcatttnttactacctatatggcatgatctatgttnnggtgagctcttagaanaacacacagaagaatggtccagttaagtgcntgcaannnngccngcnaaatgaagggattctatccagcaagatcctgtccangagtagcctgtggaatctgatcagttnctttnacaaangactccttattgtcacatgtttccacattgttgtcgtggacacgatggtctcatctgtacatacctcagcataccacgatttctcacccgcgcattacgtatactttcctctaccgctgcctcccctggcgtcgacaggtcgaacttgcccctctcacaggacccgccctatcccccgaatgatgcattatttacgacgtctactacactcggcccctgtcctcgcaactgtcgggccacccgctcccgcccagcactccatcacactccgcccaaccggccacaacccgcacagttcc

SEQ ID NO: 595204 - DNA, 765 bp, Homo sapiens
  misc_feature (29)..(29): n is a, c, g, or t
  misc_feature (126)..(126): n is a, c, g, or t
  misc_feature (140)..(140): n is a, c, g, or t
  misc_feature (142)..(142): n is a, c, g, or t
  misc_feature (148)..(148): n is a, c, g, or t
  misc_feature (206)..(206): n is a, c, g, or t
  misc_feature (214)..(214): n is a, c, g, or t
  misc_feature (219)..(219): n is a, c, g, or t
  misc_feature (222)..(222): n is a, c, g, or t
  misc_feature (251)..(251): n is a, c, g, or t
  misc_feature (284)..(284): n is a, c, g, or t
  misc_feature (299)..(299): n is a, c, g, or t
  misc_feature (328)..(329): n is a, c, g, or t
  misc_feature (345)..(345): n is a, c, g, or t
  misc_feature (376)..(376): n is a, c, g, or t
  misc_feature (382)..(385): n is a, c, g, or t
  misc_feature (389)..(389): n is a, c, g, or t
  misc_feature (392)..(392): n is a, c, g, or t
  misc_feature (428)..(428): n is a, c, g, or t
  misc_feature (455)..(455): n is a, c, g, or t
  misc_feature (460)..(460): n is a, c, g, or t
  misc_feature (466)..(466): n is a, c, g, or t
gcccgctcctcctccccagccatggcgtncaggttcgcgggcttctgctacatgctggcgctgctgctcactgccgcgctcatcttcttcgccatttggcacattatagcatttgatgagctgaangacgtgattacaangnaatccntatagaccaggtgtaataccctgaatccgtgagtagaccagtgatgagtggccaggantctatgancctanaancatcatgaatgcagatattctagcatatngtcagaaggaaggatggtgcaaattagcttttnatcttctagcatttnttactacctatatggcatgatctatgttnnggtgagctcttagaanaacacacagaagaatggtccagttaagtgcntgcaannnngccngcnaaatgaagggattctatccagcaagatcctgtccangagtagcctgtggaatctgatcagttnctttnacaaangactccttattgtcacatgtttccacattgttgtcgtggacacgatggtctcatctgtacatacctcagcataccacgatttctcacccgcgcattacgtatactttcctctaccgctgcctcccctggcgtcgacaggtcgaacttgcccctctcacaggacccgccctatcccccgaatgatgcattatttacgacgtctactacactcggcccctgtcctcgcaactgtcgggccacccgctcccgcccagcactccatcacactccgcccaaccggccacaacccgcacagttcc

SEQ ID NO: 595205 - DNA, 156 bp, Homo sapiens
  misc_feature (14)..(14): n is a, c, g, or t
  misc_feature (125)..(125): n is a, c, g, or t
atggctcccactgncacaactggtacatggtgggcctggtcgcgcaggaggcggtgaagaattaggcggtttacgagcggtgaaacattacatgcagcgaaccgctgttcagggtagtccgacgntgcttgccgctatcagtaaacagtgggtgcg

SEQ ID NO: 595206 - DNA, 334 bp, Homo sapiens
tgccaattgtttgtgaccagacaagacgattttactacagcaccctcgagtctatctatctagagaagtagaatctagatccgaatcgtttattcttaatgcttctttgattttgttcttttatccttttctcctctccaactcatcttttaaataatcatgttcgtatactagtcatacagttacattagtaatatatatagagatttaccataaatacgtggtttagtttgttagagggtgggtgaagtgtgccttcacagcctgctctactgagtggacatcatgcaatcaatacttctgttgtccgcgtgctgtaggccaatcaaagctt

SEQ ID NO: 595207 - DNA, 268 bp, Homo sapiens
ggccgcttttttttatcgttttttttattgggtgttcttataatttttaatgatcaaaacaaagcatctaaaaccgcattttctggaataaccacttgttcttgcctgtcttggatctctcttcaaacttgaccttggcctcccgacgggccttgcgtttaaaagcaggatctctgaagacatccttattgacaacagttttttccaaggggatatccacagagtaccttgtgggcattatgtgattgtagttttacacttttacaaa

SEQ ID NO: 595208 - DNA, 278 bp, Homo sapiens
  misc_feature (23)..(23): n is a, c, g, or t
  misc_feature (64)..(64): n is a, c, g, or t
  misc_feature (73)..(73): n is a, c, g, or t
  misc_feature (88)..(88): n is a, c, g, or t
  misc_feature (91)..(91): n is a, c, g, or t
  misc_feature (97)..(97): n is a, c, g, or t
  misc_feature (145)..(145): n is a, c, g, or t
  misc_feature (157)..(157): n is a, c, g, or t
  misc_feature (166)..(166): n is a, c, g, or t
  misc_feature (171)..(171): n is a, c, g, or t
  misc_feature (175)..(175): n is a, c, g, or t
  misc_feature (227)..(227): n is a, c, g, or t
  misc_feature (242)..(243): n is a, c, g, or t
  misc_feature (265)..(265): n is a, c, g, or t
ttctcctttttttcctttttggnactctctctttttccttttctttcttccagatatctgagtntcttacatntttcgggtttctcgngcnccgggnggtcctcgcgggggcgttggcccaggtgatcgtgggggtttggggggnttgggctggggnaactgtggngtgcnaggnccgcttttttttggtcttttcccttgtggtctgtgtttggtggtgggttgtnaaatgggggttagtnntgttgttttttcccttgttgcnaatgttccaaatg

SEQ ID NO: 595209 - DNA, 126 bp, Homo sapiens
gttctgcgaggcttcaggacgcctgcgtggtcgcccttcaggtagcgcccgcccaccttggtggccaccgttgtgtagtcgcagaatcgaagaagaggtcacaggagtgcgcgttgctggaaatgc

SEQ ID NO: 595210 - DNA, 128 bp, Homo sapiens
gaccggattaggcgtcaactcagtgacctgtagactaggtcagaaaacagtcagaaagataaattactctatctctttaaaattggaataatctagcactctctcactgaatcagactactagtcttc

SEQ ID NO: 595211 - DNA, 227 bp, Homo sapiens
  misc_feature (16)..(16): n is a, c, g, or t
  misc_feature (57)..(57): n is a, c, g, or t
  misc_feature (88)..(89): n is a, c, g, or t
  misc_feature (92)..(92): n is a, c, g, or t
  misc_feature (94)..(95): n is a, c, g, or t
  misc_feature (113)..(113): n is a, c, g, or t
  misc_feature (150)..(150): n is a, c, g, or t
  misc_feature (158)..(158): n is a, c, g, or t
  misc_feature (180)..(180): n is a, c, g, or t
ctcatggtaccttttnatgtatgctaaatgatgcttagagtatgaatgaaacatcantaacaatgtaaatattaaactcagtgttgannatngnngacatacttgcatatganttggttaaaattgtgtggttaaccttatcattaaaantgtatttnttctgataggtagaaatttaanacattggttacagtgaaattgtaagactgcccagatgattgtgtaag

SEQ ID NO: 595212 - DNA, 191 bp, Homo sapiens
caggcagtgacaacctgaaacctaagggtcacagtcagtcacgacttcccttttctgaggggcctagcaggaagagaatatagagactgatgcttagtgtaagaaggaatgtagtacaggttaaccagcaaccacaaagacatatccaccacagcactaataggtcagaagaataacataccacaccaaaa

SEQ ID NO: 595213 - DNA, 572 bp, Homo sapiens
agcggggattgcaggtgtgagccaccgcgcccggcctattttattttttcaagatggagtcttgctctgtcacccgggctggagtgcagtggtgcagtcttggctcactgcaacctccacctcccaggttcaagcaattctcctgcctcaccctcccagctactcaggaggctgaggcaggagaatcacttgaacctgggaggcagaggttgcaatgagttgagattgcaccactgcacttcagcctgggcaagagtgagactcggtctcaaaaaaaataaataaaaattaaaaataaataaaatgtcagattggccagtttagtgctctgaggtctggttgccaatgagaatgtgtggtgtgagccttgggccctggatcccctctcatcgactcattatgcacctcacaccaggccactttggagttgtctaccacggagaatacatagaccaggcccagaatcgaatccaatgtgccatcaagtcactaagtcgcatcacagagatgcagcaggtggaggccttcctgcgagaggggctgctcatgcgtggcctgaaccacccgaatgt

SEQ ID NO: 595214 - DNA, 141 bp, Homo sapiens
acctggcacacgtcatggtgtagagtcagtatatttgggatttagtagtggtgtgagctgacgcttcttaattgtgtgtagtgtcagtcagtgttatctgacgcgctatcggagagatggttcatgtactatactacatag

SEQ ID NO: 595215 - DNA, 188 bp, Homo sapiens
  misc_feature (71)..(71): n is a, c, g, or t
  misc_feature (90)..(90): n is a, c, g, or t
  misc_feature (100)..(100): n is a, c, g, or t
  misc_feature (118)..(118): n is a, c, g, or t
gctcggctcccgctgcgagcggccgccctgcccgcgcaccgcgctcagcgcccaccgccgggcttcccgcngccggacccatgtacctcnggctccccgnggtgccggaaccgaggcncgcaaggccagcgctctgcgggggtgttgtgggcggacctcaggagatgaaatgacaacgtcaaccctcc

SEQ ID NO: 595216 - DNA, 587 bp, Homo sapiens
  misc_feature (439)..(439): n is a, c, g, or t
gcagaatctactgccaaaactgcaacttactttcaagtttgattaacagagggattttgcatatgttgcatgccaatgcatgtattcatgaaaaaaaaagttcggagatgagtggctaagacgcttaaattcacacctgattaggaagactgatcaaagagaggcgtgtgacttgtcctactcacatatttcatgcctcatgaattaggagtgggtgtcaagagtgcatagggactgctgatattcactgagtaccaaccgttacctctacagcagttgttaaaatattcagtagataaaagctgccctagtgttctctccttctgcacctacttccccaggactcactggagctccacaagacccagcaactgaagtgttcacacttggcacagaagactatccaacagaccctgctggtcctctggctggccacagntccattgggagtggcctgcctccagtacattgtaagtatttctcctatcacccctgggtactgtgtaacaaacttggctttgaaaaaagcttaggacattgctatgacatagcctaattcccaactcttgctatggagatgaagcttc

SEQ ID NO: 595217 - DNA, 614 bp, Homo sapiens
  misc_feature (23)..(23): n is a, c, g, or t
  misc_feature (100)..(100): n is a, c, g, or t
  misc_feature (179)..(179): n is a, c, g, or t
  misc_feature (277)..(277): n is a, c, g, or t
  misc_feature (350)..(350): n is a, c, g, or t
  misc_feature (441)..(441): n is a, c, g, or t
  misc_feature (464)..(464): n is a, c, g, or t
  misc_feature (479)..(479): n is a, c, g, or t
  misc_feature (515)..(515): n is a, c, g, or t
  misc_feature (528)..(528): n is a, c, g, or t
  misc_feature (543)..(543): n is a, c, g, or t
ggagacggggtccaggccaggangtcatcagagaatattcaaaggaataaataaaacttgggctcaccaaaaacaaaaaccaacaacaaccatttggatnattcatatggtgtagggttctttttttcaaaaaagtattcatcatttcactatgcaaataaggaatcaaacttttactngactacctcagagggaataattacccgggttaacggttcgggcggggctcaggggctcacacctataatcccagtacttggggaggcccaaggcgacnggatggctggaacccaggagtctaagaccagcctaggcaacatagggggatgtaatctcttctaaaaatgagngggggggtgcaaaattaggggcacatgccggtgatcccagctactcaggaggcggaggtgagatgataattggagccggggagatggaggnggcagtgactcaggatggtgcanggcactccagccggngtgacagagccagattctctctcaaaacaaacacanacaaaaaatactngaaatatgtggggtntgaagatatttcaacattaaaagacacagagtttagtgtccttattactcaagttctacaagagggcagat

SEQ ID NO: 595218 - DNA, 111 bp, Homo sapiens
ttgctctcgacggatctcgacgtgtctccctacctgaccctgggcaacacgatggcttgttgtggatactagagggaggcagctaatcccatgtaaaccaggcgagacact

SEQ ID NO: 595219 - DNA, 342 bp, Homo sapiens
tatcatttatttaatctatcatacccaggtttttgtcttgtttcatatagtagaactactccatcattcataaaattgatatctggcaacctactgcttacagtcagataatgccactttcagttcaataaggcaagtcacaccttttatagctattctctctcacagtcctacgagatattgtttcacttcaatttcacagggacacttcatgatttatctcatataggtaataagacaatcctaagttgtaggattcctattaagttgttgcttttcttgatggaaccctttacttgaattttctcttctcctttctgaaatttgtttctttcattatgt

SEQ ID NO: 595220 - DNA, 1355 bp, Homo sapiens
aaactgatgattctacttcaggagcaagaagctcctaccacgtatccagtatcaaaaccttactctgaggtcctggctgcaaaaaaaacatcggcagcaggaagcagagagacgaaacaagcacaagacggatacaacttgcatcaagctacagattgatagtgacacttaacaaaacagtagtttgtgccacccattgttgccagcagaggacaatcagcaggagcctgcaggtaacaacaaagtctatgcaggaggtgcacatcaagacgcaggaagacattaaactggagaaggcactgagggtgcagccgagctctgagagcagccaccagctccccagtactcaacacgaggaccaatccaggggcacaggcgagctgctgcgaatcaccaaaacgaacagggctcgacaggaagagaagaaccttcagagaacggaactgcaagttgatatctcagaagccagtatccaaaacagaagctataagaggctaacaaggtgagaaccaacaggaagatgacatcaacataacacttcacagtcaaagagcatgatgagacccactgcagaagagaaagcaacaatgcacagaaaaccagacaaggcagaaggggaacaacaatcaagacctaagaacacacatacatacacgagcagaatagtagcccgacaaggcacaaacaccaaaagatggaagaagacaacccacaagcacacaaggcaagagacacaagaacaccaaacaaggggcaacaccatggaaccaaaggacgagaatacaccaaaaacagaacaaacccacaaacagaaggcaaggtagacaacaacacaaggcaaaggcaaacaataaaaaaataagacacagcagaaaccagtgaaaagcaaaagacacaaggccacaaagaagcgcggctacagacacaagaccacacaaggagagaacagaaaaagacacccaggagggaaacacagagatgaagcacaagccaccacaaagatgagagcccgacacaggaaacaggcaaagataaacacccaccaacgagaggaaaagagacacgaatgcatgacgcagatcatctacacaagacaagaagattataagacaacgcaccaaatcgcacaccagcgaatacatgtcgtactagaaaaagcaacgaagacaagagcaacaccgaccaaagatacatataacgcacatctacaatgacgcgagagcatcaacaaccacaaaatagatgaaccaaaagcaaagccatctaaacacacaacgaacagaacacacgaacacatacaaacaatgtaccaaatgataataagaagaaactatgactcaataactatccagtca

SEQ ID NO: 595221 - DNA, 277 bp, Homo sapiens
  misc_feature (188)..(188): n is a, c, g, or t
  misc_feature (231)..(231): n is a, c, g, or t
acgcgcggttcaagtgctggcattacaggcatcagccaccacgcctggctttcttctgtgtttttttactgaagtatttaggccattaacattgtttgtaatctattgatatatttcgggtttgtaacaactcatcttgctcttttattcgtgtttctctctatctatcctttaattctttattctanattttctcgcctcattttgtgtatttctttaaacttatattcntattttacttgctactaactggctaagatattacgcgcacttcttt

SEQ ID NO: 595222 - DNA, 206 bp, Homo sapiens
agaatacggctaacgaccaccctacctactttcctaggaccctaacatcctactacttgccacatacactcaggccccagacccagctattagccaaagcactagcctccaagcgaagttaaatcaacaatacataaaaacagtaacaatcgaccagacaagagaccccaagttctctccacttagctcagttcgtgtcgatctta

SEQ ID NO: 595223 - DNA, 477 bp, Homo sapiens
tcttattggactttagttgaaacatgccatctgatgacaggcattgtccctaggcccaatctagcttcgatttagcgttgttaaaagtgaatttcaaacaaaaactaatgaagcataaccgaaacataaattgttttcttgtgaaaatacattttttcttaagatacaaagatgattttcctttattgtggtcacactgactttactatccccatgacagcagtgagcatattgtcaaagtcactgtaatagcagatttcccatgcctgaataacattgattttactcttaacattctatttttagattaccacagtattttactttaaaatagagtaaggtgagtggggaattagaagaatgtttgggaactaagctgccaaaagctttcattaatttcctattctcatttattagacaatattgattcatcaaagcttgtgtagcagtcagtgacaaagctaattggaataaaaa

SEQ ID NO: 595224 - DNA, 158 bp, Homo sapiens
gatctagaggatcccaaatcaggtgggcgcgaatcaggtcggtcgcgaatcagagttcaaggcattatgttgctatcggaggactacaatggaccacgtcggtctgggtgttaagtgctccaagagaggtggccaccgccatccagtggggccatcat

SEQ ID NO: 595225 - DNA, 261 bp, Homo sapiens
  misc_feature (12)..(13): n is a, c, g, or t
  misc_feature (31)..(31): n is a, c, g, or t
  misc_feature (242)..(242): n is a, c, g, or t
tccccccccccnnccgagcttctcccgtagntcccaaatatctggttttttctgcttagcctccttctttatatgctggcctttcctttcccagaagcagtgtacaggaagaactctgctttttcatacctgttgctttgaccctgagtacaactgaaattgttccaaaggtcacaccctctgcccacagaatctcagctggctttgcaactgagttctctcacctaacagtgtcctttggncaggagtaggttacatgcc

SEQ ID NO: 595226 - DNA, 210 bp, Homo sapiens
ttggcccgggggttaatttccgggaggaaaactaagtggaggcaaaagaagggtttgaaatggggtttttccgactttcggggccatttttttgaaaccccttaaccccgctgcctttgggtcactttgtaaaccgcattttaccctttagaaagtcctttataaagttccctgtgctttccctggggttacaaacccttggttttgtta

SEQ ID NO: 595227 - DNA, 295 bp, Homo sapiens
  misc_feature (121)..(121): n is a, c, g, or t
  misc_feature (214)..(214): n is a, c, g, or t
ctcatctctttctcatagtaactcccttactggagtcacatcttccctagctgcttctctttcctggcaagcttctttgaggataaggtacatatacagtcacctcattttttcctcaaanatgacccacctgaaactgtttctgcccaggacactaatgatcaaagccaatgaacacaattcagactttcttgtatttgttctttatgtagcnatggactcaactgagcatccactgtttctggaatctttttttcctttgacttcaccaactccacacttcaggcttttcttc

SEQ ID NO: 595228 - DNA, 858 bp, Homo sapiens
agcggggcggacggtctaggcggggctggaggcggtggctgcggttgcgggaccggtggccgtctgcccggccagcaccgtgcacacagcttgtggtcttgagctacacggcaggtgctgcatgtgcacagccagctgcctgccaggcccgtgcccagtgctgccaaggcgaacgtcttcccaccatgctgttcacaggtggccttccatggaccaaagaatgacagtggtacttgcgacgagttgggtactacacagtgggccattcccggcttgcttcacgtttccatgcaagaatgctgacaagggagtggtgcccaccaggggaagccagttgcccttcctggcaagcgaccgggatcttggacaacgtggaggaaagccttgcagaggctttgataaattcacatggcgagcgcatggacttggaagcccgggggcagtgccccaggtaaacgcatccagggaaggcacctggagagagggcactagggcacagcaatgttaggagcccaccagtattagcggggcaaaagaggaaacgcgcacattagaaaatggcagatacacaaggcggggattacgacaatgaggcagatgaggacacatatgagacgccggcagtagaagacacagccaatagagagagcgaagactacaacacatcgggggtcagaggcatcagaagacaaacgcaatgggcaaatcaccaatggggagggcaacaagttagggaaaaggacaaggccgcaagtaatggctagaggcgacactctttgagaagccaagggcaaaagaaccgcggaataaagaatatcccaaccgggagagaaataacgcaaaatggctcgacagcgg

SEQ ID NO: 595229 - DNA, 302 bp, Homo sapiens
gcacgcggagtgtgtggctcatcattgctcactgtggccacctcctaagcttaatgtgagcatcccaccttagtctcctgaggtagctcggactataggtgtgtgctaccacacttagctattttatttcttattattttggtaaaaattgggtcttatattttggcccaatttgttctcaaactctgggactcaagcgatcctcccacctcggccccccaaagtgcggggattccgggcttaagccagtgcacctggccttagaacggtctgtttgaggcagccaggtggcctactccagc

SEQ ID NO: 595230 - DNA, 147 bp, Homo sapiens
caagatgaacatcaacaaacacaatctatatgcagttttgacgactgtaagaagacctttaagaaccatcagcagctgaaaatccatcagtgccagcataccaatgaccctctattcaagtgtacccaggaaggatgtgggaaacac

SEQ ID NO: 595231 - DNA, 193 bp, Homo sapiens
tctacggaatggaccttgctgaatctcatcatggtcagtcctgtgccatgcttgtcactcagaagttttctcatgaggagattgccatggagacgtctacagcgctgcgccgcacagtgtcccccgttgtcactaggatctccttcctgtctggaggccagagtgaggaggaggcgtccatcaacctcaatgc

SEQ ID NO: 595232 - DNA, 460 bp, Homo sapiens
cctggaggatgcccactaaatttgagaaatatgcatctgcgtgctgctacccaagataacagtgcatagtaagtccagaaataaagaaatctccttaactttaagtaacagcatttttcaaatgtatagccacaataaaaaacttatttgtccatgtgacacttaactaatgctatagaaaggctctattgagaagtgataaatgactaagtgatatatcgggctaacaagtagatttcttataattcgaattatagaatctgttctgatatctcctaatttaatcgtatttcctaatgtcctagagaattccaaatgcttatttttcttctaactaaaggtaatggtagtactacttgagcacatagaattgtaggagactgtcattcaacaggtatttgtagaatacttagtatggccttattaaaggccagatttcacagtgattctgtgactaaaa

SEQ ID NO: 595233 - DNA, 334 bp, Homo sapiens
tctgtaagacatgagggaactgaggattgaaaagctcatacaatctctcttagacaacacaatataagcaataagagcttaacaagatgctcattgcaaattccagactctgcccactgtagaccattctctttattggcataaaggggcatgacagccctcagagccaccgagctgagagaagatgaagcagtggcagatctcagaggaaagacagtttatttggtgagtcacatgaagaacaagcagagtgtgagcagaggaaaggcagcagatactgaaaaagaatagaccatgtctggtaatggctataggaggtaagtaaggtcgacgc

SEQ ID NO: 595234 - DNA, 411 bp, Homo sapiens
catagctcgatttctccattttcctctgaaatagctccatccgcccttctcctatgtcatagcgccatccgcaattctcctgtgacagagctccatccgcaattctcctgtgacatagctccatcctcccttctcctgtgacatagctccatcctacattctcctatgacatagctccatcctcccttctcctatgacatagctccatcctcccttctcctatgacatagctccatcctcccttctcctatgacatagctccatcctccattctcctatgacatagctccatcctcccttctcctatgacatagctccatcctcacttctcctctgaaatagctccatcctcgcttctcctatgacatagctccatcctcccttctcctatgacatagctccatcctccct

SEQ ID NO: 595235 - DNA, 129 bp, Homo sapiens
acggcaggtaaagaatggaaagtctgtcaggcgcggtggtcacacttggaatcccagcactttgggaggccaagacgggcagatcacgaggtcaagagatggagatcagccaggcgcagtggctcactg

SEQ ID NO: 595236 - DNA, 305 bp, Homo sapiens
  misc_feature (65)..(65): n is a, c, g, or t
aaagaagatgctttcacaatataacaaaaagtgagttcttccatctaaactctgaaagaaaaganataaacagacgttctactgtgatacacctgtgcttttggttaacttcaaatggttttcagatcttgacttagtatttccagttactctgcttccagaaatagggttcctgaaaatcagagcttacacacacagaccttccatgtatgttttgggaaaaagaagttgactctcaattatttgtgattatggtaactattcatttaaaatttcacaaataattgagagtctccgtcgaactg

SEQ ID NO: 595237 - DNA, 833 bp, Homo sapiens
cgcagtggctcacgcctgtaatcccagcacttcgggaggcagaggtgcgcagatcacgaggtcaggagatggagaccatcctggctaacacggtgaaaccccaactctactaaaaatataagaaattagcctggcgtggtggcgcgcacctgtagtcccagctactcaggaggctgaggcaggagaatggagtgaacccaggagacagagcttgcagtgagccgagactgcaccactgcactccagcctgggccacaaagcgagactccgtctcaaaaacaacaacaacaacaaaaagtccacctgtctggggcaggcaccatgagtggagctggcgggactggcagttgctctgggtgagtcagtgagtgagtgatgggtgaatgtgaaggtctaggacatgactgtacactaccatagactttataaatacagtacagttaggctgcattaaatttataaacatatttttatttttaaaaagtaattgtgctacattagatggcttctttcactcatgaagtgagaaatttttcagctccattacaatcttatggctgaccatcataagtggggtctgtcagtccgtcactgaaggaaacttctttttcccaagatggaatttcgctctgtctccaaaaaaaaaaaaaaacaaacaaaaaaattgtggggccgcggccctgaaaagtttttaacaacctctgttggggcggggcccgggtttgacaccggcaacgggtcccagaaaccgggcagacagggggggtctcccaaaaaaaccgggggccgggtttgaacacccgggtcgggcccggtataagggcagtaaccgg

SEQ ID NO: 595238 - DNA, 466 bp, Homo sapiens
aaggggggcaggcacggggctcacacctgtaatcccagcactttgggaggccgaggtgggtggatcacgagattaagagatcaagaccatcctggccaacatagtgaaaccccatctctactaaaaatacaaaaattagctgggtgtggtggtgcaagcctgtagtcccagctacttgggaggctgaggcaggagaatcctttaacctgggaggcggaggttgcagtgagccaagatggtgccactgcactccagcctaggtgacagtacgagactctgtctcaaaaaaaaaataataatgctaccaggtagcacatagtaggcccagacatgttctaaccccttcacttcacacacttaccatgcaggactgtgtgaagtgggtttctcctatgaaccgctctctataggtggctcacatatggacgagctgtacaaggggtcgatttcgagagtcttggccaag

SEQ ID NO: 595239 - DNA, 248 bp, Homo sapiens
  misc_feature (1)..(1): n is a, c, g, or t
ntggcgcgctgcgccggcgaggaagaggaggaacgccttaacggcggcgacatgcatatcgaagcgcgcgccgccggggaggatgaagcggaagacaaacgcccggcataataggttaaaaaacgccccatcttgttgcgccatacgcaacacctggctatgatgcgtatagcgcaacactcatggagccgtcaggatgataagaagcttcaagcataagggactcaaaaagtttttcgaaaccggtt

SEQ ID NO: 595240 - DNA, 232 bp, Homo sapiens
agcggatccccctcccttggcagagctaattttttatttttttgagtcagggtatcactctgttacccaggctggagtgcagtggtgtgatcacagctcactgcagcctcaacttcctaggctcaaccaatcctctcacctcagtctcccaggtagttgggactacaggcacacgccaccacacccagctattttttattaatgttaggggacaagaagctctgccaggggg

SEQ ID NO: 595241 - DNA, 382 bp, Homo sapiens
tgtacagttcagtggtatgtggccattttttaaaaatcacaaagtttttaaaaagcaagatgtgcgaaatagtgtgtataaatacacacaatctatttgtagatctttcgatcttcaaatgtgaaacacttataatctttctcctactcccgagctcctcagttatgtcttatcaaaacgtaaagtgtttttctcactgattgcacattgaagtattagtccccagaagagatataaaaagattttctttttttttgagacggagtcttgctctgtcgcccaggctggagtgcagtggtgcgatctcggctcactgcaagctccacctcccgggagaattgcttgacacccaggtggcctgggcaacagcaagactatctca

SEQ ID NO: 595242 - DNA, 141 bp, Homo sapiens
gcaggtgtatcaggatcccctcgtctatcctacccttcctcaccacttccgctcagtcccgactccttttccctattatcctatctcctcctgtctattaaagcctgcctcttccaggtaagacccccctaattagaactg

SEQ ID NO: 595243 - DNA, 739 bp, Homo sapiens
  misc_feature (42)..(42): n is a, c, g, or t
  misc_feature (61)..(61): n is a, c, g, or t
  misc_feature (69)..(69): n is a, c, g, or t
  misc_feature (116)..(116): n is a, c, g, or t
  misc_feature (125)..(125): n is a, c, g, or t
  misc_feature (139)..(139): n is a, c, g, or t
  misc_feature (162)..(162): n is a, c, g, or t
  misc_feature (195)..(195): n is a, c, g, or t
  misc_feature (198)..(198): n is a, c, g, or t
  misc_feature (235)..(235): n is a, c, g, or t
  misc_feature (246)..(246): n is a, c, g, or t
  misc_feature (256)..(256): n is a, c, g, or t
  misc_feature (260)..(260): n is a, c, g, or t
  misc_feature (301)..(301): n is a, c, g, or t
  misc_feature (310)..(310): n is a, c, g, or t
  misc_feature (316)..(316): n is a, c, g, or t
  misc_feature (319)..(319): n is a, c, g, or t
  misc_feature (323)..(323): n is a, c, g, or t
  misc_feature (327)..(328): n is a, c, g, or t
  misc_feature (350)..(351): n is a, c, g, or t
  misc_feature (362)..(362): n is a, c, g, or t
  misc_feature (365)..(365): n is a, c, g, or t
  misc_feature (384)..(384): n is a, c, g, or t
  misc_feature (397)..(397): n is a, c, g, or t
  misc_feature (407)..(407): n is a, c, g, or t
  misc_feature (448)..(448): n is a, c, g, or t
  misc_feature (715)..(715): n is a, c, g, or t
atttgttacattaactccttttccctcttctactaaatttcngttcctaatcatggttganccactttnttacacagcagattcaaccatttcaaatgaagtcagccagtcttggntctgttgtntatgggtgtatgtntacacgtgtatctaacatatttntttaaacacacataaaacacatacaatctgggntgngggaaattacagataatttagtctgatattatatgcnactcaattttnccactgtggnttgngtcctgggctttgggtcaagattttattttaaatcactggnagtccatcngcggcnggntggnttgnncagatgaggcatgcgcttttcnnaaggcaatggnacngacctcagggcatgggggncttggggcgtacngtgggtgganccctcaggtaggacttctgtaggtgagacgagggggcggtnatggcttgcctatcccagccgggggcactgaatctactaataacacaagcaattcactctgggaattctgtcaaatatggtggtatctgttaaaagcttggaagtagaaaagggccagttcatcttgatcatacaaattagggaatgcacccacaactgcaataccctcaggcagtatgccaacattgaaatagaaagcatctctaaaaagcactgttcctccatgggtgaagactggtattaggaagtgccacacaatttttgggnattgttgcacaggacacgtggatt

SEQ ID NO: 595244 - DNA, 496 bp, Homo sapiens
  misc_feature (42)..(42): n is a, c, g, or t
  misc_feature (112)..(112): n is a, c, g, or t
  misc_feature (211)..(211): n is a, c, g, or t
  misc_feature (225)..(225): n is a, c, g, or t
taagaggtgataaggaggatgatttaaagattaatttagatntaagttgtaagaaaaattagtatagaatggagtgtattaaattaataattaggagagtggattttttttngttattttggattagtttttatgaaaggatttttgaaatgaaatttatatattttatgtagattggaaaaatttatgttttaattttttttgtattgtngaaattattttatnggatatgttgtaatagtaaaatttttagttagattagtgtttatatatttttttagttatttaatatttaatgttttttttaatatttaagtgatgtttgtttttagtgttttaatgtagtataaattttatgtaaaattatattatgtatttttgatattaatgttgaaattaaatatatgtataagtttttaattttgtgtaatgtgttaagtgttgtttatttaagttattgaaaatgagaataaaatgttgagtttttttaaaagta

SEQ ID NO: 595245 - DNA, 765 bp, Homo sapiens
ggcaggattgcgccactgcactctagcctgggcagcagagtcaaactccatctcaaaaaaaaaaaaaaaaagttcttcgacctactttgtttgactgtagttcataaaacccccgattccaaagggtcctgccccacacccaggaaaaaggaattgctacctcagagaggccaagaaggattctagaacagacaggccttgcttgggttttccccactcagtctatcagcaattcgatcaggccctttttatatcccgtgtttctccacagctctccattacttttgttaagccttaagcattaaaaagtggacaattttccccgtggattcttggggtcttcatgctgaagtttaaattacattgttaaattacattttgcattgccttttctctcatttaatcagcctcattgcaggtgaatttttcagcaaacctccaggggccaaggggcctttggcccccacacttttatttgtttgcttacatacctagtacatgggattggtttcttaactgtgtgtccctttaatccatttatatgatccatgctggtgaactgtgggaatacagaacctaagctttattgaaattactgaaggctgctgggggtggtggctcacacctgttcatcccagactttgggaggccgaggcaggtggatcacctgaggtcaggagtttgagaccggctgccattgtgtgggaccgtctctcttaatccaacgtacctgggtttgtggtgtgccctgtgtccagtgctcga

SEQ ID NO: 595246 - DNA, 1002 bp, Homo sapiens
gaccgtacccagcaaggtcgatcgcgtattacgaatcatagaccatgaggaagccgaagatgaaatgagaagcacattcagcaagagaataactgtctcgagtcaatgtgacagctcagtatgtaacaaaatactatgggtcatatttaacaggggtctaacattatggataataatggaatacctgggtcggaggttcagacagctggactcttcttcgagctgggtccgatccgatggagtgtgcagagtaggctcaccaatgctatgaggcatagagtgccaaaaggtcgggtacctatcgtgcgattcagcagaatagacaccagtgtcacctgagacataaacagctgccaatgtcgtcggtctcagcaccgaaggagatgttacaacttgctgcatatggagctagctggtctcgctgtacagaaatacaccaggattacgaacagacaactacgctttgccgcgtgaacctcccactgatgcgatgggcgtccttgcacagtgtgtgcacacaggtcatgcttatgactcaaaaaatctgaccaattgggcgtccatggaggaaatatagctgcctgattgtgaaacgtaagacaaaggggaggaagccgaccgttacagctgccggattatggacgatcgcaaaccggagcaggttcctggtcttgccttgaagttccccaacaacagacaccgaaaattcccctcgcaaagcgtccgtttgggctccgcggaaagcagctttcaatccttacagagttcccgtattcttgaaaaaggacgggaacgtgttcaacctcggggagctggccgttggcgcctatggacgaagccaaaacacgcaatatcccacgtccacgtcgcatacgaacgccgttaagcaagccacaaatcggaaacaactttcttgggaacaacagcgaaagaatttccagtatggtgaacacaaacacagtatcacaacagcaaaagaaccattgcgtattgaagtctgga

SEQ ID NO: 595247 - DNA, 202 bp, Homo sapiens
atggaggactggaaggatatagccaagagcagtggaaagccattggaaggttctaggcaggagatgacacaatcccattcccattttgcaaaaatgactctggcaattgtggacagaatgagctgaggggtaagaggggaagcagggccaccacctcagatgctgttagttgtccaggccagaggtgacagaggcttggatg

SEQ ID NO: 595248 - DNA, 302 bp, Homo sapiens
cttttttaaaacgggggcccctcaggccagccccaacaaattttagggatggccagtgccctcccattatggggcaggcccaaccacccatgtaaggttcccccaaaggtttcaagtgggtcccctctttgttttttaaacttttaaggaccggccgctttgacctttgggaatatggtaaggggatggggaggcaggggacccaaatgttccccccccagggtccttaaaaaggaggggggtttggggttttttttaccggtccaaaaaaaagttaatttccaatataagatttaagtgga

SEQ ID NO: 595249 - DNA, 780 bp, Homo sapiens
gtggactaccgtaataaccgtagccttttctttatcttggcttattccagggagggagagtcgtctagatgcacactagagtaggggctgctttcgggtttaaagatgtggcacaaggaaaacactcatagccttacggtaacactgcctaagcttcacattatgaaccaagtgacatcagaagatcatgagaaccaagtgaagctatctactgatcagacgcacacatgtgcagctactaaactcacttgatagagctgctactagcactcaatactccttttgggaagacaactaatgcaccattgacactgtgggaacaccctacaggagaatgtgctgactggtgagccaagaacctaggagaactgaatgcatattgcgaacacacatatgacaatcgctaacctaaagaatatgtgagacatccagagctcacagtcatgcacactgctcttcatgaccacagagagacattcgttgactaatactgatatgacaccgtcagactagatccttacttatatgacgcggcactcctttgctatgctgtcctcccctatgcctaagctcgagcgaacttgaaggatgcacaggattgcttacgcatgagcaacatagactctatgtagtgcctttactgcacaaatgtcggtgaatgaacctttcataggctagggcaggaggttcacctgagccctatactatccggctcttgttgcctacattcccaagggtaagacgggatcttacccgacacccgggatgctgactcgtggg

SEQ ID NO: 595250 - DNA, 1528 bp, Homo sapiens
  misc_feature (86)..(86): n is a, c, g, or t
  misc_feature (99)..(100): n is a, c, g, or t
  misc_feature (120)..(120): n is a, c, g, or t
  misc_feature (122)..(122): n is a, c, g, or t
  misc_feature (138)..(138): n is a, c, g, or t
  misc_feature (142)..(143): n is a, c, g, or t
  misc_feature (145)..(145): n is a, c, g, or t
  misc_feature (158)..(158): n is a, c, g, or t
  misc_feature (181)..(181): n is a, c, g, or t
  misc_feature (198)..(200): n is a, c, g, or t
  misc_feature (523)..(523): n is a, c, g, or t
  misc_feature (1293)..(1293): n is a, c, g, or t
  misc_feature (1347)..(1347): n is a, c, g, or t
  misc_feature (1470)..(1470): n is a, c, g, or t
  misc_feature (1490)..(1490): n is a, c, g, or t
  misc_feature (1499)..(1499): n is a, c, g, or t
actatgttcttaagatcgagagtcggacgtcctattaacaatgagaagattgatatattgatgatcgacatggatggaacacaaantaaatctaaggtnnggtgcgaacgccattcgtgngngtgtcccttgccgtcngcanngntggtgccgttganaagggggtccccctgtaccgcanatcgctgacttggctgnnnactctgaagtcatccatgcgcgatgttccctctggcgtacaaatgtctaacaattggcgggttctcaatgtcctggcaaatcgagatgcttggccattgcattgagttcaatgatccgtcccaagatctggatgcatgacaatactttcagcggaagccaatgcagcaataaggagcagaggtttacacaactgaagaatgtcatcaaggagaaatatgggaaagatgccaccaatgtgggggatgaaggcgggtttgctcccaacatcctggagaataaagaaggcctggagctgctgaagactgctattgggaaagctggntacactgataaggtggtcatcggcatggacgtagcggctccgagttcttcaggtctgggaagtatgacctggacttcaagtctcccgatgaccccagcaggtacatctcgcctgaccagctggctgacctgtacaagtccttcatcaaggactacccagtggtgtctatcgaagatccctttgacccaggatgactggggagcttggcagaaagttcacagccagtgcaggaatccaggtagtgggggatgatctcacagtgaccaacccaaagaggatcgccaaggccgtgaacgagaagtcctgcaactgcctcctgctcaaagtcaaccagattggctccgtgaccgagtctcttcaggcgtgcaagctggcccaggccaatggttggggcgtcatggtgtctcatcgttcgggggagactgaagataccttcatcgctgacctggttgtggggctgtgcactgggcagatcaagactggtgccccttgccgatctgagcgcttggccaagtacaaccagctcctcagaattgaagaggagctgggcagcaaggctaagtttgccggcaggaacttcagaaaccccttggccaagtaagctgtgggcaggcaagcccttcggtcacctggttggctacacagacccctcccctcgtgtcagctcacggcagcttcgaggcccccgaccaacaacttgcaggggtccctgctagttagcgccccacccgccgctggagttcgtaccgcttccttagaaacttctacangaagcccagctccctggagccccgttggcagctctagctttgcagtcgtgtaanttggccccagtcattgtttttctcgcctcactttccacccaagtgttctagagtcatgtgagcctcgtgtcattctccggggtggccaccggctagatccccggtggttttgtgctccaaatnaaaagcctcagtgacccctngaaaaaaanaaatcaaaaactcgagactagttctctcc

SEQ ID NO: 595251 - DNA, 918 bp, Homo sapiens
  misc_feature (250)..(250): n is a, c, g, or t
  misc_feature (636)..(636): n is a, c, g, or t
catctttttttttgagacagtttcgctctgttgcccaggctggagtgcagtggtgtgatcttggctttctgcaacgtctgccttccaggttgaagaggttctcctgcctcagcctccttagtagtgggattacaggtgcccgctactatgcccggctaatttttcttttggtatttttagtagaaatggggtttcaccatgttggccaggctggtctcaaactcctgacctcaagtgagctgactgcctnggcctcccagagtgctgggattagtcgtcatcttttgttaaaccaggatttgatttttttcttttcttttcttttcttttcttttttttttttttggagacagagtctctctctgttgcccaggctggaggtgcggttggcccaatctcggcttcactgcagcctccgcctgccgggtcaagcgattctcctacctcagcctcctcagtagctgagattacaggcttgcaccaccatgcccggctaattttttggtgttttagtagagatggggtttcaccgtgctggccaggctggtctaaaactcctgactgcaaatgatcagcccgctcagccacccaaagtggttgggattacggggtgagccactgtgcccagcgtgattntttctttcttgaacgcccgcttggccttggggttgtgcggaacaagggcttgtccccttttatttggcccccctttttgtgggcctgtccacccgggctcagttttgcttgtgtgctttccccgtgcctctcttgggggggcgccctttcattactggcccgggcctagcggcgggggattggccctgtgtgaggagttcggcgcgatgactcggagtcccgggccgggtcccggggcgtccccttgtctggcctgccctgaatgtgggcgcgccttcgctg

SEQ ID NO: 595252 - DNA, 182 bp, Homo sapiens
gaggtgggacactgggtggcggttggcagtggttcatctctgggaggagaagccggtcagcctcaccatccatgcagcatgtgagaatgcaccccacccaccacagagagggtgccatgaagaagatgtcgaaacggacaaatgaactgcctttaatgcatgaatgcacaatgaatgctggc

SEQ ID NO: 595253 - DNA, 225 bp, Homo sapiens
atgaaagctgccctacactgtacaaccgtaggatgcggatcatgtacttgcattgaagtagctgttggtaacacaggattgactgtgttttcagacgagctaaaagtcggccgcactataaatggcacattctatggaggatgtagtgtacattctgtctgctggtcactgactatccgaatatggatgcattgcgactaatgtaccggtatagagcattcgtac

SEQ ID NO: 595254 - DNA, 1228 bp, Homo sapiens
  misc_feature (223)..(223): n is a, c, g, or t
  misc_feature (993)..(993): n is a, c, g, or t
  misc_feature (1047)..(1047): n is a, c, g, or t
  misc_feature (1170)..(1170): n is a, c, g, or t
  misc_feature (1190)..(1190): n is a, c, g, or t
  misc_feature (1199)..(1199): n is a, c, g, or t
atatggtctaggttgaggctgtgtgaatcggagaggctccagtggtgcagaattcagtgaagcatgcgcattggagcagaggtttacacaactgaagaatgtcatcaaggagaaatatgggaaagatgccaccaatgtgggggatgaaggcgggtttgctcccaacatcctggagaataaagaaggcctggagctgctgaagactgctattgggaaagctggntacactgataaggtggtcatcggcatggacgtagcggctccgagttcttcaggtctgggaagtatgacctggacttcaagtctcccgatgaccccagcaggtacatctcgcctgaccagctggctgacctgtacaagtccttcatcaaggactacccagtggtgtctatcgaagatccctttgacccaggatgactggggagcttggcagaaagttcacagccagtgcaggaatccaggtagtgggggatgatctcacagtgaccaacccaaagaggatcgccaaggccgtgaacgagaagtcctgcaactgcctcctgctcaaagtcaaccagattggctccgtgaccgagtctcttcaggcgtgcaagctggcccaggccaatggttggggcgtcatggtgtctcatcgttcgggggagactgaagataccttcatcgctgacctggttgtggggctgtgcactgggcagatcaagactggtgccccttgccgatctgagcgcttggccaagtacaaccagctcctcagaattgaagaggagctgggcagcaaggctaagtttgccggcaggaacttcagaaaccccttggccaagtaagctgtgggcaggcaagcccttcggtcacctggttggctacacagacccctcccctcgtgtcagctcacggcagcttcgaggcccccgaccaacaacttgcaggggtccctgctagttagcgccccacccgccgctggagttcgtaccgcttccttagaaacttctacangaagcccagctccctggagccccgttggcagctctagctttgcagtcgtgtaanttggccccagtcattgtttttctcgcctcactttccacccaagtgttctagagtcatgtgagcctcgtgtcattctccggggtggccaccggctagatccccggtggttttgtgctccaaatnaaaagcctcagtgacccctngaaaaaaanaaatcaaaaactcgagactagttctctcc

SEQ ID NO: 595255 - DNA, 322 bp, Homo sapiens
tgagaagatgggctcgcacctcgccaaggattaccaatgcaaggaaactcatgtctcgacaacagggatagaagatttccaaaggtcttttgagttaggaagccaaggcaattagaaaggtgttccggagggttgttgaaagggggttttaaatagccaaaaaagaattttttttaaaaagcccaaaattttagcacggagggaagaaggaaaaagggtgtctccaaacagcgggttgggaaagggaggtttccaaattaccaaaaagccccagaaatttttgggggcccaactgcgctgaaccaaaaataagggggacaaa

SEQ ID NO: 595256 - DNA, 1560 bp, Homo sapiens
  misc_feature (86)..(86): n is a, c, g, or t
  misc_feature (99)..(100): n is a, c, g, or t
  misc_feature (120)..(120): n is a, c, g, or t
  misc_feature (122)..(122): n is a, c, g, or t
  misc_feature (138)..(138): n is a, c, g, or t
  misc_feature (142)..(143): n is a, c, g, or t
  misc_feature (145)..(145): n is a, c, g, or t
  misc_feature (158)..(158): n is a, c, g, or t
  misc_feature (181)..(181): n is a, c, g, or t
  misc_feature (198)..(200): n is a, c, g, or t
  misc_feature (1325)..(1325): n is a, c, g, or t
  misc_feature (1379)..(1379): n is a, c, g, or t
  misc_feature (1502)..(1502): n is a, c, g, or t
  misc_feature (1522)..(1522): n is a, c, g, or t
  misc_feature (1531)..(1531): n is a, c, g, or t
actatgttcttaagatcgagagtcggacgtcctattaacaatgagaagattgatatattgatgatcgacatggatggaacacaaantaaatctaaggtnnggtgcgaacgccattcgtgngngtgtcccttgccgtcngcanngntggtgccgttganaagggggtccccctgtaccgcanatcgctgacttggctgnnnactctgaagtcatcctgccagtcccggcgttcatatgtcctcaatggcggttctcatgctggtgaacaagctggaccatgccaggcagcttcatgattcctcccaggatcgtgtgcagaaatacttcacgggcaagcccatgcgtcattgggagacagagggtttctcacgcacaaacctggaagaatgtcgactcacagggagataatatgggaagagatgcacactcagagtgtgggggatcgtaacggcggggtttgatccccggacattcggtgggaggaatactcgataggcttgtccgagtggaagagtcagtggtatagtggagaaggtagggctaatctgtgattaccgtgtcgtggcatctgatattgagacgtgactggatcgcgcgagttcttcaggtctgggaagtatgacctggacttcaagtctcccgatgaccccagcaggtacatctcgcctgaccagctggctgacctgtacaagtccttcatcaaggactacccagtggtgtctatcgaagatccctttgacccaggatgactggggagcttggcagaaagttcacagccagtgcaggaatccaggtagtgggggatgatctcacagtgaccaacccaaagaggatcgccaaggccgtgaacgagaagtcctgcaactgcctcctgctcaaagtcaaccagattggctccgtgaccgagtctcttcaggcgtgcaagctggcccaggccaatggttggggcgtcatggtgtctcatcgttcgggggagactgaagataccttcatcgctgacctggttgtggggctgtgcactgggcagatcaagactggtgccccttgccgatctgagcgcttggccaagtacaaccagctcctcagaattgaagaggagctgggcagcaaggctaagtttgccggcaggaacttcagaaaccccttggccaagtaagctgtgggcaggcaagcccttcggtcacctggttggctacacagacccctcccctcgtgtcagctcacggcagcttcgaggcccccgaccaacaacttgcaggggtccctgctagttagcgccccacccgccgctggagttcgtaccgcttccttagaaacttctacangaagcccagctccctggagccccgttggcagctctagctttgcagtcgtgtaanttggccccagtcattgtttttctcgcctcactttccacccaagtgttctagagtcatgtgagcctcgtgtcattctccggggtggccaccggctagatccccggtggttttgtgctccaaatnaaaagcctcagtgacccctngaaaaaaanaaatcaaaaactcgagactagttctctcc

SEQ ID NO: 595257 - DNA, 210 bp, Homo sapiens
tcctgtggcttggcagcccagtatgctgcagtaacactcattcccagtgcttcactatgtgccagtggcccagaccccagaatccagaggcgtgacactaaagacatcggctaatacatagcaagatgtgtgcaaagttctgtggggagcccagcagtgtggctccacactgactcccactctggagtggggcagtgtgcatgaagctgc

SEQ ID NO: 595258 - DNA, 1470 bp, Homo sapiens
  misc_feature (86)..(86): n is a, c, g, or t
  misc_feature (99)..(100): n is a, c, g, or t
  misc_feature (120)..(120): n is a, c, g, or t
  misc_feature (122)..(122): n is a, c, g, or t
  misc_feature (138)..(138): n is a, c, g, or t
  misc_feature (142)..(143): n is a, c, g, or t
  misc_feature (145)..(145): n is a, c, g, or t
  misc_feature (158)..(158): n is a, c, g, or t
  misc_feature (181)..(181): n is a, c, g, or t
  misc_feature (198)..(200): n is a, c, g, or t
  misc_feature (523)..(523): n is a, c, g, or t
actatgttcttaagatcgagagtcggacgtcctattaacaatgagaagattgatatattgatgatcgacatggatggaacacaaantaaatctaaggtnnggtgcgaacgccattcgtgngngtgtcccttgccgtcngcanngntggtgccgttganaagggggtccccctgtaccgcanatcgctgacttggctgnnnactctgaagtcatccatgcgcgatgttccctctggcgtacaaatgtctaacaattggcgggttctcaatgtcctggcaaatcgagatgcttggccattgcattgagttcaatgatccgtcccaagatctggatgcatgacaatactttcagcggaagccaatgcagcaataaggagcagaggtttacacaactgaagaatgtcatcaaggagaaatatgggaaagatgccaccaatgtgggggatgaaggcgggtttgctcccaacatcctggagaataaagaaggcctggagctgctgaagactgctattgggaaagctggntacactgataaggtggtcatcggcatggacgtagcggctccgagttcttcaggtctgggaagtatgacctggacttcaagtctcccgatgaccccagcaggtacatctcgcctgaccagctggctgacctgtacaagtccttcatcaaggactacccagtggtgtctatcgaagatccctttgacccaggatgactggggagcttggcagaaagttcacagccagtgcaggaatccaggtagtgggggatgatctcacagtgaccaacccaaagaggatcgccaaggccgtgaacgagaagtcctgcaactgcctcctgctcaaagtcaaccagattggctccgtgaccgagtctcttcaggcgtgcaagctggcccaggccaatggttggggcgtcatggtgtctcatcgttcgggggagactgaagataccttcatcgctgacctggttgtggggctgtgcactgggcagatcaagactggtgccccttgccgatctgagcgcttggccaagtacaaccagctcctcagaattgaagaggagctgggcagcaaggctaagtttgccggcaggaacttcagaaaccccttggccaagtaagctgtgggcaggcaagcccttcggtcacctggttggctacacagacccctcccctcgtgtcagctcacggcagcttcgaggcccccgaccaacaacttgcaggggtccctgctagttagcgccccacccgccgcagctccgtggagatcgtaccgcttcggataaaacattctacagaagccaacgacttcatagacggacatgctgtacagctgtagactatagtaaatcacgtaatttggcccaagtcatcagtgtctgctacgcgtcacggtactaccaaggtagttagactacacagaagcctcatgtaatctatgagggtagcgacaaggataaactcccc

SEQ ID NO: 595259 - DNA, 717 bp, Homo sapiens
  misc_feature (17)..(17): n is a, c, g, or t
  misc_feature (62)..(62): n is a, c, g, or t
  misc_feature (80)..(80): n is a, c, g, or t
  misc_feature (130)..(130): n is a, c, g, or t
gacacgaccctctcacnctagcgggactccgaagtggactctaacaggtcccagtattaggngctattcttaaatagttnaattgccttgaaaagtccttacttaaagtattatttagcaaatcctggancccttgactaaaaatcccatttttactcaacttgttaagggcagataagactttggcaatttgattaactgcacaaatatgttatccaaactgagtatttattgctggtctgaggcttgccttgtttacacttaagtagatttacgttgtttccacaatggcagatatcaactttaaggatttaatagtgacctattcaataaggcaatcatcttggtagcaaacttttatttaaatcttacataactcaagctttataaaaagccaacataattgaaaattgggttctccctctaaagccttaagtattcaaagctcaaaacagttaatttaaaaataagcaaacaaataaaacaaaaaaaccctgccagcagatcctgctgaaatactaaaaaaaaaaaaaaaaaaaaaaaacacccctaaaggagcttaatctttacaaaggttccgttggctcaaaagctttaaaatcaaagtttttttaattttacaaaaaagggagagggtcttcatgccaccatttccttaaagcctcatttttttcatccaattgggccacaaataaaatttttgggggcccctgtttt

SEQ ID NO: 595260 - DNA, 813 bp, Homo sapiens
ttgtgtgcgactaaaccacgtgaatgtctctgttttgtccacaccggcagggttgtgcattgttcggctgcaagacccgcttgtttttgccgggagggttgcatggccggcgctcgacgcattccgcacttggctctcacgcgggtgtaaggggtgcttgcctcccccgtagctctgtggttgaaaaatttgtcccgcctgtctcgttggtgggatgtctgttggatgacccccgcggttttcttccgcagacactggcacggggtaaaggtgtggttccacacccctttgggccacgtgctcttccctccggatggaaggcgtttgtgcccccacctgttgtggaggggacgcgatgccggatctgtgaccactgtgttcagcgtcacgttccggcctgtccgttgtcgccctgagcttgatcacatgtgctcctggcacattctttgggcttaacctggaggacttcccggaattcctgttcagggtgtcccctccattgcctggaagaggagcctggtggctgtccagccactgggggcccaggcacaagccgtgggcacttcctcccttccactcaagcccgggctccctcctcctgtcgtgggcgtccattgtgacccctggccctcttcttatccagcaccggccctgtggcctgttcaatggcagatacccctgacccttgactccccggtggggaggtggccacaggatgctggactgaatcagaccctgacagtttttcaggcatttttatttccccatcgaattgacaaccttggcccaataaagttgaattttacccaccca

SEQ ID NO: 595261 - DNA, 431 bp, Homo sapiens
cctggagggggttttctttatttccaaacaaggggagctgcttttttcattattgctgggacctgttaattgctttttgacaatgatgatctcatggctaaaagggctgaaccccgtatccttttggaataaatcaaagttgtttcaagtcttgaggaaaactaaaaccaggggggagtattattgctagccctggctttgggttgaaaagtgggttttcatccagcttccaaaaagctttttgtcaacgttgggggacctaaacgttttaaagctttatctaatctggtttctgggcttctcttggccccatgggtcattgttttttctgggacaacaaaaccctaattttgggcgccattctgctagtattggggcaggaacaattcatatccaggggacatctgatgggcatgttcctttaaagaaaa

SEQ ID NO: 595262 - DNA, 163 bp, Homo sapiens
ttccctttcaaacccccattttcaccctgttttttcccctcccccagttttttggaaatttgtgatcgggggattttagttgcttatttgttttgactcttgtgggctgtgggccctggagtaaaaatttttggagaaaaaaaaaccgtttttttcctcttga

SEQ ID NO: 595263 - DNA, 662 bp, Homo sapiens
acatgttttaagattatagccaacatgtccagtgctatcctgatgcatagtaatcgtccgttcatagggactgtcacgaatggtcatggtatctttctctcgaaaagcctgtatgagcacgctgtgcgctagtcagagctccatcctgcacagtgtcaccattgatctcaagtacttggtcctcaaatctcagaccatccaatgaggctgtagaattagcctggactagctgacctaatataccattatctattgatttaagcctgagtccaatgtttccatcgtgatccttcacagaaatgacttctcgaatcccgtgcttaatgtctgctctgcgaattccaacatcattaccagttacagtagccaccatatagtttatactgcaaggtcttgctagcatctgcccctgaagtggtgcaccagaaaccacggctacatttgcacgtatttcttcttcatttacactcagctccatgtattgagagagctctggatacagtctggcatacagatttccatcgtgagggataggagcagaagcttctgccataactgctggattggcagggtttgcagaaaaagcagtttgagcctgaattactttgtctaccttcaagtcttcgacagatggatagagagacatttttgcagcattcttc

SEQ ID NO: 595264 - DNA, 969 bp, Homo sapiens
gtttctacgtggtagcgaaattcactcaggcaaggtgtaagttgcaacacaggctgattggtaactgttgcaatgtaatttccgccttgtttttcatgggccacgtttcgccccttgttgcgtttacccctatgcgaatccaccgaggtttcctccccccggtggcttacctctacctcatgtggcgacgtcttgttcgcaggcccatctaacttgcgtgtgtttcgcgtttcgcgcgtgccaagcaaacgagtagcatgcaaaggccgttaaagttttcgatctttctcctgaaggattcctgcccaggctcgtgacgttgtgtcttggccctttcgcgtcgcagttgtatcctaggtgactaggcctgccccacgggtcactgaatgcttcttcccgccttttcggttggatctcagtgagacctactgttcccccgaggattgcgaaactactaggatatgcctcacgttctccctaggcccctaccacgttgaggagttctctttctctatgacgtattcttaacgtgtctatcgactatgtcctcataagcgtagttgcgaatgaagatagtaagcgttgagagaggactaatgggaacgctgcgggatgaggacgagagaaacggactacatttcttacgcaatagatgcactcgctcagtgatactctcactgatcggcagcgaatgacaggcctcggctgatctcattggcgtatcataggatgacgataccatgcttgtggttgacgagtcacgggataccccggtgtctatcagctcgcgcacttcgcttacgctccttactcttaatggagccaaggatcctgctgggacctttcaatccatgatccctttaagtcttccagtcttctcccagtgtcatgctcctatcgtttccctctcttcatggttcttctcccaggtattctcttcccaggccttaacccatggttgtatacggg

SEQ ID NO: 595265 - DNA, 1581 bp, Homo sapiens
  misc_feature (86)..(86): n is a, c, g, or t
  misc_feature (99)..(100): n is a, c, g, or t
  misc_feature (120)..(120): n is a, c, g, or t
  misc_feature (122)..(122): n is a, c, g, or t
  misc_feature (138)..(138): n is a, c, g, or t
  misc_feature (142)..(143): n is a, c, g, or t
  misc_feature (145)..(145): n is a, c, g, or t
  misc_feature (158)..(158): n is a, c, g, or t
  misc_feature (181)..(181): n is a, c, g, or t
  misc_feature (198)..(200): n is a, c, g, or t
  misc_feature (523)..(523): n is a, c, g, or t
  misc_feature (1346)..(1346): n is a, c, g, or t
  misc_feature (1400)..(1400): n is a, c, g, or t
  misc_feature (1523)..(1523): n is a, c, g, or t
  misc_feature (1543)..(1543): n is a, c, g, or t
  misc_feature (1552)..(1552): n is a, c, g, or t
actatgttcttaagatcgagagtcggacgtcctattaacaatgagaagattgatatattgatgatcgacatggatggaacacaaantaaatctaaggtnnggtgcgaacgccattcgtgngngtgtcccttgccgtcngcanngntggtgccgttganaagggggtccccctgtaccgcanatcgctgacttggctgnnnactctgaagtcatccatgcgcgatgttccctctggcgtacaaatgtctaacaattggcgggttctcaatgtcctggcaaatcgagatgcttggccattgcattgagttcaatgatccgtcccaagatctggatgcatgacaatactttcagcggaagccaatgcagcaataaggagcagaggtttacacaactgaagaatgtcatcaaggagaaatatgggaaagatgccaccaatgtgggggatgaaggcgggtttgctcccaacatcctggagaataaagaaggcctggagctgctgaagactgctattgggaaagctggntacactgataaggtggtcatcggcatggacgtagcggctccgagttcttcaggtctgggaagtatgacctggacttcaagtctcccgatgaccccagcaggtacatctcgcctgaccagctggctgacctgtacaagtccttcatcaaggactacccagtggtgtctatcgaagatccctttgacccaggatgactggggagcttggcagaaagttcacagccagtgcaggaatccaggtagtgggggatgatctcacagtgaccaacccaaagaggatcgccaaggccgtgaacgagaagtcctgcaactgcctcctgctcaaagtcaaccagattggctccgtgaccgagtctcttcaggcgtgcaagctggcccaggccaatggttggggcgtcatggtgtctcatcgttcgggggagactgaagataccttcatcgctgacctggttgtggggctgtgcactgggcagatcaagactggtgccccttgccgatctgagcgcttggccaagtacaaccagctcctcagaattgaagaggagctggagcatgccacaggacctaagtattgtccgagcaaggatagcttacaggaagatccgcctttaggccagaggtaacgcatgtgcggcaaggctaatgccactttcgtgtacgaccttgttggtctatcacatgatcgctcctccctctccgtgtcagtctcagtgcaagctcgatggcccccggacacaacaactttgcaagggtgtccctgtcgtagttgagcgcccctagctgcgcgtgtggagttcgtaccgcttccttagaaacttctacangaagcccagctccctggagccccgttggcagctctagctttgcagtcgtgtaanttggccccagtcattgtttttctcgcctcactttccacccaagtgttctagagtcatgtgagcctcgtgtcattctccggggtggccaccggctagatccccggtggttttgtgctccaaatnaaaagcctcagtgacccctngaaaaaaanaaatcaaaaactcgagactagttctctcc

SEQ ID NO: 595266 - DNA, 1450 bp, Homo sapiens
  misc_feature (86)..(86): n is a, c, g, or t
  misc_feature (99)..(100): n is a, c, g, or t
  misc_feature (120)..(120): n is a, c, g, or t
  misc_feature (122)..(122): n is a, c, g, or t
  misc_feature (138)..(138): n is a, c, g, or t
  misc_feature (142)..(143): n is a, c, g, or t
  misc_feature (145)..(145): n is a, c, g, or t
  misc_feature (158)..(158): n is a, c, g, or t
  misc_feature (181)..(181): n is a, c, g, or t
  misc_feature (198)..(200): n is a, c, g, or t
  misc_feature (523)..(523): n is a, c, g, or t
actatgttcttaagatcgagagtcggacgtcctattaacaatgagaagattgatatattgatgatcgacatggatggaacacaaantaaatctaaggtnnggtgcgaacgccattcgtgngngtgtcccttgccgtcngcanngntggtgccgttganaagggggtccccctgtaccgcanatcgctgacttggctgnnnactctgaagtcatccatgcgcgatgttccctctggcgtacaaatgtctaacaattggcgggttctcaatgtcctggcaaatcgagatgcttggccattgcattgagttcaatgatccgtcccaagatctggatgcatgacaatactttcagcggaagccaatgcagcaataaggagcagaggtttacacaactgaagaatgtcatcaaggagaaatatgggaaagatgccaccaatgtgggggatgaaggcgggtttgctcccaacatcctggagaataaagaaggcctggagctgctgaagactgctattgggaaagctggntacactgataaggtggtcatcggcatggacgtagcggctccgagttcttcaggtctgggaagtatgacctggacttcaagtctcccgatgaccccagcaggtacatctcgcctgaccagctggctgacctgtacaagtccttcatcaaggactacccagtggtgtctatcgaagatccctttgacccaggatgactggggagcttggcagaaagttcacagccagtgcaggaatccaggtagtgggggatgatctcacagtgaccaacccaaagaggatcgccaaggccgtgaacgagaagtcctgcaactgcctcctgctcaaagtcaaccagattggctccgtgaccgagtctcttcaggcgtgcaagctggcccaggccaatggttggggcgtcatggtgtctcatcgttcgggggagactgaagataccttcatcgctgacctggttgtggggctgtgcactgggcagatcaagactggtgccccttgccgatctgagcgcttggccaagtacaaccagctcctcagaattgaagaggagctggcgctacctagaggctaatgcttggccggtacggatacttcagagactcccctctgggtccaggtatgctgtggtgcagtgcccacgacccttcgggtcacctgttggtctacttcggtaacgccctccccttgcgttgtcaggctcagggcagcttctgaggccccctgatgcaaggggttgcacgtgggttcactggtctacgttgagcgctcccacctggccggtggggttcgtccccgtgtccttagaatctggcttacagaagcaagctcctgggagccctgtgtgggggttccaggcttggcggcctggtattgggccagtctttggttcttccctccctttccccattgttgaggctggggtccggccccggg

SEQ ID NO: 595267 - DNA, 478 bp, Homo sapiens
ggcacggtcttgcccagcaggagttgtcttcgaccgtccgcgctttcatgcgtacttccctagatcttccccatccgaattgcgccagttccaacgtatcactccgtttgttcgccggcacagcattttaaggagacccaccgcacgtcttcgaccacctcgataacacccccctcagtagtcactaggccagccgggatggtgacgctgcccgcgctggcctatccggcgctgttcatcgccttcgccctattcttcgttctgcctctgggcttccacggcctctgggtgccggatgaaacgcgctatgcacaggcggcccaggagatgctgaacacggacaactgggtggtgccgcacttcatggggctgcgttatttcgagaaacccataggaggctattggctgatcgcgatcgcccaggcgctattcggcgacaacctcttcggtacgcgcatagcctcggcgcccccggccg

SEQ ID NO: 595268 - DNA, 394 bp, Homo sapiens
ctgtcaaatcattcatcgtatttgtggtttatagctattgtaaatggattctgttcttgattcttttttagaaaattcgttgttggcatatagaaacattacggatttttgtgtttattatgtatacagcaactttactgaatttgtttattagttccagtagttttttggttgattctataggtttttttataattaagatcatgtcttctgcaaacagagacaacttgactctcaatttgacaattgaggagcatgtcatttaatttccatgtagttgtacagtttccaaagttcctaatgttattgatatctagatttttttcccttgtggtcagaaaagatacatgatatgattatgatttttaaaaatattgtgaagacttttttatga

SEQ ID NO: 595269 - DNA, 1152 bp, Homo sapiens
ggccaaggagggctcaggccgagacaacttggcagtctgccgccgtcggcatcgagctcggcgcttgtgctcactgatccgcctccatgggggccaccgtgcatgtcgatgccgccggtgggaacgaagaatgtccatcaagatgtccagtgtctgccactagtcaggaggtcatcctctcccccgcttgcgtgcgctgtgaatgctgctgcgctacatctaatcaaaggccactccacaagtatcatggattggagtgggcggcacccgtgctacgatggccgaccgctccttggcatactacccatgactggccgtgaagaattcatggcagcatgcgcctgttctcaatattgcatgggcagaggactatacaatgcagagggcacggtggtcacgagcctcccgagacactatccatgactggggctgtggcccaaatttcgatggaatgaatgcctgaccatcagccttgcttaacaacggaggtcaccactattatgcctagataggggcgcgcttgtgttaacgtcacaaactagttcaagctcccgaaggtttggcattacgtcgacaggaaacgtcggtgcggaattgcaaaatggtaaacacagttgggaaagtccatgcaattcaaactagaacaacgccccctcaaagtgtcataaaacacagttgcccataggtttctttcccatttcacctatgcagaagaaaaggccgatttgatacttcttagagagatacaccggcagttgacggagccaaaggaaaatacgggggtgggccccgtgtaagttaattccaatgaaaagtgatatgccattgggttggatagtccacggttaagcgggtcaagcctcaagttaggccgaggatagtaggctcactacacccttgaacgggaggctatcacacccagttgcccagaacggcggtttttccaccaaggtccacattcgttctcaaacgcaaaagtaatgccattcttttccccttttggtggcccagaggaacggcgtttgacacgccttttaagtttccaccaaatgtttgaaccgccaacggtacaggtattaaagccccgtggcgtttctagaacgcggttggggaaggggcccagttaaacgttcaaagtcccgttaaacacca

SEQ ID NO: 595270 - DNA, 117 bp, Homo sapiens
cgagcgaagggataggaagtatcgacgtgcgaaggataggaagtatcggcgtgcgaaggataggaagtacccagcttttgttcccctcttcgttctgcatcgtgttgtagcccttgc

SEQ ID NO: 595271 - DNA, 281 bp, Homo sapiens
agaaggatccccgcgaaaatgcggcggatagaatcataattctaatggtcaccttagagtatattatgctggcattctggaagcatctgctgctggtatttctatgttattaaagccatttacagaaagcccagcatctttctcatggagattcttattccacatgtgtcttccccgtgattccttttccacatgtgatggcctagagctccttctcaaattaccctgaggttgctgctccagagacatgtttgctgtcgccaaggctactggccctttgt

SEQ ID NO: 595272 - DNA, 752 bp, Homo sapiens
ttgggtcgttacccgccaattggaccattatgaccgctattattccagcaatcagcagagttcgaccaaacatggatcatcggtgttaacaagttatcgatatttgctgactactgttaggatcatttgactgtactagggagatcttactttctagctgatagtgcgtgtgacaggacctatgtttgtgattctgattacttattgagattatgtgaatcttaaagtgctgtatatatcacgtgaccgtgctgttatgacatgattcgtagatctagtactagatatttaattagtgagtctttagcgttttgagctgctgtccttgctactcgtgaggctgttacaggagaacgtcatgaacccatgtggaagagctatgagtgagctgagatagctccactgtactctagcctgggtgacctgagcgaactccgagtcatatagatcaaagttaactagccaggctggtgcacgcctgttatcccagctactcattaggctgaagcagtagactatctagaagctgacagtcagagcttgccagtcgagctgacattgttccaattcccttcgtgtgcacaagaatgaaactctgcctcgcaccatactacgggcccagccatctccccactaaccatgtaatttaagcgatacgtggccattatctaacttaggctgcttcggcggttcaaggcataactttctcgacgcccccatttatgccgtttaccgactgtctctatcaccct

SEQ ID NO: 595273 - DNA, 446 bp, Homo sapiens
gctcgacagggaggcctgggcacaagtaagctcgtgtggattagtgcagaggctgggtacagtggctcacgcctgtaatcccagcactttgggaggccgaggtgggcggatcacttgagatcaggagttgaagaccagcctggccagcatgatgaaaccccatctctactgaaaatacaaaaattagccaggcgtggtggcatgcacctgtaatcccagctactctggtggctgaaggagaattgcttgaatccaggaggtggaggttgcagtgaggcaagattgtgccactgtactccagcctgagtgacagagtgagactctgtctcaaacacacacacacacacacacccaccctgaccaacagtgtgaatccccgtctctactaaaaatacaaatgtgagccgggtgtggtggcgggtgcttgtaatcccagctactccgga

SEQ ID NO: 595274 - DNA, 1376 bp, Homo sapiens
ttcgcttctgggtgtctctgtgggtctgagtcgttcgaagttctttgtcgctcgtcgtctgggcgaggtgcgctttctgtttcgccttgtgggtggcctttctgtgcctgttctgtgtgtgcccgctttgtcgctttctttccttggcttgcttggtttttggagcgttttccccggttttttggtttatggcagtcacctcttgtgtggtttcttttcctcgtggggttctttgccacctggttccttgtctgagttttctccttcggtctgtgatctgctcgatgtatcctcggcttttttcccttggtagtcccctttcggtgtcggtatccctcgggctctgggggttctgcttccttccttttttctgtctcgctcctcgcagtgtcattggcagttttgtttactctgtgtcttttctctatgatggacttgtgcgctcatttggcgaggttttggccctatgccccttggggtgttgataggccccatctattcgctctcatctgtggtaattgcacaagctagcccgggcttctggctcggcgttttactccccgatttgcctctgacgtgagccgcgcgcggttgcttgctcctgggaccgttctccgggttctcgcgggcttggcctactgcgattcgttcgcccgtgtcgtggggtccccaaggtctgtggcgttgcatttgcgtgctttgggtgtccttgcaagcggctcgttccgatcgttagctaaggataccttctgggcgcttttctaggcgcttcctggagaattgtcccaacctttgctccccggagtacgtgtaacctgttttcctttctgtggttctctggcgtcgctagaggacgggcatagtcgtggtgtcaatgtatacgtcttgctggcctctgaggtgtacagggccctacccgtggcgcatcactatgtatagatgcctattaatgagcgatggtgcacggtggttattcgagttttgtcggtgttgcagcacaaactgcataggcacgcatcctggcggtatttcggctactaccttgtgcagagccagtgtgtctgtgggatatgtgctgcatcttgcccagtggtatgaaaacctgtgcagaactttccagacgagtatatcagaacacacccttccaaggtatgtatgactctgtggttcctgtcctgtcttcactgagcgcagggctggaggcctcgttagacagttctgccgttggtccgtcgcttgcagctgccctacctgtagtatccacagtgcccgagttctcgcatggttcttggcaagttaaacggtccttcctaagctggtttagactacacttacaacaaggaaaatgcccctcgtgtgaccatataattcacatg

SEQ ID NO: 595275 - DNA, 614 bp, Homo sapiens
cgggaagatggcggagctgcggtgctcgtagctgtcaagagggtcatcgactacgccgtgaagatcccagtgaagcctgacatggacctggtgtggtcactggatggtgtgatgcactccatgaaccccttcttgtgagatctgcgtgtggagtgagtgcttggtgctggctcaatggagaagaagcttggtgaaggaggtcatctgccgtcagctgtgggcctgcacagttgccatggagacgattcgtaccgccctggccatgggtgcatgacctgatggtgtccacgtggatggtgcccccagcagaagcatgaactgcttgggtcccctgcaggtgtgctcgggtcctggccaagctggcagagaaggagaaggtggacctggtgctgctgggcaaacaggccatcgatgatgactgtaaccagacagggcagatgacagcttggatttcttgacttgtgccacagggcacattcgcctcccagtgtgatgcttggagtggggacaagtgaaagtggagcgggagatcgattggggcctggagaccctgcgcctgaagctgccagctgtggtgacagctgaactgaggctcaaagagccccggtacgcca

SEQ ID NO: 595276 - DNA, 437 bp, Homo sapiens
  misc_feature (1)..(1): n is a, c, g, or t
  misc_feature (3)..(5): n is a, c, g, or t
  misc_feature (7)..(7): n is a, c, g, or t
nannntntacactccaaacattttttattgcaggaaacaaaaagcacacaacagcctgtacatacatacaaaatactaactatagacagacaaatgtagaacatgtcatcatgttccttagtgtaaaacctaaacgatctaaaaaggatcatacattaactgtacaacacagtgtcatacagggataatgctatcatatttaatatgaaacagtgttacgggcacaaattacccatttctacaaaataagtgtgcaagtgatgccacatattatccatattcaactgagctgtcatcaaaatacattttatttacaatatgtactatgatcagttggatattaagttctaaaatgatttacttcactgctacattataaaggtaaaagccatgtgtagaaaagtgtgagattatgtttttacatactgcttgtgtct

SEQ ID NO: 595277 - DNA, 383 bp, Homo sapiens
  misc_feature (141)..(141): n is a, c, g, or t
tgaggatcccctatgtctcgatcgttactagtctcgatcattagaattaaataaaagattagaaattagaatcaagtgtgcagcactgtggcaaagctctcattccccattccctcggttttcacagataccctggaaatngaacctgaaggataagaaaaggaaggcttgtactagttcatatacacagccagcactgagtccggaacttgaacccaggtctatctagaacaaaaacctatgtttctccactccgtaatgtagttctctcaggtagttctaagtgggagatacctgctcccagactttttttctaattttttacattagctaaacttaaatgacaatatgaaatgttacaaataactaacgatcgagaaggg

SEQ ID NO: 595278 - DNA, 517 bp, Homo sapiens
  misc_feature (1)..(1): n is a, c, g, or t
  misc_feature (3)..(5): n is a, c, g, or t
  misc_feature (7)..(7): n is a, c, g, or t
nannntntacactccaaacattttttattgcaggaaacaaaaagcacacaacagcctgtacatacatacaaaatactaactatagacagacaaatgtagaacatgtcatcatgttccttagtgtaaaacctaaacgatctaaaaaggatcatacactaactatagacagacaaatgtagaacatgtcatcatgttccttagtgtaaaacctaaacgatctaaaaaggatcatacattaactgtacaacacagtgtcatacagggataatgctatcatatttaatatgaaacagtgttacgggcacaaattacccatttctacaaaataagtgtgcaagtgatgccacatattatccatattcaactgagctgtcatcaaaatacattttatttacaatatgtactatgatcagttggatattaagttctaaaatgatttacttcactgctacattataaaggtaaaagccatgtgtagaaaagtgtgagattatgtttttacatactgcttgtgtct

SEQ ID NO: 595279 - DNA, 663 bp, Homo sapiens
agaacccgacgacggatttttgtggggtgaaccgaagtgagcgcccggaacttgttgctgtcgccgcgccgcgtggaccccctgcggacaggagggttaaaagagggggggcctaacccaacatacccctgtcttttcccctacctgggggacccaagcctgggtttgatacaggcgaagggcaggaaaagggtgaaacccacagaaccacatcgggaaaagggcttcgcggggaactcaaaataaggtcggacagggttgtacaagtagaatatctaaaaaaacaagaacgtgggatgaagcgaacaacacccaaggaacacgccacttgttggaaaaaaagaaaacaacggccaacggcccgaggtggccagaaaaggggaaacacacccctacggcggaaaagaaagggggggattattcgcacgcccgaacaagagaaacaagagccggcttggggagcgcgagttaccacaacggcaaaacaagcgggatacggacccaggcggtggggggacgaaaaacccagttaaaaaacgcaaaaacctagacagcccgcaaggaccccccacccggtccccgggaaacgaaaaagggaccggaaggacaccctccacctgacactcggccccgcgccaatgggcaagcaacacggcaacggcg

SEQ ID NO: 595280 - DNA, 249 bp, Homo sapiens
  misc_feature (18)..(18): n is a, c, g, or t
  misc_feature (77)..(77): n is a, c, g, or t
  misc_feature (231)..(231): n is a, c, g, or t
  misc_feature (239)..(239): n is a, c, g, or t
tcccaaaaatgctcgggnaagaggtcagcactaggagcccagagacaggctctgaggattcttgcccctgggggagncagaggcacctgccccatagccaccctacctcgttggaggggcagtgatactgtgtgttggggccactggactggctcccagtctcagcccccaccacacctgccctccagtccctcccctaggcttgctgctgccaggggttctgcgctgcanctggccgnatcccttgcc

SEQ ID NO: 595281 - DNA, 541 bp, Homo sapiens
tggccgggggggggaaaaaaaatttttttttttaaaaaaaaaaaaaaaaaaaaaaaaaggaagataattaaaaaaaaaaggaaagccccccccaaaaaaaaaaaacccttgtggcccgcttggcccaagccaattttaaattgaacaaagttaatgattgcgcccaaatttgagcttaattggccaaattcccctaaaagggggtggaataaaaataaatggcccgggttttaaaaacgtgggaattggaaaaaccttggggtaaccaaattaaatgcctttgaaaaaaatccccttttcccaagttgggaaaaaaaaaaaaaggcccgaacgaaacgcctttccaaaaatttgccaaccctaaatgcgaaaggaaaatttaaagcgtaaaatttttgtaaaaaaatcgggtaaaatttttttaaaaaaaactaatttttaaaccaaaaagccaaaaaccgaaaaatcccttaaaacaaaagaaataaaccggaaaagggttaaagtttttcccaattttgaaaaaaaaacccctttttaa

SEQ ID NO: 595282 - DNA, 955 bp, Homo sapiens
  misc_feature (67)..(67): n is a, c, g, or t
  misc_feature (69)..(69): n is a, c, g, or t
  misc_feature (228)..(228): n is a, c, g, or t
  misc_feature (232)..(232): n is a, c, g, or t
  misc_feature (286)..(286): n is a, c, g, or t
  misc_feature (332)..(332): n is a, c, g, or t
  misc_feature (377)..(377): n is a, c, g, or t
  misc_feature (388)..(389): n is a, c, g, or t
  misc_feature (418)..(418): n is a, c, g, or t
  misc_feature (420)..(420): n is a, c, g, or t
  misc_feature (431)..(431): n is a, c, g, or t
  misc_feature (487)..(487): n is a, c, g, or t
  misc_feature (509)..(509): n is a, c, g, or t
  misc_feature (544)..(544): n is a, c, g, or t
  misc_feature (595)..(595): n is a, c, g, or t
  misc_feature (633)..(633): n is a, c, g, or t
  misc_feature (822)..(822): n is a, c, g, or t
  misc_feature (837)..(837): n is a, c, g, or t
  misc_feature (852)..(852): n is a, c, g, or t
  misc_feature (858)..(858): n is a, c, g, or t
  misc_feature (932)..(932): n is a, c, g, or t
ccccccagcaacagcagggcggtgccacattggtcctgagccaggcctggccgccggtgacggccgnanctctctgggaggccggcggtcctcgggtgtagagggagacagctgcccgggggcacgggcgagcgcctctgggggtcctggatccgagacccgcggccccggggtgagggtgacgcctggagtcatgcgtggcttggctgggccgggctcttggggcanccangcgccgctgccggcgtctaggccacaccaccctgaacgcgcccgctcgcctctnatctgttgaagctaagcagggtcgggactggttagtacttggatgngattccgcctggtaatagcggtaccgtagcttttggcttcccgcnccctccttctnncccccttttttctccgtgcttcccaactncnccccgcctctnctccccgttgaccgcccccgtgccccagccgaagcccaggacctcctcctgaaganccgccactgcagcaccgccagncagcagcatcccacctcttccgactcgcggcagcnccacccaacccgggcgggacgggaccgaccccgagggtgcaggcgcgggtnccctgaggtcccgggtgtcttcacgctcctcggactcncaggcaattgtattcattcattcagcgtcactgcaaccgtccaagccggtggaaggggcgagcaggggcagcgggtgccacagaccccagccaagacctccgctccagaacccgagggctgctttccccagaggaaggacattttcttcgccagccacgaggaaatccgtgcttgtgcacctgtgttcncaatgccaccgactncgtgtaactccagtncggagnagtgagagagaccaggcttcgcccgtggacacgctcggcgcacggctccgccaggcacacgagcacatctacantctcggggccaacgcatcaagga

SEQ ID NO: 595283 - DNA, 249 bp, Homo sapiens
  misc_feature (9)..(9): n is a, c, g, or t
  misc_feature (36)..(37): n is a, c, g, or t
  misc_feature (49)..(49): n is a, c, g, or t
  misc_feature (199)..(199): n is a, c, g, or t
  misc_feature (228)..(228): n is a, c, g, or t
  misc_feature (237)..(237): n is a, c, g, or t
tttacccanatgaattcattatataaattttttccnncttagtgtttcntttacataatagtagcccagttaaaaaattgtacttcaggccaggcacggtgggtcacgcctgttaatctcagcactttgggaggctgaggcaggaagaccacttgaggtcaggagttcaagaccagcctggccaacatagcaagacccnggctctctataaaacagaaaacgcaaacnttaatattntcaacaatcaat

SEQ ID NO: 595284 - DNA, 135 bp, Homo sapiens
tattaaaaaaattaaggaacaacagtttaatttggtaatagtcccaaatcgggaaacaactaaaatatccttcaataggtacatggttaaaccacagggcacatcaatcaccagttaaaccagggggcacatcaa

SEQ ID NO: 595285 - DNA, 107 bp, Homo sapiens
caacacccgctaggtactggtggtccccgctcccgggaggctcaccatattgatgcgaacttagtgcggacacccgagcgccatagcgcactacagcccagaactcc

SEQ ID NO: 595286 - DNA, 156 bp, Homo sapiens
cagctgcagctcatgccaccctcccgtctgcctcctggttctcttgcctgcccagggccgtttgctgggtgaagggcatccccaccatcctcggcccatttccgtttggggctcagccgtgcgccctgggctccaatcgctggcaccccttggtga

SEQ ID NO: 595287 - DNA, 145 bp, Homo sapiens
gtcgtaccggcgactccgagggagaggagggaggcggcccagtgtgtgcacactgacacaccacaaacacaccaagaagcagcaggaaaccaggtgtgcacacagacaggacaaagaggcagttcacccttagccaaagttgcca

SEQ ID NO: 595288 - DNA, 627 bp, Homo sapiens
acagctgttgttggcctactgtacccctgtatcgacagtcacctcggagaaccccacaaatttaagagagaatgggccagtgtcatgcgctgcatagcagtttttgttggcattaaccacgccagtgctgtatccttaattttctgtgctacgtccagagtatcttcttaggttatatattgaagcgttttgttttgttatatactcaaatgactccatgtcataatacagacatgatggtggtacctacccatttcagattactaaaaagagaaagaagaatggggctatcgatgacttcatagtaaaatatattgttttatggtcaaaataaatatatatttatttatatttttatatatattatatatatttttaaatatatatataatatatataataaatatatatttatataaatatatataagcactttatatatagctttcagcaagtttattcttatggttaagtttttgactcagtgatggcagggagatttcaggtgatcttaatgattactgtaacctgtatccaacaaatcctttctttagctcattacacagtttttatggacagtgaattatctgtggtacaataataaaatacccaaattatttaaaaaaa

SEQ ID NO: 595289 - DNA, 166 bp, Homo sapiens
tgtgtagtagcatcagtattggcttgtagtgttttctcgttatttactgtgatttgtcgaattcacattatgtgactttcattgaagacttgggtactttttcaaagactgaaatttcaatataaagtattttgggttgtagtaaaaatatgttgtaggaatgaag

SEQ ID NO: 595290 - DNA, 277 bp, Homo sapiens
tccacccatcagacctgtgagaaagatagtgatatctgatcatgaaaacgtggttactatcacagagagggctcccagaaagttaatactgtggggtgaggttaggatagcgatgcttgctccaagtcatcaaaaagctatcagtgggagtagagttcgaagtccttgagagaggattatgatgcgactgtgagtgcgtacgtagtttgagtttgctacgcagactagtaatgagcgatgtaagctaccgggcgattatgagaatgactgcgccggt

SEQ ID NO: 595291 - DNA, 240 bp, Homo sapiens
tcataggatttcctaatataagcatgccacgtgaatgaaggagaatggccaatgtgactccctagtttgtctgcttttcatgctgttggggacagattatttagggctgctgcttagtaaaggctgcttttccatttggagcattttctaggaaagcaaagattatttatattaattcgatacacgttttttctccagactattcatatcaaaatttcttcttgtgcacaaaagtgtgca

SEQ ID NO: 595292 - DNA, 466 bp, Homo sapiens
ttgaagtgccacggggagaaaccaccgacctgtgggctggacctacagtacacttgccatacttgcttgtacctgtacttgcttgtatgttctgaggccttggagcccctcctgttgaggcagataccttagggcaggtttgtatggtcaggtagtaggaccaactgcttttgtctcccctcagtcttgctcctgctttaggggcttacaattaaggaatggctcccaggggtcataatgagtaagtacctttcacatgttagcttcgattcacagggcagaatttatccaaaatgtcattttaaagggcccaaatggccaccggtaatttgtggtcactagaatccatgggagtcttaaaacctttagaatacatgtactcagggtctcttctgagaatttgcgagtagatcgatagcagatgatgagaataaacgactgttgtctctatagggaaactcttccc

SEQ ID NO: 595293 - DNA, 343 bp, Homo sapiens
aactggaatttaatttccattcataaactactatatttcccctcttgcaaatcattttatgtttcatcggtttttcccttcgggtaaatctttggttttgaaaacccacatttaaaaagatggtattttatcttttaaacttaaaaattatttaaaacagctatatggcccttataaaattgattttttatttattattagcccttactactaaaagggacatctaactattcagggacatttttccctttccaaaaaataaaatttattatgctttaaaccctcttctggattttttaattttttcattgtctttgataaataaaacagttttgttttgcta

SEQ ID NO: 595294 - DNA, 340 bp, Homo sapiens
accccgtttacaacagctgggggtgtactggcttcgacatacaaaaggatataattgcagtggtcttgtaaaccataagacaatttctttactaagcggaaaagaaaacaaaaaagaagattattcattattaatgaatgcttcaactcaatcaaatctagcttttgcattttaaaaaactagtagaccaatttgcttctcacgaattgtaatctttatattagagaatagttaaaaatctgatcactttttaatgaatttatagatcacaggcttttttaatctttttgttattttagatcaagagtcttcttaaaaataactaaactgttgtaactgg

SEQ ID NO: 595295 - DNA, 582 bp, Homo sapiens
acaaaaatgagttccacaaagcatgtggagctttgatatatccttattaagggccagtttctgcgaatgcccttggacaaacacatggaaatggagaacactctcatcagatcttgactggttcttatgataagacttctcggatctggtccttggcacggacaacgtcaataatgacaatctgtgggacatacggatgttgtaaacgatgtggcctgggctgaaacaacgatagctttgtcctgcttacttattgacgtgcttctatggactcagactattctcttactgggagtggaatgtagagacgaaacaacagtgaacacgccctacactgctgtaccagcgtcatgctggacgctgtagcattctatacgctgcttgatggcgtcagcgaacctaaacttccgcagctggactccatgggcactacatactgcatacacgactctgcgtctacacgctcccataccagactgaacgaccgcatgcaacttgtcacgcgatctgacacccacattcgtagcacatgacaagcacacccagcaacatcagacacccagatcgaggcactacacaaac

SEQ ID NO: 595296 - DNA, 115 bp, Homo sapiens
ctagaggattccctcgctttgagctccacagccacaaaggtgcatcaagactgttgtgagaggaacgcaagcgaggagtacctgctttgcttcagccacatgggactgtacgtgg

SEQ ID NO: 595297 - DNA, 182 bp, Homo sapiens
  misc_feature (123)..(123): n is a, c, g, or t
tcagagctggttttctcggaggaacgttctgggctggagctttttactcgcggcggtgatctttttttgctggaactttagcagcagcagaacagcagcagcagcaactcccagttacttgtncagtccaggtgcaggtacagcaaaaaaagatcaccgccgcgagaaaacaggctccaggg

SEQ ID NO: 595298 - DNA, 597 bp, Homo sapiens
tatcctagccgcgcagtggtcctggtctataagagagtcgggggtgaaggctggtgagcaggcgcaggcaggtgcagctggaggagcagggagggctgcgtgtgggaggggaccaggacttccaggcctcagcctcagcctctcctgtggggcacccgggtccttttgagacagaggtggctgagctgccccggcaggccctgggcacaagtctcccttcagcccccaggcaggatgccaggctgggtggaggaggcaccgtggccttgacatggacttctaggctcacttccttctccaccagctgctgtcttgagaatgtgtgtttgtccatggctgaacatggtgagattcctatgcatttgcctgtcagagggccagtggggccagaagcctcctgcagaggctaaccccggtgctcccagtctcccccagtcgctggctgggcagggcagggtgctggttcccccgtgtttgtttgtggtgagagaagggccccaccaaggtggggtcagaacccccaggtgtgagtctgccgccctggcctgcggatggagttgccgccctgcctgcggatgggagctctcactccgtgaa

SEQ ID NO: 595299 - DNA, 204 bp, Homo sapiens
gtgaaccatgctgcagtggctgtcgggcattgtgtatactccttacgggggtaactgctctggtgaagactatgagacactgcgtcatatatgatgtgcacattttcaagtgcattgtccttgctgttggacaaatgctgcccccggatgaagtcttgccatcctgtggtgcaatgctcctgtaggtacccgtacagtgctgct

SEQ ID NO: 595300 - DNA, 272 bp, Homo sapiens
ccacgctcgccccctgtactgggaaggccgccacgctcgccccgtgatggggaaggccgccacgctcgccccctgtatggggaaggccgccacgctcgccccctgatggggaaggccgccacgctcgccccctgtagggggaaggccgccacgctcgccccctgtactgggaaggccgccacgctcgccccgcgatggggaaggccgccacgctcgccccctgtatggggaaggccgccacgctcgccccctgatggggaaggccgccacga

SEQ ID NO: 595301 - DNA, 949 bp, Homo sapiens
agtggacttttatgggtcatttacgggcttcgagtatgcctataacgccaacggcttaaccctgcgtatgtacttggactaagggttgctggttcattgtgggccgtccttgatgtgtattgcctaaggggcttttttcaaagcgtctgtgtaccaattgtcataggctaggataccattgaagcctgctatttctcgcgggttttgctagccgctccttctaggcagttcgtcgctttcgccgatgtgctgtggcccaagctattctagagtgccaattcctcaaggtagccaccatactgcatcgtttctcgtcgcgtccatggcacggagagacgcctactatacgcaatcttacaaggggccgtacttgcctaggtctcctacgcgtcccgcaacacgttccatcacggctccctgcgtctggtacttggcagagcacctgctctctgcagggttgccctgtccgtctacatgggctctccacagtcgtgccacctgctggtctccaggtagaagctaggggactgaattggcagtcacgctgccccgtgcacattacttgcttctgctgcgtctgcctagtaacgcatagtgtagcagccacaattgctcaaccatacagatcaacctgctgattgtgacatgcatgatggtaatcaccactggagcttgcactggttagcataaattaggaatttggttgcctccagtgttctatctctgagggctgagcattatagagaaaagtgacctgctgctccgtttcattgcagaaaattgcacaggggcttatttcagaacaagcttccacgtactgtccactggctctcaaagtactttaacttataagtgttgtgaacccccacccaggcaagtatccaggaaagcagcaagtgacgtagtcctagtgatgtaccaaaacctctatcggctgtgaatgatttcc

SEQ ID NO: 595302 - DNA, 185 bp, Homo sapiens
  misc_feature (171)..(171): n is a, c, g, or t
gccccaaggttcccccttaaaaggggttccccccccaaaacccgggggggggttaaaaaggggtgggggggccccccctccccaaaattttaaattgaaaaagggggccccaaaaaataaaaaaggggaaaaaggggggggggccccctttctggggggaccaaaaaacgnttttttttttttta

SEQ ID NO: 595303 - DNA, 109 bp, Homo sapiens
gaccagcctcgctcagcaccttctctcagaccctaggactatgaacgtgatgctacgctgaagtctctcaacgagcatattgagaaccttcttagtcctgatggctcta

SEQ ID NO: 595304 - DNA, 153 bp, Homo sapiens
ctgcaaaccctgcaacccatgacagagagccctcgaatcactatgcataaatgcaatggagatcttgtgcttggatgactgatccttgcttaaaacagaacagtgacaactagaaaagaaaaccactccaatatcccacgagcttctagtgca

SEQ ID NO: 595305 - DNA, 224 bp, Homo sapiens
aaggcgcacgatgggcgtccacctgagcccagacaccaatggaccggtgcgcagcatgactgtggtgcctgtacttggaggacctgcacggcgcggacgaaggacgaggacctcttcgacatcgaggatgacatcatctacactacaggacttcacggtgcccggacaggtcccagaagaggaggccatgtcacaagtggacgcgccatcgtgcggcttcgggt

SEQ ID NO: 595306 - DNA, 110 bp, Homo sapiens
actaatgcccggcactttagttatgggcggccatcttgcatcaatgcccggccatctttcactcaatgcagcggcatctttactaatgcccggcatctttgactaatgac

SEQ ID NO: 595307 - DNA, 622 bp, Homo sapiens
ttaggtggtaggatgtcttggcgttatgacgtctagtctgctatgaactgtgatctcaccactgtactctagtatgccagcagagccataacctgtctctagtcaaccggtaaactctggactccaagatctcgagtgagctgctctggtgatcagtattggcagtacttcgtgcatgttgtcacatgctactgtgagaatcaggtgctgcatatatggctccactgcaagagggcagatgcaagccgtcgcctcatctgtagtggaacgtgtctagtgcacctcctccctatgctgatcttaatctctgtccatgtactgtaataatctgtaactgtgagcctagcagctttcctgagtccagtgagtccttctagccaagaggtctggcacaggcacagaggctggtctctttgaagtgggtcttcatccattggggtcgggtccaactctgaaggcccacgtccttgccagctacagtctctctcccctctcagtgccgacgctgtcaccatgtgccctctgtctgtggatcctgggaaaagctgttctctctgctcacagctgcataggagacatgcccattagctgaggcgctggcatgctctgaactcgagggtca

SEQ ID NO: 595308 - DNA, 598 bp, Homo sapiens
gtgagatgttgccagctctggataggttcgtgagcatatgacaggcatgctccttagaatatcaaagatcagttaatacaattggccctgtgatgaatgaatgccaaatggacaaatataagaatctaagaacactcagagcactctcccatgatgagatttctacgtaagtttccattttaatcacaaattcaattcagttgcctagtatggaatatcttcatgccagagcaaagctgaattcatggtgactctaccaaggatgtatgaattgaggtgagggacaggcatggttgtgatgatgattgagttgactgaagtactgggtggggtaaagagaagaggacctgggtccaaatccccagtgttccttcttagctaagtgaccttgggtgtatggtacaaccctgcagagctcctgttgccttatctgtagaatgttggttttcatccttccctcccaacggctgtgtggatcactgaaaaagcacctaacacagtgtctgaccatgcactaggcatgctggaaatatgtgactcagaaatgcacggggttacaagaggacagatcacatacttgcgagggtccgagctcgat

SEQ ID NO: 595309 - DNA, 370 bp, Homo sapiens
gtcaacctcgccagtcatggaatgagacatgagtggaattaggttgccagcttctaggagctctgggagaccccaaccccctggcccatccctacctcccagaacctcactggctctgggcgtggctgggcactggtgattggagaactcaagcggcatgatgcagcctcccagaaatgatttctagaacagggcagacgtgatacttggaggctgggctttgagctcggtcacctttgcacccagcttgggagtgagagagtttaaggtcatcctccctcaaagccagtattccatatccagattatttctctccattccaggaagtttgcatagctccctggacttctgctttgcacttgcctgcagg

SEQ ID NO: 595310 - DNA, 404 bp, Homo sapiens
gatcagagtcatagtacagaagacatgtactgtcataccccagtacggtgggcacagcaggaccagcaactcagagcataaaaatcaaaatatactccctgtgaagtccaaatcagtgaggtagttcggcacacacatttacgggatattctacgccaagccaatgaaattcaagcatttgaaagtttccgagttacccatcttttttatggtaatacttgtctttttccaaaaaacaccaaacaaacaaacaaaaaaaaacaaaaaccaaacagcatctcactctgtagcccaggatgaagtgtagtgatgagaccagggctcactacagcctcaaactcctggactcaagggatcctcctgcttcagcctccctctaagtagctcgagctacaggtgcaagc

SEQ ID NO: 595311 - DNA, 1062 bp, Homo sapiens
gcatggttccatcatggcgtcaatgcagacaacgactcacagcacaagcaactgttggctttgcaacatgcacccacctccgtgcgcaattgcaccttcaacatgcagcacagcagtgttccaacacattcgaattaccaccagtggcattgtagcaccatggcacaggtgccaccaggttaccgttatcatgcacaggggccaacacacattctccaagcttcgtcaatttcaacatttcagtcagtcggcatcatccgtttttgcacctctccctccaggtcaatggtttacatgtgtgcaccaactattccgtgtttcaatcacatcagtgtttcatagcccaatgggtccactatcgtgctattatcgcaagtttcctaaaccgcacagaacgtgggtcccccaagtcagcttcttccagtccaagtccaggctcatgaggtcataccaggccactatacatgacaggccattggccttatatcccgaagacaattggcccacggggcacaccccagactgtaacggaacccaaagcgcggggaaacttaccagttgtccatatctgtatcagtggttgactgtcacagacgaactgggttaaacgcacaccgggcaactttccgcgatagaagtgaaacgcgcgcgacacacactcggggctggggatcattcccacttgcactggcaactaccgtctgggtctcggacaatgaccccacttgggttctattcaagttctcgttaccttaaagccgcggacacaggcaattacaggttcccttacctctggggcagcaacacaagcagttgggaacgcaccacacccttggtcggggcacattccaagttgtccccggggatcactattatgtgcaacacgcgttcgattatcaacacgcgctatattgcgggcgcgtgtgtgggcaacacgagtggggataccccgttaaaattaccagcggggcagcacaatgtggcaacatgggaacgctgtaaacggtgttcacagctgtatactctacacccttgtgggcacagttttgtggtgacaaacac

SEQ ID NO: 595312 - DNA, 802 bp, Homo sapiens
aatctcatctagtcgagacgctgcatagtgaagcagaaatcgcgtggacacctcatgcgagctcgtccgtgatatgagttggggtatgatcgtgctcgaattgccaggtgcacgccttgcgataaacagcatgccatacgatatctcatgctcaacaataaccaagggaacaggtaacgcgagaataaccactgtatgcgactgccgaatcgctagggcctatagaagtagtagcagtatcacactaacgagtctaaatcgatctacaactcctgtgttctgtgataagtggagcgtcgacacgtctagtttgcagaacaatgccttgaagttctcccatgccacttagacagtttgtagatctgctttatcaacttagtaatgaactatggggaccattattcgtattggtctcgaagaatcacttctttgtgacgaacatcaccttaatgtccttctggataattcgttttgtatagctatgatcatgctttatgggaccatgtagaggtcgacgttataagcttgtcatactattaacaagattgtaaacggctgggtgcagctgggtcacacgctgtatatcccatgtcactttgggacggtcgaggcagagtggatccacgactgtgcaggagtgcaaatgacctatccgtggccagcatgatgagaacccgtttttaacaagaaatacaaaaaattagtcaggtatggtggtaacgcacctgtagtcccaggtacgtcgggaggggtgaggagaagaatcgttgaaccctaaaggggaggttgacgtgaggcagat

SEQ ID NO: 595313 - DNA, 383 bp, Homo sapiens
aggttgtgctctccttctccatcctaatcagaacgcaatctatagagtcctaagtgtggcataagagcaacgtttctaagtaatatgttgtaagttctcgagaagtatcatatgataggagaaaacttagtgcagatctggatccagagactgctcaatatcttgatgtactcattcaactcctccattaagtataagacattgctgatctttataatcagcacgtatatgagataataatgagagcagatcacatgtgcagggagcacagcacaggatgaaagtgggatcacagggtgaggctgtggtctctctcgtctcctacactagacagcgggcttcctcttgcacacggtcctctatgcttctcttcctctcgtgcc

SEQ ID NO: 595314 - DNA, 387 bp, Homo sapiens
ccaaggggattcaactatcggcacactccctctatcgagttcgcacgccagctgatagctgatggtcgcctggggacggtgactaatgctagggcatggcttatcgcggactacgcgtctgatccgcacgggccactgacgtggcgttatgacagggagcgggccggtgccggcgtcagcctcgatctcatgggtcacggagaggacctcgtccagtagctactcaaagggggattcactgatgtgtcctccgtgtccgagacgttcatccttcagcgtcgcaaggcacgcaaggaagggatcgttttacacaggttgggtcgtctcggactagctcgggtcggtgggcaacgaggattattgcgctgtcatcgcccgttttgaata

SEQ ID NO: 595315 - DNA, 354 bp, Homo sapiens
ttcattaggcaatccatggagacagaaagcagattatatggttgtaagaagcttatagaacggagtgtgggagagattgctaaaaaggagtttccttctagggtgatgaatatgttctggaactacttattggggatgcttgcactacatagtgtatgttctcaatgtctctaatgttaaatttcacatactttttatccattatttttaatataagctattattacctacattatgttatgatacttatatgtcataacaataacattctgtacgcttcactatgataaacaacttcggatttatatgcatctggaagagatattttttcactgtaatttgccttaattaagc

SEQ ID NO: 595316 - DNA, 244 bp, Homo sapiens
  misc_feature (77)..(78): n is a, c, g, or t
gttttgatgcccaaagtcctttttttccttttttagaaaaccccatgggaccaaacagatcgaccagttttgaagcnnctggggggggggaatgacccctcttgctttattccagaatgctggacatttattttggattgtaaattgggtttgggtatttacgctttgattcatagtaactttttatggaattgatttgccttgacccccacctgtaaataaaaaaaaatggttgaaagggcca

SEQ ID NO: 595317 - DNA, 419 bp, Homo sapiens
acttggtgggatacaatcagtttggcataaacagaagtgaatttgtctgaattacatcatatctacataacatgatgaatatggatccacccattgtagcagtctccactagtaggttgaattccagcagacttccttcatataggagctggaggacacagcacattgtaaatcaagaagaaaataaaagataaaacaggaacttctaatgtcttcccatatgactattacatagtgccactttaaacatgagctggaaatgacgttaagagagtgagcatgacttcagattaatcctctgataatgacagtgattcagaggaacccagcaaatacatcaatgcatcttttctaatgagctactggaaacctgaagtgatgattgctgctcatgcaccattgatgggacgaatactgcg

SEQ ID NO: 595318 - DNA, 285 bp, Homo sapiens
  misc_feature (170)..(170): n is a, c, g, or t
aaaactcataatttaaaaaagataaatataaaaatatcaatgagtcaatcaataataatttggcatcacgagacacatcacagaggaatattatgagcacagaaacaattgaaatattcaataatagtgatgaatgggcaaatcaactaaaacacgcattatcgaaaggngaaaatctggcattactacatggtttaactcctgatatccttgatagaatatatgcatatgcattcgactaccatgaaaagggtaatataacggacgcagaaatttattataaat

SEQ ID NO: 595319 - DNA, 111 bp, Homo sapiens
ctgttgagcgcacctaaccactggtcatgcccccacaatacagactcaactctcccacaatacagactcaattctcccacaatacagactcaactcccctgcaataccgag

SEQ ID NO: 595320 - DNA, 142 bp, Homo sapiens
  misc_feature (56)..(56): n is a, c, g, or t
gtgacgaggatagcttgactggcgtcgttttacatgtgctgggaaaacccggagantatgtaatcagtgtctagtatataaaatgtaaaataggttgtatatatctatgtatgatgtaataatgaaataatgattaaagaga

SEQ ID NO: 595321 - DNA, 91 bp, Homo sapiens
  misc_feature (12)..(12): n is a, c, g, or t
  misc_feature (80)..(80): n is a, c, g, or t
ccacggaaaganggcctgggccccgtggagcctcagtgcccgtttggcctggctgtctcgctgacaataaagagcccttngttgcactgaa

SEQ ID NO: 595322 - DNA, 150 bp, Homo sapiens
tagaagagtagatgttaaagtataagcattaggaagacttaatggaaaggtatctggcactgaaaacccctgacagaaacacagttactctcttaggataccagtcatgcaggctcaaacatagtcatggtcttatactacgctcaactc

SEQ ID NO: 595323 - DNA, 139 bp, Homo sapiens
aatagtctcccctactcttaaaggctgagtgggagaatggcctgagccctggaggtcaaggctgcagtgagccatgggcagtgagccatgggtgctccactgcactccagccggggcgacagagtgagactctgtcttt

SEQ ID NO: 595324 - DNA, 104 bp, Homo sapiens
gggtcgacacggccgtgtattactgtgcgaaaggactggcagctggcggcggtgggggtgcttatgatatctggggccaagggacaatggtcaccgtctcttca

SEQ ID NO: 595325 - DNA, 175 bp, Homo sapiens
aattatatttggtggatttctccatttggttttctggtataaaagtggggataatgggtagccacttcggatttggggaacccattgtaataattgtggaaatgttttgtctttaagtgtaaatattttaaaatttgacataccctaatgttaataataaaaagaactatttgca

SEQ ID NO: 595326 - DNA, 143 bp, Homo sapiens
ggtcgactctgcggatccttaagatcctgactcttcgggctgtttgaggatacggctgggtgccttcctgtcctactgccccggcatggacgtggccctgcgcctgtccctctcaagcccagccgtggtggtccgagcggccc

SEQ ID NO: 595327 - DNA, 1204 bp, Homo sapiens
  misc_feature (152)..(152): n is a, c, g, or t
  misc_feature (380)..(380): n is a, c, g, or t
gtctatagatgtggaccattcgtcctgtacccgggctcatcgtgggaccttaggctcagctacgtgtcgagtggaagaaagctcagtagtgctagagcagagtaaccatgttaaataatcaatggactataacagaaacatactactagcantgtaatgcttcttcactccggtgaaacaaaaatttggcccatgtagtgttacttcctactgttgagttatgccaacgaactaggtttacttcaggagtataatctgggatatttagattgcaatttcgagtcaataattttagatagatctacttcgggaacatgtgtatctacaacaggagtttatggagaaaaaacataaatttacacctaataataaatagaaantaatcttagatggataacacgttcatttttggggtaccaaagaacgtgggtttgagacgattgggcatccgaaggaggaaagcgactaacgtagatattggagatgtctaactcccatgacaatggtgttgccgagataagtgtggcataatattagaacaacgatgttataacgctatatcgaacagtgaatttaattgtgaggtccaattaggttaggtcgtctcaaagtgaacaaaggtcgacatatatcagtctcttgagcaaggagaggaaaccaaaacaataaatgatatcggttggtgccaaagacctttgatggtggctgggttccgccctagaatgggtctctttcccaagagaacgaattaggtaaaaacttctccaggaggacatactcttgcactgtggggtaagttgatccaaggatcacggtgactcacattgggtggcactttccaaagtatcctccagtttgaagacacctaaatagagtttcataaaacacatacagggtttgtcaaagggaggatttaacacatttaatatcggacatgtcaacaaggtgcgaaaagatggggcttatgttttcttccaataggagatgatgatgaaaggtgggaggtaccaccaatagagatgggtgggggtggtgttgaggcgaaagtcttggctatgggtcgggcgcctagtatataaggattatgtaaataaatggtctggcagggatatggctattattcattcgtctttgccaataggaagtctagaaaagttcagtgaagagctttgtggtgaaaaaaatttcggccacttgttaattg

SEQ ID NO: 595328 - DNA, 214 bp, Homo sapiens
aaatttaataaagtgctttgtgcactggagtaatcagaggctctaataaaaataaaagcttggtagaaggaaagctggattgtaataaaaaacatcatttgagtataaaagatgggaaaaggtatagaaggtaggagatatgggtgagagcacagaagtaggaatgatttaaaatccacaaccgtcgtggctcagtgggaggtgtcgcagaatt

SEQ ID NO: 595329 - DNA, 315 bp, Homo sapiens
gtcccttgccttcttaaaagcccccccctttttttttaaggagaagggcccggtcttttcccaagtccccccagggggggggaaagcattgtttttgggtaaattatgtaaagcaaaatttttttaattttcccccaaaaactttttttttttgttttttttggaaagaagggccttggggcccccccttcccccttttttttcccccaacttgaaaggtatgaggggttttggtttccctgggggggggggggggcagccggggtttccctgtccctttatttgggcccggttgaataaaaggggcccccttta

SEQ ID NO: 595330 - DNA, 243 bp, Homo sapiens
tagtggggcagaggtaggatgcagtgctggggaaatgggcctttccacctgagaaaggcgagtgtgtctagcgtattgataatcctttgatatttgcgtatctgctattttcaaggaattcacattttcacatgtagaacagccagtggtgacagttttttaaatttacaaacaacaaaaggttaaaaattctccagagaattttgtgctttataggttatttctactgtgccatgcttcaca

SEQ ID NO: 595331 - DNA, 317 bp, Homo sapiens
  misc_feature (26)..(27): n is a, c, g, or t
tgttcccaagctggagtgcagtgganntcttggctcacgcaacctccaactcccggcttcaaggcctcttgagtagctgagactacaggcatgcaccaccatgcccggctaatttttgtatttttagtagagatggggtttcactatgttggccaggctggtcttgaactcctgaccttgtgatccgcctgcctcggcctcccaaagtgctaggattacagacatgagccaccaagcccggcctcatcccagccattctttagggaacttcagacatatctttttttctccttaggcatggatgcccaccccaaggt

SEQ ID NO: 595332 - DNA, 189 bp, Homo sapiens
  misc_feature (95)..(95): n is a, c, g, or t
aaatctaccactgtcgaagacaaataaaatatagcaaagacaagaatgtggtatttaggcaaaattgatacgaggaatgtctattgaccaggctntggctcaggtggaatgcaatgacaaaaaaggggccaaaataattaaagaggttctgttagaagcacaagatatggcagggagagaccataacgt

SEQ ID NO: 595333 - DNA, 312 bp, Homo sapiens
  misc_feature (5)..(5): n is a, c, g, or t
acccntaataatgaaacccctgtcgcagttatgccgctctcgctgggctgagtgtcagcaggttaaacctcctgaactcgaactcctgaccggggtgatccacctgcctcgggctcccaaagtgctgtgattacaggcgttgagccactgcgcccgtcaaaaaaaaatcttttttaattagccatggcggagtgcacttgtagttccagctacttgggagatacgcagaaagactacttaagccccaggagtttggggctgcagtgagctatgattataccactatactccagccaagactctgtctccaaa

SEQ ID NO: 595334 - DNA, 219 bp, Homo sapiens
atgacttcaaatgggcccagtgcaaggctgtgtgtgtggaggcgggcatgatcgcacctgcgcagggtgccacggaggctcaccccccgaggactacatggaaggcatcctggaggtgcaggccaaaaaaaaagccaacctccaatactacgcctagggcacacaggccagccccagtctcccggctgaagtgcccaataaaaaatggtttagggtcca

SEQ ID NO: 595335 - DNA, 174 bp, Homo sapiens
cagcaagggaggatgaggcctcgggcacacagccggcgcccagtcacccgtcccttctgaatttaatttgcactaagtcatttgcactggttggagttgtggagacatgccttgagtctcggtgcgagtgtgctgtagtgtgagccaccttgcgcaagtgcctgcgcagaggga

SEQ ID NO: 595336 - DNA, 933 bp, Homo sapiens
tggggactcatgcgcgctgggctggcaggagttgcttccggtcgtgttgttgtgtctgatattgagaagtccgactactaagggaacgaatggagacaagtactgtgcagggcatcctgccgggctatcatgaggagaaggaacaggctcatggacgtcatggcataaagagtagtgctcacactaagaagtgcgatccgctccgggacctaccatcgaattcttgatctaccgtagcatcggggtcgcatgctagagaataggtatatggaggtcatgatggtcaatccgtgagggatttgtatcgcatgatagatggatgtgtttactgataagtgtaggagcctcaatgccatttcaggatcccaaatgagttagctgaattctataatcattactcatgcaagtacaggacttccagcggaagcagccaaatgagatctgtgtgccagatgttctgctggagaatatgaggaaactcctgaaggctcgacgagaagtccaagtgaagaggcacaaaacttggtggagttcacagatgaggagggatatggtcgtagatctcgatttccatgaagtgttagccttcaagtacattaggactgaagggcattctgcgaagctggactaatatcaggatacctgtccatcttttgacccaattatttttgacatttcctaacagaaaggctaagaactgcagagtattacgagatacctagagatgctgcttgaagtaaccttcagggatttccccacatatgagttgaagcctctcccaaggattcacaactgacgcttcttgggaacaattcagggcgcgttcgcgaaagcatgcggcgaaatgggcctttccgcgtggtcccagcaacaatccacggccgcgccactgttgggcccttggcaccttgatattccccctcgggaacggtt

SEQ ID NO: 595337 - DNA, 388 bp, Homo sapiens
gcagaagggttgtggagcgggggtgcagcaagttgggttccagatgtagattcaaggccatgtgggctgaggatgaggcttgcgctatttgagctcagatatgcaggtctgctctgggccagagaggctcacaagagacccactgtgagctgagacggagcaggccccgtagagctgtgtgagccagggtgagctcatatgaccagacctttattccatggaaaataataggaagattaagggggctaggctgggagctgtggctcacgcctgtcatcccagcactttgggagatggagatgggaggattgcttgagcacaggtggtcgaggctgtactgggctgtgatcgcaccactgcactcaagcctgggtgagagagcaagatc

SEQ ID NO: 595338 - DNA, 89 bp, Homo sapiens
aagccacaaagagtagctgagttactgggcccagaggatgggcccctggacatgtacctgcagaataataaagtaaaaaatccctcaaa

SEQ ID NO: 595339 - DNA, 1074 bp, Homo sapiens
agtgtgggaaattttcagaggtttcagttaattgcacaaatacatggtgcaggccaaaacttgtgtggagagattataacaaaggccatgcagtcaggttcaacgtttggatgaaaattgtagggatttaggaataataagggaaaagggtcaatgtgcgtaaagtaataattaggcattggtttaaaagcagggaaatgtaaggacttagaagtaaggcatttcttcgctgtcgaactttcagagattgtcttggtattaacgcagcgtgtactttgcgaatttccgtatcgactttgctacgttacctgcctttgtggcaatcctgtaaatgtttagtacaacaggtttatccctaatagatctaaatgtaaaatgaaagtttctattaatgaatgtcgagaatgtaaggtgtgtccaaagaagtctacctagggtactgagttgaagttttaggaaagaagcaatgcatagccctgaactcctgctagactagcaacttgtctgttacactgtgctatcatcattgaagagaatagtgattgagaggcaatgctatgtagtggagagatcataggcgtcgaagcctagtgctttctacttactggttgtataactttaggtaaattacttaacctcaggccaggcacggtggctcacacttgtaatcccagcactttgggaggtcgaggcaggaggatcatgaggtcaggagatcgagaccatccgtagctaacatggtgaaaccgtgtctctactaaaaatacaaaagttagccgggcgatggtggcagggcagctctgtatgtcccagctactccgggaggctgaggcaggagaatggcgtgaacccgggaggcggagcttacagtgagccgagatcgtgccacagcactgcagcctgggcaacagagcgagatctccgtctcaaaaaaataaataaaaaaataagtaaataaaaacttaacctctctgtgcctcagttttgttatctataaagtgggtataactcccttagtaagattgtgcctggcacatggtaggctttcaaatgtccagatattgttttattaca

SEQ ID NO: 595340 - DNA, 368 bp, Homo sapiens
atgttacacaaggaacagagcactacagcatggacacaagcctttatacattcatgccaaataaaagcatactgaacacatagctgtgtattattaaaaaaaaaaaactgtataaaggccaaagacataggattatgcctagcctttaatacactgctctttaaatcatttaaattcactgaaagaaaatgctagcaggatcctacacacttggcctcccaggctcctaaagttcataccaagatggacagtaatgtattctgcagaacgtacttcccagagatcattaccttctgttggcttattgagagcacagagataaaaacctccagaactcttactctgtagctttggtaagttcaataagc

SEQ ID NO: 595341 - DNA, 119 bp, Homo sapiens
ccgttcgacgaagcgtgaaatgctcctattttaataacagaaaaatgcaaaactagggaagagaaccctagatattcactagggaaggtaccaaaatttccagaatcaaaaattccatc

SEQ ID NO: 595342 - DNA, 179 bp, Homo sapiens
tggtgctcgctggtttagcggacgacgcattagcacgatctcggtcgtgtcgggatgccttcctgtacgaggggacgaaggtgggtatcgctatgccttgggcatgccaagtacaacgagaaggagatcttgaggctacagaatggcctggaaatctaccagtacctgcgaacctataa

SEQ ID NO: 595343 - DNA, 745 bp, Homo sapiens
  misc_feature (225)..(225): n is a, c, g, or t
aacgaagttttatttgtcattttttctgcttatacactctgattcctataatacagtgctataagctatgcagcagaaaataaagatgtttgaaatccaagaataagtgggttcttactgctatagagggagtaagtagttattactaatgattttgattagggttgcatttgttggttgcaagtgttatattcgcagcttgcagtttagaaataatgaatatgntttttatcaggtagtgtggctaagagtaagcacaaagcaatttgtgttagaaaagaaaagaagagaaaaaggcacatgtaattatacattgtggttcggtgtgaaatagtttcttaaggcatctggcgccctatagatgaagatcacgagtctttttagagcaagcctgtggtaaagtattggattgattggaacaatcctggttggtctttaatggatgggacatgtggctgtgtttgagggttactcgacgcactattctgtgtgggacaatcgagtgggtatataaaacatggtgtggggggtataacgaaaatgagctccattgtttgggtgggaaacttttaggggtgaaaagttatgggaagcggtttagatcgtcgatctacatgtagtttttcatatttatagatggtccgggctacatatattgccgataggtatgaaacctgggtggccatttatgtgaatcttcaggagtaagctcttgagatgatcaatgtaaggttaaagcttggtt

SEQ ID NO: 595344 - DNA, 388 bp, Homo sapiens
  misc_feature (24)..(24): n is a, c, g, or t
  misc_feature (30)..(30): n is a, c, g, or t
  misc_feature (32)..(32): n is a, c, g, or t
  misc_feature (50)..(50): n is a, c, g, or t
  misc_feature (78)..(78): n is a, c, g, or t
  misc_feature (85)..(85): n is a, c, g, or t
  misc_feature (169)..(169): n is a, c, g, or t
  misc_feature (178)..(178): n is a, c, g, or t
  misc_feature (184)..(184): n is a, c, g, or t
  misc_feature (187)..(187): n is a, c, g, or t
  misc_feature (219)..(220): n is a, c, g, or t
  misc_feature (249)..(249): n is a, c, g, or t
cgcgaagcgagcactcagcaggtnaaagcngnagctcaacacagatatantgagctctgtgggcacttataatctggnccagaangctctcaagcctcctccaataaagctctatcgggaaacaaatggaccagtggaaaccaagacccggacctttaatacaaggcangcgggttgnttctgnctngcgataccaagagggctcagatctatgggagnnggcagattataccggagaaagagggaacnggagagcttaaaccggttgatgatccaaggttgatgctcaagggtttcaaggcgcgggtaccgtggagcaccattacctgagggcctccctgttcgtgtacccacaggagtcgcttgtgattggggctcccctgttcgt

SEQ ID NO: 595345 - DNA, 749 bp, Homo sapiens
cgaggtctcgcagctcatgctactccttgacaaaactgcacactattgaccctgctctggtgatagctctaccatggtggatagtccaaatggtgctttacagtatctagtgctgcaggtgcagagggcctcaaagtctcacctctctatggataatactgtctgctcatgcactaaccaattcttgatactcccagcgatgcgttcccaagtctttgtcttgggtcagtacccactgatcacatacttgctgtgagatgatacacgtacctcggttgtcattgcaagaaataactatcttctgtgcatatcactgtcgctagcaactgactaggacaggatctattcacccatattgctacgtgagcactctaggcgttctattctgtcatcaccaaatggccatagctgttcttataataaaagatgaggatatacagtcctttcatatgacgtgactgtcttgcacacccctacctgtgaccacctgaacactctgaaataattgtgcataggctacaaaagtagaatgctatgagtatatcatagattctcggtgaggcacctgtgcagaccctgatctagcagacttgtgtatcaagtatgtggcgtgccacatacgagccaagaacctgtgatcacctggccgcacactcacctgttgcctggactactatatacatgtgaacaggttgctgctggcctgtgaagagctgctatattctcttcacgatggtgtgttttctgtg

SEQ ID NO: 595346 - DNA, 488 bp, Homo sapiens
  misc_feature (32)..(32): n is a, c, g, or t
  misc_feature (48)..(48): n is a, c, g, or t
  misc_feature (89)..(89): n is a, c, g, or t
  misc_feature (91)..(91): n is a, c, g, or t
  misc_feature (96)..(96): n is a, c, g, or t
  misc_feature (102)..(102): n is a, c, g, or t
  misc_feature (132)..(132): n is a, c, g, or t
  misc_feature (156)..(156): n is a, c, g, or t
  misc_feature (158)..(158): n is a, c, g, or t
  misc_feature (166)..(166): n is a, c, g, or t
  misc_feature (171)..(171): n is a, c, g, or t
  misc_feature (189)..(189): n is a, c, g, or t
  misc_feature (203)..(203): n is a, c, g, or t
  misc_feature (206)..(206): n is a, c, g, or t
  misc_feature (221)..(221): n is a, c, g, or t
  misc_feature (228)..(228): n is a, c, g, or t
  misc_feature (233)..(233): n is a, c, g, or t
  misc_feature (246)..(246): n is a, c, g, or t
  misc_feature (279)..(279): n is a, c, g, or t
  misc_feature (281)..(281): n is a, c, g, or t
  misc_feature (315)..(315): n is a, c, g, or t
  misc_feature (323)..(323): n is a, c, g, or t
  misc_feature (338)..(338): n is a, c, g, or t
  misc_feature (369)..(369): n is a, c, g, or t
  misc_feature (372)..(372): n is a, c, g, or t
  misc_feature (401)..(401): n is a, c, g, or t
  misc_feature (447)..(447): n is a, c, g, or t
tggttgagcacagggtactttattgagggaanatgacaaggggcggcnccctaggccccccccctcttcaagggggctacagggcaacngngaggngggganattcagtgtggggggggactgagtgtggcngggaccccccagcagtgagggtcncnctcttccncttgngctcttgctggggctggnggtccaggggtctnacnccttggaggccatgngggccangaggnccaccaccctgtngctgtagccaaattcgttgtcaaaccaggaaangngcttgacaaaggggccgttgagggtcaatcccanccccaccntcaaagggggaggantgggtgcccccgttgaagccagaggagaccnccnggggcccagtgtagcccaggattcccttnagggggccccccgacgcctgcttcaccaccttcttgatgtcatcanatttggcaggtttttctaaacggcaggtcaggtccaccact

SEQ ID NO: 595347 - DNA, 149 bp, Homo sapiens
  misc_feature (3)..(3): n is a, c, g, or t
agnagggttttcaagcatacaccaaaaacacacacaaaaacatcaaccaaaaaacagagacaacaacaacacaaaaacaaaaactaacaccaaacacacaaatacacaacaaacctcacaacaaaaatacacaccacaaacagaccaaa

SEQ ID NO: 595348 - DNA, 514 bp, Homo sapiens
gtgtatataattgcaccatcagctcccaggatcaaaaggaaaagtaccagccgggtgctgtaatcccagcactttgggaatgccatggcagaaggatctcttgatgctagcctgggcagcctagcgggaccctgtctctacaaaataccaaaaaaacaaaaaattcgccggatgtagtggcatgcacctgtactcccagctaactctggaggcggaagccggaacgataacttgagccccagaggtagaggatgcagtgaacaatgatggtagccattgcgctccaagcctggcatcagaatgagaccctgtcacaaaaaacaaaagggaaacttactcagagtctggtgctgggaaccacggagcagagcaagctgcccagggtaatcaggtgcaggaaaagcagcgccaaggaccctgtgcagggagtcaggaataggaccccagagaccgtgtgaagtaggctaaaagccaatcatccaagccaaggctgaggggctcatgcagggagacg

SEQ ID NO: 595349 - DNA, 101 bp, Homo sapiens
tacgcagtccgacctctcctatctctcccaggtctagctgtttcctgttgtaaaatactaacagaccgcaactcaacaccaccttcttcgaccccgccgga

SEQ ID NO: 595350 - DNA, 893 bp, Homo sapiens
acaggccggagttatcggctggctgcacatcgacggtgcaagctgtccgtcctgcgggtggagcacgcgctctccaaggtccacttcaccgtcgaacgcgagctcctactacaagtccctgactgtctgcgcgaggaggccgaaagcgagaagaaatgagaaggtctgggcccactatgaggagcagcccgtggaggaggtgatgccagtgctggaggtagaaggagcgatctgctagctacaagcccgtgtttgtgactgagatcactgatgacctgcgacttcatactgtgcaggatgtcggagatcgggcgactcgcgagattggagaagctgatggagaacatgcgcaatgacgattgccatgtctacccctcccgtgtagagggctccgtatgccccccgcgagggggagagttctagctaagttgtccaaattttgtacgatggagaatggtcacctgtgcccgagtagagaaagtcgagtctcctgccaaccatacatgtcttctacattgactacggcacacagagaggtcctgacatccatccgtcgtgggtaccctatcacactgccgttcagcactcgggtgctgccagatcaagccacggagtatgcctacgacttcatacaggtgccccaagatgattgatggccgtagcggacgccgtggacagcgtagttcgggatatccagatacaatcaggtgcctgctcaacgttggaagacctgagtgacggggtggccccatgtcaacctgtgggtttgcgattcgcagggcgatgtgggggctggccttgggggaacgcaaggcaggccaggtggaacgtggcccgggcacccggcccaaaagtggatccccgattctgactgtcaaattggaaaagcaagg

SEQ ID NO: 595351 - DNA, 266 bp, Homo sapiens
cacgagggatgcgcggctgtatcgcaccggcgaccgggtgcgctggcgcacggatggcagcatcgccttcgtcggtcgcaccgatcagcagatcaagctgcgtggcttccgcatcgaacccggcgagatcgaagccgcgctcgccgcactgcccggcgtgaaccaggctgccgtcatgctgcgcaccgccaccgacggcgagcgtcgtctgttcggctgggcgagcggcgatggtctggacggggctgcgcctgcgcacacagctc

SEQ ID NO: 595352 - DNA, 488 bp, Homo sapiens
cggatcgagctcggtaccatataggttggacgaggcaggtggactcacctgaggtcaggagtccgagaccagcctgaccaacatggtgaaactctgtttctactaaagatacaaaaattagctgggtgtgagggcacgtgcctgtgatcccagctacttgggaggctgaggcaggagaattgcttggacctgggagacggatgttgcagtgaaccaagattgcgccactgcacaccagcctgggcaacaagagtgaaactctgtcccaaaggaaaaaaaaaaatctctcttcttcttcctcttcttcttccttcttccttcttcttccgtcttcttctcttcttcttcctttcttttttcttcttcctttttttttctccttctttctttcttcttctaccttacttcttccttcttacttcttcctatactatttttctatcttacattccttcttctttcttcttccttcctcctccttactatct

SEQ ID NO: 595353 - DNA, 144 bp, Homo sapiens
  misc_feature (3)..(3): n is a, c, g, or t
tantggcgagcccgagccgagctgagcagatggcaagaaggccgaagcgattagctgtacaggaggctgctcagctggacatgctgcgtagagaagctgccccaggtgcatgaggagatcagtggtcccttgcacttcagccaa

SEQ ID NO: 595354 - DNA, 134 bp, Homo sapiens
ggcttcaggcaggcctagacttgatgcagccactgcaatcatggtccatggtgcaattggcagacaagtaggtgaaaggtaagtagtctccagagatttcaatcagggacgtggtttccagatgttaaaagata

SEQ ID NO: 595355 - DNA, 299 bp, Homo sapiens
tgaaggcagtggttccccatccaccttcttccatccccctgcagacagacagatgagcgatagggctcgagccataggggatcctgaccagctcagacacctgaaggaggaggcacaggtctgtgagtcagaaagaagccacttgcttaggacatcagacataggtaatggctgaatctccctaccctgagtgtttgtggaggcggaagaaattagttgtgtgcggatcctagactagggtagccatcatcatttcctaagctcttgattcaaaaatgtgtattattctcacgtctgca

SEQ ID NO: 595356 - DNA, 403 bp, Homo sapiens
cgcagtcataagcagtaggtcagagacctagtggccacttctgggctgatcagcattgtcaaagctagcctacttgtaacagaggtttctacatatgcaaaccatccgatgaagaactcggtgttttgacctgtgagacactctattaagatgaacggaatagttctaattcctatgacaattatggactagcaaatgctgagcattgatgcttcattattatgggatttcaaacggatatactctgtgattctttatggagcactgcctacagcctggcaccagattgtgccttagagctgcgatatatgcacatgcatggatacgttcggtagggatttgaggacttgatatctgtgactacctctgatgagacaggtggctttgctgtcacaggtggtcg

SEQ ID NO: 595357 - DNA, 275 bp, Homo sapiens
  misc_feature (93)..(93): n is a, c, g, or t
  misc_feature (107)..(108): n is a, c, g, or t
  misc_feature (111)..(111): n is a, c, g, or t
  misc_feature (117)..(117): n is a, c, g, or t
  misc_feature (122)..(122): n is a, c, g, or t
  misc_feature (131)..(131): n is a, c, g, or t
  misc_feature (135)..(135): n is a, c, g, or t
  misc_feature (147)..(147): n is a, c, g, or t
  misc_feature (151)..(151): n is a, c, g, or t
  misc_feature (153)..(153): n is a, c, g, or t
  misc_feature (159)..(159): n is a, c, g, or t
tcggtaataggtcatgtgcatccaggcagtgggaaggcatcgtgggaagaagaagagaggaatcacgtgatcatgcttagggttgcggtgatnatggaggtggaatnnggngctgtnaaatngtataggtnatancttttctagtcnggtnangtctangaggagtaggggcaggttttggctcgtaagaaggcctagataggggattgtgcggtgtgtgatgctagggtagaatccgagtatgttggagaaatcccaacggtgaccggcgactt

SEQ ID NO: 595358 - DNA, 212 bp, Homo sapiens
ctcacatgcttaaagagcataaagatcacaggtgaaggccaattagaacactgatgagggtctgtgtccgctgtgtacacattgtcttgataaacatcttaacaggaaacaaggttcaagagcagagaaccagtctgactagaattcaccaggctggaatttcccaatcctagcaagcctgagggtactgcaggagaccaggctgtatttca

SEQ ID NO: 595359 - DNA, 229 bp, Homo sapiens
tgctattacttttggaaagtgtgatctgtcacacatagtatttggtttcttaagctgttttgtagaccctataatgaaatctacattttgtatgtatgttttacatgataggaaagtgaggctggaataaatatgtcagaaaatatacacccactgggacctgagaaaatctggagtaagcaaagccattctcagagtgctcaagtgtgagcctaggactgcttccatg

SEQ ID NO: 595360 - DNA, 317 bp, Homo sapiens
agatatgaaagtctggagtaaggcatgagaggttgagagctccgcatagttgaatggaggaatgaggaagaggagcatggtgccctgggctgggatcctggaactcagtggtagagctgccctccagagacaagagattctgattaactgatgagcgttaattgaactctcagaaccagaataaaagaccttcttcagtgggacacaaacgccaggtcataaaggaaaagagtgattaatttagccacatccaaaatctaagacatcgtgtgaaaaaaggcacaataaaacttgcaaaagatgggaacagattagga

SEQ ID NO: 595361 - DNA, 207 bp, Homo sapiens
gcagcccatttttggggacccctttttcaaatatgagaagatcaggcccaagaacatcagaatttaagataatggcggatatcatttccataggctcaaataattagatgcatgaaaacgatgagtcggttacccggtgaaaaaatcaaggaacccggtgaaaaaattttattgatgaataaataactttaattattttgtcctcca

SEQ ID NO: 595362 - DNA, 159 bp, Homo sapiens
gtgctcggacatacttctggctgggcactgtgcggaaacttgaggataaatcagttgagctgcatgcattttataaggcatggcctgtctcctcacttaagtgcaaggttctcatcgaccaaagccctgattctgatcaattactcatcttcatgccag

SEQ ID NO: 595363 - DNA, 226 bp, Homo sapiens
  misc_feature (12)..(12): n is a, c, g, or t
  misc_feature (15)..(16): n is a, c, g, or t
  misc_feature (22)..(23): n is a, c, g, or t
  misc_feature (26)..(26): n is a, c, g, or t
  misc_feature (40)..(40): n is a, c, g, or t
  misc_feature (43)..(43): n is a, c, g, or t
  misc_feature (59)..(59): n is a, c, g, or t
  misc_feature (64)..(64): n is a, c, g, or t
  misc_feature (71)..(71): n is a, c, g, or t
  misc_feature (105)..(105): n is a, c, g, or t
  misc_feature (107)..(107): n is a, c, g, or t
  misc_feature (114)..(114): n is a, c, g, or t
  misc_feature (143)..(143): n is a, c, g, or t
  misc_feature (158)..(158): n is a, c, g, or t
  misc_feature (160)..(160): n is a, c, g, or t
  misc_feature (163)..(163): n is a, c, g, or t
  misc_feature (165)..(165): n is a, c, g, or t
  misc_feature (177)..(177): n is a, c, g, or t
  misc_feature (180)..(181): n is a, c, g, or t
  misc_feature (184)..(184): n is a, c, g, or t
  misc_feature (204)..(204): n is a, c, g, or t
  misc_feature (212)..(212): n is a, c, g, or t
  misc_feature (217)..(217): n is a, c, g, or t
  misc_feature (220)..(220): n is a, c, g, or t
cctcactcagcngcnncctacnnggnatcctcagcaagangcnggagactttttacccncccgngacagcnttacaacccgtaaccacaatccctccacctctcngngggaacnggaaccctcctttctccgcgtgacctaangccactcaatgaacngnagntnacgagacctttngcnnggnctccggaatgtcctcacggnatattgangttcnggnggagct

SEQ ID NO: 595364 - DNA, 376 bp, Homo sapiens
cctctgaaggaatttatgctttctccagatgttgaacatagcgtgctctttggcctccttcaaaaaatgttggagtatggccagcccaaaaaatttctttcagagaagccttaaagcatcccttttttggccttttgaagaaaaggatatagatctgtaattgggcagctctctcgaaaagattttcacgaccggatcagtctaatttttaaattttaaggtattttggacagctttgtaaatttttaacctttttatattgccctgtttattttgtttggggaatttggttccttaaggacaaagctaaggtaatgaacctctttttccgtaattgtaaagtgattttttccgaataaattttttggggttttta

SEQ ID NO: 595365 - DNA, 775 bp, Homo sapiens
tgctctggccaagatttcgaggttgagaaaacaaaaaaatgacatggtgcagaagcttgtaacattgagtcacattcttaactgtaaatggtgtctttcttctggggttttcatgttattgcaaagaaatgaagagattctggaaatgcatcaataacctaagaaacacacgcgacataaacaatatacttatggcttgtgtttatgctcttcatcattgtgcgttgtgtgcggttacctgcttgagctgatcctgcaactctgttcgcgacgagagggcactcacgtggcactctgttcgattatgattcgtctgtttaactagagaaaacaatagtggactcgatttcccattcaaggctgttggtgttcaagtgttgatagtgaacgaacaagactgtgaagtaatgatatttttctgcttacaacttatccccactcattggcacgtgaacagtgacgcaagctcaatagacttcagtaagctgttcatagaacttttgacaatgtctgagtgatcttagaaatcattatctgttatttacaaatcaacggaaactgaggtccagaagagagcaagcgactttgcttaaagtcgcatcagagagctgagggtaagactcaggtgtcctgactcccagtttagtatcttatgaattttatgtctgtaccatttagaaaataactaattaacactattatgtgcaagtcagggttatggaaaattcagtgtcccaataaaaagtggacttgcacactaagggaccatccccca

SEQ ID NO: 595366 - DNA, 151 bp, Homo sapiens
acgacactggtggacaggtagagttataccgagcgatcgagtgaatcgtggtgaatgaactcggcaaaatgcccccgctaactttgggataatgggggacctgagctgtcgtgcacccgatgtcggtgtggtggcggtgaggggcgcagag

SEQ ID NO: 595367 - DNA, 299 bp, Homo sapiens
cgggggggggggtttcaggtaagggtgtgtgaggccccccgctgctgcttttttggaggttaaggggatttattacacccagtcctaaatgtttcaagggcagaaaaaactgggtaagtcctaaatgttaccgggggaggacattttaggcatgaaaaacttttttttattgccaaaaaagaaattaaagctttgggttgtttccttttttggggttcaaaaagtagtctgtctgtgggaactgtttggaaaatcttgttttccccattgtgatttttgattaaattttattccccata

SEQ ID NO: 595368 - DNA, 200 bp, Homo sapiens
tgcctagagggcttaaggaatcgtgctggtgctcggaagcataagacgaatcaacatatggtgattcatttacaaagcagaacattaccgatcgataaataggaatgaatttctgatatatgcaacaacatgatggatctcagacattatgctgagtgaaaaaagacaccagcacgatagcaccagcacgatagcaccag

SEQ ID NO: 595369 - DNA, 140 bp, Homo sapiens
ccgttgtgctttcccctattgggctagaaaggaggaaagacacggatgtgggaagccagtgagggggcaggaggaaaaagggactacaagctcctgagatgtagtgtcaacaagttattggagctgagcgaccatcgttg

SEQ ID NO: 595370 - DNA, 127 bp, Homo sapiens
tgatcataaagttgtgactcgtggaaatgtcacgctgctgatctggcgctctcgtggacatttccacgagtcagccccactttatgaatctgtatgcccatatgcctggccctgactcgtggaaatg

SEQ ID NO: 595371 - DNA, 112 bp, Homo sapiens
gtcctggtcacggaacttcgggcattgtagtaggactgtaaatgtgcagccactttgggcaacagtttggcatttcctccaaatgttaaacacagttaccatatgatccagt

SEQ ID NO: 595372 - DNA, 116 bp, Homo sapiens
gccttattcgattgcattgacctgtgggaaagtctttctcacagaagtcacagctcatcaatcatcagagaactcatacagtaaaaaatcctaggactacagttaatagtagtctt

SEQ ID NO: 595373 - DNA, 334 bp, Homo sapiens
  misc_feature (14)..(14): n is a, c, g, or t
  misc_feature (40)..(40): n is a, c, g, or t
  misc_feature (64)..(64): n is a, c, g, or t
  misc_feature (70)..(70): n is a, c, g, or t
  misc_feature (156)..(156): n is a, c, g, or t
tcctgcagttttcngtccttggcaagtttccaccaccagnggggctcaggaacaggattaaaancccaantgatgccaaactcatagtagaagcttagagtctctcccaggaagtagatagaggtgggaagaaagtgcatgggattcggaatcaangggttaatctaaacctgtcacctaatggtagtatattttattctatagatcaaataattatttgaattttataacaatactcaagacatgcaattcttgtttaatgtattaaaaacatttaaatgtttgggagatcgagctgggaggatcgcttgagcccaggagtttgagaccggcc

SEQ ID NO: 595374 - DNA, 755 bp, Homo sapiens
gcgtccttgtcctaggtacccggggattgcggccattatcggccgggtgctccaggaccccgaccattcgtggtgtgaaaatctacactttcagtcaatgcaggctcgggacactgtcctcattattgaaggcacactcgagactgatgtgaaatgtgctcaaggggccaagaagcactatgtatgacaagaggcaaggggtggaggcaaagttcaaaatcttgcaagaccacacatccctatggggcgcgctctccgagccacccaaaagaactgcagggcgcaaaagcgccatctgccatcgcaaaccacccgcccaccgcccgcccctcgtggcgcatgccctgggtggggatgcagcgtagaagcgggcagggcgggggtcggcgtgcagacgggtgcgagcacctcctatagggtctctaacgctgcccacgccgccccccttccccccccgtatcactacgtacattgcgatactctcggctgtctctagcgtcatagcgctactcatgcgcttattagctgcggttgcgctcgacaaccggttcgaacaagcatactacctctagctacaatgagcgtgtcgggatgcgggcggacaggaggggcctgggcgattggccgggtcggcggtcacctctacgcggaccatgcgtctaggtggtaacttgtctcggaaatgtagttggtatagaggtgtggtgaatagaatggacggaacagtcgggcggggacggtctgggctggccggc

SEQ ID NO: 595375 - DNA, 993 bp, Homo sapiens
gcggtagggcagttcgggtctcgatccagtgtgcgttctgactgaggccctttgagcctcctgctcctggactcgaatgtgtcgttacgagtggccgactggtctatcgggcgagacgaggacggtgcgcagtgtgccggctctgggccttctggtggtgactagcgtgatgcgtgaccacgatagtagcatatagaggatgtcgcatgtgtgaacgtcgtgaccccttgcgggtattccaggtgactgagttagcgcacgatgcgatcgacgaccgactgggaacttgcgaggattagggaccgactttcgtttggtagtctcctgtcaaacttcagcgcagcgtatcaccacgttgtaataggtctggaagaccatccctggtcccgtgatgccaaaggtgcttgggtgccttatcttgtgcccatgccgttgcagtgctagcgaatttcactgcaacaggtgtcccgatgagctgagaatccacgagcttgacaattcaaagctgtcgatcccttcacagacagtaaaccagctctttggaaaccgagttccatcaccccaataaaggagctcttcacagcacctaatgatctctgcctttcacaaagaccacctttgtgcatccatgcctactcttcagaacagcactgcaagaaatcccctcagccactttgtcatccaccaaggctgaaaggtaaccctctatgaagctctgctgaccacctcctttgggtcctgctaacctaccctctgtttcatgacacttaggacactgggagctagaggtcattggtatgaacctgttcttctcccatggactaagcttgttcagagaaacagagacttgtctcaattccttgggttaccagcaaccttgcccagacagcaggaacttcattaaaaatgggctggacttgatctggtgggtttgactggtcagtggtttaacctgagcaaggaaagaaggttggtcattttgattcaacccca

SEQ ID NO: 595376 - DNA, 407 bp, Homo sapiens
  misc_feature (13)..(13): n is a, c, g, or t
  misc_feature (339)..(339): n is a, c, g, or t
  misc_feature (383)..(383): n is a, c, g, or t
tgggcttaagtgnttctcctgccctcagactccctgagtagctgagacccacaggtgcatttcacccactcagctaatttttagtttttttgtagagatgaggtctctacccaagctggtctctaactccctgggctcaagcgatcttcccatcttggcctcccaaagtgctgggattacacatgtgaaccactatgcttggctcaaagatttattgataataccctgcaagcacaagcgtgcaaagcaaaaatggacaaataggatcacatcaagttaaaaagctgcacagcaaaggaaacaataaacaaagtgaggaaacaaccacagaatgggagnaaatatttgcaaaccacccatctgacaagggattaattaccagnatatataaggagctcaaacaactc

SEQ ID NO: 595377 - DNA, 182 bp, Homo sapiens
gaggagtatcatgctgatggcgaggctaacctgggcctcccacgagaagatgcaggagggtgacgagggccctgttccaccaccataagccaggcctcggggagtggcaccccactaaagaccacagttggccaatgatcacatgtggccacggtccatggtccacatgtcatggttggcca

SEQ ID NO: 595378 - DNA, 177 bp, Homo sapiens
atgtacagctatgagcacatgaaagagtgtttaacatcctccactcagcctccaagtagctaggactacaggttatgcgccatcatgcctggctaattttcaaactttttttggtagacaactggtcttactatataatatgttgcccaggctggtctcctgggctgaagcagtcct

SEQ ID NO: 595379 - DNA, 328 bp, Homo sapiens
gactgtgggtgcaaacctagggcagtttgcaggtggtaagccatttaccaacgatagttgtaggtaaagaagggcagatttattagagaaatggtgaaaatatgttgcagtgggcagctcagcagagaaggggctacctgcaaggaggcaagggctggaggaaagttttatagggtcctgctgaagggtgctacgtgtggaatgaggtcattgtgcccgcaggtggtttgtgattagctgtctctaacaatggttcatacaataattgtgcattattgttctcaacttggggctctccccaacctggggacccttccttattgttgct

SEQ ID NO: 595380 - DNA, 301 bp, Homo sapiens
caccaccatgcctggctaattttttatgttttgtggagacaggatcttaccatgttgcccaggctgggtctcaaactcctgggctaagcagtgtcccacctcagcctcctgtagtgctacgactacagacgcaagccaccgtgcctggctaatttttgtatttttggtggagacggggtttcaccatgttggccaggctgggacttcaagtgatccgacctccttggccttccagagtgctgggattacaggtgtgagccacagtgcctgcccttacttaattcagtgaatgctttgaggc

SEQ ID NO: 595381 - DNA, 906 bp, Homo sapiens
agcggagtcgggcgatcccctggctccgtgcgcgagggacggccgcgatgcgctcggcctgaggttacccgtgcccggccctttcctcgcttccctcggacgtattccactgcgatcaatcgcgctgccccaggcgtcgatcctgcgaagtcccgtctgactgggagggaagatggctgcacgggagtctggcaggacgagctggccaagctaggcccgaggagggctcggctccggctgccgggaaatgctctcggctcggcctaggctttctgcgctaccgtagctgggcgctccatcctggggctggagccgaacacggtaccaccgtgctgggtgatcctggtgggcacctggcgcgctcgggctgctgcctgctgtttctgctgggctacgcgctgggcctgcggcttggcgccgggcgcccgcggcagattgctggcaggagcccgttcccgcaagctgggaggaggcgtgctggtcgtgccggctctgcgggcccgcgaagacctgggccgttgctgagagcaatctccggagccgacggaaccagacgacgcacggaaccgcgaagaagactgtcctgaagaagccccagacgccaacatggcgcgggccctaggtgtgacaagtggcctggagggctgacaggcttggttcggacacacccctccacacgtgcgtacaagcagaagcctgtcacaatgacgaacaactgcacgacggcccttccgaccgacccagtcgcgcctccagtccccccccccccacccaaccccccccccccctccccccccccacccttgcaccgctccccccccgccaccccccacctcctcccctctccgcccccccactgccccacccccgtttccactccccctccacctcccgcccctcgcactc

SEQ ID NO: 595382 - DNA, 605 bp, Homo sapiens
  misc_feature (425)..(425): n is a, c, g, or t
ccagctactcgggaggctgaggtaggagaattgcttgaacctggaggcggaggttgcggtgagccaagatcgtgccattgcactccagcctgagcagcgagagcaaaactttgtctctaaataaacaaatacataaaataaacataaagtaaaatcttggaccaggaacgaggttgtgcaatacactgacttttgcccccgaaatgttttatgatctgggatgggtatttatgacgcttagtgcactttgtcctagcctggtctgtaccacttggcgcgagtgaacttttgctacgttattagggaccttgtggtccatcaagtccttgggccctgaatccaccaggaaaggaggctcttaaggggaactacgcgggcatccatcgttctgggaaaaacgcttttgccggtaaaccctcaggaanccccccggttgcttaaaggccccaaacagtcccccaccttttggttggaccgttcccccttttggccctcaaaccacccaagggaaccttttatcacttaggagaacttgggatcaccggtccaaacacctttaagttttctaccttttaagagggaaaacgggggccccaaaagacaag

SEQ ID NO: 595383 - DNA, 148 bp, Homo sapiens
  misc_feature (1)..(1): n is a, c, g, or t
ngtaactcctattttacttaaaatgtaaaagtgcaagagtagtaatgctggtatattgctataattgttctatgttattattaactactgttagcctcattaacatttaatttataaattaaatgctattgaaacttctaaaactagg

SEQ ID NO: 595384 - DNA, 251 bp, Homo sapiens
ggtttttcccccccccccctttttataaatgtaggcctagaaaacgtttttttgttgcaaaactcaggtaagttccggcttcccccttgatgttgaaattttttatgtaaaagggcaggggattttgttaaaatggcaaaaaaaacccagtttcaaatttttggaaaagagcctgtggtggagttttaaaaatgtttggggaagggcttaaaatcagaactttttaatgaaaggtccttggggaagtccta

SEQ ID NO: 595385 - DNA, 289 bp, Homo sapiens
tggctgttacctacctgggcgtatctaaatggctgttacctaaataggctgttacctaaatggctgttacctaaatggctgttacctaaatggctgttacctaaatggctgtggagcgctttgatgcctttggtgaaaaagggaacgtcttcccataaaaactagacagaagcattctcagaaacttgtttgtgatgtgtgtacccagccaaaggagttgaacatttctattgatagagcagtgttgaaacactctttttgtggaaaatgcaagtggatatatggatag

SEQ ID NO: 595386 - DNA, 597 bp, Homo sapiens
cccgggctgcaggaattcggacgggtaattggatgtctgttactatgtatacttcctatgcaggtctgcttggcatgatatttggaccattattgtatgtaggagacagccagaattcaaagtagcatagagacacatactatgcttgatataaacaacggcctttgatatactgtgtgacactagaagagctattaaagaaaggcatacttagttaaataaatcagtatgacatgcacatactgcatcttgtcctggataatgatccatcagagaacagacaattagaatattccctgtattgagcaatcatatgctatttactaggctctatatatcagcctatcagttgacattcgaaactcgataggcgagccgctcactaaacccactgaggggcatctcattctgacgtgaaatgacacttcattatgaagtttagcggcttctgagaatgatatacagaaagtacagcgctacgtacatgcatgcgaatgcagctcattgaggatgaggatagatctgatacgtgtatgagctcgagacattctgacgtcatgactctcagttctactggactcatgatgagacggcctg

SEQ ID NO: 595387 - DNA, 160 bp, Homo sapiens
  misc_feature (66)..(66): n is a, c, g, or t
  misc_feature (70)..(71): n is a, c, g, or t
  misc_feature (73)..(73): n is a, c, g, or t
  misc_feature (75)..(75): n is a, c, g, or t
  misc_feature (79)..(80): n is a, c, g, or t
  misc_feature (90)..(90): n is a, c, g, or t
agtctgctacgatcacgagagcccggttgcacattcctgagcccccacgacgaaagtgtggttcgntctnnanancctnnagagcgggtngtgctgacttgtgagctctcaagggtggacttcccggcaacctggtacaaggatgcgcagaaggtggtgg

SEQ ID NO: 595388 - DNA, 234 bp, Homo sapiens
taacccaggtagagctaacctgtatcattactgcaggacagctactcttgcgcctaacttgggagcgccaccctaactatatcagccattatgcttccctctacacgtatgatcttcacaattctaattctagtgactatcctagaaatcgctgtcgccttaatccaagcctacgttttcacacttctagtaagcctctacctgggttaggttacctgggttaagtctacctgg

SEQ ID NO: 595389 - DNA, 297 bp, Homo sapiens
cacgaggggggcatgggaagttgacaacgaccaattgagagcaatcattgaactacatgaaacattacagaagaactcagcgttgactattcgacggtcattatggtcgttcagcattccaagcatcttggaaaggtgaaatggcttgataagtgggtgcctcatgagctgagcggtaatcaaaactagcgttttgaagtgtaatcttcttttatgctacgcaacaacaaaccatttctcaatcggattgtgacatgttatgaaaagtgaattttatacaacaaccagctcagtggt

SEQ ID NO: 595390 - DNA, 143 bp, Homo sapiens
ctcataactagctagcacattactatctatcactagccatggcatccccttatgagcgggcgcagagattataggcttacgcatcgaagattaaaaatgccctagcccacttcttaccacaaggcacacctacaccccttatc

SEQ ID NO: 595391 - DNA, 185 bp, Homo sapiens
gcttaaaatttgggggaaaatttaaaaaaaaaattgcccggatttttggaaatttgttataaagaatgaacccttttgtcaaaaaagattcatatttcctttttaaccctttgataaagtaaggcagggggggggttaatttggtttttttttgttcccccagttaaataaatcataaaacttga

SEQ ID NO: 595392 - DNA, 459 bp, Homo sapiens
gcaacatgactgactaacactagacacagattcaccccatggaatagtgcatatggggataccaggtaccttgcgacatgttattctcttaggaatgatgcatggggactgctaacatattactggtgaacacttatcacttagtccgctgaagtttgcgacggtgcttaggtatggttttataccatgagcttatatatacatcggtgcgggcatgtggatccattagtgctatacccagtcttcgatcgcatctgagcgcgagccaagattacgaaagaacacccatttatcataaaggggcggatgttctaagacgtggcataactggaccttgtgatctgtaaaagagatgacacttgctggacggttactaaactctatgtcaataaggcacgaagaatgtttttccagactgtggctcaagaaagcacttctttgtgcgctctgccatgtacg

SEQ ID NO: 595393 - DNA, 1158 bp, Homo sapiens
gagcttttaggaatcattgtaggacagacagagccctaaacaaccattcatgacttaagttgttggctcagtgtatgctggggacaaagaaaaactaacaagccgacctgcctttatgataaattctcagtgtgcttcccacagggcatgcacttcctgcaggtgtgcatctgtcccaccattgcaagcaactccaatacactagcaagcacaggggcagctgtgcagcaacgtggcattgttctaccaacttgcacaagggattaaccagaggcaagtggctgaggccatagagatcacgtatattccaagttcccattcgcaacactatatttcttggacaacgcggaacaggaagctgtgtaccgtcatggtcatagacagaccatggaaatccatcaacgctcagaaaggcaaagtactgattggcatcgacacacatgtgcgacggcatcaggggacagaatcagatcagacatacatagggaaatagaccagacatgccatgtacgacatggcccataatgggagcaaagaacctatgcagatacaagacaggatcagcagaagagctagggacaggaacatagtcatacgatgctactgaggacaacaaaacccgaaccagtaagcaaaacaaggcagacgtagagcgcacatgcgacactggcagatcaaaaacaaggacagacatgaacgcaccgagcactaggagacacaagcataacactggcaacaagaccacacacgttgacacacccaacgcagaaccacacaagacaaacaacgcaaccaaaacaaagcaaacaaacacaacccaacagaccacacaagaaaacagaaaaaagaaaaacaaagaacacacaacagcagcgcaagccgagaacacgacagaacgaaggagaggacgcgcagaagaaaaagcagaaaaaacgaaccagcaagacaaagaacgcagagacgagcacaacaaacggcagcccgacacccgacagcccacagcgagacagatcgacgaacacaacaggcgagacacaccacgaaggagaacagcgacacacctcgaagccggcagccggaagcagcgcgaagcacagccggaagcaggcacaagcgggcccacaacgagcagaagaagcagagcaaccactggcagcc

SEQ ID NO: 595394 - DNA, 188 bp, Homo sapiens
gagctagaccatgtagacgtaactagaagtgtgaaaaggtatggcttggattaaagcgacagcgatttctaggatagtcatgtggaattagaatggtgaggatgatacgtgtagagggaaggttaggggtggatatagctagggtggtgcttccaattaggtgcatgagtagggttaggtctacctgg

SEQ ID NO: 595395 - DNA, 101 bp, Homo sapiens
gctcggcccttgtgtatgagaactcaaacaaagctctggataaggccggttaaagagcaaagacgtcaagttggctgaggcacaccagcaggatgtgtgcg

SEQ ID NO: 595396 - DNA, 502 bp, Homo sapiens
  misc_feature (78)..(78): n is a, c, g, or t
  misc_feature (142)..(142): n is a, c, g, or t
gctcccgaattctgccaaaagtacatggaacaagcttctgcacagaccgccttcatatctgtgtgcggttacactccntatcacgtcacccgatatcccaaacatgttgtcttgtgctggctgcagaggctccacacaacgnatgcgacctgcctttggaaagccccagggcactgtcgccaggcttcacactggccaagtcatcatgtccatccgcaccaagctccagcaccaggagcatctgattgtagccctgcgcacgggccaagttcaactttcccggccgccagaagatccacatctcaaagaactggggcttcaccaagttcaatgctcactgacatttgaagacacggtggctgacaaccggctcatcccagatggctgtggggtcaagcacatccccactcgtgcccctctggacaagtgccgggccctccacccatgagggcttccaatgtgctgcccccctgttaacactcaccactaaattctactccct

SEQ ID NO: 595397 - DNA, 278 bp, Homo sapiens
ggggggggggggggggaattgggtttcttttttacagggcccgggtttttaaccaactggcccttggtaaaaaccccccataaaaacttttgggagggggggggggggggggcttcctttttggccaaccttcccagggtttaggggggggggggtttttttttccccaggggaaaagggtcctggggtttgggccccttcaggggttgcccccccaaaaaatttttggtggggtttttttttgtttttttttaaaaaaaaggggggttgggggggga

SEQ ID NO: 595398 - DNA, 129 bp, Homo sapiens
tctgagatccccaagatgttgcaacctcaagctcaagtacgcgcagatacgccggaggcacttatcctcacgtgacttcaacaaggacagccggggaagacacgcctgcgggattcggatcaacaccaa

SEQ ID NO: 595399 - DNA, 188 bp, Homo sapiens
ggccccccgaaaatgaaatccccggcctggtttccagttccgacccccccccaaaaagttttgggaaaggcccccctttataaccagttcctattgaccccccccccatggccggaaaaccccccgggccgtttttaacccaataaaaatttgtgtagtttgtggggaaaaaaaaaaaaccaccccca

SEQ ID NO: 595400 - DNA, 214 bp, Homo sapiens
accaagagaatactaagtcagaatagagcctaagcaaaaaactggatgcaccacattacctgacttcaaactataccagtaagagtctgcagtaatccattacagcatggctagtgactacaagaaacacactagacccatggtacacaaggttgctcttcagtgcaagcttcaattcgctctgccaggtgctaagccccactatgatgaatta

SEQ ID NO: 595401 - DNA, 163 bp, Homo sapiens
tctcaggacttccacttggatagcggatagcggacgatactgcagttgaaaacaggcactccaggcttagtgacagtggcagcagacacagtgttggctgctttctgatcctccctcatccgcttatactacatgtgtaccgcgctctcgattcgtaatcctt

SEQ ID NO: 595402 - DNA, 236 bp, Homo sapiens
tacttcagcaacgcacactgttcagcccagacgaaggacggagactacgacactggaaggcaatgtgtgaccctgtacttggctcctgggacagaaagaggacagtagtgcgaaattgtgtgaacaatcaagaaagaaaaaaaaaacctttagttgagagtattactcccagtggtaatattctcttcttgcgggcgtaaggggacggagtggcggcccaattaccaggctgaagt

SEQ ID NO: 595403 - DNA, 958 bp, Homo sapiens
tggggcacaggaggcgctaggggggaacgctgcctctgaaactagctctgggaccgggtctgcggccggcccctagctgccccgttcccatccccagaagggtatcactgggatcctgagcttggtatccagttccccacgaaaggattgtccccttttctaaaagctgctggagaggacttggacgtgtacatactaatccttgttgtggatgtgaggagaactctggggcacagactagaatgaaaaaaattgtgcaatgtggtcgggagaaaggggtaacagagtcagagaaaagctgtgggctctaagtgaagaggggttgaaaaccagtgtttaataaagagctttgagacgcacttgtggggcccagggttacagacaaaattacattaccatctttcaggggtgttgccggtgaaggtggcaaaccagcactttctggggcaaggccgtgttgcaaatttcaaccaacaaagtaactggcaaggacgaccacgtgctaagggagactcaaggagaagtcacattctttacaaggggaaggtcaattgatactgcctgatctaataaaaggggggtgactgaatatgacaaaccatttgtggcaaggagcacggtgatgcagtgtgattgatctcctgcattaggaagacacctaagggaccaattaaccctgtgtttgaggagcttgcaaagtccaagcatgttcacctcttgagatgatagcaggctggctgtcacagagatctccacctcgtgtggtccatctaactgtccggttgactacctgtgcggcaagtggtgggggtccaacaacgcggacgtggccacgacatgcagtccctaacctgtggacttgactgaacaggttactttggcgtaccaaagtcgaacggtggaccgtggcgcacagccatacagtatatgttccacacgagaacgcactttttttgaa

SEQ ID NO: 595404 - DNA, 161 bp, Homo sapiens
tagagtatcggggtatgcgtcgaatcataagaacaggaaggtaagaagtagggtctggtagacaaaatatgttgtgtagagttcaggagagagtgcgtcatatgttgtcctaggaagatagtagtggtgagggtgtttataataataatgttagtgtattc

SEQ ID NO: 595405 - DNA, 502 bp, Homo sapiens
tgagccggtccgtcacgcccacaaggactggtagatgtcagagctggaacctcaccccaggcctgactccaaaatccacactccctccaccgcacttcacattccttcccatacaacaacagaggcaacgtgggtctatgtggagagtgggtgctggaggacaatgatgtgaggcatgaagggtgtggaatgtggtcacggagcatgcagtttggccgggggaatgtggtgaggcaagaagtcaggcagcaaccacagcccggggctaggaaggggagtggaaaagtccgaggaccctcagactgtcaaacatgccaggagtacagagatgggaagacatgaccaagggtaagatgacgcatgccaggagctctgagcagagagggaagacagcaaggaggaggttgggaagttcagtccccacttgttctttggttttttttttttgagacggatctcgctctgtcacccaggctggagtccttgtggcgtacggtccggc

SEQ ID NO: 595406 - DNA, 191 bp, Homo sapiens
cactcgtatctgctcctcactgcacggatcttccatcaaggacatcctcatcagccatttcttgtactctttcttctctttatctatccagatccttgagtctttgccttagatcttccaactccgccttagacttcttctcagctgccatcagctgaacttcgtctctctgtaaccaacggggaggaacg

SEQ ID NO: 595407 - DNA, 437 bp, Homo sapiens
atagtatagacgacggtacacgttttatcgtgatagtggttactggataagtggcgttggcttgccatgatatgtgaggggtaggagtcaggtagttagtattaagagaagaggttgttagggagtcggaggaaaaggttggggaacagctaaataggttgttgttgatttgattaaaaaatagtagagggataatgctaataattaggctgtgggtggttgtgttgcatcaacattcatgtgttttttggaaagtccatgtcagatggtaagtaatcatcacattgtcgggacgcattcagtttcagccattggcagatcaggcttaggttcatgtacgtcatctcagagccatatgtgtaggagcatagcacatcagtaggagctaggccccacgctgcttcgcaaacgagacaaagcactagtattggcatcgg

SEQ ID NO: 595408 - DNA, 278 bp, Homo sapiens
taaaaatttaaacatttgtgtcaattacatattcatgtaggtaataaaaaaatctcactggccgggtgcggtggctcatgctgtaattccagcattttgtgagaccaaggcaggagaattacttgagcctagggagtttgagaccagcctggaacaacatgggtgaaatcctctgtctacaaaaaatgggaaataaaaaaattagccaagtgtgggtccccatgcctgtgggtccgggggccccatgcctgtgggtccccagcttacttgggggaggg

SEQ ID NO: 595409 - DNA, 154 bp, Homo sapiens
agtcataacccagcttcatattttaaaggcttcaggttgaaattaagtcaactgcatgcagctttgctgatcaatgaataatactctttgatgccatttatgagaaaagacttcaatatctgttggctggcatatttaagaaaaattactgttg

SEQ ID NO: 595410 - DNA, 231 bp, Homo sapiens
gacacattctaaaggtatcgtgaagatccatgcatatgtaataatcttctacatagataataaccatcataatcggaggcttgagaatagactagtgccctcgtaataatcggtgcccccgatatggtgtttcccgcataaacaaaataagcttctgactcttacctccctctctcctactcctgctcgcattctgctatagtggaggccggcgcaggaccaggttgaaca

SEQ ID NO: 595411 - DNA, 1523 bp, Homo sapiens
agcggggtgggcttctgtgaaacatggcggtaggctgggaccataacacaagcatgactatatgaaggacagcaggaaggttttcctgaagatgaggcgactgaatcggaaacaaaactttaacgttctcggtaaaacgacgtcgcgactgccttatccgaacgcgcttcctgacgacgctactgtagacgacctatcagccaagtggacggctacagctcttcatctaaataagcactttaccacaccctattggcgtcttacttacaccaagtaatttggacatatcatcaagctattactccacagaactccccactgcgacttgacacgttactcgaccctaagccgaaaagatacgaccaccccgcggactatcacgccctacgccccaccactctacaccgaacctttacacctaccttcccgaacctaacttcacacccctcggctctggcaccacataggaccacgatggtaccacactaacttgctctgccgacagccagagcaatagctcactaccggcgccccccataccgcaccacgacaaaaacgacaaatggcggaatctgaaccacatctccctggccccagaccaccctggagccacatcacaccccattcaaccgctgcccaaacgcaccgcaaggacccaagacctaacaactaccctatgacacttcccatacacatcgcgaaagcacccaaagcacacgcgcccagcggccaaaacgaagcgacagcgtgggcgacacaaagccaacggagcaaagtggcccattagggccaacgcgcgcttcggcaacctcttccccaacggataaggacctccaccgcggccaccttacacccaacaagacaaaacaacgcaccagaccccacatcttcaccccaacaaacatccacacgacaaccacccaacctctccatatgaaaccataacacattaacacccaacacacaaccgaccttagacccctatattaacgacaaaactcaatacaccagatcaaaaccacaacatattcccacaacatacctcaccacacccacttccacctctttactccacaaaaaaccccaaaaacaacacgtcgacaccataccacaaaacacacatcaccaacaaacaaaccaaaaataccgacacaatatcccgaaatatgctaaaaaccaaaacacactatgtacctcacacacaaaacaatattaatatcaaacgaccacaacaaatcacaaaacaccacctaaatgacaatcataccacaaaacgccacaccacacatatggacacacaacaatcaccccacacaccaacaaccccagaccacaacataatcacactccgcataacaccattccccaccaccactaaacgccaacaaacatattaacgcaacaaaactctacccaacatatacatctaaccgacatactacacacttacctacacaccacggacctccacaccacacaaccggcgccctcataagtagaacacataccaccaccacaaaaat

SEQ ID NO: 595412 - DNA, 655 bp, Homo sapiens
  misc_feature (308)..(308): n is a, c, g, or t
  misc_feature (388)..(388): n is a, c, g, or t
tcgagtttcgagctctgggcgcgtcaggtcggacgttacgtccgtccctttagactaatcgggttgtaaatcggtgcataccgagtggtgtatccctgcagttagcatctcagggttctcacgagcataggcccaggtaggggtcccgcggtaaaggggtgccaacacaagggcaaaattgggtggcaccaaaacagttgggagaggagatgcccccccccgagctggcttgagggcgggaaccccaaaatgatgggttccccttctcaaggaggaagggtcagccccggtagcacctttgttcccangatttttagggcctttgttacccccacctttaaggccttgggtcgcggcatttttaaggtcggaaggccttaaattggcngggggtcccccccctttgttttaagcccccaaaggaggaaaaagccggcatttccctccagaaaaaaggagggggtggggacccaaggttcagtcccttggttttaaggaccccctgtcctgattctttccagagggggggcccttggggttttttttttcgggggggatttttttcctttttgaccgggaaagggttgggtttttcaatttttttcccccaaaaaaaagattattcaaaaaagtttccggccttttggcaaacata

SEQ ID NO: 595413 - DNA, 949 bp, Homo sapiens
  misc_feature (49)..(49): n is a, c, g, or t
  misc_feature (65)..(65): n is a, c, g, or t
  misc_feature (239)..(239): n is a, c, g, or t
  misc_feature (275)..(275): n is a, c, g, or t
  misc_feature (344)..(344): n is a, c, g, or t
  misc_feature (348)..(348): n is a, c, g, or t
  misc_feature (407)..(407): n is a, c, g, or t
agcggactagggcggaggcagcggctgtagcggggctgtagccgggcgntgagcacagcgcgggncaggccgaacggaagggacctgccacaggccctcaactccacggactcttcgtccctagactagcggagctgcatctccgcgcttcgttggacgcctccgtaagcagcgaagggctctctctctcccgtgaccctccagccccatgacctgttcatatgcagccgagagctcangccaggcgggggtgttgtgggtacaggccatcgatncctgtgacccctcaaagagccaggatctcggtttccgcccgcaggcttccctcccctgtgatctccctncatngcagattctggggacagagctgtgaccgtagccgctaggatccgccgcgctgagagctncctcactgacgggtccctcctcggagtccccttcattggggtctccgtaagaagcaccaattttggtctctggcaagcctcgctgaactcgctgaacgaggtggggaggcctgcgtgtagagcaatgtgcagagtcgtgaggacacatccttgatacaacactggatctcctgtggatctccaaagcataatattcataagcaactgggagcacaagctatggcaagaggacatttgcgcaaaggcagcattcgaatcaaaggtggcacacattgacttgacaatcgtaggggaagctacttcggaattggaagcgtgcgtgagaaccgcatgacatgggaacggttagagttgaatcggtggcaagggacgactgtcatgtcaagggcctgatgaagatttcgtgggaggcaggaccagctggatacaagggggaccgcaagacgcggtggaaggatggatagccgtaaaaagggggaatttcaagagatcattgtctttaacagcatgtgggagcaatatggggcgcaccagtgtatccc

SEQ ID NO: 595414 - DNA, 876 bp, Homo sapiens
gggatcggcagggcggggcggaacggtgaggccatctactgaaacacagaagcaattttaaaagaaaatggaggcagtataactgatctttgcagaaagtggggaagtgagttgaccagagattaggatgagagaatgccaagttgtcactgaacgccaagctgagcaatggtgattctgcaagcatcagcaacatgcgtttgcaatggctgctactgtgaacttggaacttgcatcccatttttttgaaagccactaggtttcttgcattcacaagcaagtaaagattctgctgaacaagctaaacagcactgcttgatgaatctcttggctcggggccattgattccagttaccgtccatctcaacaaggcatgtggagccacccaaaatttcaagccacaaacaaacattctccattaagcacgagcccaccaatatcatccagtcttccttctggtaataatcatggcaggtcctcacaactgacacacggtcaagaaggaagctgaaacgagacctgtgatccaatgcacatccgacatcatgaaaggagttgatatccaccagaccctagatggccgaacccagaacacacagtcattctcccatttaactgtcccaaaagtagccactgtatctccacttatgggctgaccctttccaggtctgacgacgacccaggcctgatgctttgccactggagatggatgggcctgcgctgcgctggcaacgacgggtgccttcggatcactccgaatgctgaatgcacctctacaccgcatggcaaaccaggtacacggacaatacccctggtgatggcgcgtcccaagacgaggccaccccaccgcacccccgtcacccacaacgtgcacaa

SEQ ID NO: 595415 - DNA, 835 bp, Homo sapiens
  misc_feature (1)..(1): n is a, c, g, or t
ncttccggaaatgtaaaaatttcgccccccacttattgcctttttttccacacatggcccccctctaaattagctgcttccgcccacctcccctggttccccactaccaggtgtaattcaccgccccaaacaactcgtgccgcagaaaataacttttttgtctccaaacactcatggccacgaaacatgttttcaaaggcactacactccccgtgcgcctaaatatcaatcttccggcgtgtttgacacgaatgctctaatgacgccccctcttccccgcatgaaccatgtctttccatcacagccccctctccccacaatattggtggggacgctcacattctccctccgggagtactctattactttggctgggtgatcactcatcggacctagtaaacgacttttcaggaagaccccacgcctctgcggtgactttccatggttacaatccccccacgcacctggagtgtgcgatagaaaattaccactggggtgttctccccccctctctgcggggtttaccacccatacgtgggtatcctcaccattcctgttcatataaaaacgctttcgctgggtccttcttttcagaactcctaccgcatgaatatttttttattgctcctccaccatggttcctcccccacatcatcttccaaatttctgtctcccactcctctgtttaccacgcatgtcccatctcaaacgggcgacgtataaaagcccctttttccccgctcccacccccatctttgcggcgagcaatcaacatgaaacagacaacccatctgaagggcgggatatttttttcccaaaaaaccccaacataaca

SEQ ID NO: 595416 - DNA, 118 bp, Homo sapiens
ccctcccccatttatttttccccctcccgtcctccccatcattggtttttttttgggggtcaactgggcggtttttattttattccttttattttcccccttttcacaaagaaataaa

SEQ ID NO: 595417 - DNA, 547 bp, Homo sapiens
gcactcagggaggcagaagcaagaagatagcttgagcccagcagttcaagacctgcctgggcaacatagtgataccctattctccacaaaaaggaaaaaaaggcaaaataaaataaccaagagaatgacatgtctgatgtttttgaattaaatgtgtggaccctctgtctattaatgcaggcactagggggtttagtcaaactacgtctgcagaaaggcattagaaagagcagctgggaagagtacaggtgatttgattcttttcctaataattttcaagtgcccctggcatattaatacaagtttatggcattgccctttgggctttgttataaatgtgtgtccaaaaaataatttgttcctcctttgcctttgccatcttattcacagtctaaagcaatgttttagagtaaatgtggtgatctgatgcttaaggatgtaatttcagtcttagcttctataaatctctatttagtgttcttaaaagattttctttgtttttttcagtatacttcttgatgaagaaggtcacatcaagttaacaggt

SEQ ID NO: 595418 - DNA, 225 bp, Homo sapiens
tgagggggcagcatgtacccggatgaagatgtctatgagcgtgcacaccttacttatagggtcaacaactccgatcggggtggtacccagaccgtggcgtctccgcccctcggggtgcacgcgggcgagggacggaggccgaggtggctggggctgcccccgggagccgcggaaggggaaggcagggacgcgagtctctcacctcgggcagctcgccgcctgagt

SEQ ID NO: 595419 - DNA, 277 bp, Homo sapiens
atttaatttttttaaattcccgttaaactctattttatggttttgatttcagattgcaaacatgttaaacccgcaaccaagcgagtcctcggttttgccggtttttttagttttttactgtccctgtcatggaaacagctaattttctgtggatggtgctgtaaaggaagcatgttcctttcatgggtatttaatcatgatgtttaattttgcccccctatttggaatgttttttttaaataaaaggggctaattttgttgtagtttggcgcctgta

SEQ ID NO: 595420 - DNA, 150 bp, Homo sapiens
atgtagtcactcatggggatttatgtaacctgtatagagcctttaatgtgtcacatgttctccgaaccccatcgtctcctctctgctccaaaacgccatcatcttttggtcaaacagactgctagctgatcttcctgcatcccactcccg

SEQ ID NO: 595421 - DNA, 872 bp, Homo sapiens
gttatacccaattctaatcgcaatggcattcctaatgcttaccgaccccaaagatattgggctatatacgaacgtacgccaaaggccccaacgttgtagagcccctacgggctactacaacccattcgactgacgccataaaactcttcaccaaagagccccataaaacccgccacatcataccatcaccctctacatcaccgaccccgaccttagactcatcaccatcgctcttctactatgaaaccccaccatccaccatacaccaaccaccactggatacaacacatcaaacactaggacatcatatataatatctagaacaaccatcatagacactagacacagtagatacatcaacatcctcatgcatcagaggaatgaacgacaatcacacagacatcagacaaagtaacgaccccatgaaagtccgagacgacacacatgcagtacgaacaaagaatcagcccaaacaagaacagaaatcatcaatactgcacgatacacacacataagaagccaatcaaatataaataacataatccaaaaaacatataccattaaaataaacagaatgacaaatcacatctataaaacacatcatcgctcaccacatttacataacaacaacacaaacaaaagacaaacaccacctgcaatgacacattaacaattcccaatgcaccaaatccacaatgaaaaaccacctaatgacaaccaaattacaatcatagaatcctaatacatacaccacacaccatacggcaaagcaagacaaccaaaaccacaaaaaacaaaccaataaaaaaaacctatgaccaaaaacagagaagaaaatatcccaatcacctaaatactccaaagactaacca

SEQ ID NO: 595422 - DNA, 348 bp, Homo sapiens
  misc_feature (43)..(43): n is a, c, g, or t
  misc_feature (45)..(45): n is a, c, g, or t
  misc_feature (105)..(105): n is a, c, g, or t
  misc_feature (244)..(244): n is a, c, g, or t
gttgagcccaaagagcttgcttacttgctgggaggcagggcgngnagacgctgacttcaggacgacttgggcctgcagaggtcgccaggaggcccaagctggcgncggaggagcccaccgaccggagaccgtttggggcctggagacgccatcggagggcaggagctgatcctggagaggccaccgtgagcctgacctgggcctggggagcttggcttgaggaagctgtgggccgaccaaggcngccagaggatgggcaggcgctgagtccaaagaggttgttgggaggcagcagtcgggcctggagacgcagccgggaggaagagctgggcccggagaggacgccgg

SEQ ID NO: 595423 - DNA, 237 bp, Homo sapiens
  misc_feature (87)..(87): n is a, c, g, or t
cactctgcagtctttcgaggatgcacccagggaagcgtggcccggcccgcggtgacaaaggcctcgtcatcactctgtggtcttttnaggacgtatcccgcgaagtgtggcccggcccgtggtcacgaaggcttcgtcgtcactctgcagtcttttgaggatgcacccagggaagcgtggcccggcccgcggtgacaaaggcttcgtcatcactctgcggtcttttgaggacgtatc

SEQ ID NO: 595424 - DNA, 1296 bp, Homo sapiens
  misc_feature (166)..(166): n is a, c, g, or t
ggtagatagacgatggtaagatgtaggaaggagcttggtgacaggtaagatacggggtcagaagacgaacataacgaggaacctgaggatgtagggagtagacgatgagtgatctaacgtggagaataaccctagttttgataaagattaccgtgatgtgtgactngtagaactggtgattatgaggcctactattcaccgtcatgcctggcgtcttgcgatacccgtgcacacacgcgtgaagctgctgatacgttggctagtcatcgcgatattgagtagtcgtcctgtgtgatggagaagatgtggagagacgcaaggcgatacgtagcgtagtggttgacgtagtcgagttggagtgtcgcgccgaggggagcgagcgaggagggagcgtttaatcataagaatctcatgaattagcacgaggactatcattcagtgcttgacccttgtagacttgtcgcttgaatgcgttcgcgtgcttgggtggtccgcgtggaacttttgaaagcatggtaatctcgcaaagaaatgggcgagacctcgaggagcagtgcctcttactggcattacagcgactgggagtgtgacaatcaacgtaaatcgtgcggtgttaaccaagaactggattccacgtgaggccaccctagcaggcagaacgacgatatgagggaaatcgttagaggaagtcagcacttacattacgcaaaactggctagcaacgcgacacagtagcatatgtgccaatctctggtcggcaatggtgacaacatgctggagccaaggtgctaacatgactgagtcccgggactggacaagtcacccgtaggggatggcaatggccacgtggaaccccgctgcttgagagtcctgggactgggatcctaacaaccactacgtacaaattgaacaggcccttgcagcaggctctacaaggatgtctacaacaccgggggagatgggaacgaggccggttgggccgaacgggcgacacgggggcccaaaaccgggaatgagcggccacgagtgaccacgaccagacacaaaggagagaaaaaacgttgcgtaaacgtcaccggaaaactaaaaaaagcgagcccggcgagaaaggagagtaccgcaaaaaaataatggagcaagaacatagagcaagcagggaggcgaacaaacactgaggaaacaatcacccacaaagaagaaaaaacagaaaggagagacactagaacgacaagagtgtattcaaagacgacacaacagaagaaatgcaacatccttcacagcgtcagccgctcagga

SEQ ID NO: 595425 - DNA, 883 bp, Homo sapiens
aggatgctcagacgcgtgcgactcggttccgtagcaaattgatcatcgcaaaagcgcaaagtgacgagaaacttgtggtgatagggcgtcttaaatagtaggtctatatcgtcatactgtctatactctgggggctatggggacgagagaacgtcgtatgatgtggttcgcaattgaactctcctatctaatgaacaccattagagttgggcatagcattctctacgcgtagcactgtgtctgggaaacactagggtgcactgccaaggtgactgcgctttccacggcagtggtagcactacaatacagtgctcactgtgtgctgaacgcctcctgggaaacatgcaagacggggcccttctctagggaccagtggatggtttggtggacaccctaggggaagtggataaagaacctctagggcttgaacaacttgggcacgcgaaaaccttggatttgcataagtaaaacctatctgcgcggtagttggagtaccactgtgtcccgaaggtagtatcgcctcgaggaggtagtggtgtagtccgcggacgtacatcaataattgctatagttcgcggaagctaaccgtgtggtccatgtacgggcactgggggggcaaggtccaacacttgggctaggcatcttagaatacttacgcaaacaggagtaccattggggaatccgtgccgcctttggctcggaagataatacccaattcaataaacgggtaaggagactagatgttggaattttgccgcttttaaatcgccacacggggtaatttgacataggaattcgtgcgaaatgcgggccacgcatacccttttgccccgtcatagctcggagggaatccatactcccaaaagggatcatcggccggcta

SEQ ID NO: 595426 - DNA, 1435 bp, Homo sapiens
gattgaggaggtgaagagcactacgaagacgcagcgcatcgcctcccacagaccacgtgcaaagggctggggctggacgagagcggcttggccaacgcaggcggcctcagggcattgtggtgcccggagacacgcgcgagatggcactgtgagcgtcaatagtagaacttaactcaaaagcaaagaaacatggctggaagagctgtcttagtaagcgcagagacctcctggcaactaggccaagcacagctactggcatctggctcatttgctacaggagacatagggatagtaacaggtacccacttctagcccaatcggtaggagcgagtgacacgtacacctcaagctgacgactcaacgaacgaccacgagagtgctgactggacgacaactatccgacagaggaccaactcagggacatagcgacacataaacaaggacgacccacaaggccacgctctcacatgcacaggtagacagatatcaacagcacgcataaaattcacgctgtcgagcaacacgaagcacattccccactggcgaacgggactactgagacaaaacacacgaaatgaagacccactgttgcctacactaagcgcacatcacaaaacaccacggcccaacgcaggcgacaaacccacaaaaaccacgatcggcacacaaccacggcaaccgcccaggaagacatcctaccggacacacagcaatcagcgcccgcacaacacgcaacgcagcaggactacgcaacacgagccacggcgaagaccgtgagccggccactaaaacccccgcaccgaagcagggccacaaaacgatagcttgggaagcggcacccgtcaggaaacagggaaggcgaccccgagcggcaccaacagagatggcgcgacagtaacccccgatacacgtgaccaccacaccagtgcacaaatatacgcgacacccacagcgcaccaagcagcgatgaacacaggcaaggattcctatggaatcgccaccccacagctggccacaaaccaacaggggtaggaaaatgatatgtaagaaggacacacacacacggcaacacaaggcacaacgagttcacaatcccaagagagaacatgaatgcacgcccatcgagcaccagtatgaccacccttgagggaaacatggataggccactacagcgttggcgcacggcgggccaccaccgaagaggcgagcaggaacacaaaacagcacaaacacccgaggagagcagccaaatgagcacagaggtgtgcaccagcatacagagtcgtaaagcacgcacaaagacacaacaccagaggatcacgagaccaccaaacggacacgcagaagcaaatacaagaacggcaggaacaaaccatcagctaatcggcgtgggccgcgaacgacacagaatcacaatgtgaacaaacaaagtgga

SEQ ID NO: 595427 - DNA, 387 bp, Homo sapiens
atgtttctcaggacttgtacaaagtatcttgttcatagcagcatctcatctcaatatctgctcaactacattatttccatcactccactacttataatcacaacatctgccatgatgggaatacaatttgagccttaaacaatcattctcactttatttgtaaaatgagacatggtcatgtactgtcagaaggtaatgaatatatataatggccatctatcagtttttaaagtgtgtttctttctatgtatatatgcaacgttaagcattcagactatgtatgtattgacatcaaactatctgtatatatatgtgtgtgtgtatatatatatatatatatatatatatatacttctcactcatagtaatatcttttcatgatcattc

SEQ ID NO: 595428 - DNA, 244 bp, Homo sapiens
caaaaacagcagacatgcatccagtctcctgcatgcgctgatggatcttgcagtacaaggtaacgactgacggcctcctgggaccaggactggtggtaaaactcagcaccggacgctcctcttcagggttgccggctacatctgtcatcaccttaaggtacccaggctctgggagcggagcatgtcttggacatcgcctttggggtctctggagaagcttagcatgaagacctaagcacctata

SEQ ID NO: 595429 - DNA, 409 bp, Homo sapiens
gtcactgcacctccatctcccggtttcaagagattatcatgcctcagcctccaagtagctgggactacaggtgtgcaccaccacacccagctaatttttttttttagttgagatgggagtttcaccatgttggccaggctggtctctaactcctgacctcaagtgatccgccgtgcctcagcctcccaaagtgctgggattacaggtgtgagccaccatgccttggccaatagtttatttccaatggcgatctattacatttgggtctcgtttgtcataatttgtgcacataccctttttcacagagtattttcctcggttgtggcatgtcgccaaattgtggacacttttagtggtttgtttttcgcccaagagttccccgaacgtgcgcccaaagggtagcacacgg

SEQ ID NO: 595430 - DNA, 683 bp, Homo sapiens
  misc_feature (7)..(7): n is a, c, g, or t
  misc_feature (136)..(136): n is a, c, g, or t
  misc_feature (147)..(148): n is a, c, g, or t
  misc_feature (158)..(158): n is a, c, g, or t
  misc_feature (184)..(184): n is a, c, g, or t
  misc_feature (188)..(188): n is a, c, g, or t
  misc_feature (235)..(235): n is a, c, g, or t
  misc_feature (257)..(257): n is a, c, g, or t
  misc_feature (263)..(263): n is a, c, g, or t
  misc_feature (279)..(279): n is a, c, g, or t
  misc_feature (293)..(293): n is a, c, g, or t
  misc_feature (302)..(302): n is a, c, g, or t
  misc_feature (304)..(304): n is a, c, g, or t
  misc_feature (318)..(318): n is a, c, g, or t
  misc_feature (329)..(329): n is a, c, g, or t
  misc_feature (332)..(332): n is a, c, g, or t
  misc_feature (337)..(337): n is a, c, g, or t
  misc_feature (356)..(358): n is a, c, g, or t
  misc_feature (362)..(362): n is a, c, g, or t
  misc_feature (379)..(379): n is a, c, g, or t
  misc_feature (381)..(381): n is a, c, g, or t
  misc_feature (383)..(383): n is a, c, g, or t
  misc_feature (393)..(393): n is a, c, g, or t
  misc_feature (421)..(421): n is a, c, g, or t
  misc_feature (425)..(425): n is a, c, g, or t
  misc_feature (436)..(437): n is a, c, g, or t
  misc_feature (452)..(452): n is a, c, g, or t
  misc_feature (459)..(459): n is a, c, g, or t
  misc_feature (467)..(467): n is a, c, g, or t
  misc_feature (489)..(489): n is a, c, g, or t
  misc_feature (502)..(502): n is a, c, g, or t
  misc_feature (535)..(535): n is a, c, g, or t
  misc_feature (537)..(537): n is a, c, g, or t
  misc_feature (548)..(548): n is a, c, g, or t
  misc_feature (559)..(559): n is a, c, g, or t
  misc_feature (608)..(608): n is a, c, g, or t
  misc_feature (642)..(642): n is a, c, g, or t
  misc_feature (652)..(652): n is a, c, g, or t
  misc_feature (658)..(658): n is a, c, g, or t
  misc_feature (682)..(682): n is a, c, g, or t
atgagangatacacaaaccagttttcaaatagtaaagccagtaatctagcaattgtaagaaataggtaaaagattataagacaccttacacacacacacacacacacacacacacacacgtgtgcacgccaatganaaaaaacaatnnggcctctacnaaaataagaacatgaagacccttaantgcngcgaggggggaacactgtgtaacccctccctacaatccagggagtgncctttaatccaatagcaaagcngggcanatgtgagaggagtgantgtgagagcgacgnggaaatccngnggggaaccattgangtgcacccacnggngcgcngaaaaaatgccaatgattnnncgcncccactgctgcggcggngncngccacagccncacagagaccccagacccgcgggccccnggcngggcagcgcanngcggggagagcaagngataggnctcgtctntgacgtgacagaagcgatagancaaattgcctggncggtcattgtaataaccagagaagtaaattctnanccctggcagcngcttagcaggngggctcaccccaattttcataaattttctcttgtggggctttttgagtnccaggagggcataaacataatccatgccgatgtnattggcattncccttnacccaacccttgggcacatgggtnc

SEQ ID NO: 595431 - DNA, 401 bp, Homo sapiens
  misc_feature (11)..(11): n is a, c, g, or t
tccatgaatangggagcttcctcctaaagtcactacccaaggcagctatttcctttttttttttgaagacgggagtttcactcttgttgccccaggctggagtgcaatggcacaatctcggcttacctcaacctccgcctcccgagttcaagtgattctcctgactcagcctcctgagtagctgggattacagcatgtgccaccatgcctagctaattttgtatttttagtagagatggggtttctccatcttggtcaggctggtctctaactcttgacttcaggtgatccacccacctcggcttcccaaagtcctgggattacaggcatgaaccaccgcgcccgccaccaaggcagctatttctatgaaggcaaatcacagggagaaagtaatacaaatt

SEQ ID NO: 595432 - DNA, 362 bp, Homo sapiens
  misc_feature (15)..(15): n is a, c, g, or t
gggccacccggctantaaagtacgtttaattaaaaaaacagctttgttttaattaaaaaaaaaaaaaaaggccaagcacagtggctcacgcctgtaatcccagcacttcgggaggccaaggtgggcagatcacctgaggttgggagttcgagaccagcctgaccaacatgaagaaaccccgtccctactgaaaatacaaaattagtagtggcgcctgcctatagtcccagctactcgggaggctgaggcgagagaatcacttgaacccagggaggcggaggttgtggtgagtgggagattcacaccattggcactcagcctggggcaacaaaaggcaaaattccatcttttaaataggttaa

SEQ ID NO: 595433 - DNA, 468 bp, Homo sapiens
cttactgggttaagttcggtatagtcgactggataagtattataatatgagctacttagctgtggtggtgtaccctctctgtgaacagatatgcaggcaaattaatggccttttctaacatagttcaacccaccaaagagctcgacaccatcgttaccttgaaaccgattatggatcatgcccgcaaggatccaatctactgattgcatctatgtgcggggtgaaaggtctgtgctagatcaataaggcacggggtggcgatgtggcggagaagttgcttgtggggagaccttgcttttaacaggcttctggaaaagctagggaaaagtggttgcccgctttccccctttccctccccttcaagcaccgcttgagatttgggctttattattaagagctgctataaaaacagcttgcttaaatgttaagagaagcccaggggtacttcaagcattccttcggatgctt

SEQ ID NO: 595434 - DNA, 558 bp, Homo sapiens
  misc_feature (12)..(12): n is a, c, g, or t
  misc_feature (63)..(63): n is a, c, g, or t
  misc_feature (66)..(66): n is a, c, g, or t
  misc_feature (74)..(74): n is a, c, g, or t
  misc_feature (98)..(98): n is a, c, g, or t
  misc_feature (101)..(101): n is a, c, g, or t
  misc_feature (103)..(103): n is a, c, g, or t
  misc_feature (106)..(106): n is a, c, g, or t
  misc_feature (151)..(151): n is a, c, g, or t
  misc_feature (153)..(154): n is a, c, g, or t
  misc_feature (156)..(156): n is a, c, g, or t
  misc_feature (160)..(160): n is a, c, g, or t
  misc_feature (163)..(163): n is a, c, g, or t
  misc_feature (169)..(170): n is a, c, g, or t
  misc_feature (180)..(180): n is a, c, g, or t
  misc_feature (223)..(223): n is a, c, g, or t
  misc_feature (242)..(242): n is a, c, g, or t
  misc_feature (244)..(246): n is a, c, g, or t
  misc_feature (275)..(275): n is a, c, g, or t
  misc_feature (292)..(292): n is a, c, g, or t
  misc_feature (325)..(325): n is a, c, g, or t
  misc_feature (342)..(342): n is a, c, g, or t
  misc_feature (344)..(344): n is a, c, g, or t
  misc_feature (349)..(349): n is a, c, g, or t
  misc_feature (352)..(353): n is a, c, g, or t
  misc_feature (478)..(478): n is a, c, g, or t
  misc_feature (549)..(549): n is a, c, g, or t
agatatacagtngtacaaattagcttcaagttacacatactgaaaaaaagagggtgagcgagnganggtggggnggagtgaggggaaggaggaaggtngancnggnaggagaagaaacaaaagaattgaacaggcatgcaggcttttccanannancttnaangctaanntgcttcagtnggagagtaaagtaggcaagaatgagcagccacggattgttganctgtaaccagcaccaggcntnnnagcgaactattgacagcggagtgggaaanattttttacagcaaaancattacaacgaagtccctccccaaaccaccttnaaccatctaaagcgaananccaanaanntgcaaacactggtataaaacacagtttaaacaattagaaaaatgaaaactgaaaccactgatgcctctatagtgtgattaacctctctctaagatgcttgcatcacctatgggtctaaaggcttncaaatgtaatttccatttgctaatggtgatcttgccacaactggcacggagagcgacacagtaatgctganaaagcctct

SEQ ID NO: 595435 - DNA, 1413 bp, Homo sapiens
gggtgcgctctagcgttaacgttactccgacggagataccagtcggtagaggagaacgtcgaggttagagggaactgggaggcactatatgctgtctgcaatcgacagttcgagcaggcccagtatttaggcgacagtgaatttattactctgaagagggttctgcacatatttccaacacttatatcggtggtcatcagaagtaggtgataggaagaaatacttactacacgggtgcaaacatgccgagtaatcaacacttttaacttggagcaagcataaaccatactaccaagaaagcatcatcaacatcaccaccagcagcagcaccaccagcagcaacagcagcagccgccaccaccgccaatacctgcaaactgggcaacaggccagccagccacaatgaacggcttgacctatcgacctgaacagaacttttcagaaaaccagggagagacagaccttcacccaacggcacgccgctctacaagctgggaaatctatcctcccgacactcactgcacggacgacacactgacgggaaacgctatcagcaaggaacatagtggacaacagggcagagcggaaagacaaccaatccatacaccgggataacacgggactcagggccagaagtccccgccaaggaaacacccccgaaacccctaaccggaccactggccacaaagtcggcgccatggccacaagtcatcagcccaccacacgagggcaacagccagcctggcgatgctggcacataaggacacagcacgtcacctgcatacacaataacagcgcacaaaaaccttccctcacagaaaaacaagatccaagcaaccgtgcgcgacagacagcccactacaagcgaaaggccaagagaaacaacaggcagcagcgccaacatgcgcgacaatagacacgccgtaaaagcgacatcagagaacaggacgaaccgatacacaccaacacggaaagcccgagggcaccgaccaccacgcgaacacgcgcccacgaccacccatacgaccagcccactcagtccccgaatacagagcacaacaccgaccacgaccaagagaacacaaagcaaagaacaaacacggcattcgagagagaaaggcagcatgaacactgcagacacaactaacgaagacagaggtaagagcactttaagatgtacgcagacgagagtcaacgacgtcagtaagctgatagaatcaagagtagcattacttgcctgacaaacgcgatcatagaaatacgtgagaatataagcgatgacgggaggcagcaacaccaatgtaatgccaggggagagctagcacgagtagaaagaagaccctgcgctcaccaggcaccagagagggtcagcaccatctgcaaccacacacaaggagcaacccagtcaggaat

SEQ ID NO: 595436 - DNA, 2507 bp, Homo sapiens
cttcagttcaactaaaaatggacagatctcagcagaccagccgtacaggatactggaccatgatgaacatcccccctgtagaaaaagtggacaaggaacaacagacatactttagtgaatcagaaatagtggttatttccaggccagatagttcttctacaaagtcaaaggaagatgccctgaaacataaatcgtcgggaaagatttttgctagtgaacaccctgaatttcaaccagcaacaaacagcaatgaagaaattgggcagaaaaatatcagcagaacttcatttactcaggagactaaaaaaggtcccccagtacttttagaagatgagcttagggaagaagtaactgtacctgttgtacaagaaggttctgctgttaaaaaagtggcttctgctgaaatagagcctccatcaacagaaaaattcccagctaaaatacagcctccattagttgaagaggccactgctaaagcggagcccagacctgctgaagagacccatgtccaagtacagccatcaactgaagagactcctgatgctgaggcagccactgcagttgcggagaattctgttaaagttcagcctccacctgctgaagaggcccctttagtggagtttcctgctgaaattcagcctccatcagctgaagagtctccttctgtagagcttctggctgaaattctgcctccatcagctgaagagtccccttcagaagagcctcctgctgaaattctgcctccaccagctgaaaagtctccttcagtagagcttcttggtgaaattcggtctccctcagcacaaaaggctcccattgaagtacagcctttaccagctgagggcgcccttgaagaggccccagctaaagtagagcctcccactgttgaagagacccttgctgaagttcagcctctattacctgaagaggctcctagagaagaggctcgagaacttcagctttcaacagctatggagacccctgcagaagaggctcctactgaatttcagtctccattacctaaagagaccactgcagaagaggcctctgctgaaattcagcttctagcagctacggagcctcctgcagatgaaactcctgccgaagctcggtctccactatctgaggagacttctgcagaagaggctcatgctgaagttcaatctccattagctgaagagaccactgcagaagaggcctctgctgaaattcagcttctagcagctatagaggctcctgcagatgaaactcctgctgaagctcagtctccactatctgaggagacttctgcagaagaggctcctgctgaagttcagtctccatcagctaagggagtttctatagaagaggcccctcttgagcttcagcctccatcaggtgaagagaccactgcagaagaggcctctgctgcaattcagcttctagcagctacagaggcttctgcagaagaggctcctgctgaagttcagcctccaccagctgaggaggcccccgctgaagttcagcctccaccagctgaggaggcccccgctgaagttcagcctccaccagctgaggaggcccccgctgaagttcagcctccaccagctgaggaggcccccgctgaagttcagcctccaccagctgaggaggcccccgctgaagttcagcctccaccagctgaggaggccccctctgaagttcagcctccaccagctgaggaggcccctgctgaagttcagtctctaccagctgaggagactcctatagaagagacccttgctgcagtacactctcccccagctgatgatgtccctgcagaagaggcctccgttgacaaacattccccaccagctgatttgcttctgactgaggagtttcctataggagaggcctctgctgaagtttcacctccaccatctgaacaaacccctgaagatgaggctctggtagagaatgtgtctacagaatttcagtcaccgcaggtggcaggaattccagcagtaaaattaggatcggttgttttggaaggtgaagcaaaatttgaagaggtttcaaaaatcaattctgtccttaaagatttgtctaataccaatgatggacaggctcccactcttgaaatagaaagtgtttttcatatagaattaaaacaacgtcctcctgaactgtagtcaggttgtacctaagctagcaatcagaagctacatggttttggaagaacatactttagaaaagggtgggcagcaggaagtagctttgtcaataaggcaaattaaaggggaccccaagacttggaatacaggttggaaaatgaacaataaaaactgtagcagcataaaattacttgtgttaatttcattcaaatttatggcatgaaaaatacctattttgaaagtaagtttataattgaaaaaaattgcttaaaatatccttcctacagtaaacttgttgacacgagtaaagtttaatctgcagccatcttttcttgtctttgccttccctttataagtaaatatagtttctagtgg

SEQ ID NO: 595437 - DNA, 123 bp, Homo sapiens
ggagcagaaacattggaatgccaagacgctgaggatgctggtacaagttgtgggactgcatgctactgtctaaagcttgtctcaatggatctaaaacttcatcgccctcttgcccgcgttcct

SEQ ID NO: 595438 - DNA, 221 bp, Homo sapiens
tatagatactagtccagaccttactcaaaggtaaggggatgaaacaaggtatgaatatctggaggtgctgatatccagagctcgcttctatatcacctgtaaaccctgtaaggccgaaagttaagtgtagaaatttaattagtttgatgatgaatgtctttaattcaaacatgtgagaggtaatgttttatacttatgttgtatgacacagtaattcggta

SEQ ID NO: 595439 - DNA, 306 bp, Homo sapiens
tttgctgttgtgacctgaggtcacttgcctgcccttctcctgaactgcaactgtaggggcctgtagaacctggttcccccttgttccaatttccccacctcagtgaaggcacaaccaaaagtgtccccgggcattatcaaagaccctccaggccccaggtctgagacaaaggggaggcagggttctccccagcaatcagtggcccgagcagggatgtgccattgcggccacaagaccaccaatggagtcggagccgccccgaaggggagggggctgcacaaatgccaccacacaggggggctcgga

SEQ ID NO: 595440 - DNA, 297 bp, Homo sapiens
atagcctatagctgggcaggaaggcaaaaggtggcctttctgtgcctggcagaaaaagagggtctcagccgggcgtggtggtgatcccggcctttgatcccagcactcaggaggcagaggcaggcagatttctgagttcaaggccagcctggtctacagtgtgagttccatggccagccagggctacacagagtaaccctgtctgaaaacaaaacaaaacaaaaaaataaaaacagacaaaaactgtacttagatgctaccagaatggcttcaatcatgaaaacagccaaaaaaggg

SEQ ID NO: 595441 - DNA, 661 bp, Homo sapiens
  misc_feature (1)..(1): n is a, c, g, or t
  misc_feature (17)..(18): n is a, c, g, or t
  misc_feature (252)..(252): n is a, c, g, or t
  misc_feature (348)..(348): n is a, c, g, or t
  misc_feature (415)..(415): n is a, c, g, or t
nccgcctcgccgtcgcnncgggctttctccggtcgctgccgccaccaccgttgcttcgcgggctgggaggcccggggtccccgggcgaacagaggctgcgggtgggagccttcgcgggcgctgcagagcgggccgggggaggccgggatggagccccgcggagtggactgacgccgcaggggcgagctagccggctccgcgcctctccgcgggatccagacgcctcctggggctgctggcggagggtctgangcggcgcggccatggctcacctccggggatttgccaaccagcactctcgagtggaccctgaggagctcttcaccaagctcgaccggcattggcaangggctcgttatggggaaggtctacaagggccatcgataaccacacaaaggaggtggtggccatcaangatcatcgacctggaggaggccgaggatgagatcgaaggacatccagcaaggaagatcactgtcctcgagtcagtgcgacagcccctaaatcacccgaatagtttggttcctagctaaagagcaccaagctatggatcatcatggagtacctgggcggcgggagcagacacgggacagtgcctaaagccaggtcccactgaggaagacataatggcacagaaactgcggaaatcgaagggccgcat

SEQ ID NO: 595442 - DNA, 144 bp, Homo sapiens
ttctgcacgggtgtccctgcatctgactgagaagaagaacagactgaggaaacgaggctcttcaacagccccagttatcctggccccatgacctgtggctacagccctgctccagcagcacttgcccattccttacagcccttc

SEQ ID NO: 595443 - DNA, 599 bp, Homo sapiens
  misc_feature (1)..(1): n is a, c, g, or t
  misc_feature (17)..(18): n is a, c, g, or t
  misc_feature (190)..(190): n is a, c, g, or t
  misc_feature (286)..(286): n is a, c, g, or t
  misc_feature (353)..(353): n is a, c, g, or t
nccgcctcgccgtcgcnncgggctttctccggtcgctgccgccaccaccgttgcttcgcgggctgggaggcccggggtccccgggcgaacagaggctgcggtggactgacgccgcaggggcgagctagccggctccgcgcctctccgcgggatccagacgcctcctggggctgctggcggagggtctgangcggcgcggccatggctcacctccggggatttgccaaccagcactctcgagtggaccctgaggagctcttcaccaagctcgaccggcattggcaangggctcgttatggggaaggtctacaagggccatcgataaccacacaaaggaggtggtggccatcaangatcatcgacctggaggaggccgaggatgagatcgaaggacatccagcaaggaagatcactgtcctcgagtcagtgcgacagcccctaaatcacccgaatagtttggttcctagctaaagagcaccaagctatggatcatcatggagtacctgggcggcgggagcagacacgggacagtgcctaaagccaggtcccactgaggaagacataatggcacagaaactgcggaaatcgaagggccgcat

SEQ ID NO: 595444 - DNA, 1148 bp, Homo sapiens
caagattttcagcatccctaaaatcacactaagaagataaacatggaaacagcttggagctgccctacccatagtgaggtggtactgactggaagacagcttaaacgatttggagaaaagtggaatacattaatctcagaaaactctaccacctgtagaaagagagctaaaatggagacaaccacaggcagtctaagatacgctgaactactacagaaaataatgcagcatgaaggaatgctggaaggtatggggtcagagcaagctgatggagggtccttcatttccaagccacgagtacagcaggatgtaaggcttagttcataagaacatctcctgaaagacaatctctataaaaactgtttcaatagaaagaatgcaagatgtaactgtttaataataggactgatattttaaaaaacaaatgaacgtaatagaagactagatggatgtgcttctcaaagtcctctctgtgggaggcttcatcctcactctagatgtgttgcctgtagcagctgttattgattacccgcccatagcctatccatacttactcatcattcctttacctaccagtggcatcctattggaagcacctgcgactttcttagggctttctcttggccaagcattggaaggccagcagtattgaaaagttaatagtcttggaagcactggccctcaactaatgacaaagaaaaaatataagataaattccccagcttccttgcctcctgaatgggtcaagtctgtggtgtgttctacccgtttttcagaggtcccatgttttaaaccctagctgctcaaggcaatttcctgatcattgatgtactctctattggctaatttttagataatatggaatatgctcaaaataggatactcaaagaaaaaatcagatgccaaaattatgtacaccgaatgagttcaattctgtataagtgtggacatacacacatcaaaagaaatatggaacaaaagatataaatgtttcatagtgggtaataactgagtgttgaaaatttaagtggatttgcctttgaatctagataatggtatctatagagaaggaaatcaatattaccggaatttactgtaaaagtagaaaaacgacataggtaattaaaagggataataagcgaaaaaga

SEQ ID NO: 595445 - DNA, 966 bp, Homo sapiens
gaaggtacagtcgccgcgtgcggaggtgttcctggttacttggcctcatggcggtccgagcttcgtttcgagaacaactgtgagatcggctgctttgccagactcagcaagacctactgtctggtagcgatcggaggctcagagaagcttctacagtgtgttcgatgggcgagctctccgataccatccccgtggatgcagcgcgtcgtatcgtcggatgccgcatcatcgggcgcatgtgtgtggggaacagggcacgcgtctccgtggtacccaagcaataccaccgaccaggagctgcaagagattacgtagatagcctcccagaacacagtgcagattaggcgggtggaggagcggtctcacgtcttgggccaatgtcatacactgtaaatgatctacgtgagcttggtccacccacgagcattgtgagggggacgacagagagaagattctgggagatgtgctcaaggtggaaagtcttcagacagacagtgggcgaccaggtgctagtaggaagcgtgctgtgtcgttcagcaatcagggcagggttggtgcaatcccatagatttcaattgaagagcaggatgagctgtcctctcttcttcaaagtccccctgttggcggggactgtgacccgaatgacatgtgagcgtgatttggtgctgggatggtggtgacctgcctgggtgtgcttctgtggctggacctcaccagctctgatgtgtcagtgcggagagtgtctccaagctgaatgaagcctgctaagatgcgttgcaacagggtgagggatccgtcttgaaggctgagctgtttacttcctcgttgtccttgggcctggcttgcctgtggccacttttcggttcgccacttggcgggtgtggggggggggcagacgccggacgagggtggcgccccttgctggtcgggtctatgggccgcttttgggccatgtgggagttttgc

SEQ ID NO: 595446 - DNA, 537 bp, Homo sapiens
acccgttctcccccccccatcgctttggcacattcattttcatcgccatattggatcgcccttcagcgtttcccgctggggtctcacccccagatttttcagcttgttgtacgctgctccttgttaaaactccctggacttccttaatcacctcattccttagttcgccatatcctccttgactgccctgcatgctatttcagagtggcgtatatcatcctagaggaaaactcgtagttaccagtcccatcatgtctctgggattttcactatcacatccccttcctcacctcccaaggaatgcttcaccctttcattcagtgatgtgtccaccacgcctcctgtattcaagaaaagaagacttctttgtgctatttagaccataaaacattacatgtacttatttattcttcattgcctcgacagatggctcattgttactgagtagatcgacactcggataccattaattccaattagtcaagcagcagctatccgcaaacagaaataaattaaaataaaacaaaatatcattca

SEQ ID NO: 595447 - DNA, 238 bp, Homo sapiens
tagcggcggctcttgttcgctcggacggccagcagcttgctggtcgccgcctgcctcgtcttccctcttgacggctgccgctgggccggcactgtcaccaccaccgcctgtgtgactgacgcgggacaccggctgtgctcacgacgcacgttccacctgggctccgccgtccgtcaggcgattctgtcttgggggactgtaggccgggtacgtttgccctgtgggtacggtcgccttg

SEQ ID NO: 595448 - DNA, 432 bp, Homo sapiens
ttgcctctgcatctcaagtcctgtaagttgtaggtgtaagccatcagtcacatccagacactaacagcttctttacgtagagttgttggcccaggagaacaccaggttttcaggtgtgtctgggttccatagttcttcctcatcagtcagtgattggcttcaccttgctgcactccagaactgcacggtaaatccgcacagagcagtaatttcagagaaggttgtgtatagtgtgaaattccctctccagaattggaagtttacacaccatcggcttcctgttctgccctgctcttctgtagatcatgaatatatggtatataacaaaacatttggggaggggctggtttctctgtgaagcccaggctgtcctggaactcactggtctacagagcaagttcaaggacagccttttctctaccctgtctcgag

SEQ ID NO: 595449 - DNA, 117 bp, Homo sapiens
taccacctggatgaaaggagattttcttggcctgtataaataggcttagcaggaggcagaaaaccctttacacagctggggatgtggagcctgggcctgcgcctcaggtgggctacg

SEQ ID NO: 595450 - DNA, 119 bp, Homo sapiens
  misc_feature (12)..(12): n is a, c, g, or t
tatcaatgcatnaaatttcattacatgtcatagagaatcagtgttcttcatgatacatatgtctactgagtgagtttgtccctccagagacctttctgggaacatgccttctccaggga

SEQ ID NO: 595451 - DNA, 430 bp, Homo sapiens
  misc_feature (17)..(17): n is a, c, g, or t
  misc_feature (122)..(122): n is a, c, g, or t
  misc_feature (127)..(127): n is a, c, g, or t
  misc_feature (160)..(160): n is a, c, g, or t
  misc_feature (162)..(162): n is a, c, g, or t
  misc_feature (187)..(187): n is a, c, g, or t
  misc_feature (227)..(227): n is a, c, g, or t
  misc_feature (246)..(247): n is a, c, g, or t
  misc_feature (253)..(253): n is a, c, g, or t
  misc_feature (273)..(274): n is a, c, g, or t
  misc_feature (279)..(280): n is a, c, g, or t
  misc_feature (295)..(295): n is a, c, g, or t
  misc_feature (300)..(300): n is a, c, g, or t
  misc_feature (309)..(309): n is a, c, g, or t
ggcggcggcggcggcgngtggtgtgggaccacataagtggaaggtgtagtaaaatctcagacttcactactgtagaactcatatatatgaccaaaagccatttgtaccccaaaagccattgnaattnaatatatatatatacacacacacacataaagananacaaaagaaaattataagaagttantattgacagacctggaacaaaaaatcaaagacagtattangtcattaaaatttgctatnntcaatntcatcagtgtaaataattanntttanngtggagaggagtgtncattngtaaccatnggagttactgtctgtatggtcctagatcggaggaatcgggatacggagattcaggaaactgctttaccagcattatccaaacacaacaattcaaacgaaacgcaaggtcaacacgacgcgc

SEQ ID NO: 595452 - DNA, 468 bp, Homo sapiens
attgcctactggtatactctagtgtctctgctgtggacaagagtcagggaaatagtagaacaggattactatcactaatgtagcaaggcgccgttcgagcaaggatgacatagaccgtattgcccaggaagctgagatgtccaatgctgaaaatgaaacgcagaagtacacggtgtcatccataaatccacttgtagtcctatgccttcaacattatccctactgtagaatgattacatcccttcgaggtcaagcattatctgattcaggatcaatgcatgaagcagttctgtaccgagtgtcatgtacttatccattgtcttgataataatcagactgctgagaaggaagaatttgaacatcaacagaaagagctggagaaagtttgcaaccccatcatcaccaagctgtaccagagtgcaggaggcatgccaggaggaatgcccgggggtaggaggtgggtaccga

SEQ ID NO: 595453 - DNA, 1034 bp, Homo sapiens
gccagcccagaacactggtctcgggctggaacagagctccttcatccagcgcataaggtgtcaccactaaaatctcctggtgcacacatgcgaaatgctgaagtgatgtgcagccatgatcaagactggagaccaagtgcgagccagacgaagccacgctgctgaacatgctacaacatctccccccttctcctttgggctggtcatccagcgaggtgttctgacaatgactagacaactacaacccatgaagtgcattgatatcacagaggaaactctgcatgctcgctttctggagggtgtccgcaatgttgccagtgtctgactgcagattggctacccaactgtatgcatcagtaccccattctatcatcaacgggtacaaacgattcctggccttgtctgtggagacggattacagccttcccacttgctgaaaaggtcaaagccttcttggcctgataccatctgcctttgatggactgctgcccctgatgagctgctgccaccatcagctgctcctgactgctgatgcagtcccagctaaggttgaaagccaaggaacaactcggaggagtcggacgaggatatgggatttggtctctttgactaatgcaccaaaaaggcaacaatttagccggtttatacgcaccacacaaggaaagtacagcttacttctgtagacacccacgacgatatcgcgaaggcgtccatcttgggctgcggcaccaaacagggtcaatgacactggccagtggatatggtgtgagtcaagcccgaacttgcttgtatcacagtggaaaatgcggatcccaaaatgaaagcagtaattgaaaaagacggttaacgttagtgctttcgacgatcgacgactgtgagagagaaggggcctagggagcaattgacaacaggcgccggttgaacagccgctagacaaaagagcatgacaagaggagtgaagacgagaaatgacagaaagtattgatcgatggtgagaatgacaacacacgaggagtcaatagagcaacaaacga

SEQ ID NO: 595454 - DNA, 159 bp, Homo sapiens
gaaggtctgtccgtgaaggactaatagaagtagtatgtactaacctttacatgaggactctattctttaactcccattaccatgtaatggcagttatattttagcagatcccacattaatagaagacctagagaatgtatccccgaaaagcgtgagcta

SEQ ID NO: 595455 - DNA, 4724 bp, Homo sapiens
tgatttggggcgggcgggggagtctccaggggaacctcgaggttgcccccagcagaacccatgcaccgctaagccacccgagcaccgcctccttccgctcgggcccgccccggagctgcgggtcgctccgagcccattcccgccggaagtgcgtcaccagcttggcgctccgcctccctcggccttagctagaagtcgaaacaaaacaagccgctaaggcggtggcggcggcgccgggacgggggaggggcgcgccggaaccggaaccgacctgcgccggaaccggaacggagagcgggttgccagggcccgaagagggctggctgcggcggtctcgctcggctgtccgttccttgctggagaatttggccacaaagagttgccaagatagctgggccaggaagaaagcgccgcagccctgacccagacgctgttgccgaccccggggcactctggctgtcgaccaagcggctcaagatgtctggcggggccagtgccacaggcccaaggagagggcccccaggactggaggacaccactagtaagaagaagcagaaggatcgagcaaaccaggagagcaaggatggagatcctaggaaagagacagggtctcgatatgttgcccaggctggtcttgaacctctggcctcaggtgatccttctgcctcagcctcccatgcagctgggatcacaggctcacgccaccgtacccggctgttctttccttcatcgtcagggtcagcatccactcctcaagaggagcagaccaaagagggagcttgtgaagaccctcatgatctcttggctactcccactccagagttgttgctcgattggaggcagagtgcagaagaggtgattgtcaagcttcgtgtgggagtaggtcccctgcagctggaggatgtagatgctgctttcacagatacagactgtgtggtgcggtttgcaggtggtcagcagtggggtggtgtcttctatgctgagataaaaagctcttgtgctaaagtgcaaacccgcaagggcagtctcctgcacctgacactgcccaaaaaggtgcctatgctcacgtggccctccctcctggttgaggctgatgaacagctttgcataccaccgctgaactcccaaacctgcctcctgggctcagaggagaatttagcccctttggcaggagagaaagcagtgcctcccgggaatgacccagtctctccagccatggtccggagcagaaaccctgggaaagatgactgtgccaaggaggagatggcagtggcagcagatgctgcaaccttggtggatgagcccgagtcgatggtgaacctggcgtttgtcaagaatgactcgtatgagaagggcccggattcagtggtggtgcacgtgtacgtgaaggagatctgcagggacacctcaagagtacttttccgtgagcaggacttcacgctcatcttccagaccagggatggaaacttcctgaggctgcacccgggctgtgggccccacaccaccttccgttggcaggtgaagctcaggaatctgattgagccagagcagtgcaccttctgtttcacggcttctcgcatcgacatctgccttcgtaagaggcagagtcagcgctgggggggcctggaggccccggctgcacgaggtgcagtgggtggtgcaaaggttgccgtgccgacaggtccaacccctctggattcaaccccaccaggaggtgctccccaccccctgacaggccaggaggaggcccgggctgtggagaaggataaatccaaggcacgatctgaggacacagggctagacagtgtggcaacccgcacacccatggagcatgtaaccccaaagccagagacacacctggcctcgcccaagcctacatgcatggtgcctcccatgccccacagcccagttagtggagacagcgtggaggaggaggaagaggaagagaagaaggtgtgtctgccaggcttcactggccttgtcaatttaggcaacacctgcttcatgaacagcgtcattcagtctctgtccaacactcgggaactccgggacttcttccatgaccgctcctttgaggctgagatcaactacaacaacccactagggactggtgggcgtctggccattggctttgccgtgctgcttcgggcgctgtggaagggcacccaccatgccttccagccttccaagttgaaggccattgtggcgagtaaggccagccagttcacaggctatgcacagcatgatgcccaggagttcatggctttcctgctggatgggctgcacgaggacctgaatcgcattcagaacaagccctacacagagaccgtggattcagatgggcggcccgatgaggtggtagctgaggaagcatggcagcggcacaagatgaggaatgactctttcatcgtggacctatttcaggggcagtacaagtcgaagctggtgtgccctgtgtgtgccaaggtctccatcacttttgacccgtttctttatctgccggtgcccttgccacaaaagcaaaaggttctccctgtcttttattttgcccgagagccccacagcaagcccatcaagttcctggtgagcgtcagcaaggagaactccactgcgagcgaagtattggactccctctctcagagtgttcatgtgaagcctgagaacctgcgtttggcggaggtaattaagaatcgttttcatcgtgtgttcctaccctcccactcactggacactgtgtccccatctgatacgctcctctgctttgagctgctatcctcagagttggctaaggagcgggtagtggtgctagaggtgcaacagcgcccccaggtgcccagcgtccccatctccaagtgtgcagcctgccagcggaagcaacagtcggaggatgaaaagctgaagcgctgtacccggtgctaccgtgtgggctactgcaaccagctctgccagaaaacccactggcctgaccacaagggcctctgccgacctgagaacattggctaccccttcctggtcagtgtacctgcctcacgcctcacttatgcccgcctcgctcagttgctagagggctatgcccggtactctgtgagtgtattccagccaccctttcagccaggccgcatggccttggagtctcagagccctggctgcaccacactgctctccacaggttccctggaggctggggacagcgagagagaccccattcagccacctgagctccagctggtgacccctatggctgagggggacacagggcttccccgggtgtgggcagcccctgaccggggtcctgtgcccagcaccagtggaatttcttctgagatgctggccagtgggcccattgaggttggctccttgccagctggcgagagggtgtcccgacccgaagctgctgtgcctgggtaccagcatccaagtgaagctatgaatgcccacacaccccagttcttcatctataaaattgattcatccaaccgagagcagcggctagaggacaaaggagacaccccactggagctgggtgacgactgtagcctggctctcgtctggcggaacaatgagcgcttgcaggagtttgtgttggtagcctccaaggagctggaatgtgctgaggatccaggctctgccggtgaggctgcccgggccggccacttcaccctggaccagtgcctcaacctcttcacacggcctgaggtgctggcacccgaggaggcctggtactgcccacagtgcaaacagcaccgtgaggcctccaagcagctgttgctatggcgcctgccaaatgttctcatcgtgcagctcaagcgcttctcctttcgtagttttatctggcgtgacaagatcaatgacttggtggagttccctgttaggaacctggacctgagcaagttctgcattggtcagaaagaggagcagctgcccagctacgatctatatgctgtcatcaaccactatggaggcatgattggtggccactacactgcctgtgcacgcctgcccaatgatcgtagcagtcagcgcagtgacgtgggctggcgcttgtttgatgacagcacagtgacaacggtagacgagagccaggttgtgacgcgttatgcctatgtactcttctaccgccggcggaactctcctgtggagaggccccccagggcaggtcactctgagcaccacccagacctaggccctgcagctgaggctgctgccagccaggcttcccggatttggcaggagctggaggctgaggaggagccggtgcctgaggggtctgggcccctgggtccctgggggccccaagactgggtgggccccctaccacgtggccctaccacaccagatgagggctgcctccggtactttgtcctgggcaccgtggcggctttggtggccctcgtgctcaacgtgttctatcctctggtatcccagagtcgctggagatgagctcgcctgcaggcagctgctgtgagctggcctacctgcctgccccaggccatgcctgcctttgttgtggggaacacctctgggctttgggcctcagcttatgcatctggtgggagagggtggggaggttgtggcccctgcaggggcagagtatcctagggtgtgtatccatctggctgtctgtccattcatcctgctgctctgacccttggcctcaggcttggccctgcccaagctacttcctgtacttaaaagtgttaataaaaccagactattcaggccca

SEQ ID NO: 595456 - DNA, 255 bp, Homo sapiens
  misc_feature (241)..(242): n is a, c, g, or t
atccaaagaatttggcacgagggccaaggtacgggagctggaggctgagctatgatgcagagcagaagaagcacgacgaggcccttaaggcgttgcgcaaatgaagcgccgtgtcaaggtaagagctacaagcgccagtttgaggaggcggcagcaggccaacacgacctggccaagtatcgcaggcccagcacgagctggatgatgcggaggagcggcagaatggcggaaccgaggccannaagctgcggcacg

SEQ ID NO: 595457 - DNA, 726 bp, Homo sapiens
  misc_feature (231)..(231): n is a, c, g, or t
  misc_feature (233)..(233): n is a, c, g, or t
  misc_feature (235)..(235): n is a, c, g, or t
  misc_feature (690)..(690): n is a, c, g, or t
  misc_feature (719)..(720): n is a, c, g, or t
aacaaaaggctggaacgtcgggttgaggcctaagcaatggtctcaatataaagcccgagtcgatggtgaacctggcgtttgtcaagaatgactcgtatgagaagggcccggattcagtggtggtgcacgtgtacgtgaaggagatctgcagggacacctcaagagtacttttccgtgagcaggacttcacgctcatcttccagaccaggtgggtgggtagatgatgggcanancnatgcctcaggtgggacagtatgtctcatgctcttcctcatgtccttcctcctatcctgctgtgcctctgcagggatggaaacttcctgaggctgcacccgggctgtgggccccacaccaccttccgttggcaggtgaagctcaggtgggtggtgcccggccccaccactgtgcctgtcctacaccgtgggctccatctccctggctcatctatcctgatgctcattcctcctaagtccctgagttcagcccccacaggaatctgattgagccagagcagtgcaccttctgtttcacggcttctcgcatcgacatctgccttcgtaagaggcagagtcagcgctgggggggcctggaggccccggctgcacgaggtctgcacacgagctcccttcattgcccagttccacgtgaccaggacccaaacccctgtcacatgctgctaaccaccagccntctcattccccctttttaaggtgcagtgnntggtgc

SEQ ID NO: 595458 - DNA, 405 bp, Homo sapiens
tgatttggggcgggcgggggagtctccaggggaacctcgaggttgcccccagcagaacccatgcaccgctaagccacccgagcaccgcctccttccgctcgggcccgccccggagctgcgggtcgctccgagcccattcccgccggaagtgcgtcaccagcttggcgctccgcctccctcggccttagctagaagtcgaaacaaaacaagccgctaaggcggtggcggcggcgccgggacgggggaggggcgcgccggaaccggaaccgacctgcgccggaaccggaacggagagcgggttgccagggcccgaagagggctggctgcggcggtctcgctcggtgagtggagcaggctgcaactcgctggcttggccgcagcggggaggccgcaacgcgcggccgc

SEQ ID NO: 595459 - DNA, 836 bp, Homo sapiens
atttgaatttaaaaggtttgcaataaacttcatgtttagaaattgaataaataggagttttattaccacattggatatccttgtgtcctaacctttttccttggagttatcttagttcaataaataaaacctcattagactattcccatttcaacgagtttattaaattttgcaggagtaattagcataagctgtgctaatttttctggaagactaatgagggaggttcttaattaggtttactttgtaagaatcagaaaagatgataatgacaaaagtcacatagggtagtctgaattgggaacccagtttttctgcatctattaaaaaatctttctatatggaaactttttaataaatgtcggaactgaatatattaagtatgcagactgttattccatatctggttaggatgaccattcattcttaatttgcttccccaaactctttattttcctaaactatctttgagcaatgacatggatgaatacagatggtcttataaaaacatttctttctccaaagtatgctggaggcttcttttcacacagactcctgaagtttctggctagatttctgttgcttatttgcagtggggtgggatagggggcagttaatgttggttgttgtagtagtttgaattagaattagtgcaattgatgaaatgaaccattaagtaagggtgacaaatgtgagcatcattccttgtgcaatgaatccttatctgttacaagtggatttttttttaagtagaattgaaatcctaaggggtgaaatccatctcaaattatgttctccttatggtgtgaatttagacctcagttttaagggattaa

SEQ ID NO: 595460 - DNA, 4646 bp, Homo sapiens
tgatttggggcgggcgggggagtctccaggggaacctcgaggttgcccccagcagaacccatgcaccgctaagccacccgagcaccgcctccttccgctcgggcccgccccggagctgcgggtcgctccgagcccattcccgccggaagtgcgtcaccagcttggcgctccgcctccctcggccttagctagaagtcgaaacaaaacaagccgctaaggcggtggcggcggcgccgggacgggggaggggcgcgccggaaccggaaccgacctgcgccggaaccggaacggagagcgggttgccagggcccgaagagggctggctgcggcggtctcgctcggctgtccgttccttgctggagaatttggccacaaagagttgccaagatagctgggccaggaagaaagcgccgcagccctgacccagacgctgttgccgaccccggggcactctggctgtcgaccaagcggctcaagatgtctggcggggccagtgccacaggcccaaggagagggcccccaggactggaggacaccactagtaagaagaagcagaaggatcgagcaaaccaggagagcaaggatggagatcctaggaaagagacagggtctcgatatgttgcccaggctggtcttgaacctctggcctcaggtgatccttctgcctcagcctcccatgcagctgggatcacaggctcacgccaccgtacccggctgttctttccttcatcgtcagggtcagcatccactcctcaagaggagcagaccaaagaggagttgttgctcgattggaggcagagtgcagaagaggtgattgtcaagcttcgtgtgggagtaggtcccctgcagctggaggatgtagatgctgctttcacagatacagactgtgtggtgcggtttgcaggtggtcagcagtggggtggtgtcttctatgctgagataaaaagctcttgtgctaaagtgcaaacccgcaagggcagtctcctgcacctgacactgcccaaaaaggtgcctatgctcacgtggccctccctcctggttgaggctgatgaacagctttgcataccaccgctgaactcccaaacctgcctcctgggctcagaggagaatttagcccctttggcaggagagaaagcagtgcctcccgggaatgacccagtctctccagccatggtccggagcagaaaccctgggaaagatgactgtgccaaggaggagatggcagtggcagcagatgctgcaaccttggtggatgagcccgagtcgatggtgaacctggcgtttgtcaagaatgactcgtatgagaagggcccggattcagtggtggtgcacgtgtacgtgaaggagatctgcagggacacctcaagagtacttttccgtgagcaggacttcacgctcatcttccagaccagggatggaaacttcctgaggctgcacccgggctgtgggccccacaccaccttccgttggcaggtgaagctcaggaatctgattgagccagagcagtgcaccttctgtttcacggcttctcgcatcgacatctgccttcgtaagaggcagagtcagcgctgggggggcctggaggccccggctgcacgaggtgcagtgggtggtgcaaaggttgccgtgccgacaggtccaacccctctggattcaaccccaccaggaggtgctccccaccccctgacaggccaggaggaggcccgggctgtggagaaggataaatccaaggcacgatctgaggacacagggctagacagtgtggcaacccgcacacccatggagcatgtaaccccaaagccagagacacacctggcctcgcccaagcctacatgcatggtgcctcccatgccccacagcccagttagtggagacagcgtggaggaggaggaagaggaagagaagaaggtgtgtctgccaggcttcactggccttgtcaatttaggcaacacctgcttcatgaacagcgtcattcagtctctgtccaacactcgggaactccgggacttcttccatgaccgctcctttgaggctgagatcaactacaacaacccactagggactggtgggcgtctggccattggctttgccgtgctgcttcgggcgctgtggaagggcacccaccatgccttccagccttccaagttgaaggccattgtggcgagtaaggccagccagttcacaggctatgcacagcatgatgcccaggagttcatggctttcctgctggatgggctgcacgaggacctgaatcgcattcagaacaagccctacacagagaccgtggattcagatgggcggcccgatgaggtggtagctgaggaagcatggcagcggcacaagatgaggaatgactctttcatcgtggacctatttcaggggcagtacaagtcgaagctggtgtgccctgtgtgtgccaaggtctccatcacttttgacccgtttctttatctgccggtgcccttgccacaaaagcaaaaggttctccctgtcttttattttgcccgagagccccacagcaagcccatcaagttcctggtgagcgtcagcaaggagaactccactgcgagcgaagtattggactccctctctcagagtgttcatgtgaagcctgagaacctgcgtttggcggaggtaattaagaatcgttttcatcgtgtgttcctaccctcccactcactggacactgtgtccccatctgatacgctcctctgctttgagctgctatcctcagagttggctaaggagcgggtagtggtgctagaggtgcaacagcgcccccaggtgcccagcgtccccatctccaagtgtgcagcctgccagcggaagcaacagtcggaggatgaaaagctgaagcgctgtacccggtgctaccgtgtgggctactgcaaccagctctgccagaaaacccactggcctgaccacaagggcctctgccgacctgagaacattggctaccccttcctggtcagtgtacctgcctcacgcctcacttatgcccgcctcgctcagttgctagagggctatgcccggtactctgtgagtgtattccagccaccctttcagccaggccgcatggccttggagtctcagagccctggctgcaccacactgctctccacaggttccctggaggctggggacagcgagagagaccccattcagccacctgagctccagctggtgacccctatggctgagggggacacagggcttccccgggtgtgggcagcccctgaccggggtcctgtgcccagcaccagtggaatttcttctgagatgctggccagtgggcccattgaggttggctccttgccagctggcgagagggtgtcccgacccgaagctgctgtgcctgggtaccagcatccaagtgaagctatgaatgcccacacaccccagttcttcatctataaaattgattcatccaaccgagagcagcggctagaggacaaaggagacaccccactggagctgggtgacgactgtagcctggctctcgtctggcggaacaatgagcgcttgcaggagtttgtgttggtagcctccaaggagctggaatgtgctgaggatccaggctctgccggtgaggctgcccgggccggccacttcaccctggaccagtgcctcaacctcttcacacggcctgaggtgctggcacccgaggaggcctggtactgcccacagtgcaaacagcaccgtgaggcctccaagcagctgttgctatggcgcctgccaaatgttctcatcgtgcagctcaagcgcttctcctttcgtagttttatctggcgtgacaagatcaatgacttggtggagttccctgttaggaacctggacctgagcaagttctgcattggtcagaaagaggagcagctgcccagctacgatctatatgctgtcatcaaccactatggaggcatgattggtggccactacactgcctgtgcacgcctgcccaatgatcgtagcagtcagcgcagtgacgtgggctggcgcttgtttgatgacagcacagtgacaacggtagacgagagccaggttgtgacgcgttatgcctatgtactcttctaccgccggcggaactctcctgtggagaggccccccagggcaggtcactctgagcaccacccagacctaggccctgcagctgaggctgctgccagccagggactaggccctggccaggcccccgaggtggcccccacgcggacagcccctgaacgcttcgccccccctgtggatcggccagcccccacctacagcaacatggaggaggtggattagcaggtccctggctgatgggggggactgggtttgggacacccacacagagggccagctccttgccgcttctccttctctaacccagaggacactggctctgtcagtgggaagctgaggggtatgatttgggtgtggagacctctcaggttgggacttcttgtcagcttggacccctgaccagtgggctttggcttctccagccgcctccagtgctgcgtgatttgattctgttgtaccttcaattcttctgacccgcattataaacattataattttattctaaaaattgtaattttttttgcattttggaagtgactgctgctgtttaaatatattttaaaaataaataataagtaagtaga

SEQ ID NO: 595461 - DNA, 4515 bp, Homo sapiens
tgatttggggcgggcgggggagtctccaggggaacctcgaggttgcccccagcagaacccatgcaccgctaagccacccgagcaccgcctccttccgctcgggcccgccccggagctgcgggtcgctccgagcccattcccgccggaagtgcgtcaccagcttggcgctccgcctccctcggccttagctagaagtcgaaacaaaacaagccgctaaggcggtggcggcggcgccgggacgggggaggggcgcgccggaaccggaaccgacctgcgccggaaccggaacggagagcgggttgccagggcccgaagagggctggctgcggcggtctcgctcggctgtccgttccttgctggagaatttggccacaaagagttgccaagatagctgggccaggaagaaagcgccgcagccctgacccagacgctgttgccgaccccggggcactctggctgtcgaccaagcggctcaagatgtctggcggggccagtgccacaggcccaaggagagggcccccaggactggaggacaccactagtaagaagaagcagaaggatcgagcaaaccaggagagcaaggatggagatcctaggaaagagacagggtctcgatatgttgcccaggctggtcttgaacctctggcctcaggtgatccttctgcctcagcctcccatgcagctgggatcacaggctcacgccaccgtacccggctgttctttccttcatcgtcagggtcagcatccactcctcaagaggagcagaccaaagaggagttgttgctcgattggaggcagagtgcagaagaggtgattgtcaagcttcgtgtgggagtaggtcccctgcagctggaggatgtagatgctgctttcacagatacagactgtgtggtgcggtttgcaggtggttgaggctgatgaacagctttgcataccaccgctgaactcccaaacctgcctcctgggctcagaggagaatttagcccctttggcaggagagaaagcagtgcctcccgggaatgacccagtctctccagccatggtccggagcagaaaccctgggaaagatgactgtgccaaggaggagatggcagtggcagcagatgctgcaaccttggtggatgagcccgagtcgatggtgaacctggcgtttgtcaagaatgactcgtatgagaagggcccggattcagtggtggtgcacgtgtacgtgaaggagatctgcagggacacctcaagagtacttttccgtgagcaggacttcacgctcatcttccagaccagggatggaaacttcctgaggctgcacccgggctgtgggccccacaccaccttccgttggcaggtgaagctcaggaatctgattgagccagagcagtgcaccttctgtttcacggcttctcgcatcgacatctgccttcgtaagaggcagagtcagcgctgggggggcctggaggccccggctgcacgaggtgcagtgggtggtgcaaaggttgccgtgccgacaggtccaacccctctggattcaaccccaccaggaggtgctccccaccccctgacaggccaggaggaggcccgggctgtggagaaggataaatccaaggcacgatctgaggacacagggctagacagtgtggcaacccgcacacccatggagcatgtaaccccaaagccagagacacacctggcctcgcccaagcctacatgcatggtgcctcccatgccccacagcccagttagtggagacagcgtggaggaggaggaagaggaagagaagaaggtgtgtctgccaggcttcactggccttgtcaatttaggcaacacctgcttcatgaacagcgtcattcagtctctgtccaacactcgggaactccgggacttcttccatgaccgctcctttgaggctgagatcaactacaacaacccactagggactggtgggcgtctggccattggctttgccgtgctgcttcgggcgctgtggaagggcacccaccatgccttccagccttccaagttgaaggccattgtggcgagtaaggccagccagttcacaggctatgcacagcatgatgcccaggagttcatggctttcctgctggatgggctgcacgaggacctgaatcgcattcagaacaagccctacacagagaccgtggattcagatgggcggcccgatgaggtggtagctgaggaagcatggcagcggcacaagatgaggaatgactctttcatcgtggacctatttcaggggcagtacaagtcgaagctggtgtgccctgtgtgtgccaaggtctccatcacttttgacccgtttctttatctgccggtgcccttgccacaaaagcaaaaggttctccctgtcttttattttgcccgagagccccacagcaagcccatcaagttcctggtgagcgtcagcaaggagaactccactgcgagcgaagtattggactccctctctcagagtgttcatgtgaagcctgagaacctgcgtttggcggaggtaattaagaatcgttttcatcgtgtgttcctaccctcccactcactggacactgtgtccccatctgatacgctcctctgctttgagctgctatcctcagagttggctaaggagcgggtagtggtgctagaggtgcaacagcgcccccaggtgcccagcgtccccatctccaagtgtgcagcctgccagcggaagcaacagtcggaggatgaaaagctgaagcgctgtacccggtgctaccgtgtgggctactgcaaccagctctgccagaaaacccactggcctgaccacaagggcctctgccgacctgagaacattggctaccccttcctggtcagtgtacctgcctcacgcctcacttatgcccgcctcgctcagttgctagagggctatgcccggtactctgtgagtgtattccagccaccctttcagccaggccgcatggccttggagtctcagagccctggctgcaccacactgctctccacaggttccctggaggctggggacagcgagagagaccccattcagccacctgagctccagctggtgacccctatggctgagggggacacagggcttccccgggtgtgggcagcccctgaccggggtcctgtgcccagcaccagtggaatttcttctgagatgctggccagtgggcccattgaggttggctccttgccagctggcgagagggtgtcccgacccgaagctgctgtgcctgggtaccagcatccaagtgaagctatgaatgcccacacaccccagttcttcatctataaaattgattcatccaaccgagagcagcggctagaggacaaaggagacaccccactggagctgggtgacgactgtagcctggctctcgtctggcggaacaatgagcgcttgcaggagtttgtgttggtagcctccaaggagctggaatgtgctgaggatccaggctctgccggtgaggctgcccgggccggccacttcaccctggaccagtgcctcaacctcttcacacggcctgaggtgctggcacccgaggaggcctggtactgcccacagtgcaaacagcaccgtgaggcctccaagcagctgttgctatggcgcctgccaaatgttctcatcgtgcagctcaagcgcttctcctttcgtagttttatctggcgtgacaagatcaatgacttggtggagttccctgttaggaacctggacctgagcaagttctgcattggtcagaaagaggagcagctgcccagctacgatctatatgctgtcatcaaccactatggaggcatgattggtggccactacactgcctgtgcacgcctgcccaatgatcgtagcagtcagcgcagtgacgtgggctggcgcttgtttgatgacagcacagtgacaacggtagacgagagccaggttgtgacgcgttatgcctatgtactcttctaccgccggcggaactctcctgtggagaggccccccagggcaggtcactctgagcaccacccagacctaggccctgcagctgaggctgctgccagccagggactaggccctggccaggcccccgaggtggcccccacgcggacagcccctgaacgcttcgccccccctgtggatcggccagcccccacctacagcaacatggaggaggtggattagcaggtccctggctgatgggggggactgggtttgggacacccacacagagggccagctccttgccgcttctccttctctaacccagaggacactggctctgtcagtgggaagctgaggggtatgatttgggtgtggagacctctcaggttgggacttcttgtcagcttggacccctgaccagtgggctttggcttctccagccgcctccagtgctgcgtgatttgattctgttgtaccttcaattcttctgacccgcattataaacattataattttattctaaaaattgtaattttttttgcattttggaagtgactgctgctgtttaaatatattttaaaaataaataataagtaagtaga

SEQ ID NO: 595462 - DNA, 3784 bp, Homo sapiens
cagaagcgggcccagggccgtggtgaggtaggcgcaggtgctggccccggggcccaggcagggcccagcgccaagagggctgtgcatctctgcagagggccagagggggacgggtccaggatgaccctggaccccggggtgatgccccacccttcgtggctgacccagccacccaggttgaggctgatgaacagctttgcataccaccgctgaactcccaaacctgcctcctgggctcagaggagaatttagcccctttggcaggagagaaagcagtgcctcccgggaatgacccagtctctccagccatggtccggagcagaaaccctgggaaagatgactgtgccaaggaggagatggcagtggcagcagatgctgcaaccttggtggatgagcccgagtcgatggtgaacctggcgtttgtcaagaatgactcgtatgagaagggcccggattcagtggtggtgcacgtgtacgtgaaggagatctgcagggacacctcaagagtacttttccgtgagcaggacttcacgctcatcttccagaccagggatggaaacttcctgaggctgcacccgggctgtgggccccacaccaccttccgttggcaggtgaagctcaggaatctgattgagccagagcagtgcaccttctgtttcacggcttctcgcatcgacatctgccttcgtaagaggcagagtcagcgctgggggggcctggaggccccggctgcacgaggtgcagtgggtggtgcaaaggttgccgtgccgacaggtccaacccctctggattcaaccccaccaggaggtgctccccaccccctgacaggccaggaggaggcccgggctgtggagaaggataaatccaaggcacgatctgaggacacagggctagacagtgtggcaacccgcacacccatggagcatgtaaccccaaagccagagacacacctggcctcgcccaagcctacatgcatggtgcctcccatgccccacagcccagttagtggagacagcgtggaggaggaggaagaggaagagaagaaggtgtgtctgccaggcttcactggccttgtcaatttaggcaacacctgcttcatgaacagcgtcattcagtctctgtccaacactcgggaactccgggacttcttccatgaccgctcctttgaggctgagatcaactacaacaacccactagggactggtgggcgtctggccattggctttgccgtgctgcttcgggcgctgtggaagggcacccaccatgccttccagccttccaagttgaaggccattgtggcgagtaaggccagccagttcacaggctatgcacagcatgatgcccaggagttcatggctttcctgctggatgggctgcacgaggacctgaatcgcattcagaacaagccctacacagagaccgtggattcagatgggcggcccgatgaggtggtagctgaggaagcatggcagcggcacaagatgaggaatgactctttcatcgtggacctatttcaggggcagtacaagtcgaagctggtgtgccctgtgtgtgccaaggtctccatcacttttgacccgtttctttatctgccggtgcccttgccacaaaagcaaaaggttctccctgtcttttattttgcccgagagccccacagcaagcccatcaagttcctggtgagcgtcagcaaggagaactccactgcgagcgaagtattggactccctctctcagagtgttcatgtgaagcctgagaacctgcgtttggcggaggtaattaagaatcgttttcatcgtgtgttcctaccctcccactcactggacactgtgtccccatctgatacgctcctctgctttgagctgctatcctcagagttggctaaggagcgggtagtggtgctagaggtgcaacagcgcccccaggtgcccagcgtccccatctccaagtgtgcagcctgccagcggaagcaacagtcggaggatgaaaagctgaagcgctgtacccggtgctaccgtgtgggctactgcaaccagctctgccagaaaacccactggcctgaccacaagggcctctgccgacctgagaacattggctaccccttcctggtcagtgtacctgcctcacgcctcacttatgcccgcctcgctcagttgctagagggctatgcccggtactctgtgagtgtattccagccaccctttcagccaggccgcatggccttggagtctcagagccctggctgcaccacactgctctccacaggttccctggaggctggggacagcgagagagaccccattcagccacctgagctccagctggtgacccctatggctgagggggacacagggcttccccgggtgtgggcagcccctgaccggggtcctgtgcccagcaccagtggaatttcttctgagatgctggccagtgggcccattgaggttggctccttgccagctggcgagagggtgtcccgacccgaagctgctgtgcctgggtaccagcatccaagtgaagctatgaatgcccacacaccccagttcttcatctataaaattgattcatccaaccgagagcagcggctagaggacaaaggagacaccccactggagctgggtgacgactgtagcctggctctcgtctggcggaacaatgagcgcttgcaggagtttgtgttggtagcctccaaggagctggaatgtgctgaggatccaggctctgccggtgaggctgcccgggccggccacttcaccctggaccagtgcctcaacctcttcacacggcctgaggtgctggcacccgaggaggcctggtactgcccacagtgcaaacagcaccgtgaggcctccaagcagctgttgctatggcgcctgccaaatgttctcatcgtgcagctcaagcgcttctcctttcgtagttttatctggcgtgacaagatcaatgacttggtggagttccctgttaggaacctggacctgagcaagttctgcattggtcagaaagaggagcagctgcccagctacgatctatatgctgtcatcaaccactatggaggcatgattggtggccactacactgcctgtgcacgcctgcccaatgatcgtagcagtcagcgcagtgacgtgggctggcgcttgtttgatgacagcacagtgacaacggtagacgagagccaggttgtgacgcgttatgcctatgtactcttctaccgccggcggaactctcctgtggagaggccccccagggcaggtcactctgagcaccacccagacctaggccctgcagctgaggctgctgccagccagggactaggccctggccaggcccccgaggtggcccccacgcggacagcccctgaacgcttcgccccccctgtggatcggccagcccccacctacagcaacatggaggaggtggattagcaggtccctggctgatgggggggactgggtttgggacacccacacagagggccagctccttgccgcttctccttctctaacccagaggacactggctctgtcagtgggaagctgaggggtatgatttgggtgtggagacctctcaggttgggacttcttgtcagcttggacccctgaccagtgggctttggcttctccagccgcctccagtgctgcgtgatttgattctgttgtaccttcaattcttctgacccgcattataaacattataattttattctaaaaattgtaattttttttgcattttggaagtgactgctgctgtttaaatatattttaaaaataaataataagtaagtaga

SEQ ID NO: 595463 - DNA, 105 bp, Homo sapiens
agcaataggcgagccccagagcataccaaccctacctccagaacacccaggaacatcacttctgtatgcgtgagctgatgtgacacattatagaatactctcaac

SEQ ID NO: 595464 - DNA, 4592 bp, Homo sapiens
tgatttggggcgggcgggggagtctccaggggaacctcgaggttgcccccagcagaacccatgcaccgctaagccacccgagcaccgcctccttccgctcgggcccgccccggagctgcgggtcgctccgagcccattcccgccggaagtgcgtcaccagcttggcgctccgcctccctcggccttagctagaagtcgaaacaaaacaagccgctaaggcggtggcggcggcgccgggacgggggaggggcgcgccggaaccggaaccgacctgcgccggaaccggaacggagagcgggttgccagggcccgaagagggctggctgcggcggtctcgctcggctgtccgttccttgctggagaatttggccacaaagagttgccaagatagctgggccaggaagaaagcgccgcagccctgacccagacgctgttgccgaccccggggcactctggctgtcgaccaagcggctcaagatgtctggcggggccagtgccacaggcccaaggagagggcccccaggactggaggacaccactagtaagaagaagcagaaggatcgagcaaaccaggagagcaaggatggagatcctaggaaagagacagggtctcgatatgttgcccaggctggtcttgaacctctggcctcaggtgatccttctgcctcagcctcccatgcagctgggatcacaggctcacgccaccgtacccggctgttctttccttcatcgtcagggtcagcatccactcctcaagaggagcagaccaaagaggagttgttgctcgattggaggcagagtgcagaagaggtgattgtcaagcttcgtgtgggagtaggtcccctgcagctggaggatgtagatgctgctttcacagatacagactgtgtggtgcggtttgcaggtggtcagcagtggggtggtgtcttctatgctgagataaaaagctcttgtgctaaagtgcaaacccgcaagggcagtctcctgcacctgacactgcccaaaaaggtgcctatgctcacgtggccctccctcctggttgaggctgatgaacagctttgcataccaccgctgaactcccaaacctgcctcctgggctcagaggagaatttagcccctttggcaggagagaaagcagtgcctcccgggaatgacccagtctctccagccatggtccggagcagaaaccctgggaaagatgactgtgccaaggaggagatggcagtggcagcagatgctgcaaccttggtggatgagcccgagtcgatggtgaacctggcgtttgtcaagaatgactcgtatgagaagggcccggattcagtggtggtgcacgtgtacgtgaaggagatctgcagggacacctcaagagtacttttccgtgagcaggacttcacgctcatcttccagaccagggatggaaacttcctgaggctgcacccgggctgtgggccccacaccaccttccgttggcaggtgaagctcaggaatctgattgagccagagcagtgcaccttctgtttcacggcttctcgcatcgacatctgccttcgtaagaggcagagtcagcgctgggggggcctggaggccccggctgcacgaggtgcagtgggtggtgcaaaggttgccgtgccgacaggtccaacccctctggattcaaccccaccaggaggtgctccccaccccctgacaggccaggaggaggcccgggctgtggagaaggataaatccaaggcacgatctgaggacacagggctagacagtgtggcaacccgcacacccatggagcatgtaaccccaaagccagagacacacctggcctcgcccaagcctacatgcatggtgcctcccatgccccacagcccagttagtggagacagcgtggaggaggaggaagaggaagagaagaaggtgtgtctgccaggcttcactggccttgtcaatttaggcaacacctgcttcatgaacagcgtcattcagtctctgtccaacactcgggaactccgggacttcttccatgaccgctcctttgaggctgagatcaactacaacaacccactagggactggtgggcgtctggccattggctttgccgtgctgcttcgggcgctgtggaagggcacccaccatgccttccagccttccaagttgaaggccattgtggcgagtaaggccagccagttcacaggctatgcacagcatgatgcccaggagttcatggctttcctgctggatgggctgcacgaggacctgaatcgcattcagaacaagccctacacagagaccgtggattcagatgggcggcccgatgaggtggtagctgaggaagcatggcagcggcacaagatgaggaatgactctttcatcgtggacctatttcaggggcagtacaagtcgaagctggtgtgccctgtgtgtgccaaggtctccatcacttttgacccgtttctttatctgccggtgcccttgccacaaaagcaaaaggttctccctgtcttttattttgcccgagagccccacagcaagcccatcaagttcctggtgagcgtcagcaaggagaactccactgcgagcgaagtattggactccctctctcagagtgttcatgtgaagcctgagaacctgcgtttggcggaggtaattaagaatcgttttcatcgtgtgttcctaccctcccactcactggacactgtgtccccatctgatacgctcctctgctttgagctgctatcctcagagttggctaaggagcgggtagtggtgctagaggtgcaacagcgcccccaggtgcccagcgtccccatctccaagtgtgcagcctgccagcggaagcaacagtcggaggatgaaaagctgaagcgctgtacccggtgctaccgtgtgggctactgcaaccagctctgccagaaaacccactggcctgaccacaagggcctctgccgacctgagaacattggctaccccttcctggtcagtgtacctgcctcacgcctcacttatgcccgcctcgctcagttgctagagggctatgcccggtactctgtgagtgtattccagccaccctttcagccaggccgcatggccttggagtctcagagccctggctgcaccacactgctctccacaggttccctggaggctggggacagcgagagagaccccattcagccacctgagctccagctggtgacccctatggctgagggggacacagggcttccccgggtgtgggcagcccctgaccggggtcctgtgcccagcaccagtggaatttcttctgagatgctggccagtgggcccattgaggttggctccttgccagctggcgagagggtgtcccgacccgaagctgctgtgcctgggtaccagcatccaagtgaagctatgaatgcccacacaccccagttcttcatctatctggagctgggtgacgactgtagcctggctctcgtctggcggaacaatgagcgcttgcaggagtttgtgttggtagcctccaaggagctggaatgtgctgaggatccaggctctgccggtgaggctgcccgggccggccacttcaccctggaccagtgcctcaacctcttcacacggcctgaggtgctggcacccgaggaggcctggtactgcccacagtgcaaacagcaccgtgaggcctccaagcagctgttgctatggcgcctgccaaatgttctcatcgtgcagctcaagcgcttctcctttcgtagttttatctggcgtgacaagatcaatgacttggtggagttccctgttaggaacctggacctgagcaagttctgcattggtcagaaagaggagcagctgcccagctacgatctatatgctgtcatcaaccactatggaggcatgattggtggccactacactgcctgtgcacgcctgcccaatgatcgtagcagtcagcgcagtgacgtgggctggcgcttgtttgatgacagcacagtgacaacggtagacgagagccaggttgtgacgcgttatgcctatgtactcttctaccgccggcggaactctcctgtggagaggccccccagggcaggtcactctgagcaccacccagacctaggccctgcagctgaggctgctgccagccagggactaggccctggccaggcccccgaggtggcccccacgcggacagcccctgaacgcttcgccccccctgtggatcggccagcccccacctacagcaacatggaggaggtggattagcaggtccctggctgatgggggggactgggtttgggacacccacacagagggccagctccttgccgcttctccttctctaacccagaggacactggctctgtcagtgggaagctgaggggtatgatttgggtgtggagacctctcaggttgggacttcttgtcagcttggacccctgaccagtgggctttggcttctccagccgcctccagtgctgcgtgatttgattctgttgtaccttcaattcttctgacccgcattataaacattataattttattctaaaaattgtaattttttttgcattttggaagtgactgctgctgtttaaatatattttaaaaataaataataagtaagtaga

SEQ ID NO: 595465 - DNA, 5550 bp, Homo sapiens
  misc_feature (4825)..(4825): n is a, c, g, or t
tgatttggggcgggcgggggagtctccaggggaacctcgaggttgcccccagcagaacccatgcaccgctaagccacccgagcaccgcctccttccgctcgggcccgccccggagctgcgggtcgctccgagcccattcccgccggaagtgcgtcaccagcttggcgctccgcctccctcggccttagctagaagtcgaaacaaaacaagccgctaaggcggtggcggcggcgccgggacgggggaggggcgcgccggaaccggaaccgacctgcgccggaaccggaacggagagcgggttgccagggcccgaagagggctggctgcggcggtctcgctcggctgtccgttccttgctggagaatttggccacaaagagttgccaagatagctgggccaggaagaaagcgccgcagccctgacccagacgctgttgccgaccccggggcactctggctgtcgaccaagcggctcaagatgtctggcggggccagtgccacaggcccaaggagagggcccccaggactggaggacaccactagtaagaagaagcagaaggatcgagcaaaccaggagagcaaggatggagatcctaggaaagagacagggtctcgatatgttgcccaggctggtcttgaacctctggcctcaggtgatccttctgcctcagcctcccatgcagctgggatcacaggctcacgccaccgtacccggctgttctttccttcatcgtcagggtcagcatccactcctcaagaggagcagaccaaagaggagttgttgctcgattggaggcagagtgcagaagaggtgattgtcaagcttcgtgtgggagtaggtcccctgcagctggaggatgtagatgctgctttcacagatacagactgtgtggtgcggtttgcaggtggtcagcagtggggtggtgtcttctatgctgagataaaaagctcttgtgctaaagtgcaaacccgcaagggcagtctcctgcacctgacactgcccaaaaaggtgcctatgctcacgtggccctccctcctggttgaggctgatgaacagctttgcataccaccgctgaactcccaaacctgcctcctgggctcagaggagaatttagcccctttggcaggagagaaagcagtgcctcccgggaatgacccagtctctccagccatggtccggagcagaaaccctgggaaagatgactgtgccaaggaggagatggcagtggcagcagatgctgcaaccttggtggatgagcccgagtcgatggtgaacctggcgtttgtcaagaatgactcgtatgagaagggcccggattcagtggtggtgcacgtgtacgtgaaggagatctgcagggacacctcaagagtacttttccgtgagcaggacttcacgctcatcttccagaccagggatggaaacttcctgaggctgcacccgggctgtgggccccacaccaccttccgttggcaggtgaagctcaggaatctgattgagccagagcagtgcaccttctgtttcacggcttctcgcatcgacatctgccttcgtaagaggcagagtcagcgctgggggggcctggaggccccggctgcacgaggtgcagtgggtggtgcaaaggttgccgtgccgacaggtccaacccctctggattcaaccccaccaggaggtgctccccaccccctgacaggccaggaggaggcccgggctgtggagaaggataaatccaaggcacgatctgaggacacagggctagacagtgtggcaacccgcacacccatggagcatgtaaccccaaagccagagacacacctggcctcgcccaagcctacatgcatggtgcctcccatgccccacagcccagttagtggagacagcgtggaggaggaggaagaggaagagaagaaggtgtgtctgccaggcttcactggccttgtcaatttaggcaacacctgcttcatgaacagcgtcattcagtctctgtccaacactcgggaactccgggacttcttccatgaccgctcctttgaggctgagatcaactacaacaacccactagggactggtgggcgtctggccattggctttgccgtgctgcttcgggcgctgtggaagggcacccaccatgccttccagccttccaagttgaaggccattgtggcgagtaaggccagccagttcacaggctatgcacagcatgatgcccaggagttcatggctttcctgctggatgggctgcacgaggacctgaatcgcattcagaacaagccctacacagagaccgtggattcagatgggcggcccgatgaggtggtagctgaggaagcatggcagcggcacaagatgaggaatgactctttcatcgtggacctatttcaggggcagtacaagtcgaagctggtgtgccctgtgtgtgccaaggtctccatcacttttgacccgtttctttatctgccggtgcccttgccacaaaagcaaaaggttctccctgtcttttattttgcccgagagccccacagcaagcccatcaagttcctggtgagcgtcagcaaggagaactccactgcgagcgaagtattggactccctctctcagagtgttcatgtgaagcctgagaacctgcgtttggcggaggtaattaagaatcgttttcatcgtgtgttcctaccctcccactcactggacactgtgtccccatctgatacgctcctctgctttgagctgctatcctcagagttggctaaggagcgggtagtggtgctagaggtgcaacagcgcccccaggtgcccagcgtccccatctccaagtgtgcagcctgccagcggaagcaacagtcggaggatgaaaagctgaagcgctgtacccggtgctaccgtgtgggctactgcaaccagctctgccagaaaacccactggcctgaccacaagggcctctgccgacctgagaacattggctaccccttcctggtcagtgtacctgcctcacgcctcacttatgcccgcctcgctcagttgctagagggctatgcccggtactctgtgagtgtattccagccaccctttcagccaggccgcatggccttggagtctcagagccctggctgcaccacactgctctccacaggttccctggaggctggggacagcgagagagaccccattcagccacctgagctccagctggtgacccctatggctgagggggacacagggcttccccgggtgtgggcagcccctgaccggggtcctgtgcccagcaccagtggaatttcttctgagatgctggccagtgggcccattgaggttggctccttgccagctggcgagagggtgtcccgacccgaagctgctgtgcctgggtaccagcatccaagtgaagctatgaatgcccacacaccccagttcttcatctataaaattgattcatccaaccgagagcagcggctagaggacaaaggagacaccccactggagctgggtgacgactgtagcctggctctcgtctggcggaacaatgagcgcttgcaggagtttgtgttggtagcctccaaggagctggaatgtgctgaggatccaggctctgccggtgaggctgcccgggccggccacttcaccctggaccagtgcctcaacctcttcacacggcctgaggtgctggcacccgaggaggcctggtactgcccacagtgcaaacagcaccgtgaggcctccaagcagctgttgctatggcgcctgccaaatgttctcatcgtgcagctcaagcgcttctcctttcgtagttttatctggcgtgacaagatcaatgacttggtggagttccctgttaggaacctggacctgagcaagttctgcattggtcagaaagaggagcagctgcccagctacgatctatatgctgtcatcaaccactatggaggcatgattggtggccactacactgcctgtgcacgcctgcccaatgatcgtagcagtcagcgcagtgacgtgggctggcgcttgtttgatgacagcacagtgacaacggtagacgagagccaggttgtgacgcgttatgcctatgtactcttctaccgccggcggaactctcctgtggagaggccccccagggcaggtcactctgagcaccacccagacctaggccctgcagctgaggctgctgccagccagggactaggccctggccaggcccccgaggtggcccccacgcggacagcccctgaacgcttcgccccccctgtggatcggccagcccccacctacagcaacatggaggaggtggattagcaggtccctggctgatgggggggactgggtttgggacacccacacagagggccagctccttgccgcttctccttctctaacccagaggacactggctctgtcagtgggaagctgaggggtatgatttgggtgtggagacctctcaggttgggacttcttgtcagcttggacccctgaccagtgggctttggcttctccagccgcctccagtgctgcgtgatttgattctgttgtaccttcaattcttctgacccgcattataaacattataattttattctaaaaattgtaattttttttgcattttggaagtgactgctgctgtttaaatatattttaaaaataaataataagtaagtagacttagtgactgtgatccaccacatgctggggccacctcccctccccatcatttgcggtgtgtatgtgtgtgtatgtgtgtttatatatgagagaccctgaaagtgccctagtctgaagggagatgatggggtcccagctcatgtcctatgggtcatgaagcccccagtgctatcagctntttggagcctacctgctgctctttcatcccactggttctggatcctacataagaggcagcttggtaggcatcgtcaggatctcaatatagccaagggacagaggagtatatgaagcactggagctgacagcgtggagtaaaaggtgcattcaccagagcagcctggggctgacaagtcagggaggacttgggggacagaagtactgggagatcttcctcctcctctcctgtcctcagctttttctttgctgtaacttgaacactaactgcatccctgcaggtaacagagcaggaggaaaactgctgtggggcagatcttgctgccctgaaaagaggacaagcagagaggaccagagtgaatcttgtctgacttctattggagggagggtgctggggcctgccagcctgaagagtcttcccttaagagttcctgaagccttccttctttggccaggcatggtggctcacacttgtaatccccgcactttgagaggccgaggcgagtgggtcatgaggtcaggagttcgagaccagcctggccaagatggtgaaaccccgtctctactaaaaatacaaaaattaggtgcagtggcgggcacctgtaatcccagctacttgggaggctgaggcaggagaatcgcttgaacctgggaggcggaggttgcagggagccgagatcgcgccactgcactctagcctgggcgacagagcaagactccgtctca

SEQ ID NO: 595466 - DNA, 4976 bp, Homo sapiens
tgatttggggcgggcgggggagtctccaggggaacctcgaggttgcccccagcagaacccatgcaccgctaagccacccgagcaccgcctccttccgctcgggcccgccccggagctgcgggtcgctccgagcccattcccgccggaagtgcgtcaccagcttggcgctccgcctccctcggccttagctagaagtcgaaacaaaacaagccgctaaggcggtggcggcggcgccgggacgggggaggggcgcgccggaaccggaaccgacctgcgccggaaccggaacggagagcgggttgccagggcccgaagagggctggctgcggcggtctcgctcggctgtccgttccttgctggagaatttggccacaaagagttgccaagatagctgggccaggaagaaagcgccgcagccctgacccagacgctgttgccgaccccggggcactctggctgtcgaccaagcggctcaagatgtctggcggggccagtgccacaggcccaaggagagggcccccaggactggaggacaccactagtaagaagaagcagaaggatcgagcaaaccaggagagcaaggatggagatcctaggaaagagacagggtctcgatatgttgcccaggctggtcttgaacctctggcctcaggtgatccttctgcctcagcctcccatgcagctgggatcacaggctcacgccaccgtacccggctgttctttccttcatcgtcagggtcagcatccactcctcaagaggagcagaccaaagaggagttgttgctcgattggaggcagagtgcagaagaggtgattgtcaagcttcgtgtgggagtaggtcccctgcagctggaggatgtagatgctgctttcacagatacagactgtgtggtgcggtttgcaggtggtcagcagtggggtggtgtcttctatgctgagataaaaagctcttgtgctaaagtgcaaacccgcaagggcagtctcctgcacctgacactgcccaaaaaggtgcctatgctcacgtggccctccctcctggttgaggctgatgaacagctttgcataccaccgctgaactcccaaacctgcctcctgggctcagaggagaatttagcccctttggcaggagagaaagcagtgcctcccgggaatgacccagtctctccagccatggtccggagcagaaaccctgggaaagatgactgtgccaaggaggagatggcagtggcagcagatgctgcaaccttggtggatgagcccgagtcgatggtgaacctggcgtttgtcaagaatgactcgtatgagaagggcccggattcagtggtggtgcacgtgtacgtgaaggagatctgcagggacacctcaagagtacttttccgtgagcaggacttcacgctcatcttccagaccagggatggaaacttcctgaggctgcacccgggctgtgggccccacaccaccttccgttggcaggtgaagctcaggaatctgattgagccagagcagtgcaccttctgtttcacggcttctcgcatcgacatctgccttcgtaagaggcagagtcagcgctgggggggcctggaggccccggctgcacgaggtgcagtgggtggtgcaaaggttgccgtgccgacaggtccaacccctctggattcaaccccaccaggaggtgctccccaccccctgacaggccaggaggaggcccgggctgtggagaaggataaatccaaggcacgatctgaggacacagggctagacagtgtggcaacccgcacacccatggagcatgtaaccccaaagccagagacacacctggcctcgcccaagcctacatgcatggtgcctcccatgccccacagcccagttagtggagacagcgtggaggaggaggaagaggaagagaagaaggtgtgtctgccaggcttcactggccttgtcaatttaggcaacacctgcttcatgaacagcgtcattcagtctctgtccaacactcgggaactccgggacttcttccatgaccgctcctttgaggctgagatcaactacaacaacccactagggactggtgggcgtctggccattggctttgccgtgctgcttcgggcgctgtggaagggcacccaccatgccttccagccttccaagttgaaggccattgtggcgagtaaggccagccagttcacaggctatgcacagcatgatgcccaggagttcatggctttcctgctggatgggctgcacgaggacctgaatcgcattcagaacaagccctacacagagaccgtggattcagatgggcggcccgatgaggtggtagctgaggaagcatggcagcggcacaagatgaggaatgactctttcatcgtggacctatttcaggggcagtacaagtcgaagctggtgtgccctgtgtgtgccaaggtctccatcacttttgacccgtttctttatctgccggtgcccttgccacaaaagcaaaaggttctccctgtcttttattttgcccgagagccccacagcaagcccatcaagttcctggtgagcgtcagcaaggagaactccactgcgagcgaagtattggactccctctctcagagtgttcatgtgaagcctgagaacctgcgtttggcggaggtaattaagaatcgttttcatcgtgtgttcctaccctcccactcactggacactgtgtccccatctgatacgctcctctgctttgagctgctatcctcagagttggctaaggagcgggtagtggtgctagaggtgcaacagcgcccccaggtgcccagcgtccccatctccaagtgtgcagcctgccagcggaagcaacagtcggaggatgaaaagctgaagcgctgtacccggtgctaccgtgtgggctactgcaaccagctctgccagaaaacccactggcctgaccacaagggcctctgccgacctgagaacattggctaccccttcctggtcagtgtacctgcctcacgcctcacttatgcccgcctcgctcagttgctagagggctatgcccggtactctgtgagtgtattccagccaccctttcagccaggccgcatggccttggagtctcagagccctggctgcaccacactgctctccacaggttccctggaggctggggacagcgagagagaccccattcagccacctgagctccagctggtgacccctatggctgagggggacacagggcttccccgggtgtgggcagcccctgaccggggtcctgtgcccagcaccagtggaatttcttctgagatgctggccagtgggcccattgaggttggctccttgccagctggcgagagggtgtcccgacccgaagctgctgtgcctgggtaccagcatccaagtgaagctatgaatgcccacacaccccagttcttcatctataaaattgattcatccaaccgagagcagcggctagaggacaaaggagacaccccactggagctgggtgacgactgtagcctggctctcgtctggcggaacaatgagcgcttgcaggagtttgtgttggtagcctccaaggagctggaatgtgctgaggatccaggctctgccggtgaggctgcccgggccggccacttcaccctggaccagtgcctcaacctcttcacacggcctgaggtgctggcacccgaggaggcctggtactgcccacagtgcaaacagcaccgtgaggcctccaagcagctgttgctatggcgcctgccaaatgttctcatcgtgcagctcaagcgcttctcctttcgtagttttatctggcgtgacaagatcaatgacttggtggagttccctgttaggaacctggacctgagcaagttctgcattggtcagaaagaggagcagctgcccagctacgatctatatgctgtcatcaaccactatggaggcatgattggtggccactacactgcctgtgcacgcctgcccaatgatcgtagcagtcagcgcagtgacgtgggctggcgcttgtttgatgacagcacagtgacaacggtagacgagagccaggttgtgacgcgttatgcctatgtactcttctaccgccggcggaactctcctgtggagaggccccccagggcaggtcactctgagcaccacccagacctaggccctgcagctgaggctgctgccagccagggactaggccctggccaggcccccgaggtggcccccacgcggacagcccctgaacgcttcgccccccctgtggatcggccagcccccacctacagcaacatggaggaggtggattagcaggtccctggctgatgggggggactgggtttgggacacccacacagagggccagctccttgccgcttctccttctctaacccagaggacactggctctgtcagtgggaagctgaggggtatgatttgggtgtggagacctctcaggttgggacttcttgtcagcttggacccctgaccagtgggctttggcttctccagccgcctccagtgctgcgtgatttgattctgttgtaccttcaattcttctgacccgcattataaacattataattttattctaaaaattgtaattttttttgcattttggaagtgactgctgctgtttaaatatattttaaaaataaataataagtaagtagaaaaaaaaaaaaaaaaaaaagggggggggctataagagtatatgcttaggggggccaaagtataagcggttacccaagtttgtttttacaagggggccctatagatggaatgggtatttataaacaaaggaagggccgtagttaaacaacggtcgtgcagggggaacacgtgtctagctgggaattctgggtgaaggaacctttcttgtgggggttggaatagtggaggaactaccaaagaaaattaaggtctggacgacattaaactcagtgtttagtggtcacagacgaattgctgtgtctagaattgctcggcattctagaacttagt

SEQ ID NO: 595467 - DNA, 921 bp, Homo sapiens
gcgagttggtggtggtcgtcgttatctgttggctggtttgtattcggctactttggcctgtcgcttgtccgtggtgtccgaggtggtgctcagtgggatggcgtagtttcccaattgtgtgtcggcgatgatcgattgctgctgggggcactgccatattgtatgggtctcctctgttgagggtttccgttatgtcgcccgttggtcttttcttttgcttctctgctgtccctgttctgtacactcggccgcggctggttattacgtcgtttggacgctgcttgcaggtgtggacgcttttgggtttttctgtgcgcggagtctgcatggtggcttttagtggacgctccgattcttgggtgtcctgattgtcctaatcagcacagtggtcttcgtggctcctccgcctcggtcggctgcaagtcacgttggcccgcccagggcgcctgcagatcttacggtgggacccccgggatcggtgtgggtatttttttcaagtccgctacaataatttcccccccctttgttcgttgggacccctggcacctttgttgtccctcctgaccttgaccccccagggtgtgggatcgtccggtcgtaggccccccgcttgggagaaaattgtacagtgacccaagcgcttgttgtacctcatatgaggggtgccccccctatgtggttgttcataccggagttccgacttttcccggtgcgtttacccccagccgctcttttgcgcccgtacatcggcgccgggggttatcccccggtccaaatcgtgttgcataactttgcgggaggcaacacccctggttccatgccgccctctgtgccaatgaattgtaatttggccccctaaatttttaaaaggggccccgtttttcccttccccccctttatccccctttgaacccacaaaaa

SEQ ID NO: 595468 - DNA, 415 bp, Homo sapiens
  misc_feature (8)..(8): n is a, c, g, or t
  misc_feature (19)..(19): n is a, c, g, or t
  misc_feature (199)..(199): n is a, c, g, or t
  misc_feature (380)..(380): n is a, c, g, or t
  misc_feature (385)..(385): n is a, c, g, or t
caggcggnggcgccgctgnctggccagtacctgctggcgcaggctggggatatcccagcgctgttgtgcttcatcgacaaatgcctgcagcagcgcctgatgctccgggctgccggtgaggttctcccgctcgtgcgggtcgcggctcaggtcatagagtaggctggggtcatcctcgctgtacacgaacttgtacggnccgcggcggatcatcatcagcgggccgacggtgccttcggccatgtattcgccgatcacttcatcgtgaccgccctgcccttgcagatggccgacaagcgagcggccgtccaggtgcaggcttttatccacagacccgccgccagttcgaccagggttgcagcaggtcgcaggtcgatacngaggngctgacccggcctgctgcaaagcgcttggg

SEQ ID NO: 595469 - DNA, 303 bp, Homo sapiens
cccccccccccccccgaccccccgggcccatgggtttttttggcagggagggggaaggggccccatttcccaaccccccccccccccggggttggcggttttttttttcccctgggccccccggttttcccccttggaaacgggccgtgggggccccccccttttttttggtttggtcccccctttggccccccccgcttttccctttttttttcccggttgttttttttttggggtttttggggggttacccttttcccccggggacccctttttcctttttttggatttgggcccggggga

SEQ ID NO: 595470 - DNA, 346 bp, Homo sapiens
  misc_feature (12)..(12): n is a, c, g, or t
  misc_feature (53)..(53): n is a, c, g, or t
  misc_feature (76)..(76): n is a, c, g, or t
  misc_feature (304)..(305): n is a, c, g, or t
acaaatgtgtgnattttttcaacattaggtagaattcttaaatctatttaaanggaaaatcaggccaggcgcaaantgtcacgcctgtaatcccagcactttggaagctcgaggtgggtggatcacctgaggtcgggagttcaagaccagcctgaccaccatggccaaaactccgtctctactaaaaacacaaaattattacccaggcatggtggcgcacgcctgtaatcccagctacttgggaggctgaggcaggagaatcgcttgaacccaggaggtggaggttgcagtgagctgagtgttnncattgcgctccaactggggaaacgagcgacatccgtctcag

SEQ ID NO: 595471 - DNA, 4804 bp, Homo sapiens
tgatttggggcgggcgggggagtctccaggggaacctcgaggttgcccccagcagaacccatgcaccgctaagccacccgagcaccgcctccttccgctcgggcccgccccggagctgcgggtcgctccgagcccattcccgccggaagtgcgtcaccagcttggcgctccgcctccctcggccttagctagaagtcgaaacaaaacaagccgctaaggcggtggcggcggcgccgggacgggggaggggcgcgccggaaccggaaccgacctgcgccggaaccggaacggagagcgggttgccagggcccgaagagggctggctgcggcggtctcgctcggctgtccgttccttgctggagaatttggccacaaagagttgccaagatagctgggccaggaagaaagcgccgcagccctgacccagacgctgttgccgaccccggggcactctggctgtcgaccaagcggctcaagatgtctggcggggccagtgccacaggcccaaggagagggcccccaggactggaggacaccactagtaagaagaagcagaaggatcgagcaaaccaggagagcaaggatggagatcctaggaaagagacagggtctcgatatgttgcccaggctggtcttgaacctctggcctcaggtgatccttctgcctcagcctcccatgcagctgggatcacaggctcacgccaccgtacccggctgttctttccttcatcgtcagggtcagcatccactcctcaagaggagcagaccaaagaggagttgttgctcgattggaggcagagtgcagaagaggtgattgtcaagcttcgtgtgggagtaggtcccctgcagctggaggatgtagatgctgctttcacagatacagactgtgtggtgcggtttgcaggtggtcagcagtggggtggtgtcttctatgctgagataaaaagctcttgtgctaaagtgcaaacccgcaagggcagtctcctgcacctgacactgcccaaaaaggtgcctatgctcacgtggccctccctcctggttgaggctgatgaacagctttgcataccaccgctgaactcccaaacctgcctcctgggctcagaggagaatttagcccctttggcaggagagaaagcagtgcctcccgggaatgacccagtctctccagccatggtccggagcagaaaccctgggaaagatgactgtgccaaggaggagatggcagtggcagcagatgctgcaaccttggtggatgagcccgagtcgatggtgaacctggcgtttgtcaagaatgactcgtatgagaagggcccggattcagtggtggtgcacgtgtacgtgaaggagatctgcagggacacctcaagagtacttttccgtgagcaggacttcacgctcatcttccagaccagggatggaaacttcctgaggctgcacccgggctgtgggccccacaccaccttccgttggcaggtgaagctcaggaatctgattgagccagagcagtgcaccttctgtttcacggcttctcgcatcgacatctgccttcgtaagaggcagagtcagcgctgggggggcctggaggccccggctgcacgaggtgcagtgggtggtgcaaaggttgccgtgccgacaggtccaacccctctggattcaaccccaccaggaggtgctccccaccccctgacaggccaggaggaggcccgggctgtggagaaggataaatccaaggcacgatctgaggacacagggctagacagtgtggcaacccgcacacccatggagcatgtaaccccaaagccagagacacacctggcctcgcccaagcctacatgcatggtgcctcccatgccccacagcccagttagtggagacagcgtggaggaggaggaagaggaagagaagaaggtgtgtctgccaggcttcactggccttgtcaatttaggcaacacctgcttcatgaacagcgtcattcagtctctgtccaacactcgggaactccgggacttcttccatgaccgctcctttgaggctgagatcaactacaacaacccactagggactggtgggcgtctggccattggctttgccgtgctgcttcgggcgctgtggaagggcacccaccatgccttccagccttccaagttgaaggccattgtggcgagtaaggccagccagttcacaggctatgcacagcatgatgcccaggagttcatggctttcctgctggatgggctgcacgaggacctgaatcgcattcagaacaagccctacacagagaccgtggattcagatgggcggcccgatgaggtggtagctgaggaagcatggcagcggcacaagatgaggaatgactctttcatcgtggacctatttcaggggcagtacaagtcgaagctggtgtgccctgtgtgtgccaaggtctccatcacttttgacccgtttctttatctgccggtgcccttgccacaaaagcaaaaggttctccctgtcttttattttgcccgagagccccacagcaagcccatcaagttcctggtgagcgtcagcaaggagaactccactgcgagcgaagtattggactccctctctcagagtgttcatgtgaagcctgagaacctgcgtttggcggaggtaattaagaatcgttttcatcgtgtgttcctaccctcccactcactggacactgtgtccccatctgatacgctcctctgctttgagctgctatcctcagagttggctaaggagcgggtagtggtgctagaggtgcaacagcgcccccaggtgcccagcgtccccatctccaagtgtgcagcctgccagcggaagcaacagtcggaggatgaaaagctgaagcgctgtacccggtgctaccgtgtgggctactgcaaccagctctgccagaaaacccactggcctgaccacaagggcctctgccgacctgagaacattggctaccccttcctggtcagtgtacctgcctcacgcctcacttatgcccgcctcgctcagttgctagagggctatgcccggtactctgtgagtgtattccagccaccctttcagccaggccgcatggccttggagtctcagagccctggctgcaccacactgctctccacaggttccctggaggctggggacagcgagagagaccccattcagccacctgagctccagctggtgacccctatggctgagggggacacagggcttccccgggtgtgggcagcccctgaccggggtcctgtgcccagcaccagtggaatttcttctgagatgctggccagtgggcccattgaggttggctccttgccagctggcgagagggtgtcccgacccgaagctgctgtgcctgggtaccagcatccaagtgaagctatgaatgcccacacaccccagttcttcatctataaaattgattcatccaaccgagagcagcggctagaggacaaaggagacaccccactggagctgggtgacgactgtagcctggctctcgtctggcggaacaatgagcgcttgcaggagtttgtgttggtagcctccaaggagctggaatgtgctgaggatccaggctctgccggtgaggctgcccgggccggccacttcaccctggaccagtgcctcaacctcttcacacggcctgaggtgctggcacccgaggaggcctggtactgcccacagtgcaaacagcaccgtgaggcctccaagcagctgttgctatggcgcctgccaaatgttctcatcgtgcagctcaagcgcttctcctttcgtagttttatctggcgtgacaagatcaatgacttggtggagttccctgttaggaacctggacctgagcaagttctgcattggtcagaaagaggagcagctgcccagctacgatctatatgctgtcatcaaccactatggaggcatgattggtggccactacactgcctgtgcacgcctgcccaatgatcgtagcagtcagcgcagtgacgtgggctggcgcttgtttgatgacagcacagtgacaacggtagacgagagccaggttgtgacgcgttatgcctatgtactcttctaccgccggcggaactctcctgtggagaggccccccagggcaggtcactctgagcaccacccagacctaggccctgcagctgaggctgctgccagccaggtgaggcatgtgggaggctttacagaatactgggggacagttcacagactggggccgggttgggggatatagcttcctctcctccagccacaggcccattgagccttgggattcatgagaattgcagagttctcttaacatcaaagctttagccagaggcatccccatgccttggggacactaacaaacatacaagtacactaacatgctgccactggcaagcacattggcacctacttggcacaggtcaggcaaactgctctgaacctcactgggcactatgctgtgaatgaactatacctgacactctcctagatttcctctgcacattccccacatgctggccaacaccctcacttgtgatgtccctgagttctagtgtgcactcaagacaaggcctatttgggctggccatggctctggtggctgttatactctttgaggtaagcatctgtctttgctgagccttcaggatcttctctttagtgacatggtgtgccataggcccagttagtgggcgtaggcacatctcttttctggactggccgtctcctttctggctccatcctctcttgagccttctctgtcaagcttagagaaatcttgcagaagactggtcaggatctgggtatggtgg

SEQ ID NO: 595472 - DNA, 1028 bp, Homo sapiens
  misc_feature (4)..(4): n is a, c, g, or t
  misc_feature (14)..(14): n is a, c, g, or t
  misc_feature (68)..(68): n is a, c, g, or t
  misc_feature (78)..(78): n is a, c, g, or t
  misc_feature (187)..(187): n is a, c, g, or t
  misc_feature (718)..(718): n is a, c, g, or t
  misc_feature (1028)..(1028): n is a, c, g, or t
ccancgagttcccnttattagctttaagccattcaaaatattaaagttatcattaaagactcgactcntccagtattncgtgtaacatagagattcgctgtacagcgcactccctcgcgacacacgacccacacacacacaagtacgcgaatatatcataaatctatgacgttaagcaacattaganaaccaacaacacacgtacctcggccctcacactcaatcgtcgagccggactcgcaagcctcgcagtacgatacaccgcacatacctaatactaactcgcgcgtccaacacataggactgtgataaatcagagagattaaacatcgacaacaacagagtatgacacgccgcgacgcgcgccctataagaatcactccattatataataagctgcgacgtcgatcgactaaccctcaccatattgttattccacatatttttattattcatcgtatactactttttactctataaccatcttcattctcttgacatttacttgttcttattactactttattaacttctagtctgcacacactacgatgtccgtgttttgtacatattcaccttttatactttatcatgtccaaatatctgttctacgttactctcattatatggtacagaatgaaagagccgccatcatgtctgtatctcgccattgaaaccacatcaatatacttttgttgctgtatgatttcttattatnatttagagtatagttatatattacaaacatatattatgaatcgtatagtgaattagctaaatgaaataatcgctgatattatttcacagtactccgagatatcacactattaccatgatgtgagacctacttccttaacactttgaaacgcgacacactgtactggttatcatcgtgtactcgttggtgtagtctgcgtactgtatacgattgtgttgtagcgttgttttatagcgccatctccaagaacccaataactcacacattagatccgtacggctatactaactccacgttcatactccgcagn

SEQ ID NO: 595473 - DNA, 395 bp, Homo sapiens
gggtcctaagctggctgagggagtcggtgatgaagacacctttaagtgcctctaataaagagccatggatgtagtcacgccagaatgcatcgaggtaggcgagctcagagaactggatgtcacagatgatggagcccaggtcccgggactggaggatggggtgggccgggttaaagcgctcaaacgggcgctcaagggggtccggctggttagagaagacatggcccggcagagcagtctcatgcgggcagtattcagcccgaacccgcagtcggatgtcacatgtcggcttctcctggggatcggtggtcactgacttccggggttttcgctggctcccaagtgtggctctccctcgggctggccggttgctacacagctgaggaccatcgtgg

SEQ ID NO: 595474 - DNA, 459 bp, Homo sapiens
aggctgattgacatcccagaagcctctcagggagtaggtagcagaacccaaaacttgaacaggtctgccccacactaaagcccttacctggcttgttaggttggctccaggtagatccctggagacatcctgccaagggatcttcccctagtggggaagatgaaacagcacccccgttcctggtaggtcctccctgccataggccaccagaaagaagaaactgcagtgtctgatctttcttttccctctgcaccaaggctctggcctaggttttcccagatcttgcagtttccattctcctggggactaccttcatggttttcccttatctatgagccacctatgctgtcacagattttctgtgtattgactaactttttttacttgggcacattttcttttaaaaggcttctatcactctcaattgaaaagtagtttcacttggcattaatctaaagt

SEQ ID NO: 595475 - DNA, 846 bp, Homo sapiens
cgccggcgggagggagggcgggcggcgcgagtgggcgcgggcccggtggtgccaggctccaggagcacgtgtcagggccaggagacgatggtctccgtgactatgtggtgagtctgtggtcttctctccagggcccccctctcccctagtgccctttatgagccatcttccgagtggatcctgttctttacggcaagccgcgctattcctcctggacctgccgtcctgttatgccgtgatgtctgtaggtactaataggattcagaagagcatgctgctggatctcaataaggagataatgaatgagctgggcgtgaccgtggctgggtgacatcatcgaccattctcaagcatgccagatagatggtgcaccgtcaggacatgtggcaaagttgccactgagtcagtaccctgcagccctagcccccttgacacggcgtaagattctgccgtggtcaccagtgctgcctcccgagatgatcatccaacagcgctgtaaccatgactctccaccgcagtcagaccccccaggcgcccggacactcagacactctccaagatctcggtcactgtgtccaacaagatggcagcaaagagtgccaaggccactgcaagctcctggcccgccggcgagtgacgtgagtagctctggctgttcctgccaaggcggagtccgggtcctgctgctgagtatgcgcgggggcacgtctcgtcttcgacatgccctaaggtctcgacaccccgttacccgtcgagatcctgcgagcatgcagcgggctgccaaaggtctccataggacgtctgtgttttgaccgctcgggccgaggaccaaggcagactccacgg

SEQ ID NO: 595476 - DNA, 306 bp, Homo sapiens
atattagaaaggctaaaccgactgactatattgaccttcacaaaaataaaaaactgaatctaagagggtccaaaggagggagcagttccataaattatggtcacattattcagattattaagcaacctttaaaacattatttgtccaggttatgtaggacagtgtttatgatgtgattcttggagacacagccgagctcaggagcatccccacatccagcacagggcatggtggcctgggggtaggggcagaggaatagggaacatcaaaaaatgaatcatttaagaaacaccggctgggtgtggt

SEQ ID NO: 595477 - DNA, 120 bp, Homo sapiens
ataatgttttaataacaactgtgggataaaagttattttccccttggaaagactaatgagcccaatgatattaatcccttttatggtgaataataaatgccataattgcctcatgggtga

SEQ ID NO: 595478 - DNA, 954 bp, Homo sapiens
  misc_feature (552)..(552): n is a, c, g, or t
caggcgcccataagcgtgctccggcgccaagaggtccccctgggggagacacccccggtggggaagattcgcccaggaatcctcaggcctgtgggaaagaacaccttatgtggagtctcccccccacgtgataggagcaccaaagacgagcgttttttttctcggagcacatcaccgttgctcagagcgtgtttaagagcccccactgttctccccccgcccctgtaagagatttattctccctgttgggggtgtggttgctccctcgggggggggacacccagccctcggcccacgctcgttgtatcggagagggccttatataggcccccgttgggaaataattcctcccccaccaacttggtgagcacttcttgagagggcccccttgtaaaaatagaggcggtccaccacacagagatggtagtaagaaatgactgttgggttccacacagagaagccttgtgccccacagagaagttatatgagatgcgcgtctttttgggccctctacagagggttcctttctgagcgtcccacgcacgatttccncaccgggattcctcgggacccacaggtgtgtataatataaaggcacaggagaagtttcactggtgtccctcgcttcaacaccaccacacgagaacacactggtgggcccacaaagtggaattgaaggttgtaagtgccacccactgccagtgtccccacatgaaaggaaaggttgttaaaagtgtctggcctgtgaagctcgttgggttgtcacacgttgtaagaatgtcaccgaacgatgagcttgtgtatacacattcacctggctgtctcacatttttggtgtccttgctccagaaaaaactggccagaatgtccgggcccttatatatccagacccccctgggccaacccccgcgcctatatttaggccaccatttgaattaattttattaccccgta

SEQ ID NO: 595479 - DNA, 718 bp, Homo sapiens
gagctccaccctgtttagggggtgcaggcaccatggagattgaacgcccgctacgagaccccagttcaccctgacagacacagatgccacgacataccgaccagaatgtctacatcccaggcagcaatgccacacatgaccatacgcagacgtggacaagcggagatggcaaggcccacagacagagtggacaatggcaacaagaagaagtcgggcaagaaggagaagaagtaacatggaggccaggccaagagccacagggcggacctctccccaaccagcccagcttctccttacctgcacccaggacctcagagtttcagggactaaacccccaggaaatactaggtagagggaccaaaggacaatgcatcccccatttgggaaaaccaagacaagcaaagttgccacaggtaccagaaaacacttaaaccacatttacacacaccaccagaggggcgatttggaacattcctttgcccaccaacaggccaagatatcccaggacatgtgggggataaaacccacaacacaaattccccaaaatttcaacaaccatgagccagttggttaaaccccacaatttgcgagggggggaattaaggaatcgcgaggagactataacagtggattcaggaacacacaaccaaaaaggaacacccaagatgttgaccaaacaacacccgcaggactttatacggtatatcacaaggacttg

SEQ ID NO: 595480 - DNA, 766 bp, Homo sapiens
ggtcgggccgtggagcgcatggaagccaggagctctgatgaaggcactggggtaaagtgaatgccgaagaagaagacttggatgatacaacaaactgattttcttgttggaatacacgtaatgaaccctttctgcgaagcatgtctacaagctcgtgtacggcaacaacgcatctggcaaggtgacgagaagacatcacacaggggacgtgaaaaaccaagtccctccacgaaactcgcacaaaacgcaacacaaggtgcctatctattaccacaaaatatgatttgcccattaaactcaagcgctacatcatcctgcccgcagtagacgcccaaggtacaaaccaaacaatggggacccgcattgacgtatccttaataggaaaccccatatcctaccctgggacataacacatcctcatttcatgtgccagaaaatacaacccttcaggaaatagacgaaacggacacgaacgttaaccaaggagcggaatcctacaatggttgacaaggcccaattcactaaatacaggctacgtgcacaaataaaacggtagcgactacggggcccgatacatacattacattccacgcgcacatgggaccctctacacacacgacaggcgaggacattacaaacgattacatacgaggatttcaaaaattcccatgaactacacttatcccacaaacaggcgcgacgtgacgcacgacccaggacagctccaacaatcaccagcgaattaaaaccacagcctagatgcacc

SEQ ID NO: 595481 - DNA, 1004 bp, Homo sapiens
ggcggcggcggagcggcggacagcagggcggaggctggaggcagcaagctcgctagagagggagaaggcagtcgggcgcaggcgcctcctccgcagcccgctccatggtacggagcccacagaccgcggcggcctgtctatgcgctccacttccttcacatcctcctccgcctcctcgttttcaggcgccgccggcggcgctgtgtggaggcccgcgagctgaaattcgcggtgcgacgggcagggagtggcagaaggcaggtgagggggcccaggatcgcggggcgccctgaggcaacggggacgccggcgggccgaagcgcagcccgacgcccgcaggctcggctccgccattggccgcaccatcccggtactcctcgcctcggccgccgaggggagggagacgaatgagcccggggacccgccgggggaacgggcccgggccaggcccggggatctagacggccgaagggggaagggagccgaccttccccaaaggcgccttatccggaactgccgtggaactcagaggacgctggtcgccgggcctcactaggggcttggtgctggaaaagggtatggaccccttgcgcatttggtgccacgacacatcacaggtcgcacgcaaaaactggtccaataagagacccccattggccaacgggttgaattggaaccgagaccactggaaaacccatcacgttcaccatggaacgatggggcggtcaagaaaggtaaacatctacgaaacccagccggctaccagcgagcccacggtagtcagaaaactgctaattagcctccttggtgcagaattgaacaaacctcacattccggaaatcttaaaggacctggttggaaaaacattcgggcaagggggaatttccgcaaaagttaaaatggcacaggatttatccttaccgggcagagaggtggcataaagaaataatggaaaaactcagtttgaatcaaaaggttaacaaagttctgcaagaagtagatac

SEQ ID NO: 595482 - DNA, 1384 bp, Homo sapiens
  misc_feature (928)..(928): n is a, c, g, or t
ctagattctgatttagagtgagagacttgagattcttccttttacttgaacacttagaggccatgtagggttatcattaactgaccttatttcaatattaaattgaaatgtctcagggaatagggagccgagaagagacggagagaaacaggggaacagcctgtggtggtgctgtcagaacacacacatttatgattaagtttggcattttgtatcggcgtgatttgtggttacccaaaatgattacaacagtaacattaaataacactgatcacatatcattaaaattgatataatagtaataataaattttgaaatgttgcaagaattacacagagacatgaagtgagcacatgtcattgaaaaaaaatgacaccaatagacttgctggaggcggggttgccacaaacctttagttgtaaaaacacagtattggataagtgcaatatctgggaggcacagtaaaaataggtttgcccatacctccaatgccccagtgttttcaacactgaagtctttattaaaggaatttatagtctgcttaaaacttgatcatttcttcactttagtttattacggcaagggaagaagaattaaaagtgttctggcagtaatgttgaaaagtcacaattttaaacatttctactatgagaggtcccatgtgattaatgttgttaaaaaactatcaatttttttaaattaatttatttttccccaatgaaagaattttcatttattttatagtattttaatgttatttaacataaatttataatttttgagtgtgaatgtatgtatacttacatgttacatagacaatttacaatttatttttctatgcagtatttgttcatagctctagcatatttctgttttttttaattctagcttgagaagctcatatatattttacgggattatggctttngcaaaatatttctcaggggggggggctcgtgtctttatcaccacgcagattatggttggattcttttctttaattacaaacaaacatgggtatattggatcaaaacaaaaacaaaacaacaaccacaaacacacaacagtcaaacaaccacccccaaccaagggggggggcgcggtactaagaaatttcctccgagggggagagccaaaatttgtggccggtgaacccacggatgttgcgttggtcaaacaacggcgcggcccccaatgaggaaacgaccgatcataataacaagaaagaaccgggcgcccgagtcataaaaacgcgcgggcaggtggggaacaccgtccatcgcggtatctgggaggaagagcaacccccatcgggcggggggaacgggggaaaccaccccagagaatgtaaccccagggaaaacaacctcagaggtcaagtgcg

SEQ ID NO: 595483 - DNA, 314 bp, Homo sapiens
atttgctatatcaaggtcagatgaaagcgttttttgagggccaggcggtggctcatgcctgtaatcccaaactctttgggagtggcgaggtggacggatcacttgaggtcaggagttcgagaccagcctgaccaacatgttaaaaccccatcctactattcataaaaatacaaaaatcagcccgacctggtggcacatgcctgtagtcccagctactcacaaggctgaggcaggacaatcacttgaaccaaggaggcagaggttgcagtgagcagacatcgcaccactgcactccagcctgggcaatcaagctt

SEQ ID NO: 595484 - DNA, 387 bp, Homo sapiens
ccaatcactaccatctctgaaaataccatgttatcatctactggacttcaattgctacttcctattgtgatgtgaaggacacgaagacaggtgacatagagctggctatcctcatatgtgtctcaatcttggtcctatgccccttcccctagtcattctgtgaccactcttcacatgaatcagatatgtcattcatactgtcatatggaacacaggcttcttttcttctttccttgtcaactgaaactgtaatttattgttcatacaaactaatagagggtagtagtacagatgaaaccaagtagatttttcatatggtcaatattgtttccatttctaagggcataatagctgatcatttagaagtatcacttgtggttgattggg

SEQ ID NO: 595485 - DNA, 270 bp, Homo sapiens
accctgcggggctagcggcgggcgcttctgaggggcacggttcagacaactcagtggagcatgcagattacagagccaaactctcacagatcagactaatctaccatacggagctggagaaatacgagcaggcctgccaacgagttcaccacccacgttatgaatctctctgcgagagcaaagccggatctcaggcccatctctcctaaggacattgagcgcatagtcagtatcatccaccaagcgccacaccaagagccccaccaatag

SEQ ID NO: 595486 - DNA, 847 bp, Homo sapiens
  misc_feature (57)..(57): n is a, c, g, or t
  misc_feature (81)..(83): n is a, c, g, or t
  misc_feature (177)..(177): n is a, c, g, or t
  misc_feature (180)..(180): n is a, c, g, or t
  misc_feature (196)..(196): n is a, c, g, or t
  misc_feature (230)..(230): n is a, c, g, or t
  misc_feature (238)..(238): n is a, c, g, or t
  misc_feature (246)..(246): n is a, c, g, or t
  misc_feature (337)..(337): n is a, c, g, or t
  misc_feature (454)..(454): n is a, c, g, or t
  misc_feature (459)..(459): n is a, c, g, or t
  misc_feature (524)..(524): n is a, c, g, or t
  misc_feature (553)..(553): n is a, c, g, or t
  misc_feature (556)..(556): n is a, c, g, or t
  misc_feature (563)..(564): n is a, c, g, or t
  misc_feature (621)..(621): n is a, c, g, or t
  misc_feature (698)..(698): n is a, c, g, or t
  misc_feature (777)..(777): n is a, c, g, or t
  misc_feature (838)..(838): n is a, c, g, or t
tgtataagagatcttttttaaaaagtttttaaaataaaattcaaaaatataaatatnttgatattaattgcacctaatggnnnattctttttttgtatttgctttcgcaggcaaaatctacagatatatctgagggaagataacataacttttggaaaataacactgcttatacctntgnacatttcaacagttcnaaaactcacatataccatttaatcgattaaaatntaacatgnattcaatntgtaaagaaaagccaaataaatccttattaaaagttttgacggctgggtgcagtggctcacgcctgtaatcccagtcctttgggagaccgnggcgggtggttcacctgaggtcaggagttctagttcagcctgttttacatggtgaaatcccatctcttctaaattcaaaaaaaaaaatttgctgggtgtggtggcattcgcgggttntcccngctacttgggaggctggggcaggggaatcgcttgacctcagggggtatcggttgcggtgagccgngattgcgccattgcactccagcctgggcnacnagggcgnnactcttcttcttcgatttccattgtttcctgatggtcttgttatctgagtgggcacnatttgacggtgggcagttcccatgagtagcataaggcacaagggtccaagtacttcacttatgttcacaataggcancatcaaatataagacaattgctataacttgcatgaaataaagtagtaacagccaaacaaagattcttaaagaggtgacntgaatccaccaaattgctgaacaatgggaaaaatacaactcgaacaagccccttccgagtnagagatgtc

SEQ ID NO: 595487 - DNA, 252 bp, Homo sapiens
ggggggggcccggggggggttttttttccccccccccctttcccagggccccccccttggggcaaacccttcctttggggccgggggggggggggggggggggggggggggccttggggggggggggggcccccccccccccaaggggccccccccggggggggggggggggccgggccccttttttaaaaaaaggggccgggggggggacccctttgggggggggggaaaagccccctttttttttttcca

SEQ ID NO: 595488 - DNA, 121 bp, Homo sapiens
ggggccgggggggaaaaaaaggggggggggggttcccttggggcgggggccccccggtttggggggggccctttttttgggaccctggggaataccccccccttttggggggtttttttta

SEQ ID NO: 595489 - DNA, 716 bp, Homo sapiens
  misc_feature (124)..(124): n is a, c, g, or t
  misc_feature (132)..(132): n is a, c, g, or t
  misc_feature (136)..(136): n is a, c, g, or t
  misc_feature (138)..(138): n is a, c, g, or t
  misc_feature (141)..(141): n is a, c, g, or t
  misc_feature (143)..(143): n is a, c, g, or t
  misc_feature (146)..(146): n is a, c, g, or t
  misc_feature (158)..(158): n is a, c, g, or t
  misc_feature (166)..(166): n is a, c, g, or t
  misc_feature (179)..(180): n is a, c, g, or t
  misc_feature (182)..(182): n is a, c, g, or t
  misc_feature (184)..(184): n is a, c, g, or t
  misc_feature (196)..(197): n is a, c, g, or t
  misc_feature (199)..(199): n is a, c, g, or t
  misc_feature (205)..(205): n is a, c, g, or t
  misc_feature (207)..(207): n is a, c, g, or t
  misc_feature (209)..(209): n is a, c, g, or t
  misc_feature (217)..(217): n is a, c, g, or t
  misc_feature (222)..(222): n is a, c, g, or t
  misc_feature (267)..(267): n is a, c, g, or t
  misc_feature (275)..(275): n is a, c, g, or t
  misc_feature (277)..(277): n is a, c, g, or t
  misc_feature (283)..(283): n is a, c, g, or t
  misc_feature (294)..(294): n is a, c, g, or t
  misc_feature (313)..(313): n is a, c, g, or t
  misc_feature (326)..(326): n is a, c, g, or t
  misc_feature (386)..(386): n is a, c, g, or t
  misc_feature (404)..(404): n is a, c, g, or t
  misc_feature (419)..(419): n is a, c, g, or t
  misc_feature (425)..(425): n is a, c, g, or t
  misc_feature (475)..(475): n is a, c, g, or t
  misc_feature (480)..(480): n is a, c, g, or t
  misc_feature (554)..(554): n is a, c, g, or t
  misc_feature (574)..(574): n is a, c, g, or t
  misc_feature (593)..(593): n is a, c, g, or t
  misc_feature (621)..(621): n is a, c, g, or t
  misc_feature (630)..(630): n is a, c, g, or t
  misc_feature (648)..(648): n is a, c, g, or t
  misc_feature (669)..(669): n is a, c, g, or t
  misc_feature (680)..(680): n is a, c, g, or t
  misc_feature (687)..(687): n is a, c, g, or t
cgacaatgattgcaccaggttgttttgaggctttagtgccccagcaactgaggcacgcaccccaaaaggccagaacacctgggatgtggtttttaagggttgttttttaccgtcagaagtcaangaatcttnttcncncancnacncaaagggctggnaatgagtnattattatctcanngngnatgtttcttgcnnanccttgnananttttgatngaccnctgggatgttattaaagcctaacgttccttctattctcacaaatnttcgttangnctcagnaggatcattanctctggtatctgtttgttngcttgtatggcancaataagcagatttcttctttctaatctatggattagtatagaccaggagaaggctaatncagagactatgaaacggnaataagtttttttancgatanggcaaaattgtgactctgaaagatcattcatgtatattctaaaattaccncagtnataaaaagtcttggactttcatgaggaaatagcatagctagatatgaaaaaatatagaaaatcttcatcaatgnaactattcttggggtagacnctaatcatatgaaaagacnaatgctcattccctaagatagcctgaanctcatttanaatgtagaaaaccccttnttagtaaagagacatcttctncagtaaccacngagaagnagtggaagtttttcatctccttttttatt

SEQ ID NO: 595490 - DNA, 710 bp, Homo sapiens
  misc_feature (118)..(118): n is a, c, g, or t
  misc_feature (126)..(126): n is a, c, g, or t
  misc_feature (130)..(130): n is a, c, g, or t
  misc_feature (132)..(132): n is a, c, g, or t
  misc_feature (135)..(135): n is a, c, g, or t
  misc_feature (137)..(137): n is a, c, g, or t
  misc_feature (140)..(140): n is a, c, g, or t
  misc_feature (152)..(152): n is a, c, g, or t
  misc_feature (160)..(160): n is a, c, g, or t
  misc_feature (173)..(174): n is a, c, g, or t
  misc_feature (176)..(176): n is a, c, g, or t
  misc_feature (178)..(178): n is a, c, g, or t
  misc_feature (190)..(191): n is a, c, g, or t
  misc_feature (193)..(193): n is a, c, g, or t
  misc_feature (199)..(199): n is a, c, g, or t
  misc_feature (201)..(201): n is a, c, g, or t
  misc_feature (203)..(203): n is a, c, g, or t
  misc_feature (211)..(211): n is a, c, g, or t
  misc_feature (216)..(216): n is a, c, g, or t
  misc_feature (261)..(261): n is a, c, g, or t
  misc_feature (269)..(269): n is a, c, g, or t
  misc_feature (271)..(271): n is a, c, g, or t
  misc_feature (277)..(277): n is a, c, g, or t
  misc_feature (288)..(288): n is a, c, g, or t
  misc_feature (307)..(307): n is a, c, g, or t
  misc_feature (320)..(320): n is a, c, g, or t
  misc_feature (380)..(380): n is a, c, g, or t
  misc_feature (398)..(398): n is a, c, g, or t
  misc_feature (413)..(413): n is a, c, g, or t
  misc_feature (419)..(419): n is a, c, g, or t
  misc_feature (469)..(469): n is a, c, g, or t
  misc_feature (474)..(474): n is a, c, g, or t
  misc_feature (548)..(548): n is a, c, g, or t
  misc_feature (568)..(568): n is a, c, g, or t
  misc_feature (587)..(587): n is a, c, g, or t
  misc_feature (615)..(615): n is a, c, g, or t
  misc_feature (624)..(624): n is a, c, g, or t
  misc_feature (642)..(642): n is a, c, g, or t
  misc_feature (663)..(663): n is a, c, g, or t
  misc_feature (674)..(674): n is a, c, g, or t
  misc_feature (681)..(681): n is a, c, g, or t
cggccagttttccaaagctttgtatgagcctttagtgttccaccattttagccaccatcccaagagccaagaacccggggggtgggtttcagtggtggttccccccacaagagtcaangaatcttnttcncncancnacncaaagggctggnaatgagtnattattatctcanngngnatgtttcttgcnnanccttgnananttttgatngaccnctgggatgttattaaagcctaacgttccttctattctcacaaatnttcgttangnctcagnaggatcattanctctggtatctgtttgttngcttgtatggcancaataagcagatttcttctttctaatctatggattagtatagaccaggagaaggctaatncagagactatgaaacggnaataagtttttttancgatanggcaaaattgtgactctgaaagatcattcatgtatattctaaaattaccncagtnataaaaagtcttggactttcatgaggaaatagcatagctagatatgaaaaaatatagaaaatcttcatcaatgnaactattcttggggtagacnctaatcatatgaaaagacnaatgctcattccctaagatagcctgaanctcatttanaatgtagaaaaccccttnttagtaaagagacatcttctncagtaaccacngagaagnagtggaagtttttcatctccttttttatt

SEQ ID NO: 595491 - DNA, 199 bp, Homo sapiens
ggatcgagctcggtacctgaaattcgtgtcccagagccttagatagagaggactctatcctccttcagtttctggggttacatgagggaaacaggtgtttttcctagaatggggtctgtgacgcctcctctgtttttccccaggagtcccaggctgttagtaattatcttaggttctctcatgtggacacgaatgttca

SEQ ID NO: 595492 - DNA, 190 bp, Homo sapiens
gtattcgctgacccgtctgacgaccgtgggatttcccagtgcggggaagatggtcgttttgccaggaatgcctcctggtcggggtgtgctcccagtgcctccatctcgaagagattattatgacttgagccctcgtcgagaaccatctccccctcctcccggactagtcggccgggatggtagccgagct

SEQ ID NO: 595493 - DNA, 332 bp, Homo sapiens
ggcacgaggggaggatttccccacaggacccacgcacctccctgtatctgcgcacttcgctcgtgtggctggaacgctgtcgataagcttcacgcactggcttgcatctcttcagctctaggacttgtagctttaagcaaacggtgtggcatgggttgagtgtggccacctgcaggatgtgcatgggttgagtgtggccacctgcaggatgtgcagggctgcctcagaagctggctggggactctagcctctgtgttcataaagacattaagaagtggatggatgttgttccttttttgaagttgtcattaaagtaggtgcaacaaccaaga

SEQ ID NO: 595494 - DNA, 97 bp, Homo sapiens
  misc_feature (44)..(44): n is a, c, g, or t
tcaagcttctaacgatgtacggggacatggagccatagaaaggnctatggattgtttaagaactattttaaagtgttccagacccaaaaaaaaaaaa

SEQ ID NO: 595495 - DNA, 144 bp, Homo sapiens
tatctgcagcttctcacaccgtgtcaggtaccaggcagtgcgagctggtagggtgatctcgtcaggtctgcatctcttcagctcttcgggcgaggtcaggcggtcagcttcagcaggatctgcactgtcatggctgtgcactcc

SEQ ID NO: 595496 - DNA, 1116 bp, Homo sapiens
gctggtgaagaggacccgtcgccatgggccgagtgattccgtggacagtaggaggggcgccgggtctgtgttccgcgacgcacgtgaagcaccgtaaaggcgctgagcggcctgcgagcgccgtggactttctagctgagcggtgacgagctacaatcaagagggagcagtccgtcaaccggacgagtcgatccacagacaccgagagcacagcagagctgcgtcctccctcgccaaaggttgtgtcattcctggagactcgcgtagttccggtctaaggaaaagcagtgacggagggcatgttcgattgctcggctctgatgggtcgattcacctacaggcgccacagtattgtagtaattgcggagcaaggaagggccactcagcgtcgaaactagttatgcgcgacatgatgcgtcacctgtgtcgaggcacacagtgccgtggagcggtcacaactccgttgttgcattgcactggagagcggagaaaggccttggggaggagcccgtagggcataagctggtgcgccgtgcgcgatcaagggaagagctagttgccacacgttatatctcacgcacaatccgactgtagaatcagagaacgagcccggtgggtggaacgtctgacccattccggagctccatgaagacaggtatagtactcacgtccaggcgcaagcgaggagactggtgggtcgagtcgtgtgatggcttggaacggttggcgcgacattgacctaagaccacagtccttgagaggtctgagcctggggcggtaccgacaagatattaagtgcagaagaaggaacgtgctgtggccatcgaagtactggggtgtgtgtgccagtgtaatccttgtgggagcaatcctttttgggagtgtggcataccaacaagcacatctggctaagcccttctcacagtccgaagaagattgccccctgttggcccgaaaagtgggtctcattagtgaccgccggactggacgtctccggggaaccagactgtgcagcgacaaagagaactaattggtgaggcctcaataaagtcgggtttattgcaaaaaaaatgaaacctaatcaaaatcccggagcaaattgggggggaaaaaacg

SEQ ID NO: 595497 - DNA, 382 bp, Homo sapiens
  misc_feature (246)..(246): n is a, c, g, or t
tgggactacaggcatgtccatcatgcctagctattttttattttgtagaaataaggttttgccatgttgcccaggctagtcttgaattccgtgggcccaagtggtcctcttgccttggcctcccaaagttctaggattacaggcatgagccactgtgtccagccatgtatctcgactttactaatgtcaatttcctggttttgatattttactaaattttgcaaaattactaaattttcccattgnggaaaactgggtacaaggtatgagggatcattcttttattatatcttttaaaattttaatgggaaccggacggtagcactgtggcccaggaaaaaaggaaggggaacaattagggaagcgaggaaaacccaacccc

SEQ ID NO: 595498 - DNA, 986 bp, Homo sapiens
  misc_feature (206)..(206): n is a, c, g, or t
  misc_feature (232)..(232): n is a, c, g, or t
  misc_feature (235)..(236): n is a, c, g, or t
  misc_feature (244)..(244): n is a, c, g, or t
  misc_feature (247)..(247): n is a, c, g, or t
  misc_feature (252)..(252): n is a, c, g, or t
  misc_feature (277)..(277): n is a, c, g, or t
  misc_feature (282)..(282): n is a, c, g, or t
  misc_feature (290)..(290): n is a, c, g, or t
  misc_feature (354)..(354): n is a, c, g, or t
tatgggaagggggtgttacccaataccattgctgggcaataggtatttatatttgccgagtgtttttttgcctggacccaccgtgtgccggctttcttcagaccttctctctggcccggctctgcacaaggctgaaacgggtgagcgaatccatagataggccactcctggctggccggagctatacaagcgattacacagtcaanctgcccaccctactactggggactgncanntgtaactntcnggacncagtttccccatgcaactgggggcngcctnaaagagtnaaaagataataatatcaatcattaagcttttatggcacataagtggtcaataaacaggcattanttctacttctgagggaccacaggaagcccatcagttgtcttttccactcagtcaggaagctgaaccttttttgctttggctttcaggctcataaaggactcagtgcagcatttacagaccctgacgcaatccggagctgaccagcacgaggcttggaaccagaccactgtcatacacctccaggctgctaaggtgagcgcctgccagctgaagctgaaagggatccattttgcttcccaggcaggctaccctgctgggaaaatccgggctctgccattattccccaactctgcttcagtggcggctgccctcatttcacttccaaggctttagtccagggtattttaattaaaggacttaactccaagcaatcttgctggcagctcttaggggaaaaggtaatgaggcagtgttattggatttgcttcaggttgttcaaatatttcctcccagatagaaaagcaggtcaagtctccccttagccccacaggcaatccttggatgtctgattccatttccactcgttttgtgtttctgcataattcacagtcggtcggcaaatatttgagcacccactctgcctgggcactgacctgggtgctcaacagtgaagccactgcccatgcacggct

SEQ ID NO: 595499 - DNA, 730 bp, Homo sapiens
  misc_feature (629)..(629): n is a, c, g, or t
  misc_feature (655)..(655): n is a, c, g, or t
ggtatgtctagtctggatcccttttgttgtaattggttgtgttgctaccactccctccaccccacagcacagaatagcaagggctgcctgaaccctctgtgaacactcagctcggccatttcacttcatacctcagcttcctcagctacaaaatgggtgtggcagaagtggcctttcagtgtggtgtggagggtgaaatgcagtaaggcacattaagtcctcagcccagggtcctttcctctggcaagctcacagcgccctcgcctggcctgggcttcagaatctgggcacatgtggcagtaaggctcataaaggactcagtgcagcatttacagaccctgacgcaatccggagctgaccagcacgaggcttggaaccagaccactgtcatacacctccaggctgctaaggtgcactgctactatgtcactgtgaagggttttacagaagctctggagaaactagaaaatgaaccagcgattcagcaggtgctcaagcgcctctgtgacctccatgccatacatggaatcttgactaactcgggtgactttctccatgacgccttcctgtctggtgcccaagtggacatggcaagaacagcctacctggacctgctccgcctgatccgnaggatgcaaccttgtaactgatgctntgacttaacggacagtgtttcagcacttgctgtatgagggaacgctacaacgccggtccagggcttatcggtggc

SEQ ID NO: 595500 - DNA, 831 bp, Homo sapiens
cagagaatctctttgtgaagatgtgaatcatagtgtgtcatggctctccaagagaaggaggtggatggcctggaccgcacagttggtgcaattcgaggccgggcacgcccgggtcattcacgtagtcacctcacacgatggacaaactatgagaccagagagtactagcaacagatgcaatggtatcgtaggcaatgcgcatctatacgacgtagttactccaacaacagtctatgccaggttatcactcgaggcaaggtacgaagcgaggcgtgtgagagccctcatgctcgagaccctgtcctcgagacccatggatgaggaatgaagtattatcgatgacttcaccgaccgtggatatagtgaatggggatccgggacatcaggaagaagcagtgcgtgattgtataagggacgcccatgaggaggtagtgatgacgtcatgacatttgagacagaagattgagatgtcagaagcaggacgagctgttcgaggacagaaagacgatcagcatgatagctggcctatagttgcccggggcgactcagtggactcagacttccccaggagtgcgaaaaatgcgaagagtcgcggagacaggtggtccagctttccagtgaagagaagagctaagcgtggatgtgctgaacgtgtccaaatgggacgacagatgagcaatgacagtcatagtgctggccaagtcggatgtgcatgattgatgatgggagatgtacagcagcttttacccgagcgtaggaggaccatcttcaccaaatacatcggatgctcagtcagtgctgtgcaagaaagtggcctgaggcaggaatcca

SEQ ID NO: 595501 - DNA, 135 bp, Homo sapiens
aacccactccaccttactaccagacaaccttagctaaaccctttaccccaataaagtataggcgatagaaattgaaccctccgcccaatagatataggtacaccaagggaaagatggaaaatttataccacccga

SEQ ID NO: 595502 - DNA, 364 bp, Homo sapiens
taggaaggttagatgaacaggaagagagaagatcttatgacaaggatgcaaactagtaagctgccagatcttcaggcatgtgtaggccgaaagccagagattgcgggttggtccttttatcattagtgctctccagctgcttgggagttgtaactcttacaaatcagtgaatatggtcttcttatcttttcactgtgaattttaactcaattttaacctgataaaactaggatcccatatatacatgatgttgatgaatcaaccctccaaatatgactaactgcctgaggccccgatcagaataaccagaccccttagacatctgtactgtaacgacagatttgggccgggcgcggtggctcac

SEQ ID NO: 595503 - DNA, 2468 bp, Homo sapiens
aagagagggaggaaggagaggagctccataagcccagacaagggcttgagagcagacaagggcttgagagcagacaagggcttgagagctggccaagcagtttctctcagcttctgtgttccagcccctctgtgggaggagagaagggcaggaccacaagcctgccagaggctgcggcctacagccggggagaggccagcccggcctacagtgcggacacaggacagaggggagccaggttctttgcactgaccaatgctgagagcagaccctcggagcagccgggttggaagtgtctctccacagtcaccagacagatccaggataggatgggcagcccagtgcaccgagtgtcattgggggatacctggagcaggcaaatgcaccccgacatagagagcgagaggtatatgcagtcctttgacgtggaacggctcaccaacatccttgatggaggtgcccagaacactgcactccgcaggaaagttgagagcatcatccacagttacccggagtttagctgtaaggacaattatttcatgacccagaatgagcgttataaggctgccatgcggagggcattccacatccggttgatagctcggcgcctgggttggttagaagatggtcgtgaattaggctacgcttacagagccctttctggagacgtggccttaaatatacacagagtcttcgtgagagccctcaggagcctgggctcagaggagcagattgccaaatgggacccactctgcaaaaacatccagatcatcgcaacgtatgcacagacagagttgggacatgggacatatcttcagggcctggagactgaagccacctatgacgcagccacccaggagtttgtgatacacagccccacgctgactgccaccaaatggtggcctggagacttgggacggtcagccacccatgccctggtccaggcccagctgatctgctcaggagccaggcggggcatgcacgcttttattgtgccaatccggagtcttcaggaccacaccccactgccaggaatcatcattggggacatcggacccaagatggactttgatcaaacagacaatggcttcctgcagctgaaccatgtgcgggtccccagggagaacatgctgagtcgctttgcacaggtcttgccagatggcacctacgtcaaactcggtacagcacagagcaactaccttcccatggtggtggtgcgggtggagctgctgtcaggggagatcctccctatactgcagaaggcctgtgtcatcgccatgcgctactcggtcatccgccgccaatcccggctccggcccagtgacccagaggcaaaggtcctggactaccagacacaacagcagaaactctttcctcagctggccatcagttatgccttccatttcctggcagtcagcctcttggagttcttccagcactcctacactgccattctgaaccaagacttcagcttcctgcctgagctccacgcactgagcacgggcatgaaggccatgatgtcagaattctgcacccagggagctgagatgtgccgcagggcctgtggcggacatggctactcaaagctgagtggcctgccatcactggtcaccaaattgtcggcctcctgtacctacgagggtgagaacacagtgctctacctgcaggtggccaggttcctggtgaagagctacctgcagactcagatgtcccctggctccacgccacagagatctctctctccatctgtcgcatatctcaccgcacctgacctggccaggtgtccagcccagagggcagccgacttcctctgcccggagctctacaccacggcctgggcacatgtggcagtaaggctcataaaggactcagtgcagcatttacagaccctgacgcaatccggagctgaccagcacgaggcttggaaccagaccactgtcatacacctccaggctgctaaggtgcactgctactatgtcactgtgaagggttttacagaagctctggagaaactagaaaatgaaccagcgattcagcaggtgctcaagcgcctctgtgacctccatgccatacatggaatcttgactaactcgggtgactttctccatgacgccttcctgtctggtgcccaagtggacatggcaagaacagcctacctggacctgctccgcctgatccggaaggatgccatcctgttaactgatgcttttgacttcaccgatcagtgtttaaattcagcacttggctgttatgatggaaacgtctacgaacgcctgttccagtgggctcagaagtcaccaaccaatactcaggagaaccctgcctatgaggaatatataagaccacttttacaaagttggagatccaagctatgaaataaccaacagtattcaagaagcaaccagcaccatcatgtgataatggtactatggcatatatgcaacattaaaattttaaattagatattt

SEQ ID NO: 595504 - DNA, 299 bp, Homo sapiens
  misc_feature (266)..(266): n is a, c, g, or t
ggggcagccaggttcttccctggctggtgttgtgggctccagagtgaccttacctacaaaatactcctttgcaattataagttgtgggtcaggaatcttcgttccatgtgtggcagtgaggctgtcggactgccgtgtgacctgatgagctcatgttggctggtcccatgtgttgacatgggactctctcggggaaaccaaggtcccagacgcgtctgcgcgacttcaccccggtgctccaacgaggttggtgagcaggagcccangtgcatgcacgctgagtggccaactaggggtgt

SEQ ID NO: 595505 - DNA, 2512 bp, Homo sapiens
aagagagggaggaaggagaggagctccataagcccagacaagggcttgagagcagacaagggcttgagagcagacaagggcttgagagctggccaagcagtttctctcagcttctgtgttccagcccctctgtgggaggagagaagggcaggaccacaagcctgccagaggctgcggcctacagccggggagaggccagcccggcctacagtgcggacacaggacagaggggagccagccctggctgacacccagtccctaggcagttcctcttgcacacaggttctttgcactgaccaatgctgagagcagaccctcggagcagccgggttggaagtgtctctccacagtcaccagacagatccaggataggatgggcagcccagtgcaccgagtgtcattgggggatacctggagcaggcaaatgcaccccgacatagagagcgagaggtatatgcagtcctttgacgtggaacggctcaccaacatccttgatggaggtgcccagaacactgcactccgcaggaaagttgagagcatcatccacagttacccggagtttagctgtaaggacaattatttcatgacccagaatgagcgttataaggctgccatgcggagggcattccacatccggttgatagctcggcgcctgggttggttagaagatggtcgtgaattaggctacgcttacagagccctttctggagacgtggccttaaatatacacagagtcttcgtgagagccctcaggagcctgggctcagaggagcagattgccaaatgggacccactctgcaaaaacatccagatcatcgcaacgtatgcacagacagagttgggacatgggacatatcttcagggcctggagactgaagccacctatgacgcagccacccaggagtttgtgatacacagccccacgctgactgccaccaaatggtggcctggagacttgggacggtcagccacccatgccctggtccaggcccagctgatctgctcaggagccaggcggggcatgcacgcttttattgtgccaatccggagtcttcaggaccacaccccactgccaggaatcatcattggggacatcggacccaagatggactttgatcaaacagacaatggcttcctgcagctgaaccatgtgcgggtccccagggagaacatgctgagtcgctttgcacaggtcttgccagatggcacctacgtcaaactcggtacagcacagagcaactaccttcccatggtggtggtgcgggtggagctgctgtcaggggagatcctccctatactgcagaaggcctgtgtcatcgccatgcgctactcggtcatccgccgccaatcccggctccggcccagtgacccagaggcaaaggtcctggactaccagacacaacagcagaaactctttcctcagctggccatcagttatgccttccatttcctggcagtcagcctcttggagttcttccagcactcctacactgccattctgaaccaagacttcagcttcctgcctgagctccacgcactgagcacgggcatgaaggccatgatgtcagaattctgcacccagggagctgagatgtgccgcagggcctgtggcggacatggctactcaaagctgagtggcctgccatcactggtcaccaaattgtcggcctcctgtacctacgagggtgagaacacagtgctctacctgcaggtggccaggttcctggtgaagagctacctgcagactcagatgtcccctggctccacgccacagagatctctctctccatctgtcgcatatctcaccgcacctgacctggccaggtgtccagcccagagggcagccgacttcctctgcccggagctctacaccacggcctgggcacatgtggcagtaaggctcataaaggactcagtgcagcatttacagaccctgacgcaatccggagctgaccagcacgaggcttggaaccagaccactgtcatacacctccaggctgctaaggtgcactgctactatgtcactgtgaagggttttacagaagctctggagaaactagaaaatgaaccagcgattcagcaggtgctcaagcgcctctgtgacctccatgccatacatggaatcttgactaactcgggtgactttctccatgacgccttcctgtctggtgcccaagtggacatggcaagaacagcctacctggacctgctccgcctgatccggaaggatgccatcctgttaactgatgcttttgacttcaccgatcagtgtttaaattcagcacttggctgttatgatggaaacgtctacgaacgcctgttccagtgggctcagaagtcaccaaccaatactcaggagaaccctgcctatgaggaatatataagaccacttttacaaagttggagatccaagctatgaaataaccaacagtattcaagaagcaaccagcaccatcatgtgataatggtactatggcatatatgcaacattaaaattttaaattagatattt

SEQ ID NO: 595506 - DNA, 370 bp, Homo sapiens
ttttctgagccagggtctcgctttgtcacccagctggagtgcagtggtgcaatgtcagctcaccacagcctctgcctcctgggttcaagcaattctcgtacctcagcctctcaagtagctgggactacaggtgcctgccacaacacccggctcatttttgtgtttttagcagagactgggcaacatggtgagacctcgtctctacaaaaaataaaaaatgaaccaccaggcatggtggtgcatgcctgtagtcccagctatttgggaggctgaggcaggaggatcacttgagttcaggaggtccaggcagcaatgagctgagattgtgctgctcattccaaactgggtgacagactgaggccatgtctca

SEQ ID NO: 595507 - DNA, 758 bp, Homo sapiens
ttgcgaatggaatttggacctccagaaaatatcaatgtctaatgttaatcctcagcaaacaaaggttttaaaactatgaatttgtgggagaaataatatgactaggaagcaggagcaggggaacctcatatcttattgcgttagttatgggaatcactgatgggctggaagatcacactgggtcagggttcagtgtttggttcttgtttactgaccttgtgagttctcagagcatcagcaagtgatgtgcacgtgtggtacccctgtctgctcaccatatgcttttgttttaggttctcccatggcgccagccagtgtgggcaattgcagtgtgggcaactgcagcccggaggcagtgtggcccaaaactgaacccctggagaatggaagtaccccaggcacctatacagcccttctatagctctccagaaactgtggatcagctctctcccaatgactgacctggacatcaagttccagtgaccgtgggaaggagtacgggccagacttgaccgtgagcaaccctcagggcttggcgactcttctatggggaccttgggtcccatgcctgaccaggaggagctctttggtcccgtcagcctggagcaggtcaattcatcgcaagggtaccggctcaatcgtatctgttagcaaaaccacggcgaaaaaaaacgcgcttaaaaaagggagaaaaaagagataaaaaaaagccaaataagagaaaaaaaagacaacacacggaaaacagagaaagaagg

SEQ ID NO: 595508 - DNA, 1095 bp, Homo sapiens
gacctcagagctgagctgggcatgagtagatgctcagtaagtggtgcacagggttggtccctatggtggaggccccctaacaccgcccaacccccctccatgttctcacagctccacgcactgagcacgggcatgaaggccatgatgtcagaattctgcacccagggagctgagatgtgccgcagggcctgtggcggacatggctactcaaagctgagtggcctgccatcactggtcaccaaattgtcggcctcctgtacctacgagggtgagaacacagtgctctacctgcaggtggccaggttcctggtgaagagctacctgcagactcagatgtcccctggctccacgccacagagatctctctctccatctgtcgcatatctcaccgcacctgacctggccaggtgtccagcccagagggcagccgacttcctctgcccggagctctacaccacggcctgggcacatgtggcagtaaggctcataaaggactcagtgcagcatttacagaccctgacgcaatccggagctgaccagcacgaggcttggaaccagaccactgtcatacacctccaggctgctaaggtgcactgctactatgtcactgtgaagggttttacagaagctctggagaaactagaaaatgaaccagcgattcagcaggtgctcaagcgcctctgtgacctccatgccatacatggaatcttgactaactcgggtgactttctccatgacgccttcctgtctggtgcccaagtggacatggcaagaacagcctacctggacctgctccgcctgatccggaaggatgccatcctgttaactgatgcttttgacttcaccgatcagtgtttaaattcagcacttggctgttatgatggaaacgtctacgaacgcctgttccagtgggctcagaagtcaccaaccaatactcaggagaaccctgcctatgaggaatatataagaccacttttacaaagttggagatccaagctatgaaataaccaacagtattcaagaagcaaccagcaccatcatgtgataatggtactatggcatatatgcaacattaaaattttaaattagatattt

SEQ ID NO: 595509 - DNA, 545 bp, Homo sapiens
ttcagacagagcaaacaaattaagctgacataacagctgtgacaaactggctagcaccggggcccagagagtataagggtgaacatcaagagtcaggagcaggtctcacagggtctcaattttctctcctgtgaaatgaagaagaggacactggctacctggctctcagattccaaggtcacacaaaacgcccagtctcagacccactagaaaaatccatctcttacctatggttggtttgttttacagcctacgcaacatagtgagaccctgtctctatgaaaaatgcaaacaaaaattagctgggtgtggtggcctgcatgtgtagtcccagctacttggtaggcggaggcggaaggatcgctggagcccaggaggcggaggttgcagtgagccatgatggcgccactgcactctagcctggacaacagactaagactctgtctttaaaagaaaaaaaaatttaaaaaataaagcctgagggcacacatgagtctggaacagcatctagtgagtatcaacttggcatgttgatggaagcgtcg

SEQ ID NO: 595510 - DNA, 2284 bp, Homo sapiens
aagagagggaggaaggagaggagctccataagcccagacaagggcttgagagcagacaagggcttgagagcagacaagggcttgagagctggccaagcagtttctctcagcttctgtgttccagcccctctgtgggaggagagaagggcaggaccacaagcctgccagaggctgcggcctacagccggggagaggccagcccggcctacagtgcggacacaggacagaggggagccaggttctttgcactgaccaatgctgagagcagaccctcggagcagccgggttggaagtgtctctccacagtcaccagacagatccaggataggatgggcagcccagtgcaccgagtgtcattgggggatacctggagcaggcaaatgcaccccgacatagagagcgagaggtatatgcagtcctttgacgtggaacggctcaccaacatccttgatggaggtgcccagaacactgcactccgcaggaaagttgatccatgaagcaagtgggtgagaagatttgaagagccctttctggagacgtggccttaaatatacacagagtcttcgtgagagccctcaggagcctgggctcagaggagcagattgccaaatgggacccactctgcaatcttcagggcctggagactgaagccacctatgacgcagccacccaggagtttgtgatacacagccccacgctgactgccaccaaatggtggcctggagacttgggacggtcagccacccatgccctggtccaggcccagctgatctgctcaggagccaggcggggcatgcacgcttttattgtgccaatccggagtcttcaggaccacaccccactgccaggaatcatcattggggacatcggacccaagatggactttgatcaaacagacaatggcttcctgcagctgaaccatgtgcgggtccccagggagaacatgctgagtcgctttgcacaggtcttgccagatggcacctacgtcaaactcggtacagcacagagcaactaccttcccatggtggtggtgcgggtggagctgctgtcaggggagatcctccctatactgcagaaggcctgtgtcatcgccatgcgctactcggtcatccgccgccaatcccggctccggcccagtgacccagaggcaaaggtcctggactaccagacacaacagcagaaactctttcctcagctggccatcagttatgccttccatttcctggcagtcagcctcttggagttcttccagcactcctacactgccattctgaaccaagacttcagcttcctgcctgagctccacgcactgagcacgggcatgaaggccatgatgtcagaattctgcacccagggagctgagatgtgccgcagggcctgtggcggacatggctactcaaagctgagtggcctgccatcactggtcaccaaattgtcggcctcctgtacctacgagggtgagaacacagtgctctacctgcaggtggccaggttcctggtgaagagctacctgcagactcagatgtcccctggctccacgccacagagatctctctctccatctgtcgcatatctcaccgcacctgacctggccaggtgtccagcccagagggcagccgacttcctctgcccggagctctacaccacggcctgggcacatgtggcagtaaggctcataaaggactcagtgcagcatttacagaccctgacgcaatccggagctgaccagcacgaggcttggaaccagaccactgtcatacacctccaggctgctaaggtgcactgctactatgtcactgtgaagggttttacagaagctctggagaaactagaaaatgaaccagcgattcagcaggtgctcaagcgcctctgtgacctccatgccatacatggaatcttgactaactcgggtgactttctccatgacgccttcctgtctggtgcccaagtggacatggcaagaacagcctacctggacctgctccgcctgatccggaaggatgccatcctgttaactgatgcttttgacttcaccgatcagtgtttaaattcagcacttggctgttatgatggaaacgtctacgaacgcctgttccagtgggctcagaagtcaccaaccaatactcaggagaaccctgcctatgaggaatatataagaccacttttacaaagttggagatccaagctatgaaataaccaacagtattcaagaagcaaccagcaccatcatgtgataatggtactatggcatatatgcaacattaaaattttaaattagatattt

SEQ ID NO: 595511 - DNA, 2500 bp, Homo sapiens
aagagagggaggaaggagaggagctccataagcccagacaagggcttgagagcagacaagggcttgagagcagacaagggcttgagagctggccaagcagtttctctcagcttctgtgttccagcccctctgtgggaggagagaagggcaggaccacaagcctgccagaggctgcggcctacagccggggagaggccagcccggcctacagtgcggacacaggacagaggggagccaggttctttgcactgaccaatgctgagagcagaccctcggagcagccgggttggaagtgtctctccacagtcaccagacagatccaggataggatgggcagcccagtgcaccgagtgtcattgggggatacctggagcaggcaaatgcaccccgacatagagagcgagaggtatatgcagtcctttgacgtggaacggctcaccaacatccttgatggaggtgcccagaacactgcactccgcaggaaagttgatccatgaagcaagtgggtgagaagatttgaaggtgccagaaacctcacccaggtccctaagccctctgttctctgtcctctgcagagagcatcatccacagttacccggagtttagctgtaaggacaattatttcatgacccagaatgagcgttataaggctgccatgcggagggcattccacatccggttgatagctcggcgcctgggttggttagaagatggtcgtgaattaggctacgcttacagagccctttctggagacgtggccttaaatatacacagagtcttcgtgagagccctcaggagcctgggctcagaggagcagattgccaaatgggacccactctgcaatcttcagggcctggagactgaagccacctatgacgcagccacccaggagtttgtgatacacagccccacgctgactgccaccaaatggtggcctggagacttgggacggtcagccacccatgccctggtccaggcccagctgatctgctcaggagccaggcggggcatgcacgcttttattgtgccaatccggagtcttcaggaccacaccccactgccaggaatcatcattggggacatcggacccaagatggactttgatcaaacagacaatggcttcctgcagctgaaccatgtgcgggtccccagggagaacatgctgagtcgctttgcacaggtcttgccagatggcacctacgtcaaactcggtacagcacagagcaactaccttcccatggtggtggtgcgggtggagctgctgtcaggggagatcctccctatactgcagaaggcctgtgtcatcgccatgcgctactcggtcatccgccgccaatcccggctccggcccagtgacccagaggcaaaggtcctggactaccagacacaacagcagaaactctttcctcagctggccatcagttatgccttccatttcctggcagtcagcctcttggagttcttccagcactcctacactgccattctgaaccaagacttcagcttcctgcctgagctccacgcactgagcacgggcatgaaggccatgatgtcagaattctgcacccagggagctgagatgtgccgcagggcctgtggcggacatggctactcaaagctgagtggcctgccatcactggtcaccaaattgtcggcctcctgtacctacgagggtgagaacacagtgctctacctgcaggtggccaggttcctggtgaagagctacctgcagactcagatgtcccctggctccacgccacagagatctctctctccatctgtcgcatatctcaccgcacctgacctggccaggtgtccagcccagagggcagccgacttcctctgcccggagctctacaccacggcctgggcacatgtggcagtaaggctcataaaggactcagtgcagcatttacagaccctgacgcaatccggagctgaccagcacgaggcttggaaccagaccactgtcatacacctccaggctgctaaggtgcactgctactatgtcactgtgaagggttttacagaagctctggagaaactagaaaatgaaccagcgattcagcaggtgctcaagcgcctctgtgacctccatgccatacatggaatcttgactaactcgggtgactttctccatgacgccttcctgtctggtgcccaagtggacatggcaagaacagcctacctggacctgctccgcctgatccggaaggatgccatcctgttaactgatgcttttgacttcaccgatcagtgtttaaattcagcacttggctgttatgatggaaacgtctacgaacgcctgttccagtgggctcagaagtcaccaaccaatactcaggagaaccctgcctatgaggaatatataagaccacttttacaaagttggagatccaagctatgaaataaccaacagtattcaagaagcaaccagcaccatcatgtgataatggtactatggcatatatgcaacattaaaattttaaattagatattt

SEQ ID NO: 595512 - DNA, 1032 bp, Homo sapiens
gagtcccgagcagtgctcgctcctgctcggggcgctgcggccccgggcagtcgccatgaccagtgagctggacatcttcgtggggacacacgacccttatcgactgaggacgtgtatcgccatctgtgctcgatggattactcaggatgacctgacgcggtggccctgcagggtgcgactcgggaatcctggagcagactggcagccacggcagacggtagctgcagaagcgacaccaatggaccattaccgacaccttaccacatgctcgagcggactgcatgcactgcgcacgaccaagctactgcacccagactcatcttccagattccgccctcccggcaggccactacgtcatcgagacggctactatgccctttgatgaggcctaagctacgggaggcgctgcgcacagaagctgtccaaaacggcaccaagcacagaccctggctgacctccagcaccacccacaggcatcaccctccagcagctgccgcgagcaccgcgacaactccacacgggtcttcaaggtgcgtagaggacatgccgggctccctggtggaaaatatacagccccacttcctcctctctgaccggactggccaggactatgcagccatcgactctctgctcacaacgtccgcgacagggacgcacacacggccgctccgagcaccaggacactagccttccgcgcagaacccggatccaacaccggcccatcggcaccgcgaacccacgagcgccccggacacgccacagccaggaacccaacgcatgcacggaccacggcccccggccacaacgcctcgtagacacaacacgcggacgacacccggccaccgcgcccaccacagaagcagcaacacgcacgacggggaggagacgcgccaacgcccagcacgacaagcccgcaccgaacagaccgcaaagacaccacagccacaaaagcacagcaacgcaggcgacgaaacggcaccacgcgcgggcccgtgaaacagcacccacaccgccccacccgccccaacgaac

SEQ ID NO: 595513 - DNA, 423 bp, Homo sapiens
atctagttcatattctaggaactgtacggttgagctgcatgtggaatccagcactgttactacataatctgctttgtgttcaatgctggcgcagcaagtggcattatacacgggacagtctcacgcacagcgtgcagtcagtgcttgaaaggaaggaatgacaattccagcaggtacagagaacttaatggaggtaatctcaatggtctgctcaggctcgatgatggtgggcaactcaaagtctgcgatcttgttggcgattgcatctagatgcaaagcagcaatgccatctgaaacactctttgcaagcgtgaactggtacacagttaactgagatgcaggctaacacatcatctgcagggaagttgacctcggggagtgttggtagattgagggcgaatgatgaagttcgcagcatcgtat

SEQ ID NO: 595514 - DNA, 2243 bp, Homo sapiens
gaaattccactgttagagattcattccttcgaactgtaaagacaatcttcacatgtcaatattgcctgagcccacctaggggatagaagagtcctaggcagcagaagacctggattctggtcctaaaattctgccactgcatagctttgtaaccttgggcaattcactttcccaccttggtcctcagttttgtcatctgtaaaataacaataatgtctgacttcctttccagatccatgaagcaagtgggtgagaagatttgaaggtgccagaaacctcacccaggtccctaagccctctgttctctgtcctctgcagagagcatcatccacagttacccggagtttagctgtaaggacaattatttcatgacccagaatgagcgttataaggctgccatgcggagggcattccacatccggttgatagctcggcgcctgggttggttagaagatggtcgtgaattaggctacgcttacagagccctttctggagacgtggccttaaatatacacagagtcttcgtgagagccctcaggagcctgggctcagaggagcagattgccaaatgggacccactctgcaatcttcagggcctggagactgaagccacctatgacgcagccacccaggagtttgtgatacacagccccacgctgactgccaccaaatggtggcctggagacttgggacggtcagccacccatgccctggtccaggcccagctgatctgctcaggagccaggcggggcatgcacgcttttattgtgccaatccggagtcttcaggaccacaccccactgccaggaatcatcattggggacatcggacccaagatggactttgatcaaacagacaatggcttcctgcagctgaaccatgtgcgggtccccagggagaacatgctgagtcgctttgcacaggtcttgccagatggcacctacgtcaaactcggtacagcacagagcaactaccttcccatggtggtggtgcgggtggagctgctgtcaggggagatcctccctatactgcagaaggcctgtgtcatcgccatgcgctactcggtcatccgccgccaatcccggctccggcccagtgacccagaggcaaaggtcctggactaccagacacaacagcagaaactctttcctcagctggccatcagttatgccttccatttcctggcagtcagcctcttggagttcttccagcactcctacactgccattctgaaccaagacttcagcttcctgcctgagctccacgcactgagcacgggcatgaaggccatgatgtcagaattctgcacccagggagctgagatgtgccgcagggcctgtggcggacatggctactcaaagctgagtggcctgccatcactggtcaccaaattgtcggcctcctgtacctacgagggtgagaacacagtgctctacctgcaggtggccaggttcctggtgaagagctacctgcagactcagatgtcccctggctccacgccacagagatctctctctccatctgtcgcatatctcaccgcacctgacctggccaggtgtccagcccagagggcagccgacttcctctgcccggagctctacaccacggcctgggcacatgtggcagtaaggctcataaaggactcagtgcagcatttacagaccctgacgcaatccggagctgaccagcacgaggcttggaaccagaccactgtcatacacctccaggctgctaaggtgcactgctactatgtcactgtgaagggttttacagaagctctggagaaactagaaaatgaaccagcgattcagcaggtgctcaagcgcctctgtgacctccatgccatacatggaatcttgactaactcgggtgactttctccatgacgccttcctgtctggtgcccaagtggacatggcaagaacagcctacctggacctgctccgcctgatccggaaggatgccatcctgttaactgatgcttttgacttcaccgatcagtgtttaaattcagcacttggctgttatgatggaaacgtctacgaacgcctgttccagtgggctcagaagtcaccaaccaatactcaggagaaccctgcctatgaggaatatataagaccacttttacaaagttggagatccaagctatgaaataaccaacagtattcaagaagcaaccagcaccatcatgtgataatggtactatggcatatatgcaacattaaaattttaaattagatattt

SEQ ID NO: 595515 - DNA, 232 bp, Homo sapiens
ccatttttttcccaagggaacaagattttttcaaaggggggtttttaaaaaagcagggacaaaaagggcctggggccatttaggcctgggggaggcatttgcttttcccgtttgggccaagggaacaaaggaaaggtgctttgtttttttccccgggatttaatggggcatttttcagcaaaaacttatcccctgggattttttaaaaaaaaaaattttttttggcctttta

SEQ ID NO: 595516 - DNA, 354 bp, Homo sapiens
tacagcacagcactcagcacgatgccaggaagcagagggcggcaggtggctgcgcacgcggaggtgtgatgatggcctggtcggagcccttggagctggtgccgttgcaccggtactggccggggtcggcctcctatgttcaggttctcaatgtgtagctctgaccggccctgcgaggaactcacgaagaacctgctctcggagccgttcatgagggccttgtcctcagagtcagtgatcttgtaccaggcccagtcagtgacaggtggcacggactctgacttgcagaccagcatggccgtctccccctcgttgatgtgttctgacgacttcacggccttcactctgggaggg

SEQ ID NO: 595517 - DNA, 111 bp, Homo sapiens
  misc_feature (104)..(104): n is a, c, g, or t
gggacagtcttgctctgttgcccaggctggagtgcagtggcgcgatctcattgcaacctctgacagccaagaacacgtcgccctcatgctttagcctcccgagnagctgtt

SEQ ID NO: 595518 - DNA, 2285 bp, Homo sapiens
aagagagggaggaaggagaggagctccataagcccagacaagggcttgagagcagacaagggcttgagagcagacaagggcttgagagctggccaagcagtttctctcagcttctgtgttccagcccctctgtgggaggagagaagggcaggaccacaagcctgccagaggctgcggcctacagccggggagaggccagcccggcctacagtgcggacacaggacagaggggagccaggttctttgcactgaccaatgctgagagcagaccctcggagcagccgggttggaagtgtctctccacagtcaccagacagatccaggataggatgggcagcccagtgcaccgagtgtcattgggggatacctggagcaggcaaatgcaccccgacatagagagcgagaggtatatgcagtcctttgacgtggaacggctcaccaacatccttgatggaggtgcccagaacactgcactccgcaggaaagttgatccatgaagcaagtgggtgagaagatttgacctcaggagcctgggctcagaggagcagattgccaaatgggacccactctgcaaaaacatccagatcatcgcaacgtatgcacagacagagttgggacatgggacatatcttcagggcctggagactgaagccacctatgacgcagccacccaggagtttgtgatacacagccccacgctgactgccaccaaatggtggcctggagacttgggacggtcagccacccatgccctggtccaggcccagctgatctgctcaggagccaggcggggcatgcacgcttttattgtgccaatccggagtcttcaggaccacaccccactgccaggaatcatcattggggacatcggacccaagatggactttgatcaaacagacaatggcttcctgcagctgaaccatgtgcgggtccccagggagaacatgctgagtcgctttgcacaggtcttgccagatggcacctacgtcaaactcggtacagcacagagcaactaccttcccatggtggtggtgcgggtggagctgctgtcaggggagatcctccctatactgcagaaggcctgtgtcatcgccatgcgctactcggtcatccgccgccaatcccggctccggcccagtgacccagaggcaaaggtcctggactaccagacacaacagcagaaactctttcctcagctggccatcagttatgccttccatttcctggcagtcagcctcttggagttcttccagcactcctacactgccattctgaaccaagacttcagcttcctgcctgagctccacgcactgagcacgggcatgaaggccatgatgtcagaattctgcacccagggagctgagatgtgccgcagggcctgtggcggacatggctactcaaagctgagtggcctgccatcactggtcaccaaattgtcggcctcctgtacctacgagggtgagaacacagtgctctacctgcaggtggccaggttcctggtgaagagctacctgcagactcagatgtcccctggctccacgccacagagatctctctctccatctgtcgcatatctcaccgcacctgacctggccaggtgtccagcccagagggcagccgacttcctctgcccggagctctacaccacggcctgggcacatgtggcagtaaggctcataaaggactcagtgcagcatttacagaccctgacgcaatccggagctgaccagcacgaggcttggaaccagaccactgtcatacacctccaggctgctaaggtgcactgctactatgtcactgtgaagggttttacagaagctctggagaaactagaaaatgaaccagcgattcagcaggtgctcaagcgcctctgtgacctccatgccatacatggaatcttgactaactcgggtgactttctccatgacgccttcctgtctggtgcccaagtggacatggcaagaacagcctacctggacctgctccgcctgatccggaaggatgccatcctgttaactgatgcttttgacttcaccgatcagtgtttaaattcagcacttggctgttatgatggaaacgtctacgaacgcctgttccagtgggctcagaagtcaccaaccaatactcaggagaaccctgcctatgaggaatatataagaccacttttacaaagttggagatccaagctatgaaataaccaacagtattcaagaagcaaccagcaccatcatgtgataatggtactatggcatatatgcaacattaaaattttaaattagatattt

SEQ ID NO: 595519 - DNA, 144 bp, Homo sapiens
  misc_feature (111)..(111): n is a, c, g, or t
cagaccagtctcactcactgtgcttatgctggatctatcattactgaaaaaccgctctgttgtgctggctggcaggcctgtggctgctggctgagggttctgctgtcctgnggcaccccattaaagtgcagttccctccgggcc

SEQ ID NO: 595520 - DNA, 328 bp, Homo sapiens
tgtgactctaagaccgaaactacgatggcaacctgctttacttttcattgtcagagtaagaggtccacttgctgtaaatattccaaacaaagcatttaagattttgtctttgctaagattagttgaaactaatactagtgttttcgtcaaattgaccaagaacgtatatccgttgctcaaggttattacgccatacgtagtgattggcaaaccttctttatcttctatccgttccttgattcaaaagagaggtagaataatctataagggtgagaatgaggctgaacctcacgaaatagttcttaatgacaacaatacgtaagttgtc

SEQ ID NO: 595521 - DNA, 335 bp, Homo sapiens
  misc_feature (39)..(39): n is a, c, g, or t
  misc_feature (48)..(49): n is a, c, g, or t
  misc_feature (53)..(53): n is a, c, g, or t
  misc_feature (88)..(89): n is a, c, g, or t
  misc_feature (107)..(107): n is a, c, g, or t
  misc_feature (123)..(123): n is a, c, g, or t
  misc_feature (152)..(152): n is a, c, g, or t
  misc_feature (323)..(323): n is a, c, g, or t
gatcccaataacattcccagtatagaaaacaatcaccangaaaaacanntggncaccagaacatcattaagagctcaagcataaggtnngacaacaagttgtggaanaaaccctatgtccacnctctgggctatgtttacaagttttcccantttgttctcatcaaccttccctagtacaaattgaattacatcatctcacgtgaacactactgactttactgaatctattccttgatttgatgttacctttcatacaaatcacagtagaaaaacgtatgaagttttttcaatacagccaagatgctggcttctcacctgtgnatatagttttca

SEQ ID NO: 595522 - DNA, 1271 bp, Homo sapiens
tcagttcaagttttgcaatgagttctaaggaactgtctgtttttaaggtttttatggtgtcggggataggggaaggtggacacaacaggtagtgatctaaatcttctggttcttttcccttcagtgacccagaggcaaaggtcctggactaccagacacaacagcagaaactctttcctcagctggccatcagttatgccttccatttcctggcagtcagcctcttggagttcttccagcactcctacactgccattctgaaccaagacttcagcttcctgcctgagctccacgcactgagcacgggcatgaaggccatgatgtcagaattctgcacccagggagctgagatgtgccgcagggcctgtggcggacatggctactcaaagctgagtggcctgccatcactggtcaccaaattgtcggcctcctgtacctacgagggtgagaacacagtgctctacctgcaggtggccaggttcctggtgaagagctacctgcagactcagatgtcccctggctccacgccacagagatctctctctccatctgtcgcatatctcaccgcacctgacctggccaggtgtccagcccagagggcagccgacttcctctgcccggagctctacaccacggcctgggcacatgtggcagtaaggctcataaaggactcagtgcagcatttacagaccctgacgcaatccggagctgaccagcacgaggcttggaaccagaccactgtcatacacctccaggctgctaaggtgcactgctactatgtcactgtgaagggttttacagaagctctggagaaactagaaaatgaaccagcgattcagcaggtgctcaagcgcctctgtgacctccatgccatacatggaatcttgactaactcgggtgactttctccatgacgccttcctgtctggtgcccaagtggacatggcaagaacagcctacctggacctgctccgcctgatccggaaggatgccatcctgttaactgatgcttttgacttcaccgatcagtgtttaaattcagcacttggctgttatgatggaaacgtctacgaacgcctgttccagtgggctcagaagtcaccaaccaatactcaggagaaccctgcctatgaggaatatataagaccacttttacaaagttggagatccaagctatgaaataaccaacagtattcaagaagcaaccagcaccatcatgtgataatggtactatggcatatatgcaacattaaaattttaaattagatattt

SEQ ID NO: 595523 - DNA, 216 bp, Homo sapiens
  misc_feature (204)..(204): n is a, c, g, or t
ctcacctcagaaacgcctatcatcttgctcatcaccatgctgattatatgcttttatatcgtcaatagttttcccgagattactgaacactactgactttactgaatctattccttgatttgatgttacctttcatacaaatcacagtagaaaaacgtatgaagttttttcaatacagccaagatgctggcttctcacctgtgnatatagttttca

SEQ ID NO: 595524 - DNA, 244 bp, Homo sapiens
ctcattgcagataatttaagcttagggccttgtggctaggtcggttctctctttacagtcggagacctctgccgcaaacatgcttcgccagattcattcggtcaggccaagaagcatccgagcttgttccccctctttgtatttatggaacttgagctacttgagcaacactgtatctcttgcgtcttgcatgttcaatccagagtttgttgggacagaataacccagagccctggacaaactg

SEQ ID NO: 595525 - DNA, 822 bp, Homo sapiens
ggcagaaggctgggagggctgcgcggcctgcgcgtcgccatggagcccgacggattacgagccgggcttcgtgggtatcgcttctgccaggaatgtaacaaatgctgtaccccaaggaagacaaggagaccgcattctgctctacgcgtgcccggagaactgtgattaccagcaggaggcgacaacaggtgcttctatgtcaacaagatcacgcacgatgttggaccgaattgacccagattatcgcgaggttggtcccaggacccccatgttggctgcggacccgaggacccacccgggtgcaaaaaggtgcggcacaaggagggctggtgttctttcccaggtcacaacagtgcgccggccggagggacgccaatgcgcctttttactaacggtggtgcacacaggcccaaaatgtgggggccaccggtgggcaccggaggtgacctccttttctcccccgagggttgttattaaaacacccaagattcccattgttaaaaaaaaacattgacacacgaaaaccacactttgtgcggcgccgcttgtcgccctgggaagaagcctttctttcacaaaccaccctgtggttggtggcgcccgcgcgccccgtgtgggttttggtcggccccgtggtgccccgaccgtgtgtcccccacgcgcggcaccctgtggcctgcctcactggtggcttggtggttctccacccatttaaacgcgccgggggcacccgcggggttcgttgaccaccccagagtggcgtcggcggccgtcggcgctctcacgggggtccaggagcggaatatcaggcggcgtgggcgc

SEQ ID NO: 595526 - DNA, 237 bp, Homo sapiens
  misc_feature (35)..(35): n is a, c, g, or t
aaaatgaactaatgttttcccttccccctgccccngatttttttttaaaagggaaaagcccctggaaaaaaaaattgcccaatcctgggccccaaaaaggggaaaaatttgtttttatgaaaaaagtattgggctttgaaactaaaaatctgtaaaaagttagttttgggaattttttttctgcggggggatttacaaattaaattttttttgctgggggataaccctttaaattta

SEQ ID NO: 595527 - DNA, 563 bp, Homo sapiens
gacagctggagtcaaaacaaacttaactcaaatatcttgggaacgaattcgcgctgatgaaaccttggactgtagctccactccggggaacggactcgccgggactgacagtgccggaagtgagctgcgggaatggcgcgtgcgactggcggctgcgccggaactgtgtgcgggctggacctcaattggagaggaagagggcgctggcgggtggtcctgggctccagaaccactgcaactggggagtggatatcttctgatgatctcctgatgagtgttcacatcggcatctggagatgagtataagagctcttaacgggtggatctccgtcactacaaagcaagtgagctggagctacagcagatgacagaaatccatcgggatatatcaagagagtgagactctgcctctctaccaccagacacggctggatgtgtcctgacgatggaaaatgttggagcgtccagtgacctcagctcctaagtctgaatcaggaaatgcaagaccaccacgagcctgaacatcgatccgaaatgcccggcagcagggggaacattgggag

SEQ ID NO: 595528 - DNA, 693 bp, Homo sapiens
  misc_feature (624)..(624): n is a, c, g, or t
aaaccatgttgctttctggtactacatgcattagcgaaaggttaagtaagtttgttctccactgaagtaatacttaacatctcagaaaaaatttgcatgtctgtagtttgtataaatcagtcatttcatattgcactaatatcagtacaaaaccgggtaggtttaacccttggtttcaataggtaatgtggttatttaacaaaagtgttctccccttggcaggtttcaagacggtaatcctatagaggcttaatccggttccaaattacacgccacttgtgaattatcccagagtagttcttctacgcatagctcacctttctaaaccccagttaacgcatgggaagagaggtagtaggtaggtgcagtgtgtggaagctggcaaacaagtaggccttttattcattgatatcttttcccaagtactggattttaaatctggtatgtatctgtctgatttttttttctaatatttcacgttgagctgctgtttttcttccatgcaatatggtatactcaatgtgtgtatagaagaagctggtgagagtgccctcctacataaataagcaatgtgcagtgtttggcatgcaaactataaaaaattaaatgtgtcctgattctatntcgtcaatggagaaacaatcataatctttctaaggcggtaatggagggaagaataggggttggtggctc

SEQ ID NO: 595529 - DNA, 547 bp, Homo sapiens
  misc_feature (1)..(1): n is a, c, g, or t
nccctcacggtactcaacgtcaatactacagccttgcattgtcattattagacttaaatactcacagtgcagcaaaatatttgagtcatctgagacccacatacccagcctccttttttcagctcccataccgtaatcaagtgtcctttccataatctatttagggccacaatttctccatttgtacagtttttactggtgattttgctctttcaaatggcctaagcctggggctgaaatgccgtctagtgctcctgaacataagaaggctgggatgtctctgatggacaaaatatatgtgttagataagctttgttcacgaaagagttatagtgtgctggccgtgagcccaatgtttatgaaataatgatatatagtaaagaaggtgtctttaaacagaaacacatatgcaacaagcttatacattggtaaattgacaaaaatgttgtgacctgaagcttacaggagcctaatccaacatttcccctaaaaacaatgattcagtatttgccaattcaatgtttatgatacatatatgaaatgtcag

SEQ ID NO: 595530 - DNA, 455 bp, Homo sapiens
cttgttgggacgacaggccaccataagaggatggatctgccgggacgctccctggttagtacaacagagcaggaagctcgactagaggacgacatgtgcttaccatgtagcgcgaagggcccacgcatacccccaggcagatgtgcccttgagaagtggggactgttggcaccaagaggggttgcctccggggtggccttcctggatggagctgcccgtgttgagcgcactgtgctctgtgtgggcaggggttcccagctgcttcccagcgctttcatgggcagccccctggagctccaccagcccaaggagccccaaaaccctcctgctgaacatgccatgaatttgaatgcttgaaggcatagctttaaaaaacaaaaaaaaaccctgcttagactgcagggtggtaggggaagtaagctttgtatttgccactatttttaaaagtatatttg

SEQ ID NO: 595531 - DNA, 776 bp, Homo sapiens
cgcatgttgttaacctctacagcacaggggatcatggttctgtgcctattgttacctgtagcttgtcgtactttctgctcagctttcctcctcgagtagtgtgtctgcagtctggtagatcctatggcccgcacacagtgttgatctcaatctatccagtgggtccaacgagggctgctcttgggtcgtccctgcctgccggtcgtctgttgtcatgtgagcccaaggagtgttgactgtcggtactctagtttcacgcacatctttatctcctggtgcagaattgacggagagcttctgtctgttgtttccttcgcgcgatcgtaatgtagctcttctgtgttcatcgagtcatccacgatcgatactgctttttcgaaatggcccagatctacgaccaattctagtggatacgatccggcccactcactcccttgatcgtgtgatgctgcgtgtgatgccataagattatgaacgggacctgtgttgccctctctatttatgcaaatacccacactcagatccagtttacctatgctgatccagcttctcccttgggcaggagttctcctgtgtcctctctcctccatccacctcccctccctgccatcacctcacgcctttctgttcctgtgtcctcaccttactcccctcaggaccctaccccaccctcttgaaaagacaaagctctgcctacagtagaaaactttttttatttaaccaaagcttactgttgtttacagtgagtttggggaacaaataacactcgaatcgtt

SEQ ID NO: 595532 - DNA, 398 bp, Homo sapiens
  misc_feature (48)..(48): n is a, c, g, or t
  misc_feature (169)..(169): n is a, c, g, or t
  misc_feature (363)..(363): n is a, c, g, or t
tataaccctgagcatcctgaaaatgattggccatgcaatttactgaanatggggaaagacaagactaaagaagggaaaaagcaaattttccaaaaaggaagggagaaatccaaaagtttaatctgaagaaagtagtcagttattcaaagtggggcctgtccgtgggttnttacgcctgtaatccaagcacttcaggaggctgaggtggccggatcacttgaggtcagaagttctagaccagcctggccaacatggtgaaaacccaactctactaaaaacaaaaattagccgggcatggtgtgtgtgcctgtagtcccggctactcagtaggctgaggcaggagaatagcttcaacctgtgagnagaggctgcaatgcactgaggtcatgccactgcac

SEQ ID NO: 595533 - DNA, 806 bp, Homo sapiens
  misc_feature (300)..(300): n is a, c, g, or t
  misc_feature (436)..(436): n is a, c, g, or t
  misc_feature (546)..(546): n is a, c, g, or t
  misc_feature (563)..(563): n is a, c, g, or t
  misc_feature (628)..(628): n is a, c, g, or t
  misc_feature (654)..(654): n is a, c, g, or t
acgagcaggacacttgtcagaaggatgcaaaaaaagaaaaaagtagatccaccctcttaatcccaaaagaacaaagtctccccacctttctcggatgcagggccagagtgacacagccgaaaaattgcagtttgtctgtacttctgtttgaactttccacgttgtcctgtttacaagttaacttaagttggggtatccgtcacgggtcttcctgttttggatttaaataaaaacaacagcagcaggctgtccctgagtagttttgctgccataagttaagtcctcatgtgtacagtgcangccctgtggcccgcacttcagtaagttatcaactctcaccgctgtgaacctgccaatccgctgtaacaactctgcttaaaacaaaaccaaaccaaacttttaaaaaaaatgtgtgatccagctttctcttgccatnctatgtgcatgccgtaagatcagttggatattaaaaccatcataaagttcacaagattttgaaacaaattcttgagcttcgatacctaagacagacgatagtgatcttgnaaagaagaaagggggangggggaagctctattcagcaaaagcatataaaagtgtctttcaccagactttcttgggtggttangggagggccaaaaggtggttatagcntacttaaaaattttaatcccccacttgaaaacatggtttggaatggtgcctggtgaggtcttaaaggaaccgatttttaaccctttgcctcttccaaggagaaaggattgacccggggttttggaataaatttttccaatgccgccaatttt

SEQ ID NO: 595534 - DNA, 395 bp, Homo sapiens
  misc_feature (27)..(27): n is a, c, g, or t
tctccctactgtatcctagcactttgngaggctgagatgggaggattgtttgaggccaggagtttgagaccagcttggtcaatatagcgagacccccatctctgttttttttttttaaagaaattattgtctaagaaccagtgtcatcttccaaggagaaacttctagatacttgttttaggataaataagaaacaagtcatttctaaatgtgaattattttttaaatgcaattttttaaacattttattttaattatggcaatagacgtggaaaagactcttttttgatagtaggggagagcagaagaaacattgaattaagtacacagagattcttcagacctgctttaaaaacacatgcatacaaatgcacttctgtctcttaggaaacagt

SEQ ID NO: 595535 - DNA, 119 bp, Homo sapiens
ttaccgagcttatctagccgcgcagtggtgcacgcctggtttccagccactcaaaaggctgaggcacgagaattgcgtgaacctgggaggtggaggttgcagggcagctgagaccatgc

SEQ ID NO: 595536 - DNA, 1625 bp, Homo sapiens
ggcggggctacgagacggggaccaatgtccggaaggcgtgggtggcgtatgtgtgcgataccctgggtgacgtgggctagagtgctgagtcccaagccctgtgaaggcgtcgctgggagttgggcgagtgctcagtgggctggagccgagtagatactgtgagatcctaagtccatgaaggcggggctggtggcgcgtgttcgtgggtgcggtggctaagagaacgaggtaccacatgtccatgaatgcgtggctgtgagtggtgcgaggatcaagcccgtgacaggcgcgtgattggagctggtggcgatgacctatgtggggcagggtgttgacgagcagaggaccttaggccctgcatgatgcgtcgctgggtctgtgacgtgaagaccatgtgcttagcacttctatgtgatccaagtgctgcacacatggtgcgcttgcgactaggggtgacgccgattgagtatgcatcgacttctgcgacacagtgtgtgcgcgacggctgtaggcgacggggataaccacgggcacggacatagactaccgccaagtgaagaggcagttgtgttgaggagcaggtgggcatgatgacgcactagttgggcggtctttggagccccgtggatgtccggtacttgacgctttggtgtcatcatgaaggttcacgaacgaaaccctccatagttggaatctaagcctttagactcgcagtgccttcgtctagacattgttcttagcgtggcatccacacgggcagctagaatagcatgcagggatacttgaccgttgggagaagactacctccgggtcgggccccacaccaatgtagaacacctatgattagcgaaacgtcatgttactccaagcggttatagacaatttattggatgtacccttacctagcgacatatttccattcccttgacaactctgggtgcaaatgggtcccacctccatatggaaacaccacgctacttttaaaccaaaacatttggtgtgctatgtggggtaggccacattttgtgacgcgtctcggtcacagtacgtgaagacaattgagttgcttcccctttttggtggtatcacgcatgtgtaacctgacgccacggccctttgggactaccgcgacactcgaggaactgttaggacgggtcttgggcgtgcgcttacgagcgtgcgaaacgcgctcctgaggacggaaaacccattggggcccattttaccatgaattcgcgatttggtttcagtcgttcacgattagaccccgtttgtaaactaatcgccaggacaatagggtcaggcggatctacacaacaggtcgctattagcagatgttggcgccactattggtgacaacacccccagcggtgatcgatgtgtgtggctagagcgggtattaaaaacttggggcaaaggcattaatagagtagataacaggaacataatggcttgacgcaacaaggccgacaattgtatgactgcagtatactcatagggcaacagatcatagttatttcgtcgccataaaatattacgttagtaggaaagtgggtgtcccagcagacagtcgcttagaattacgagctagaaggcgtaagccgtaccaacatacttaggctacg

SEQ ID NO: 595537 - DNA, 220 bp, Homo sapiens
  misc_feature (3)..(3): n is a, c, g, or t
  misc_feature (6)..(6): n is a, c, g, or t
  misc_feature (21)..(21): n is a, c, g, or t
  misc_feature (90)..(90): n is a, c, g, or t
  misc_feature (122)..(122): n is a, c, g, or t
  misc_feature (219)..(219): n is a, c, g, or t
ggncgngccgcaggacgcttngaagcgcgacggcccttataatccgcgagtcggaggacagcaccgatttcaacgacaagattttaaatnagcccctcaagcactctgacttcttcaatgtnaaggaactgttttccgtgagaagcctcttcgatgcccgattccatctgggacacaaagctggctgtcggcacaggtttatggagccgtacatctttng

SEQ ID NO: 595538 - DNA, 367 bp, Homo sapiens
caaggttatcggaagcgtcagggagacggttgaatgtatctgcagatggttactaattcatcagacgacacagatcctctgctctctataattacctcgtctatgccttcaattctcagcacccgctgccgcagcactacaatctccgccaacatgctggagtagctaccttctgcctgaatcaccttgtcctggagactccaggagttcatcctctgctatctggaggttatttgtggcttcctccaactcatcaaggcggcgccttagactctgtagcttaaaccgcaagtggcgactggagccttctccttgcaccattgaacattcggccatgtctacctgccagccactgcgggctcctaga

SEQ ID NO: 595539 - DNA, 296 bp, Homo sapiens
tttcgcgagaactacccccaaaatgccaaagaatggggcaagggagaaggaccttattttcaacattgtttgaccacttggttaacgccccctcttttgtgccaaggccaccaccattttgttcaatccgaaagcattaaaaagtgggggggcaactcacaaaaggaaccaatgtttaaaatattttgtaatggggggccgcccgaaaaagggaaaagggcccccctctaaagtagggcacggttctctgtgataaaacaccaaaaacgtatctcttaacgcgcgagacaccacac

SEQ ID NO: 595540 - DNA, 487 bp, Homo sapiens
  misc_feature (41)..(41): n is a, c, g, or t
  misc_feature (71)..(71): n is a, c, g, or t
ggggggggaaaccccaaagggggggaaaaaagggggaaaangggaaaaggttttaaggcttccctgcgggngtggggattgggggtggtggtgatatagacgtggggacagagtggaaaacaacaaaaatataattattttagttcaaagttattgtgtcttgagttgaaaggcagggcagttagcaacacagcttagatttcagtactgcccctgaaatctgaactgtgttcaaagtctaaaacgtttaccttagcaaattcctcataaaactccatttggaagagtcccgagagctaatttgttaagtatacttgcaaaaggtagatgaggagacagataaaatcttattacctctttcagatgagaggcacttgagccctgctcagctatgagaataagagaggggaattaattctaattgaatacacttgttctcttatagctgttgttccccaccagaaccaaatgagcgcaagatctgaca

SEQ ID NO: 595541 - DNA, 468 bp, Homo sapiens
atcacgaaacaccgtcctatcttcgcatgggcgtagctatactatctgatcattcactgtccatcccgttccgatgacgagcgatcgtcgctacaatcgacattccctacatgtgcgctatcaggcatcccgtcaattcggtgccgccaatgaggcaaccaagagcttgggtcgcaccaagcaagccgccaagggtaatgcagctgcggtcctgtgcggcggcgctacccccagctaccctattttatgaggctgattcatccagtaaatacttaagggcacacctactgtgtataggctattttgctaggtgctggtgatagagctgtgactaagacactgtttctgtttctctctgagaccttagtagaactaatgatctgattgggaagttcaatcattaaatgagccattggaatatattagcactctagagatgtagagagtgccatggaagtgcatagcagg

SEQ ID NO: 595542 - DNA, 1913 bp, Homo sapiens
acacggggtgtggtcaacaactaactagctacgtgggacggcacacaactctggacgtgtgtggtttgatgcttccgaggcttcgttatcttttggttgttgtacgacagtaatgttcgcccatcttgcatcctgctctctgagtgaggtggtctaagctacgatactagccctagttgagttagtctatatgtcgtggctccgcgctcccccaacgcggtgtgagcagccacagcaaagagccgctgtggtggcgagggagcagaatgggctgttctgctgcgcagcatatggaaagtggttgcttgcgggtacacacacaatgagtgtgagagaatgtatttttgttcggttcgtattggtgaggaagacatccacctagagtgaagtgttccactattgaattggaggatgtcctctgtcgagactaggttttctgcttgcatctaggttgcgcacgcagtaggatgggtgtcctcacatatgcgctcgctcagtgagggctgccaatattcggtgggagcgcacgcacgcgagtggggtgcacctccacccttcgtttgttggggggtatatactccatcttggttggttgtgtggaccaacaactaatagtaagagttttttgtttgtgtgggggtggagtaatagtatgtcgcacggcccaccaatgatgctgttttcgtatttattgtggtatggatatcatccttcttttagtacgctacgacacgtcggggtagggaagcagcctgtgtttcgtcgaacctacgcggcggtgaaaatttgtgtgtttttttggggaagaaaacaacaacaaaagagaccgccttcttgtgtttgtagaatagaatatagtcacccgtcgtggggagtgttcttcgttccactacatgcactacctcctggtaagtttggtgcatgcgctgtgttttgtaccgacacacgtgtgaacaacggcacaccacactattttttattacctgcgctcaccctatctgaatagcgggacgctccgcggtagatagggagagttctcatctcggggggcgtgccctactatattttctccacacgagggataaagagacggtacaccacacaaggggtgtccagcgggagagttagtagatggaagagggtatgcaccgagttttattctgttttcactatgatgcacccactatgcaccaacaagtgagggcacacaacacaaggagtagagagaagaggacacactctcttttgagaggagagcacacatctcgggagagtgagaacgacacacacacacactcgtagctcatctttgtgtggggagagaacactgtgtgggacacaactcggggagaagaagtgtcaacactctctttggagaatatatatagagacccacgctgtttaatgtcgcacacacacagaaactcttgtgggaatcgagagagctcttgagactctgtgggcgcacaccactgtctcccgccacagaccactgctgtcgcctgtctctcactctctgagtgagagagacacacacagaagtgtgtgtgtgtgagtgtgacgacacagagatatgtcacacactgtgtgtgtgtgagacagtgagtgggtgatgtgagactgagagagtgtcagagcacaagtgtggtcccatagatctcattacctggttgttctcataacagcgttcttgccacaattctgtgggtaaataatagtagatacacacttgtaagaggagaattggccacacgttagatggcctgtggtagacctcttcccacgggaacacccacatggccacgggagcactggcacattacaccttgtcacccttgcttctaatttttgttgaaatgtatttaactgggccccacgtttctttaaatgtaaaatatttaattggaataaat

SEQ ID NO: 595543 - DNA, 454 bp, Homo sapiens
catgtgcgaggcttctaattactccaaaggccagacgcctcaagatctcaattgcttttcaagaacttatcttagggttttttttgtttgtttgtttgtttgtttgtttgttttgagacagagttttgctcttgttgcccaggctggaaggcagtggcacgatctcggctcactgcaatctccgttgcccaggctcaagcaatcctcccacctcagcctcccaagcagctgcgactacaggcacgtaccaccacaaccggctaatttttgtttgtaagtgtgtgtgtgtgtgtgtgtgtgtgtgtgtgtgtgtgtgtgtgtgtcgtgtagagacagagttgcgacatgtcgcctagggtgctctcacgctcgtgggcacaagtgatctgcccgccgtgcgctcacagagtactgagataagggtgggagccacgatatgtgcgggacaccgagc

SEQ ID NO: 595544 - DNA, 426 bp, Homo sapiens
  misc_feature (133)..(133): n is a, c, g, or t
  misc_feature (137)..(139): n is a, c, g, or t
gacgttagatcagtcctatacataaatagctgatctcataagtggttttaaggatgctggcgggaggttgaaattgtattggtggagtctcctgccaaagaattcaaagttggaagatgaagaattcaggccnaagnnntgataaatatcaatgaaaataagagagatttcacagataaatgagaggaagtattacagaatgggtaaatatgcaagcccttaatcaagtctgggtttcaattctagctccgtcactgtatttgcagatgatcttggacaagttacttaaactttctaagcatagatttcattatttgtaaaatatagtcttagagtagctagccaagacctttagatttccaagtataaattaaaagactggtcaaatatgtctcccaaactacagttttcacatagcgagctttc

SEQ ID NO: 595545 - DNA, 278 bp, Homo sapiens
  misc_feature (12)..(13): n is a, c, g, or t
  misc_feature (24)..(25): n is a, c, g, or t
  misc_feature (30)..(30): n is a, c, g, or t
  misc_feature (61)..(61): n is a, c, g, or t
  misc_feature (68)..(68): n is a, c, g, or t
  misc_feature (99)..(99): n is a, c, g, or t
  misc_feature (138)..(138): n is a, c, g, or t
  misc_feature (173)..(173): n is a, c, g, or t
  misc_feature (176)..(176): n is a, c, g, or t
  misc_feature (178)..(178): n is a, c, g, or t
  misc_feature (227)..(227): n is a, c, g, or t
  misc_feature (246)..(246): n is a, c, g, or t
  misc_feature (249)..(249): n is a, c, g, or t
  misc_feature (261)..(261): n is a, c, g, or t
  misc_feature (265)..(265): n is a, c, g, or t
  misc_feature (267)..(267): n is a, c, g, or t
aaggagcatctnnactccgagaannatgtngttctgtaactgccccagatagtgaccccgngagtggntctcggtgctagatatgcatgactaaggttnatgctgggcaaaatgtagatgatctttcattatgttgtnggcagcgtctttctctgcctttgctatatgcagtncancngtaagtccttttgctaaaatgagttttgtttgacttctgagatccaagngctgattgttgttaaaaantanaaaaaaataatntctngnatgggggtcct

SEQ ID NO: 595546 - DNA, 895 bp, Homo sapiens
  misc_feature (1)..(1): n is a, c, g, or t
nggaatgaaagagaacgaagctgcttcagggaaggtatcataatgtactgtggtgtcgacagcctagctctttgtggcccccagcctgttctgctctgcccaccacattggtttgggggcaccagattgcgctcctctgatggggtttttcttgcccccagaaggaggcaagtcggtcgaaatttctaacaagcacggcggtgtctagatttcccggcagggtatcactgctgttctgccatgcaaaaaaaacatgtgggtccgggacagcatacgtttttcatacgtttcgccggaaggattctagaagaaaaagcgttgggtcgcggcgttcttacataaaagggggcttgcgaaagatactgtttatgcgggtgcgcgacaaaaaggatgtcttgtctgtcgagagaagggaggaattatctttccagaaagagtgtgctgcgcccgcaacatcattgtgtcggggtcggtgccccgccccccccgccctgtctctcctttgatatgtttagtcgccgaggaaccccgccacacctttgtttgacccacagggctctccgtccttccttgtcaagacccctccccccctgttgcaggtaacaaagtacttttataacatatgagaggagcagagtttagacccagcacagtctctaagggcgagggcagaacttagctgttaagcaatagtaaatttctggctagatgggtttgattaataagaaagatacactgtggatatgggcagccttgcaaaaccgaaactcgcttggagggggaaagaggtaacataccataatggatgccaaacaccatggctcattgtgaacaaaaacagtagacatcccccttattcttggagaaaaaaaagaggaccccgaccacaaaaaca

SEQ ID NO: 595547 - DNA, 1061 bp, Homo sapiens
ggttctggagtctcgggacccgacagccggcacagggtcgccccgactccttcgcccgccatgccctgggccctcgcgtcctccgtctgtcgctcttgtgcggtcgcgccggcgacccgcgttgcgggacacggcctcaagctgaacgcacccgcggtgaatgcgatacctggtagggcggccatggctggttggcatcgatgatcgtgcagtcaacctttccgccaacctgagttactgtgcaagactgcagactgcaggacgtggtactgagtcgcttcgtcgacccagccagcaggctaccgagtggcagtcggtggacgtgcagatgtcggctaggactggattcgcaagcctagtggctgtccgtggagccgtgtagccagcgtgcgcttagagctaccctgacgtctacagtgttccagtcctccaagggacggccagtcagggtttcggagatgttcgatgttcctcatgcagaccacagtgcgggatgcccatgggcactggcctggacagcactgcgtgtggcttgcttgtgcggccttgggtcgcttggctgttgccctgaggccgtaggttggtcgtgtgccccatgtgagaccatcacaggtgaagttcattccactgacccagactctcctccaaatcctccaagttacacgaggatttctttccacgggtgttagggcagattgtgcggggaatcaaggggctgacactggggacgataccatgggacttcacaagaccacttgtctcgtgaagacagggcttcaaacgaggccatacggattattccggacaatgacgctccttgcgcaaatggtaaccgaggggcaaaaacccaacaagccatgaaccttttgatcaacatgtagatcattaggaacctatttgcactgacccatccagggttattggaaaggatcctatggacatttgattagaacccgattcaaaggcttggagtctccacaaatcacgaaccgtgtgtcaatgtactgtagaaccaagaatggagagaacaggaatcaaaggccagttaccccgagcagaca

SEQ ID NO: 595548 - DNA, 395 bp, Homo sapiens
  misc_feature (145)..(145): n is a, c, g, or t
  misc_feature (162)..(162): n is a, c, g, or t
  misc_feature (166)..(166): n is a, c, g, or t
  misc_feature (170)..(170): n is a, c, g, or t
  misc_feature (173)..(173): n is a, c, g, or t
  misc_feature (192)..(192): n is a, c, g, or t
  misc_feature (194)..(194): n is a, c, g, or t
  misc_feature (198)..(198): n is a, c, g, or t
  misc_feature (209)..(209): n is a, c, g, or t
  misc_feature (215)..(215): n is a, c, g, or t
  misc_feature (230)..(230): n is a, c, g, or t
  misc_feature (242)..(243): n is a, c, g, or t
  misc_feature (247)..(247): n is a, c, g, or t
  misc_feature (252)..(252): n is a, c, g, or t
  misc_feature (258)..(258): n is a, c, g, or t
  misc_feature (265)..(266): n is a, c, g, or t
  misc_feature (268)..(268): n is a, c, g, or t
  misc_feature (270)..(270): n is a, c, g, or t
  misc_feature (272)..(272): n is a, c, g, or t
  misc_feature (283)..(283): n is a, c, g, or t
  misc_feature (287)..(288): n is a, c, g, or t
  misc_feature (290)..(291): n is a, c, g, or t
  misc_feature (293)..(293): n is a, c, g, or t
  misc_feature (295)..(295): n is a, c, g, or t
  misc_feature (300)..(302): n is a, c, g, or t
  misc_feature (304)..(304): n is a, c, g, or t
  misc_feature (307)..(307): n is a, c, g, or t
  misc_feature (309)..(309): n is a, c, g, or t
  misc_feature (315)..(316): n is a, c, g, or t
  misc_feature (332)..(332): n is a, c, g, or t
  misc_feature (336)..(336): n is a, c, g, or t
  misc_feature (347)..(347): n is a, c, g, or t
  misc_feature (353)..(353): n is a, c, g, or t
ggccccttcccagcatgtcagggaaaatccctgtcccccaattccaatggattttgtgctcttttttaaaaaaaaaaattttttaggggaaacatgaattttttttcaatgtagcccctggggaatgaatgaaattttgagcttnttcaatacgtaaaattnaatntatnccnctgagggagagaccctttntnaaanaagtatggccnaaagcnctttaatgctgctgncattgttgtttnnatgntcatntgctgnagcgcannangngntgacccagtgngttnntnntnangtatnnnangtnanggattnncctgagttactcctgnatcnttgctcataanattggnaactaaaataaaacctagttggaaatccaagagaaaaaaaaa

SEQ ID NO: 595549 - DNA, 345 bp, Homo sapiens
ctctgctatatctgtgctgtacagacacaaaactgttctgtacataccctttttatttggctacttccactcaacatcgtttatgagatccatctgggctgctgcattagcagtagctaattcttttctatcactgtacgatatttctatcgacagaacatacagcaattcattttttctttctatcgttgacggacatcgagctatttccaattcaggctatggcaaaaatcacagctatgaacacggacttgtcttctgcactcgcctctctggtgcatgtctgcatgcctctccggcaggcgtgccatgtccagggctgtgggctggcagaacggctaccga

SEQ ID NO: 595550 - DNA, 163 bp, Homo sapiens
tcacaccagtgatgccctggtcatgaactacggtgctctctcttctgcttcgggaaggactttgacaaggtcgattcgttcctgggcctggtgcagtgccgctctgtggtggtcagttgtggattctatgtgccctagtatcatccggtgacccgtcccatcg

SEQ ID NO: 595551 - DNA, 92 bp, Homo sapiens
ccaccaagccaaaggattctttttctattttcattctcctcgaacttcgtattggactatgtccccctctgtgcccttccccctcaaaccta

SEQ ID NO: 595552 - DNA, 110 bp, Homo sapiens
ttgtcatcgcagattgctcgggggaataggttatgtgattaggagatagggttaggatgagtgggacgaagaaagagaggaagtaaagttaacttatgcctttgtgggtt

SEQ ID NO: 595553 - DNA, 425 bp, Homo sapiens
  misc_feature (23)..(23): n is a, c, g, or t
  misc_feature (31)..(31): n is a, c, g, or t
  misc_feature (54)..(54): n is a, c, g, or t
  misc_feature (218)..(218): n is a, c, g, or t
  misc_feature (387)..(387): n is a, c, g, or t
ctttcccttagtcctcactgagnctagttcngggtgaaagtacccttcccagtnaaacccttaccccagtccctgttcttgaccctcatgctctgggtttattgctgttgttgttgtcgttacataatatattgcctactattaaaaatccttaagatggctgggcgcggtggctcatgactgtaatcccagcactttgggaggccaaggtgggtggntctcctgagatcacgagcttgagaccagcctggccaacatgatgaaaccccatctctactacaaaaatgagctgggcatggtggcacacatctgtagtctcagctacttgggaggttgaggcaggagaatcgcttgaacctgggaggcagaggttgcagtgagctgagnatttgccactgcactccagcctgggtgacagagtgaga

SEQ ID NO: 595554 - DNA, 140 bp, Homo sapiens
cggaccccattgacctttatcccctttagtcatagcgattttgccaacgactttggtttggtcattcttatcataaagaacaacagaaacactgtctgcacttggtgaccaaactgtcaaatcaacacgcgctccattat

SEQ ID NO: 595555 - DNA, 102 bp, Homo sapiens
ctccagtcctagtgctaccatggttctcagacaccatcagtagggttacagaggcaccaaggggtatcagtgccctccagagttttagttagaggaaggtga

SEQ ID NO: 595556 - DNA, 437 bp, Homo sapiens
  misc_feature (67)..(67): n is a, c, g, or t
ctggggttgtcctcaggctccatgagcagaagagcagcagagcagtgtggcagaggagagaggaganagagtgtctgaacatcgagaggagttcggctggggactgtcagagagatcagccatgggatggccaaaccccaggggaagattatcttctcactccatccgctttccagctccccatccatcctgctgaaagcctcctccatcattcaataaaatctctgtattcaccatccttcaagtctgtaggacctgattcttcctggatgctagacaaagacccgggtaccaagaggacagggtgtaaaaggctgccaccctgactctccactgagctggtttaacacttagccatccgcggacagcaactgctaaaagagcattaattgtaacacacccctagatgctgccatggggctagagcccaaaagcgc

SEQ ID NO: 595557 - DNA, 264 bp, Homo sapiens
cgcctcccatgttcaagagattctcctgcctcagcctcccaagcagctgggattacaggcgtgtgccaccatgcctggttaattttggttatttttagtagaggtgggatttcaccatgttggccaggctggtttcgagcttctggcctcaagcaatccacctgccttggcctcccaaagtgctgggattacatgcgtgagccacgcgcctggcccagcctttctctttctgacttcacttgcccacctgtgcagtgggaggac

SEQ ID NO: 595558 - DNA, 351 bp, Homo sapiens
  misc_feature (69)..(69): n is a, c, g, or t
  misc_feature (75)..(75): n is a, c, g, or t
  misc_feature (114)..(114): n is a, c, g, or t
  misc_feature (132)..(132): n is a, c, g, or t
gagcgaaagcctgggtcgcacttgggcccaccggaaagtggaagtcgtctgggtccagcggctctgagntgatcngccaggcaagcgaaattggcattctcgctacactgcccngtttggggaatctgaatngagtactatgctatgtggctaaactggtgtcctcactacgtggcaataatattgaactgggcacgctgcggaaatactacagagtgtgcacactggctatcttgatccggtgactctgacatcttagagctgccgaacgactggtgaaaagtaaaccacctacaaatttcactgcaaacttaaactgcaaattttcctttaataaaatttgcttgtttt

SEQ ID NO: 595559 - DNA, 107 bp, Homo sapiens
atccatattgaaggtggtatcatcggtccgcggctggaaatatcgtcttcaatgaaggaaagaaatcgacagaccaggcgtgcatgccagactacacagctgctcag

SEQ ID NO: 595560 - DNA, 447 bp, Homo sapiens
gttggagagaattaaagccagaggatggcgctgagttcagcgtccccattaacggtacggagtttgacgcatgaagccagaaacaccctcactatcacttcctgacgataacgttggcagccgcgcggtgaagcgcagcaagcccggttatcagctacgccgcagccgtatcgcctggctgctggtggcgccatctcttctgttactggccgccgttgcaggctggccgctgttccgcacactgttttacagcttcaccgatgccatgctggattcgcccgatgattaccgttttgtcggcttcaccaactacattgacctggccgacggtgcccattattacggcgtcctggccgatccgctgtggtggaaggccgttggtaacacgctgcgtttcagcgtgatgtcggtgtcgcttgaactggtgttcggcatgctgcttgccct

SEQ ID NO: 595561 - DNA, 119 bp, Homo sapiens
  misc_feature (72)..(72): n is a, c, g, or t
accagatccggcgttgtacagacgacgtgcggccccaggactgctaccacggcgcaggggagcagtaccgcngcacgtcagcaagacccgcaagtccagtgccagcgctggttcctgag

SEQ ID NO: 595562 - DNA, 396 bp, Homo sapiens
tttttttttaattttttgagtacagagtctcactctgttgccaagctgaagtgcagtggtatcatctcggctcactgtaacctccgcctccagggttcaagcaaattctcctgcctcggtctcctgagtagctgggactacaggtgtgtgccgccacacccagctaatttttgtatttttggtagacacggggtttcaccatgctggccaggatggtctccatctcttgacctcgtgatccgcccgccttggcctcccaaagtgctgggattacaggcctgagccactgcaccctggtcaatctttccaaggcctagttcaaacatagccttgtctatgaattaatttctgtatctcatcactcaaaattaatcctttcctgctttatatacccac

SEQ ID NO: 595563 - DNA, 157 bp, Homo sapiens
tatgtctgcagggttcgatgacgggctactcctcatttattcacctcagcagttttgttcttcgcaggcttttactgcgccttttaccactccagcctagcccctaccccccacattaggatgggcactgagcccctcaacatggcagatcctgcta

SEQ ID NO: 595564 - DNA, 511 bp, Homo sapiens
ggcgataaggctaggtacgaggctgggtgggaatcggcgatgacacaccaggcggttggagacagcgcttacgaaaggcgtgaaaagggagcaagaaaagtggttgtggagtgctaagaaagattggtatgatgtgaaagcacctggctatgttcaatataagaaatattggaagacgctcgtcaacaggaccaagaacaaaattgatctgatggtctcaagggcggtcgtgtgtttgaagtgagtctggggatttgcagaatgatgaagtgcgtttaagaaaattcaagctgattactgaagatggtcaggtaaaaactgctgactaaaactttccatggcgtggatcttacccgtgacaaaatgtggtccatggtcgacaaatggcggacaatgattgaagctcacgctttggagttggggtcagactaccgatggttactggcttcgtctgttctgtgttggtttactaaaaaacgcaacaatccaagcatttacccggggagactct

SEQ ID NO: 595565 - DNA, 766 bp, Homo sapiens
ccaacattctggtggtttccttgctacacccgtcgtggcgccattgcccagagtgtggctcgccctctcacacttctcggtgggaggtggtccccttgtgccccgccccttcatgttgcccccggcaaagaattctgtctcttggtgccacccacaggcagtgtgtgctagctctgtggtgcctcgcccagaatatcactccccgatgcgttgtgttcggtgatgatcaacatgtgttgtccgaaatggcgctcgtacacaatggtgtccgccccctgtcttcttctatgggggcactcacctcgctcccctctcgagttgttccctcccctacgagcggtctgccccctttacgagagcgttttgataatctcccccccgtgtgtgacccgcccctatctcgtgtattataagagcaactcacacatctcacccaaaaaacatcttcgctcgccaatctgcaatcctacgagcagtacaaccaccccttcgccccccttcgctcacatgttctttcccgcggtgtatctcccattgattctgtgtattatccgtagcccccgcccgtgagcgcggtggtcacactcgtccggccctgtagaatcctgttggagcaccggacgtccctcatgaggggcagcctcacgcttcgtctcgcagcgcagccaccgtcccgacgccgcaagtctgtatgtctagtgaggcgacggactgcggtccgcactcaactccactactagcatcaccttatacgaagccacaatcg

SEQ ID NO: 595566 - DNA, 849 bp, Homo sapiens
gcgtccagaggatccatggaagaatgtgcaaggatcccttcaactttaagtgattgcattatagacagaatgtgttttgtctttccattgttgcgtatctgtgtgatctttcattactcttatcttacagttagttatattctttactatgggagcaaaataatctgctgaaatgaattgtgcctctggttaatcaatctttatttcctttgtgtagtaattgcctcaaactcctgacctcaagtgatccatccgcctcagcctcccaaagcattgggattacaggcgtgagccaccgcagtgggccgaatattattatgtgtgttggaatctgctgcggactacaagtatgttgcgtgactccactaaagcatttcgagaagtgaatttgtaacgctctaggtaggattggcgctagtattctatttcgctccgagcactgagtgtcatggcgttgaggtctcgtggtcctataagccaaattaatagtagagccgttctgccccactgctggaggatcactgggaattacaaggtcactgagccagcacagcgggccgaaggatcattgaccgaataggggcgcgggccgtggggaagaccaatgtttagtgtcctgtgaaggcgcagggcaaatgtaaggagaaggtgggaagttaacacgggggtagatagggttgtcgccgagtttccatacaactgagatagtggtggttccgtatatggcgtagtgtttatttaaagcaagcatgagatgagtgatcgtattccacaatggggaaaaaaaataagaaaaaagattcttccagaggggtggctggaagatcgggtccatagggggagagaaga

SEQ ID NO: 595567 - DNA, 110 bp, Homo sapiens
agcgacccgcgctcactgggattccggtacttcttttcttttttattttccacttcccaggggacagggtttcacttcgcaaccaggactggggagagacggaaaaatcc

SEQ ID NO: 595568 - DNA, 378 bp, Homo sapiens
tgagaaagcacacccgcacacccctgaccacgtgatggttcagatgaccacactttagtcgagcaatcgcggccttttaggttccgcaaacgcaccaaagccgaagatccacacccgatcgcttaccgacctgacgctcatgaacacaacgccatggcatgaacgctcgccgacgagcacctgggccgctcgcgtcgtaagtgccaatggaaaatacctgctgaccctggataagccgtttctcgaggacctgatcagccaaaccgatgtgggcggcaaatacctcaaactactggatgacaaactcagccccactgccacctccgacgaagccagggtgctgcccgacgcgtggaaaaaccatctgaaggcaaggat

SEQ ID NO: 595569 - DNA, 758 bp, Homo sapiens
  misc_feature (506)..(506): n is a, c, g, or t
agctactcgggagaataaggcagaagaatcgcttaagcctgagaggcagaggttgcagtgagctgaaactgtgccactgcacaccagcctgggtgacagagtgagactctgtctaaaaaaaaaaaaaaaaaaaaaaaaatttgattttgactaatgactaatgaaatgggttgtgtggaagaccttgggtgaccaaaataaaatgcattaacttgtgcaagtcaaatgccttgccacccaatcttcattcttgtggaatttttgaaattgggccagaatagccagtctcaaaaaattctccatccccgaaaaacacacacgcaaaaaacaaaacctttacaagtagtgtcccttatgtagcccctttggtcctctgcaggggaaattgcattccattaccttaccattaggatttctgcagagtatttcattggtacttttgtccctagcagtcctccggtctcctcttgcgacagaccaggggttctcacctccgggtctctcangaacctgggacgtcccccattacgcccctcatatgggctccatttgcaggccttcaaccttccccgggggtttagggtgatccctcccggtctcaagtctcccttaatagctggggcactacaggcgacacaccaccaatgcctggctaatttttggtagttttgtacgagcatgtgcgttcacccatgttgcccaggctggtctccaacttctgcgctcagcaatctgcctgcctcaggtttcccacttgc

SEQ ID NO: 595570 - DNA, 155 bp, Homo sapiens
ttaaatgaaaagtcatatcatatatgagatagacagtttttatagggtctataaatttaagatttcagaagagtatatggtgtattccctctgtaatagatccatatctgttgtcactcctatagtccttttgttgttgtttggtaggcatgggt

SEQ ID NO: 595571 - DNA, 237 bp, Homo sapiens
  misc_feature (14)..(14): n is a, c, g, or t
  misc_feature (16)..(16): n is a, c, g, or t
ctgggactttaagngnaaagacagcattaaaaataaattatgctgtcaatatacaaaaaatgatcttttcattataagcatatataaagcctcctgcaactattacatatcactttatcgaatccaaacttttttgcttgcccccttttgagggccctagcgtgtgacatcctcattgaggacataagcctttagagatccatcaattcatcccttttatttaacagataaaggagg

SEQ ID NO: 595572 - DNA, 200 bp, Homo sapiens
  misc_feature (101)..(101): n is a, c, g, or t
  misc_feature (104)..(104): n is a, c, g, or t
  misc_feature (169)..(169): n is a, c, g, or t
  misc_feature (193)..(193): n is a, c, g, or t
gcacgagattgactgtaatattagactagcagaaagggagactttgagtcatcaaatcccctaataaaataggttctttaggctgggtgccatggctcacnccngtaaacccagtgctttgggaggctgaagcaaaaggacactcaaggccagcagtttgagatcaacntgggcaacatagtgagaccctgtntctccca

SEQ ID NO: 595573 - DNA, 145 bp, Homo sapiens
tgtacggcaggagatcaacacactgcatactgtccggcaagtctgtagaggtcggcagctgccagagtgacaggaactccagcagtgggacggcatgctgctgtggctgagattgcgtagcttcaccaccagaacaggcagcgcc

SEQ ID NO: 595574 - DNA, 2952 bp, Homo sapiens
  misc_feature (919)..(920): n is a, c, g, or t
  misc_feature (1096)..(1097): n is a, c, g, or t
  misc_feature (1100)..(1100): n is a, c, g, or t
  misc_feature (1102)..(1102): n is a, c, g, or t
  misc_feature (1108)..(1110): n is a, c, g, or t
  misc_feature (1731)..(1731): n is a, c, g, or t
gccggggacggggcaggggcggggcgcgagcgggagaccagagagccggagccggatcccgatcccgagtccgagccgccgccgccatgagctgccccgtgcccgcctgctgcgcgctgctgctagtcctggggctctgccgggcgcgtccccggaacgcactgctgctcctcgcggatgacggaggctttgagagtggcgcgtacaacaacagcgccatcgccaccccgcacctggacgccttggcccgccgcagcctcctctttcgcaatgccttcacctcggtcagcagctgctctcccagccgcgccagcctcctcactggcctgccccagcatcagaatgggatgtacgggctgcaccaggacgtgcaccacttcaactccttcgacaaggtgcggagcctgccgctgctgctcagccaagctggtgtgcgcacaggcatcatcgggaagaagcacgtggggccggagaccgtgtacccgtttgactttgcgtacacggaggagaatggctccgtcctccaggtggggcggaacatcactagaattaagctgctcgtccggaaattcctgcagactcaggatgaccggcctttcttcctctacgtcgccttccacgacccccaccgctgtgggcactcccagccccagtacggaaccttctgtgagaagtttggcaacggagagagcggcatgggtcgtatcccagactggaccccccaggcctacgaacccactggacgtgctggtgccttacttcgtccccaacaccccggcagcccgagccgacctggccgctcagtacaccaccgtcggccgcatggaccaaggagttggactggtgctccaggagctgcgtgacgccggtgtcctgaacgacacactggtgatcttcacgtccgacaacgggatccccnnccccagcggcaggaccaacctgtactggccgggcactgctgaacccttactggtgtcatccccggagcacccaaaacgctggggccaagtcagcgaggcctacgtgagcctcctaggtatgcctttgtctgtctccgtcaggaaaggtgtgggagtggatctgggacgggcccatnnccngncagtcnnntccacacccattacctaatgtggctctcatatcatctgggtgaggaagggactgtcactcccactctacagaggaaaagaatgaggctcagagaggtgaagtaagctgctcaggattgcacagctggtaagcactaagctaggattctcgcctggatcctgctgctttcaaaaccattgccttttccccgcctacctccgatgagcttcagaatcacctgggatgcttgttaatatccaaattgcaaatcccagggtgtccgattcagtagatcttggcgggctcaagaatttgcatgtctgacaagttcccaggtgatgccgatactgtgggcctggggacccctctctgagcatccgtgcaccccatcctgccttcctgggggacccaaagcacctcatgaccctgctcattcctaaaaagacctaggacatctagtcccatgttatggatgtgcagacaaagacacgggtgcaggaagactttgtgaggggctcggggtgaccccttcggcacagggcagaggctcgtgtgtcctgcccactgcctggcagagcctccaggtggggtgggcccgggacagcaggaaactcaggttccctttccctccgagctcgcggnccacatctctcttggggcccacatctctctctggccccaaatgatgagccaggagcactgtggccacacccaccacaggggctggagtacacgagctaccaaaaaggagacttcttttccagtccatgggattttagaaggatcctaaatgtcaccgaatcagggcctcttgttataccattcaaggcactgaggcccagagagatgacgtggcggtgagaggtgtcggctcgacaaggcacctcccgctgctgattggattggagaagggagccgcccagagtggcgtaggttcggcccttccgagggcagctcctgtgtgctgagggctctgctgctctgagatgccgcgtcccttccagacctcacgcccaccatcttggattggttctcgatcccgtaccccagctacgccatctttggctcgaagaccatccacctcactggccggtccctcctgccggcgctggaggccgagcccctctggccaccgtctttggcagccagagccaccacgaggtcaccatgtcctaccccatgcgctccgtgcagcaccggcacttccgcctcgtgcacaacctcaacttcaagatgccctttcccatcgaccaggacttctacgtctcacccaccttccaggacctcctgaaccgcaccacagctggtcagcccacgggctggtacaaggacctccgtcattactactaccgggcgcgctgggagctctacgaccggagccgggacccccacgagacccagaacctggccaccgacccgcgctttgctcagcttctggagatgcttcgggaccagctggccaagtggcagtgggagacccacgacccctgggtgtgcgcccccgacggcgtcctggaggagaagctctctccccagtgccagcccctccacaatgagctgtgaccatcccaggaggcctgtgcacacatcccaggcatgtcccagacacatcccacacgtgtccgtgtggccggccagcctggggagtagtggcaacagcccttccgtccacactcccatccaaggagggttcttccttcctgtggggtcactcttgccattgcctggagggggaccagagcatgtgaccagagcatgtgcccagcccctccaccaccaggggcactgccgtcatggcaggggacacagttgtccttgtgtctgaaccatgtcccagcacgggaattctagacatacgtggtc

SEQ ID NO: 595575 - DNA, 218 bp, Homo sapiens
tgggagagggggtctcagcacatcacgggagaagccaggcaaggaaacagatccctcagcaccttcttggaaatacaaagattggaagaaggtcagagcagatggtttggtggtggttcttctgtgggctaccaaggaagtcacaagtgatgacagaccgtacaagatgtacagttgggacaaagaggtacagtttgtacaacagaaaggtaaacgat

SEQ ID NO: 595576 - DNA, 1895 bp, Homo sapiens
  misc_feature (919)..(920): n is a, c, g, or t
gccggggacggggcaggggcggggcgcgagcgggagaccagagagccggagccggatcccgatcccgagtccgagccgccgccgccatgagctgccccgtgcccgcctgctgcgcgctgctgctagtcctggggctctgccgggcgcgtccccggaacgcactgctgctcctcgcggatgacggaggctttgagagtggcgcgtacaacaacagcgccatcgccaccccgcacctggacgccttggcccgccgcagcctcctctttcgcaatgccttcacctcggtcagcagctgctctcccagccgcgccagcctcctcactggcctgccccagcatcagaatgggatgtacgggctgcaccaggacgtgcaccacttcaactccttcgacaaggtgcggagcctgccgctgctgctcagccaagctggtgtgcgcacaggcatcatcgggaagaagcacgtggggccggagaccgtgtacccgtttgactttgcgtacacggaggagaatggctccgtcctccaggtggggcggaacatcactagaattaagctgctcgtccggaaattcctgcagactcaggatgaccggcctttcttcctctacgtcgccttccacgacccccaccgctgtgggcactcccagccccagtacggaaccttctgtgagaagtttggcaacggagagagcggcatgggtcgtatcccagactggaccccccaggcctacgaacccactggacgtgctggtgccttacttcgtccccaacaccccggcagcccgagccgacctggccgctcagtacaccaccgtcggccgcatggaccaaggagttggactggtgctccaggagctgcgtgacgccggtgtcctgaacgacacactggtgatcttcacgtccgacaacgggatccccnnccccagcggcaggaccaacctgtactggccgggcactgctgaacccttactggtgtcatccccggagcacccaaaacgctggggccaagtcagcgaggcctacgtgagcctcctagacctcacgcccaccatcttggattggttctcgatcccgtaccccagctacgccatctttggctcgaagaccatccacctcactggccggtccctcctgccggcgctggaggccgagcccctctggccaccgtctttggcagccagagccaccacgaggtcaccatgtcctaccccatgcgctccgtgcagcaccggcacttccgcctcgtgcacaacctcaacttcaagatgccctttcccatcgaccaggacttctacgtctcacccaccttccaggacctcctgaaccgcaccacagctggtcagcccacgggctggtacaaggacctccgtcattactactaccgggcgcgctgggagctctacgaccggagccgggacccccacgagacccagaacctggccaccgacccgcgctttgctcagcttctggagatgcttcgggaccagctggccaagtggcagtgggagacccacgacccctgggtgtgcgcccccgacggcgtcctggaggagaagctctctccccagtgccagcccctccacaatgagctgtgaccatcccaggaggcctgtgcacacatcccaggcatgtcccagacacatcccacacgtgtccgtgtggccggccagcctggggagtagtggcaacagcccttccgtccacactcccatccaaggagggttcttccttcctgtggggtcactcttgccattgcctggagggggaccagagcatgtgaccagagcatgtgcccagcccctccaccaccaggggcactgccgtcatggcaggggacacagttgtccttgtgtctgaaccatgtcccagcacgggaattctagacatacgtggtc

SEQ ID NO: 595577 - DNA, 111 bp, Homo sapiens
aagtacagtaactttgcatatgtgggctaattggggcttaattgtgaaaatgaacaatggaagaccataaggcaataaggccaaatcagagcaagaagaggagccaagatc

SEQ ID NO: 595578 - DNA, 935 bp, Homo sapiens
tcaccttcgtgaagccggccttcgaggagttctgccgtggtgacaaagaagtatgccgatgtgatcatcccacgaggcagtggacaatatggttgccatcagacgcgtgatcgttgcagcacatccaggacattctgaattggtgacatctgcatagatgtgcaccgcaggagggtccaatgtggcggatgttacaatgcggaccgttttctgagccggggaatcaccgtgggatgcatgacctctggcaaacggtcacatttggagtccagcagcggaccccactgaggggctgtcgagcctcgagggcaaggtcgtcccggctcgcggcaatgtgtgttcagggactgagcctggggacgcccaactcagacccactgcttcctctcggggcaacgccaggggagtgttagcagcgaggccttcctcactcaggagtggaaactcagatgtgtcactcagactcaacttgctgggacactgacaggcgttcctgaggttttcagccacttaggctcgttgcggtttaaagatccctctaggtcactgagaaatgccacagaatgtgcaggaagcctgggaggcttctgtgaggaatgtgaggcacattatcgggcgcaaattgaggagacagcctagacactggctggcctgatgtttgttgacagtgaacccacagtgggcagagagtttttccagtctgatctggttcttacacactcacacacattactcaaacagtttgtgaacaagtatcttcactttttacctgttacatggtctcaggttttcgggttctggttcataaccaaggcgtggtgtgggcctacaagctaattatgaccagtggttgcgtcacggtggctaacgatattgggacctgtggtgtttcccctgtttgccaaggcgaccaggcatctgtaaccgcataccag

SEQ ID NO: 595579 - DNA, 465 bp, Homo sapiens
gtgcgaccgaaagggtggaattatcggaggtgagatgttgaaagacgcgtccaagtaagcaagtgactgggaaaatcacagagcttaactatgtcacaggtatctccagagatgatgccgtgcacataagcgtcggtgtagcacaggcacatcaccacaggagtccttctcgcgtcaggatggcaggcattacacccactcacgctggaacccagcagacagtgtgggcacagtgaattcctgcccgtccattgaactgaaaacaccaccacacttggagtgtctgaaagcctctctcatctgcacggaggggaaaggggagatttctttgaagtgactgcaggttgctcatcagaaaccacagaagccagaagatggggaaacagtgtcgatttttaaagtgccaggagacaagaaccactctcccagaaccccacatccagcgttgcggccgcggggtaccga

SEQ ID NO: 595580 - DNA, 650 bp, Homo sapiens
acttatggccgggggcggcagtgccagaaagccgaatatggcggtccccggggcgctgatcctacgggagagccccagcatgaagaaagcaggggcactggtaaatgcaatagattccggaagatttccacggttggttaattggattcttcaaaaacttcacctgaaggctgagagcaggttcagggaagaagaggaagaaaaactttaagcgggattttctctagaggaaccagatctttacctaggtcttggaacaatatcatttattttagaacaggcaggggatcacaatgggaagccaggaactttgcagcagcaattagaggacattcatcttagaccaggcaaagctgaagcatttggcaatacttgggcttctatgggtcaaggaacaggtgaaaaggtccggcagagaattctggcttccttgaagctagagactggtggatggcagcttaacccttaaatggcttaatttggttaagcaaaactcctggagaaagttcttggggaaatcaatcaccaggaagttgtttgaattctataacaggctagagccttttccagcccaaggtgaattccctaccatgaggtttcgaagaccgcctttttcaataggcttctgccacctcattatttggcatgga

SEQ ID NO: 595581 - DNA, 266 bp, Homo sapiens
gatgtttaccgtgtgttaaaaaacttcctgggtccttccctgaacaagcctagtccaacatttttttccagtgagtcccatcctgggatccagtgtataaatccaaaatcatgttttgtgcataatttttccaaaggattttattttgtgaactatatcagtagtggacctttccatataatgtaaaaagattttcatacaaacaatgcaacccactatccaagtgttataccaactaaaaccccccataaaccttggacagtgga

SEQ ID NO: 595582 - DNA, 1080 bp, Homo sapiens
gcaaccccgctctgaggaaaagagtcgacaacaccaccccactcttttgaagaaaggccgcgccactcttctgtctgcgtgtgtgtcgacaagagatatatagaggggcggcgccgcgggaaaaaagtcgtgtctcttttttgtgttttttgtgctgtgttttctctgaagagcgtctcccgaccactaagagagacgtcttctgtggtggcgtcctgaagactctttggtgaagaaaagaggggtcggagcccctccctgctgtggcgtataaattagtgtgtgtggggggctctcgctgcacagcggggagacacacgctgttccgggagtttcctccccctgtgggggggcctctctcaacacacagtgccccacagtgtgttctcacccacagcggtgtgctcacccgctgttgtgtctcttctgtcgcaacaccacccctcgcgcacgctggtgtgtgtctcttgtgtttgtggtgccacacgctctcaccaggggcgagaccccctggtgtggttgtctttctttattagtgccgccccgctggcggccctcttcttctctccctcttctttctctctgtgcgccacacggcacagtgtttttgtggcgtctcacacagggggggctctctcaacaacgccgcccgcgcggtgggcgcgcccgctctatatagagagcgtataccccccctggggtggtgttcttgcacagagagttctatttgtcgaccgccccctatatgtgcgccgctctctctagagaccacacaggcgcgcgacagatgagcgcaccctatatctacagggcgcacgctgttgcgctctctctcttctccacatgagaggtgtgggagagaaggcacacacacagggcacagcccccaacagagaggagagtgtctctgtgcccgcgtgtctcctccccggggcgccacatgagatggccacataaaatttgtcccttgttgggtgtttggaattacacgggaccgtgtttggcttaaaagagacttgggtctaacccagaaagttttgtttttttaagaaaattggtgaatacctggttttcctgtga

SEQ ID NO: 595583 - DNA, 296 bp, Homo sapiens
cggtgtgagtgtctagagcatcccctcctgcagatgaccaataacactggtgcagagctcagtcccgcagggcagcagccctgccaggagtgtcaggatcaggagatgaacgggtcatgatggaattaaaccacctgaaggacaaagttcaaggttgttagaagacattgtgcctgactgaacatcacagggaaagcctcatggagatggcaaggtgccttgccaagacagggacagacctgcgcggatacgcgtacgagcctgcagcctgtttgaacatcttctcaagcgagcac

SEQ ID NO: 595584 - DNA, 789 bp, Homo sapiens
actctcaatgtaaattgtttttgaaataagatcttaagaatacaaaatgtagacagattaatattcagggtgctgtacttttgagccaatatgtagcagagaaaaactaagtttctctgtggcagtatttttatgtgttgggctatttgcccaggaaattatctgaagactaagaattcatatgtgaagtgtaatgatactaatcaaagagtgagtaaaatttccattggctaccatatatgtgtgtatatatttatgtatgtatgtgtgtgttacatatttgagacagggtctcgctctattgcccaggctggagtgcagtggcatgatctcagcttactgcagcctcggtctcccaggctcaagcgatcctcccgcctcggctcccgagtacctgggactacagacaccaccacacctggctaatttttttattttttatagagacacagtctttccatgttgcctatgttggtcttgaactcctgggctcaaataattttcccaccttggctccctgtagtgctgggattacgggcataagcccatgtgtcaggccccatgtattgttaatagtgaatgttggttttcattggtttacttttcagtttattaaaggatactattacagacacaggaatttacatttcaaagtcattttgacaaatcagtgctggcttttatttttctcctttagcacatttgtatggtacttcagagaaatttttaatacctttaaatatggtcatgaccataatggaatatactatttgtttttgaaaataatga

SEQ ID NO: 595585 - DNA, 525 bp, Homo sapiens
  misc_feature (14)..(14): n is a, c, g, or t
cactgaaataaacnccaattcaccattatgaagtcaaatcttataaacaagcttggaaacccaatcccaaaatccctcagatccacaccttatacactcagtgactccatgtcttatgagcccatggtgacccatgccccagggttggggtcagaagaatccaggggaagtgcaatagcaaggggactcttcccacagccttttttgagggttcttcagtcctggctaactctgcattccatttatgatgcctatgaggaatacaagaggagcttcaaataagcactgggtatatgagcctggagctcaccgaagtcagagggggatggacatgtgggagtttttagcatgtgggtaaccatagcaaagccttgcaaattaataagggcccctttaaataaaaaaaatttccattataattttggccagccttcccaaaatagactttctgcattattatgacaatattttaattttgaaattttcataagatttactctgttgcaaattagctgttaaaactta

SEQ ID NO: 595586 - DNA, 427 bp, Homo sapiens
tgatgcatgcacacacagacacacttgatacacgatgacaccttgctctgtatggaaacatctaaacatctcgtagatgactatgcaggctgtatggctaccagtatcctgtctgaggtgtatatgttaaattcgagatcagtttgtatgtaagggactcttgtcctatgtaacagttaaggtgggccgggtgcagtggctcacgcctgtacatcccaaaggtgttctttttatcttcgggatattaaccctttatcagatacgttatttggaaatattgtgtctcattctgtaagtaaacttttctctctgttgcattgtgtctttggatgcacaaaaattcttaagtttgatatagtcccattgatcttatatagctttggtatcctttccttttggcgtcatatccaagacattctagccaaat

SEQ ID NO: 595587 - DNA, 267 bp, Homo sapiens
acaaggcaagtatgggtaaagaaactctggctttggttagtaaccacattccagaatattagaactggggcaggctatggaacctccaggtgaaggaaaaggtcaaatcagagagaaatgccatgatgtgcatttttgaagtgcaaatgtttgagtatcaggaaagacagtcactaactttcagcaagctggttcatcatgctgactttataaatacatttatataatcatttataacacaagaataaaagtatggatcctgtccca

SEQ ID NO: 595588 - DNA, 589 bp, Homo sapiens
  misc_feature (104)..(104): n is a, c, g, or t
  misc_feature (247)..(248): n is a, c, g, or t
  misc_feature (253)..(253): n is a, c, g, or t
  misc_feature (260)..(260): n is a, c, g, or t
  misc_feature (265)..(265): n is a, c, g, or t
  misc_feature (274)..(274): n is a, c, g, or t
  misc_feature (283)..(283): n is a, c, g, or t
  misc_feature (285)..(285): n is a, c, g, or t
  misc_feature (290)..(290): n is a, c, g, or t
  misc_feature (297)..(298): n is a, c, g, or t
  misc_feature (300)..(300): n is a, c, g, or t
  misc_feature (317)..(317): n is a, c, g, or t
  misc_feature (371)..(371): n is a, c, g, or t
tacagtgtccaatgatctcacttatgcacacaacgtggcggcacagcgcaactacatagctcttgccagcactactgtggagaccacggaccctgaaaaggagntggagccggctctggagctgttggagcccattgaccagaagtttgtggctatcagtgacttgtatgagcccattgatgatggttgtgagagccaggtgttctgttcctgctcctacgatgccaccacacactttgagacaacnngcaangacatcnaaganatctacaancgcatggcngncacgnccttganntngagaacatgaagcgcanacagaacgacgtctttggagaagctgagcagtgattgtggccgcccccagcccntgctgccccagcctgtgtctgttctcctcgagggctccagcatcctctgcttcccccaccacgttcccattaaccaacttattggtccactggacacaatctcttatacctatgacgcgtaggggctgtgagcagagtgggggggtgggatagtcctcctctttcgtttggcccttccttatcctaggaaaagagggttcctctccttgtgtgtgtct

SEQ ID NO: 595589 - DNA, 209 bp, Homo sapiens
caccatgtgctggctggacactttgtcacttttgaagcatgttactaaatgtcactgattaaaaaaaaaaaaaaaaaaaaaaaaaaaaaaaaaaaaaaaaaaaaaaaaccccacttttttttttttgcgcccctggggtcacaccggggggcacacaggggggggcccggggggcggggagaggggggcggggcgaggggagcggccca

SEQ ID NO: 595590 - DNA, 198 bp, Homo sapiens
caccctattgtctacgagtgaatagagggataggcttagagcgcgaactattatgctttgttgatggaatctatggaagatggggactattgctactatgatgatggatagcaatatggcacggacgcctcctattttcttagcgactgatatgataatagtgtatgctaataggaaatatcattcgaaggtgccata

SEQ ID NO: 595591 - DNA, 764 bp, Homo sapiens
tccgatcgagcggagtctttgaagagactgtgaaagaccctcaacaggatttcacgcagaggctgagaagattgggggcagctcctacctcgagggctgcctggcctgcgccacggcctacttcatcttcctctgctatggagacccactagttagaaggtggcccctcccgccccaccgtgcatccctatccctcagggactgccctgatggacttgtctcatccttgatctgtgctcctctgttttgcaggttctcaagcaagattggcccgctacatccaggagcagaatgtagaagatctttgacacctcgaggtcctcctacttacatgaccctgtggagcgtggggagtgacggttgattgacatctccatctacgaggaccggtgacagcagatggcagtctccagtcgatgcggccagtcgatgcatgcgagcacgttggacatcaatgcacgcgggtggcgtggctggtgagggtcgaggggccctggtgacttggccgagagtccctggtatggaggtgtatggccggagtgatgggcccttgtcatcaccttgccgtgccgcgcttgcgcctaccagaagactcccgtgttctgagatcatttcatttggagctcacacctgcatgtcccggtggtggggaggagaggagatgaccgtgtgcctcactactttcctggtcggggccatcgacacttatgcccacctgatctcctcatcccccctgtcatggattcatggccatgtaccctgga

SEQ ID NO: 595592 - DNA, 171 bp, Homo sapiens
tcaagctcggtacccgtcttgggactgacccgagatcgacagatcgctgcgtagcgtgttctcgccgtagaactggtggaatgcacggccgaccggcgacttggtgaacgccacgccgccggcatggcccggcgtatgccaggaatagttcgactcggccgcatggtgggt

SEQ ID NO: 595593 - DNA, 87 bp, Homo sapiens
catggatttgctggtgcagtacaactaggcttaatagggacatgcaatgcaaactaaaatagtaataattttcccatcagaatggta

SEQ ID NO: 595594 - DNA, 245 bp, Homo sapiens
ccgtcgtctagaggatcccgtactgtggtgtaccgtctgctaaacggaaactgaaacaccattccccctgccccctctccccccgtgtattcctgccatcacaaaaacactactgcaaagagagaacataggaacttctttctcaatatctcaactcttttgcaagctagagtgagatgaatttttgtaacaaggcaatgcatgacacgtagttaaaacagcacgttctctgtacgctggaactg

SEQ ID NO: 595595 - DNA, 112 bp, Homo sapiens
tcgccagaatcactataagggagtcgtctggatcgagaggcgcagtgtccagagggcgaaggtgggtccactctccctctgccactcccttgtagaaggagccgatctggag

SEQ ID NO: 595596 - DNA, 430 bp, Homo sapiens
  misc_feature (52)..(52): n is a, c, g, or t
  misc_feature (64)..(64): n is a, c, g, or t
ggggtggtggctgccatcaacccccaaaatgtggttacgtttaataaggagntggggccattcnaagtgtttgtccgtgtgggccagcaagtgaatgtggtgggccaggttggcaacccaaaaattttcccggggttccaaaggaaaacaaccccagggttgttggccccgggggaaggggaaaaattggcccctgaggggttttttccggtaccccccatttgggggggttttgtttcccttgggaagaaccccaataaagattttttaggggccccccgggggttttgaacggcagttgatgttatcagcaggccaggattcctgctgccaaggggggaccggggggaaaattttggggggaattgtgccccccggtttttttgttacggagggaaaaaaggttgttcaaaaaaaatttttttcccca

SEQ ID NO: 595597 - DNA, 267 bp, Homo sapiens
ctcaaactcctgagctcaagcagtccacccgcctcagcctcccaaagtgctgggattacaggtgtgagcctccgtgcttggccagcccctttttcttttacttactatgattttgagattcaacaatgttgttgcatcagtagttcattcccttttattgctgaataatgtttattatatggatatgccacatttgtttatctatttacctgctgatggacattttggtctgtataaataaagctgctgtgaatattcttgttcagg

SEQ ID NO: 595598 - DNA, 1157 bp, Homo sapiens
aactgcatggctggtcctggcctggagttttttggattctctctctctctctctctctctctcagcacacacacacacacacacatgccctgtctcgcgcctgatgtctcgccctgctgtgccgtggtgtgctgctggggtcatgctgcgtgcctgctgtgtccagtgacatgggtctgtgttcctgcctgcgcatgcgcccatgtgcccatgctctgtccatgatgtcttgctgtgacatgctgcactgtccatgtgcacttatccccacacatgtgatggatgcctgtgtgccacctctcacaagctctctgcccttgcagacgcttggcctatgtgtcatgtggatgtgcatgtgcatgcatgtgagcatgtgctattcttggtgcctactgtaatgccctgcagcttggccctgcgttgcatgcttactgtcttgccttgcatgcccagactgtcctcctgtgtcctcctgatgcccccgatctccactggaggggacgcagcatttccagcccagccctccccatcttcacctcgcactcccctgacacacttgtggagcctcccttgattcctggtgacaccctgctgcttgtgcggggatgttatgcctaacttgcacctgcttgtggtgacccccctttgtcccatgtgcttgttactgcagttgttggcacaatgtgcattcctggtggatgcatgtgctgattgcccccaaaatgctgttgggaagaccccatgcccactggctactactcccccgagatggacctgtgttgcaacggcccaaggatacgacgggattgttgtcggggcacaccggttgttgctccttgctttgctcaaggtggtcgcgtctcatccccagtgcttggtgaagcgtggtccccccaaaggcttcttggcttgggcctatcccgtcttcccacctacctaccaagttgggtgggggtggttggggtggggctggcccaaacctgcactgcatttttggctccttccttgcaactttacgactggtacgttggataaatttggtgcccagatgtgtccccttacttgcacgcccccaaaacacatccccttatggccttgagccccttgggggccccccaagcagcccatggattttcagcccccagggacctccccag

SEQ ID NO: 595599 - DNA, 223 bp, Homo sapiens
gcgacagggcgcgggaggaggggaggagagtgagaggaaggaggggaagggtcagggcgcatccgatgtatttttaaccttttctgtattatagagactgcaaggaaaatagaataaacaacgtctatacttggggggtgggggctaaagtccacatatgcacatgcacattgagtgtgtcctatgatgtggaactcagacctactgaggagtatctgtggct

SEQ ID NO: 595600 - DNA, 147 bp, Homo sapiens
gttgggctgtcgtgcgaggcttcgggatctgatgtctgccggcgaccagtgtcaggctgactctgctttctgggtgccgtccccagtgtccctgatcaggcctggctagtcagagccctgggatgataaggtaagcaggagccaccg

SEQ ID NO: 595601 - DNA, 876 bp, Homo sapiens
  misc_feature (561)..(561): n is a, c, g, or t
gatacggggagttcctccttgctctcgccctactctttctggtgtagatcgagctaccctctaaaagcagtttagagtggtaaaaaaaaaaaaaaacacaccaaacatctcgcagccacaaaggggatgaaatttctttctggggcatcctcttggttctcccggtaactggatcggtctggctccctaagagtccttcgggaagctttttatccctaagaggagaccatcagtcaccggggaaatcggtgctggatcacaggagctggggcttgtaatgtgggagactggactggcctatgaatttggctaaaatataaaagcaagggctggtcctcggggatataaattaagcttggacttggagggaaacaggttgccaaattgcattgggactgggtgccagggtcaactaccttggttggtagactggcaggcacccgagaagatattttaccgctctgaaaagaaaggtgaggcagaaaattgggagatgtaagtatatcaagtaaaataaatgctgggggtaagacaataacatccagaatgtgtgggttacanaaagatcttcagatggacaaagacttctgggcacgttgaattctctcggcctcttgtctgggactacaaagggggactttgcttccttgcaattggacggaaggaataacccttggcatatgggtcactgggcgttccggcacgctgggaattgtggtcggtgccccttttttactcgggtactggccaccaagtcgggtgcgggggttcacaacaccttggacagttagctggtcgcttacaatactcgggccaacacctggtcttgtgcctaatcgaacacggtatcacaaaccagtaatttggccctcggcg

SEQ ID NO: 595602 - DNA, 113 bp, Homo sapiens
tgacttctgctctagtatagagaacgtctctggaatgtgatcctgggtcaatgagtgctctagtagttgttgggtaagttacagaaactgtggtttggttttctttatctgga

SEQ ID NO: 595603 - DNA, 1102 bp, Homo sapiens
agatggcgacctctctgggttccaacacctacaacaggcagaactgggcaggatgcggcacttccccgtttctgtgccagacatgtcttggagaaaacccatcatcatccgcaatgcaccaacagaacaagtcatgggaaggcacatgcaacactctgtgccaggcccattcacagtgctcttcgcatgggtgccctggcagctccgcgcatgcgttctcgacgcaagcactgcacagtgtgcccaacaccatggcagataaattgcaagacatgtcgtgtcagcaccatgcctctttcagaccctagacgtatggccatgacccgatccaggattccgtgacgcaggcacttgtcttaataaacgatgaacatgccaacagtcagcatgtcacacacaagcagtactactacaccagcaatatggcagcagagagatctactaacctctgatgcgcacccacggaccagttatggcatgctaggcgagaccacgccacatctcacacagctgcacatgctcgctcaacactggcccggaacgcacaccctacatacaacacgggaactcgaccaccacaatttggctcccttctgggtcgcaaaggagagttgataagagaaggaagaggcaacggcacaaacagaccacgagcaagcactacacgataccacactgaacccctctgacagaatcaagaaatactaacacagaccggaccacaacgagcacatcaccgaaaccagactaacctgaccaagcctacaaacagccggccttcacccaaagcaatcggctgcacccaaccagagagagatagacacatacacaacagaagactgaaagtacagcctaccatgaatacacccaccgtcaacacagtctacacacacatctctacctagaaccatcactcaatcacactataacacaaaacacaacaacaataatagcctaaacccatatctaacacaaaataaaacaccatcaacatctacttcttcatattataactacaatacaacaacaaaaaacaatacaacatcactaaaaatccaaccaaaaaacatcacaccacccaaccacaccaaaaaacaaataa

SEQ ID NO: 595604 - DNA, 1077 bp, Homo sapiens
  misc_feature (587)..(587): n is a, c, g, or t
  misc_feature (724)..(724): n is a, c, g, or t
gctttctttcggcagccttacggggcccgaagcccgtcgtgtgaacgggtgcagtatctaagccgtgagcggggtatcaggcgggccggcgagcccctcttcatgacctccgagtgccgccgggcctctagagatcagacatggccccaggaacttgaaaggacttggcaggagacgagcatgccacgacgggcctcgcggggacatggtgcagcggtcgctgaagcatgttgctgggggctcggcgaccgtggcctacggtgtgcgcgaatctcgtgattcaccgttggcatagggcggcgcgacagacggcgcatcttgcgttcaaatcggatcggtggcatgtgcagcaggtacacgtatcctggaccgtagggctcttcaagtatcaaggatctcgcttggattccagctacctcgcattagtctagtgagcgattactgggccaggactctcgagaagagatctcgctccactctacagtgcatcgcgaaaggaaccatagcgagatcggtgaatagtctgcccttgcagagtgttggtcttcgatcctaatgctcagggagctttcactagctagtgtcanctgagcagccttcaggggcctgggacttacgaagagcaaacgcagctggttcgctcggtcaccatctgttcatagacgagagagctggcgtcaaaggagttgtgagtcggccctaaagcttccaatagcctcgacanaggcttcggatcaagcccagagcggggtcccacaagggttattccacgttgatctcggaagtaccccggccctgagtgaatccttggaactacggaagaaatgtggggccctagaggagagccattttccagagccaccgttgctaggtccgccttggggcaattgtgaacttggttggtgcgccatattcctagcgagagggatgtgtcattgggcacgtcattttaacgggccccggtagacgaagtttaccgagctaagggcttgtggctctggtttgatggaataggagcccaccaagcagaaaggttgggtcaccccacacgccattgtggacagggaccccccaagg

SEQ ID NO: 595605 - DNA, 696 bp, Homo sapiens
agcgggggggcgcgcggctcaaggctcctggaaaagaccgtccaccgcctccgtgctggcggtgtggacggcggaactcaggggagaaaagcgattcgagtgtgtggataatcactatctactggtagatgattccgacattgagaagatagggaaatagactggcacatgatgcagaccgtggattccatggttgaggttggaatactgccggtaagtgtcgccagaatagtgggtcaacgatggatgatgtgtcatcatgcagcttattgaggcacgtagcactactggagaactatgtgcaaacatctaggggtgacctggtcccagacaggtggacagtcggaggggtggaaagagcactgtctcgaggtgccaggtgacggcggggtcttccatggcaggtaccgagatacacgtccatagaggagctccggtggcctagtcgctggacatacggcatgcctgtgcgctgagacctcatgtctccagcttacttgtggcaggaacgcgcagcacagtcttaatttcgtgtccttcgcctgtaagaatcaacactcgacgtagccaagaatgtggggtgggtgggccgtggaggccgtcgacggtgcgcttggctggtgtggttaacaattccgcgctagaaccgattgttggtggaactgctaccgttgggtttcgagtcacggaacccga

SEQ ID NO: 595606 - DNA, 205 bp, Homo sapiens
ccccccgggtccccccggggggggtaaggggttttttcccccccccggccctggggtgaaggccggaaaataaggggggccagcccccctcccccttttctttttgcccccgggttggggggggggggatgggggtttttttttttttttccttttgttttgaaatttaaggatgccaaaaaaaaaaaatcccggttttttccca

SEQ ID NO: 595607 - DNA, 228 bp, Homo sapiens
actgtaggtagtaatgcccaatcccacttgccggatttcataaaacgccgcattcatttttgatagtactgatcccgtgcaataaaccttcgccacgtagatgccgtggaatcgaatgatctagttccatactccttgagccagtagcgctggcagcgtagtgcccttgaatagacgccttgcaacaacagacggtacctgatactatgtcagaatatactagtacgc

SEQ ID NO: 595608 - DNA, 140 bp, Homo sapiens
ctgcttggaacatcacctcttcctctacccccaactcttgtcccattcttcctcatccctggtgtatccatgaagaatcacatcgaaaaatacccattcgtgatgaccttttgccttctttgcattttatgcaattgaaa

SEQ ID NO: 595609 - DNA, 342 bp, Homo sapiens
gttatagtcaatattaatatgctaagaagagaataaaatcattgttacaaactcaaagaatgaacaaatggaaagagagtcaaaaatgggccaggcacagtggctcatgcctgtaatctaacattgtgggaggctgaggcaggcggatggcttgagcgcaggagtttaagaccagcctggccaccatggcaaaaccctgtctctactaaaaatacaaaaatttgccaagcgtagtggcacacacctgtaatcccacacccgcttctcgggtggctaaggcaggggaatcctttgaacctgggaggtggagacagaggctgcagtgagccgagaacatgccac

SEQ ID NO: 595610 - DNA, 156 bp, Homo sapiens
agacgacactgcgttagatgctatcgtcaatggaaactgtgagatacttcattagtctcataacgagaaatataattaaccttttatttatttatttattttgagacagagtctccctcagtcacccaggctggagtgcagtggcgcaatctcggt

SEQ ID NO: 595611 - DNA, 759 bp, Homo sapiens
gcgaccgttgactatgctctacaaacgagaaagacatggaagcactatacctatctattcggcgcatgagactggagtccgtaggcacagctctgagcctccttattcgaggccgagctgggccagaccagggagaccttctaggtaacgaccacgtctacaacgtaatcgtgaccagcccaatggctttggtgaatagatctgtctgtcatagtaagtacccatctatgaagtcggtaggcttgggcaacttgacatagttccgcctaataatcgggtgcccccgatatggcgtttccccgcataaacggacagtaaagcttctgactacttaccgtccggctctctcctactcctgctcgcatctgcgtatagtggaggccggaagcaggaacaggttgaacagttctaccgctcccttagcgaggggaactactcgccaggcctggagcctccgtagacctaatccagtcttctccgttacacctagcaggtgtctcctctatctgtaggggtcatcaatgtcgatcacacagagattatcaaggatagaaagcccgcagtaacccgtgcccgtcgagcgcaaagttcctatgacctaatgaccaataacttatagactaaaccgcagagagaagcaagaggcagaagaaggaatggctgaccactaaccatccagggggacatctgaatgcgggggcgggggagaaaaacaggaactggaaggccgggagcggtgagactaagattcccgggcac

SEQ ID NO: 595612 - DNA, 527 bp, Homo sapiens
ctccagagtttgggagtagggatgactcaccccacaaggtgtcattaccagctgtccagagcgcagcacacaacttgaactctgtcacctttctcagagtaagcactagcaacacatgtgatcggacaggacatggaggctcacatacttgtaagacacctggggcgcaaaaagtccatctgagttcgattctggctcaggcctgaggcgtagcgatgtggtccacagtgctggctccagtgatgggcaggcccaggactttcacaacatctgtgatctattggcaggctctgacaggcggagcatcatgatgtccttgctggttttcctggaatctggtctaaggctttgatgcttcagaaggctcatattgtagagcgggtgtgggaagctgtggctgacagggaccctctggcctgtgtcttcaggctcaaacaggttgtgccgacccagccagacctggctattcctggggaggaagggggtggatgcatgaggagagagaaaatggggaaagggatggatcg

SEQ ID NO: 595613 - DNA, 372 bp, Homo sapiens
gttccgcatactcctacagatcatcagatccggacatgtcaggtctctcagcacatggactagcattcacaaacgcacaatgtagctacactacagccccccatgcccaggcacagtttgttgctagctgtaacaaagacacactcagtattgtgtacctgcagccaacaccacctcctgtgctttcaacaggttcactcacccaagaggccagcacaaccacgaccgagtgtgtactcagtggcccagacaccccccgaacactggcactgccacaaggccctgaaggagtagactgtggggcaaagaggacaaactctccctcccctaagggacccggctcactgggcctccttcggaggttattggcat

SEQ ID NO: 595614 - DNA, 148 bp, Homo sapiens
gtctaaggggcgaacgtagggtgtgaagtatagtacggatgctatatgtccaatgatgttaaaagggtagcttagtggttgtcctccgattcaggttagaatgaagaggtctgcggctgggagtcaataaagtgattggcttatcgag

SEQ ID NO: 595615 - DNA, 191 bp, Homo sapiens
  misc_feature (9)..(9): n is a, c, g, or t
  misc_feature (138)..(138): n is a, c, g, or t
  misc_feature (141)..(141): n is a, c, g, or t
gggctgcanggaatttggcacgtggaacgaatggcggggtagtctgaagtcgttgctgtccagttggggaaggcgaacttgagcccgtgcttctggccgaagcggaacaggatgttgagcagcgtgctgctggccgtnttntgcgtcttcatgaacacgatgtcccgccgcggctggcagcctcccgccga

SEQ ID NO: 595616 - DNA, 299 bp, Homo sapiens
gtcgacgtggctgatgcctgtaatacctcccgctggagaggccgaggcgtgggagatcgcctgagttcgagagtttgagaccagcctggtcagcacggtgaaaaccgtctctattaaagatacaaagatgagccggatgtggtggcacgcgcctgtaaccccagctactggggaggctggggcatgagaattgcttgaacctgggaggcagaggttgcagtaagccaagatcatgttactgcactccagcctgggcagcagaatgagacggtctcgcaaaaaaaaaagaaaagtcgacg

SEQ ID NO: 595617 - DNA, 534 bp, Homo sapiens
gggagggaagctttgcctcctaatccgagtggctaatctcaggaagagccttcttattggcagtcacatttatggacagcttctgaagaccacagtcactcctgaaggagagacattattgttggaacagatcaatatcaacgttgtagttgacgctgggaatgagaatttgattcttcatctccgccgattgacaatttaccatgtcattgagtcacaacaggcctttcgttccacatggcaacgcggagagccttctccaggaggactgtgaattagtggtgttgtaatgcatggcacagtggagtccaccagtgctacctgccgaagtccggacatcctatgtcccagagtgaggtgcgtttggggctaccgattagctcccatagtatccaagacaaaggaagggaaatagcagagtggatttccataactttagcaagagagtggaagtggagaccggtcaatgtgccatgtgactttataatgagaaagatgtcagagacgaggatgaagagaggatatgagaaacaa

SEQ ID NO: 595618 - DNA, 255 bp, Homo sapiens
ctccttggcagagctagaataggttggaattaatttccagattattttcctgggagattttattttaacgatgtgaatgttacaaccatttacagttacctgtaatgggcttgatgatctgcatccccaacagtatgttcctttagttagtgttagttcatttgagattcacagatatatgcccatgtagcaacagtctgctgctgtctttcacaaacaaaaaaaaggtttcaattttttaaaaattgggcttta

SEQ ID NO: 595619 - DNA, 766 bp, Homo sapiens
gctgctctggtagtggacctcatcaatcactagcgccacgagtctctggcccagttacaatgccaagctggacacacggctcctctacgcgctgtgtccaaatagcagtaggagcagattgtctaggaggacagcgtggaggcaagtgggcgcaccagtcttcatggtctatcaccagcagtaccatgacaagagccgcgagtatgaccatgctttatgaagagtacacacggaccgtcccaggagctgcagatgaagcgtactggaattgaggccttcaatgagactatcacgatctttgaagagcagggccagactcacgagaaatgcacgcaacggaatacctggagcgcttccgggcgctgcagggcacacgacgaacgacgatgcaaacggatcctgctgaactccgagcggctcaagtcccgcaccttgccgagatccatgagaagccgcacgaagctggagccagcagctgcggggcccaggacctcggcaccacagagagatcgacaagccgcatgaacacagccctcaagccggacactcatgcagctagcgcaaggatccggaggaccagtaccatcgtgtggctcaccccagacaacggcgcccggccacgcaacgaacaatccaacgacgctggcttggggactcccaccacgtggcagactgagagacgcaaggaacgcacgctcatggaagagacgacggaccgaatctccacgccaccaacgaaggcaaacgccactaggggcaccgctgg

SEQ ID NO: 595620 - DNA, 322 bp, Homo sapiens
ttaaattcgctggcaggtggagtctctccaatctcatcgaatttagttgagacgagggcgtttgctatgatactcggacgtggcatgattaatgggacaatcttatcaaatatggcttccacagacacaccacatggcccgccgtggacttccgtacaactcactggaagaaatacacatatttgtcctttgcaagcatcctcagaaggccagtcattgtcgtttctagacgacatgctgcgaagtttggagtcaggttccactttcgcccctttgagagtgggtggaatttacttggccgtctccactggtcctgcccagg

SEQ ID NO: 595621 - DNA, 534 bp, Homo sapiens
  misc_feature (41)..(41): n is a, c, g, or t
  misc_feature (67)..(67): n is a, c, g, or t
  misc_feature (528)..(528): n is a, c, g, or t
ccggcctaccccggattaactcccctatccaaccgggaagncctaccccggcctttcccgttaatcnctgtagcccattcccctcctgtgaacacattcctccatataggggaaatgggtatgcacccctctactccccccaaaagaaagaaaacccacaaaaacacaggcagtgagaaaacccagctaggctagatcagtgtaatgatagcccagaataagatgtattgtaaagtaaaagtctgattgaagcataatacaatcagttgatttgatttaagcttttctagtgtcacattctagtcatagtattttgcaggttgtaaatggcgttaaagcaactcagatatacatatgaaataaaaatctgaaataggggttctgtatggcccataatataaaaatataggccatctggagaatgcaagagggaaagcatggtaacttctttggagggttttgcctgatgttaacttacatcccttgaacattctcagctagactgacattctgtgaatatatcattantagaca

SEQ ID NO: 595622 - DNA, 577 bp, Homo sapiens
ctgcttgaagaactgttgtaaatggagtttagatagcagaactctatgatagcatgtatgaagttcaccatttatgaggcctagctacagcaagagggaaatggggcaccatgacctagcgtctcctgtcatgccaaaataagtacagtcccactgacacccaggcacgattgagaacagaatacaggaggcccaacctaggctagttgttcacatagaagttaggaagtgtccgcactaggttattggaatcataggctttctagctttggtttcatctctcctttgcctcccaaagtgttgggattacaggcatgagccacagcgtccggcccatattgatgcttttgacactttattgtatatagctacattttctactgtgtgtattaaattagtttggaatcgaaagagcaagaaagttgttttttttcccccactctttgaatataaaaaaataaaaatcagcacgagttagctgctttttccatagtatggacctgggaggcggaggttgcagcgagccgagatcaagccactgcacgccatcctcagtgacagagtgagactccatctc

SEQ ID NO: 595623 - DNA, 402 bp, Homo sapiens
ctggcccccacacccagttcgagcagtgggtcatggaggagcgtgtggactgcctggagcagggtggccgaggcagcgtcctagcaggtcatgcccttcaccagcgcgtctgaactggtgaaggtgtcagccatgttcagccccaaggtggatctggccatcacggacctcatgctgcccctgggccgacaggaggctgctagagccattgatgcactctgaggggcttgtcatggccgcactgggggctggggactggcgcaaacgcaggcgcctgcaagggcatggatgaaggatgatgcatcgagccttacattcactgcacatggtgcgagcctatagcggctttcagagacgcgttcgagactcctgacctacaggatgtctcccggtttcttcttc

SEQ ID NO: 595624 - DNA, 215 bp, Homo sapiens
cccacagactactttttgctaaatggtatcaagattttctcgttgttgtcagcacgagagatgcgtctctaacatctcatcgaccatgtctggaggtcaaatcgatgattgtaaacttgctgaaataaactgctcctttcttgcatggctcgatgagcagtaggggtcctctgcgtgattttgcgtacgattgttaggattgctgcataaagccg

SEQ ID NO: 595625 - DNA, 358 bp, Homo sapiens
atgttacgacagcaacgtaaacactcacaatgtgttatcacctgaaaaagagaagcagatgtcagagccactagatcaaaaaataattaggtcagatcataatgagcatgatgagaaggcctgtgtgctacaagtagtctgcaatggactccaagaatcgaacaatgccatctaatataccatataatgtagaatttctccatcttgggaaagtctggataccagattacctgaggaagagactatatatagacttgcatgccgtagtccggataactccagtggaagttacccctaaaattccaagatctctaaggtgacaacctagagatgaatttaccgtaagacataaccgcgg

SEQ ID NO: 595626 - DNA, 182 bp, Homo sapiens
tatcagacatatttgggatggctaaggtgagtcttcatccatgatgctgaaatgcagaagtcagcacttcagattatcatcaattgtagtgtagtaggcccagataaccgaatatccagtattggtaaatattatactctggtactcctacggagacaagctagcctacaggaaccctaaaa

SEQ ID NO: 595627 - DNA, 124 bp, Homo sapiens
tttaatcgttgacaacgaacctttaatagcggcctgcaccatcggcgatgtcctgcatccaacatcgaggtcgtaaaccctattgttgatattgactctacaaataggattgcgctgtttatcc

SEQ ID NO: 595628 - DNA, 361 bp, Homo sapiens
ggcaccagcctgaggaaatcgacggggacaggctcgccgacttgcccctcaggtgcgatgggccatacccataggcagatcgatcatgggatgggtggagatagagatgatatggaaatattcatggaaggagatgagagaaatcagaagaaaacttagggagctgcagttcaggaattgtctgcgtatccttactcggggagctcgcttatctccatgacccatcattatgaattttggcctatgtccttgactcctggcatttatcatgagatttaataactgtgattcccgctgttttcttttttccttgcattttcctaatatgccttttctgatccgtctgcaaggaacccacgcc

SEQ ID NO: 595629 - DNA, 1326 bp, Homo sapiens
  misc_feature (515)..(515): n is a, c, g, or t
cccagttatagttccggggggaatggtggccgaaggttgtgcagcggacgcgtggttcgcctccaccgcgcgccttggttgttcccataccgcctgttttcctcacccgcagccaaccggttcggtttgccagagggtttaaccttttccgtggggcccatccttaattccccccaccaggaagttcccaggaaaccgcgtggctgggccataaatcctgtagtccccttccgcttggcgccaccaaagttgggtgctgcctcaactttaagggccccccagtgtcccttcggttgggaactgtgttttccacggggtgtcccacaggacgcttcgaggagcgccatgtgcccgaggaattattggcccccgggtgcttaatcccggccccccagcttgcttctttaggacccccccccatttttagtgacttattgggaggaccccagcctttctttgccacacagagttccccccggagatccataaggtctcacacccccaggcggtggtgntgctgaacacacacatccagacaccacagcaccaataggggtccccacactgcctcatgcccaagctttgccgcaacaccgcttgccacagactatacattcccttggcctctgttcccagcgcacccggttgtccccgcacacagtgtatataaacatatatatgtctctcccacagaggaggagtttctcgcccaatactctctctcagccacacacagtctcttaaatgcgcaccaggcccacccaagagttcaccacagagcgcacaccagacacctgtcctggttctcagagggcaccaaagagttctcaggggcacacctttgggacactgcgttcacacatgtttgggcacatcttgccccgcgctctctctcacacagagcgccacaacgccacaatgtttgggtgtaaccgggcgctgtttccctctcttatattcacaagccacatgccacccttaactctcttgcggtgggtaaaaatctcacctggccatagtttgtttgggagagattgataaattccagagaaaattctttctcaaatagctcggagatcttcccagagagatccacctcccgttctttaagagttggatggaagacctggtagcggtgttactaccagccccaccctagctataagaggctgccccagaaacgccagttacaccagtgccccccggttttcccaacatgtttaaaaattgatccgggacccatgaaaagaaacattgtgcgttctcaccgaagaaaaatatttaaatatcggaaaacttaaatattatggaaaaaaaaccttgcca

SEQ ID NO: 595630 - DNA, 142 bp, Homo sapiens
  misc_feature (24)..(24): n is a, c, g, or t
  misc_feature (52)..(52): n is a, c, g, or t
gaacaccagagaggccggactctnaccatggtgtccctgggctgtggctttntgggccctgtggtaggaggctggtacaaggttttggttcggttcatccctggcaccaccaaagtggatgcactgaagaagatgttgttgg

SEQ ID NO: 595631 - DNA, 468 bp, Homo sapiens
ctgggtttcaccatgttggccaggatggtctctatctcctgaccttgtgatctgcctgcctcagcttcccaaagtgctgagatgacaggtgtgagccatcagacccagcatttttttttttaatttaaatttaaatttttttcatttttttggagaggttttttttggttttggttttggttggttggttggttggttgttggttggttggtcttttggaggacacgtctgtgggctcgtggtcaccccagagcgtgggaaggtgacaggtggccattggatcttcgtggcaacccttctttaccttctccaagaggtggctagggatttcacgagggttagtgagaagccccaacgcccacagagcgcccgagagctttaagtgtgtatatctcggtttctccgggtcttctctctcctacagttctctgtcaaacaggtcttttgcgcgcgcgcgcggggcttcta

SEQ ID NO: 595632 - DNA, 351 bp, Homo sapiens
  misc_feature (153)..(153): n is a, c, g, or t
ctgcttcagcctcccaagtagctgggattacaggcacccaccaccacacccatctagtttttgtatttttagtagagacagggtttctccatgttggccaggctggtctcgaactcctgacctcaagtgatcctcccacttcggcctctcaangtgttgagattataggaatgagttgccacgctcagtcatagacaggttactttctcatctctcttaacaagtttcttcctcttaaaaaaaacaaacaaaaaacttagggctaatgaatagtgaggaattagtgaggtcaagcgttaagctcctgatacaggtcaaagacttgttgaaaggtttaattaaggcaaaggt

SEQ ID NO: 595633 - DNA, 266 bp, Homo sapiens
  misc_feature (91)..(91): n is a, c, g, or t
  misc_feature (246)..(246): n is a, c, g, or t
atcgaacccgggcggatcggaaacagattggcgttgctgccgatcacgagattgcactcggtctggccgaacacttcatgcgcgtcgacgncaaaagtctcgcgcacccagccgagcaactcgccacccagcgactcgccgccggtgaaaatactgcgcagttggaccccgggatgcctgacattggcctggcgcatcagcttcagcgccgtcgggcaggaagacgttacggatgttcagagacgncatcagttccatcgtcgcct

SEQ ID NO: 595634 - DNA, 196 bp, Homo sapiens
  misc_feature (109)..(109): n is a, c, g, or t
tcagtctcttgattcttatgtttaagcaccaccacctggctttattatttcaatgtcccattgtccccatttcttcagctgagaccacctctatgtgaagttctggacntgcaggaagagagtgatgccaacatttcttatttgatgcaacgtgcttctactcaagcagcacacgacggtaacaccagcagtactg

SEQ ID NO: 595635 - DNA, 859 bp, Homo sapiens
  misc_feature (859)..(859): n is a, c, g, or t
catcacttcttccactgtgtgtgacactgtttcctttacctatttgcctcagatcccctagctttctcctctgtctatgcaatttctttcgacagtgcagcgttgcacgtccggttgctgaagatgattataaagccgctggtgataattgttaagcttttattgtgattgaccgtgtatgtttcttctttccttgttcacagcgagacccaataccttttccatgggtcaaaggtacatgaagtagcaatacgattgatacgaagatgtacagaagaaattacttttgagtttttatccagtatgttttttacctcttgtgtagaagacgtctgagacagtctacatgtcacagcgcaaaaccaatcaccagaaattgacttgcatggctcgcaaacagactaggaagtatttgtggggaggagtgacatgaagcatgagtctcatctgattatgtgtttgtgagctcgctatgaatattcccaatgccttcattgtgcaagttcatgttacagttgtgtcataaattacagcaataacagcagtcctgttcacatttttgttctttgaaccgtggcttgtccgcatttgttccaccagagtgatctcagctctggttggttgcatgcgggatgcagattgggtgctagtcagagcctcttcccgaagcacttattggtgtagctcactgtggttcattactctacactggaaacgtattccgactgggaaattatttagagctacaaagtgctctagagggcttcgaaagggtccgtgatctggttctgcctggttttttacctccccggtttttgccccccttgggccgcgcccttctcgcccaaggcggtccccn

SEQ ID NO: 595636 - DNA, 699 bp, Homo sapiens
  misc_feature (699)..(699): n is a, c, g, or t
tggactaaaaagccaaggtctttaattaaaggtcccgacgggtttccccatcggttattcccatgccagccagggtccaggaacagcctctcgggagtgtaccggggggtctgggcctgggggcccgggtagcacagcgcttaagggtatctgcctgcctccactctccagcggggccagaaggccaccagcactgatgcctgccccgacctcggcttctgcgtggggcccctgtgtgtgggccttgccctttccttttagctctccagcgtgcgtgccctgctggaactcccgcgcttcatctcccgacgtggcgcagctctccgacgctgtgctatcataagaatcctcccctcacagttgtgttcacctccgaggagaagacagcgcgtcctcctttatcggggggacaggcaccagggtgccgattgggtggcgagcgaggttgaacaagaatgtgcttcccagctgggggtcctcctcctgggcctcgaactggtgtccttgtcatcaattgagcaggtcccccaagaccaccgtctttgtccctgtgtcgggataattcgtctctacgaactgggtggccccaggtgctgctccacccaggggtactccggggtaccggggggttcttttaaaatcgggattaggcgctccacgtgcgggttggggcgggagccaacttttaccacacgggtn

SEQ ID NO: 595637 - DNA, 1140 bp, Homo sapiens
agcggaggggccggagggcgacgattgaacagcagaatcggctgtggctagaagtcagagccttgtagcctggccgtcagtccctactgcagtacgtggacacagacttgtgtggctgttcagatgtaccttttccacgtatttgtcctgtccagtcagagtgaggacgagggaagcagtctgagagaaccagcgacacactgccaaaagccagatgtacccgagactattccttcacaggatttcaatgaagagccgcacgcggttgagagacgcgtccactggaggcacaaacgtgccagtgatgggcaccacagtcgtgtactctggtagatgggcactagaatgggccaattgcaggaaatgacagcgccatgatcttggagtgacctctctgaagacccatggatgcgcctgatgctgagtgtactgactccaaagcgcgtgaatggcaccgtggcagtccggccttggtggagagatggccgcatggatgagtcgctctgttgcccgagtcgggaggcaaccaactacgcacacacgtaactatgcgtgactggacactcggtagaatggaagccaggaaggcgaaaggcatcgcagattggttcccgcggaaacttaattggaccacgccaccccttagaaacacggcgctagtcgcatggatagcccacctaagaaaaggtcggggcaccgggaataatggcaacgcgtgagcctaaggccccatccattcgaacgctccaacaccacttgagtgcacatggtattctacccaataagcacccatttcctcctgctacccatgggctatgtcccacattggtgtagacaccgcagaaggggccactctcgttgttccacatatgcgcttttcccaccccacattagtccccgagcctcctccgtgggacgtgtttggaacccagacatcttacctacggttaggaacaagttcaccgtccccggatcacatgcgggccacaaatatgggatctcgagtgaccaccggctacaagttactcgcacttgggcgtggcccacgtttcgtagcccgcaacgcgaaattggcgccgcgcggatcaagggaatggggcaacacacaggggttttcccgtcggtcctttacttgggggg

SEQ ID NO: 595638 - DNA, 193 bp, Homo sapiens
tcatagaagggcccgctgatattaccatgaaggtgacttaaacagcttaaagtttagtttaaccagttgtaggtgattcacataatttgaaggcgatcttttacacagataaatttaaacttgaaaagtaggaagcagaagaaacaaagacaagctaggacacaaaaagctacgggcaaaatgtacaaactta

SEQ ID NO: 595639 - DNA, 351 bp, Homo sapiens
aggcttggggctagccccctctgaagcaatggactgaattatcagttggccccttattagaccatggactgatgcacgctgggtattcagagacaccacgtccctaggctgctacataacagaggggggcctatacgcccatgacaagcatttttacctctataaactccaaggcctgtgatagaaggcgctgctgagaaggtctctggtatgccctggagacattttccccattgtcttggtgattaacattcttggcttccgttacttatgtaaatttctgcacgctgtcttaaatttctccccagaaaatgggtttctcttttctgttgccctactgtgggtcctgtg

SEQ ID NO: 595640 - DNA, 219 bp, Homo sapiens
cacgagggcgtccgggatgaccactgaccaaagccatggtaaacgggctacattgctgcggtggatcaaatttccagacctccagagaggctggaggggaagcacaagcgggatcatccagaagtcagaatttttttttattatcgcaaaagggggaggaattgatgggaaaatggttataaaacctgaaggactctcaaatgccacaacctgtattta

SEQ ID NO: 595641 - DNA, 304 bp, Homo sapiens
agcggcccctactactactaaattcgcggccgtacgactcccacgtccaggggctgcccgaccgctgtgatcacacgtccagtcgcgtcccaccgtaccgtctcgtcgcatccgcagcgatccaagtagacataccccacgtaccgtctagtgctcccacgtccagtcgtccccctgacctctgtgatcccacgtccagtggctccccctgacctctgtgctctatgtccagtggctccccctgacctctgtgatcctatgtgcagcggctgctggcctctcaaacttaatgtgttcattgcgg

SEQ ID NO: 595642 - DNA, 153 bp, Homo sapiens
ctctgactatcggtgctggatacagatggctctccgcgagattcgctcgataccagaagatccagcgagcgtgcgtagatcagaaagctgcctttacagcgtctggtgcgtgagatcgcgcaggacttgaagaccgacatgggaccaggcgta

SEQ ID NO: 595643 - DNA, 263 bp, Homo sapiens
atatttataatcccaacagtttgggaggccatggtgggcagatcgcttgagcccagaaatttgagagcaccctgggaaacatagcaatacctgtctgtacaaataaaataacaaaatttagcatgtggtggcacgtgttcatagtccgagctactcggaagatagaggcgggagaattgcttgcacccaggaggtcaaggttatagtgagctataatggcaccacctgcactccagcctgggcaacagagcaagaccttgtct

SEQ ID NO: 595644 - DNA, 190 bp, Homo sapiens
cagcggccagcataaactgccacatacggaaatccgcaggacgagaggagtcctggtacatggatgtcctaacaacttcaactcatcgatagcgagatagcctgaatgtccagaagttatcacttcagaaatcacctgataaaagttaggccagagagtactaatggccagttctgccctgttccatgta

SEQ ID NO: 595645 - DNA, 1165 bp, Homo sapiens
catctgacgcgtgtgctgttttccctcctccccgccctcagggtccacggccaccatggctgtattagcgggcagcagtgcctgcggcagacatatggcatttgcagcggacggcagcagcaccaggctctgccacgccggcaacccccagcggcttaagccatggcgcttctcactggcattcatgcagcagcgcttgctgtaacctgtacaaagacaccttcgacattaagcacaattcctcgacttccagcaaagcaccgcaacactgaccgaacactgacgcttcctgcagccagcgacggctgtatggctgccgggaccttgcatgtccccacttcgaccaagcacggagctacaggcgcgcgctgacagacaagccctaggctctcgtcacactgactacacctgcgcacggctgcgccaacaccaccctcaacaccctcactggcgtaactcacacacagacaacggcctacacgcgcaggagcatcccatccagacctgcgctacggccagcagcgactggcgtacggctcacgcccccatcccacaccaccaacgcaaccgaagcgcaaagccctcacatcccgcgcacaccactacggcacatcgctaccacaccaaccccacctggactcaagacacaggcacgacaccagaacataaggcgaaatagccacctggcacccgcggacaactacacactcgcaaccccccgggcacacaacccaacatgcgcccaagcaatgaacacctacccatctacccacaaggcaagcacaatggaacaacataggctagcacaccacacatcagggccgcccccccctaagtgaccacgaccagcaccaccacaacagacgacaggaccccacccccacacacagaactgcaacaccaaaatacgagaccactcagcacagtacaaagtataacccagacgcccacgaccccaggagaaggcaccccacagcacaccgcgcaggaccaacccactccaccccacccataacgacccagcggggccccccggaacacagaaccacaccagaaaccaccccaacgaacacacacacccgcgcccacgacacacgcccaccaccatacaaagcaatcaaacaccacaccaacaaccacgaacacaaacagaccacgaaacgac

SEQ ID NO: 595646 - DNA, 145 bp, Homo sapiens
  misc_feature (11)..(11): n is a, c, g, or t
  misc_feature (68)..(68): n is a, c, g, or t
aaaatctcaanttcgttggtgctggaggagtgcctcagggatctgctgtcacctctgctgggccccantccagcccgtgccctcacttgtccccgggtgccgcctgccttcccagcctctaccccctctagagccaaaaaaaaaa

SEQ ID NO: 595647 - DNA, 654 bp, Homo sapiens
agcggaggcgcgctggcggcggcggcgagcggtggcgctcggctcgggcgaccgcggcgggggagtggcgcgggcaccgatgtggcgccactgagaagtggaggccaagaatgagcgggaagctgttattcctttgcggcaggcctgtggaatgtgcgaccctggcagtgcatagagtgatgtgccaacgcctcaggctctgccaagtgcgagcagcagaggatgcctcaatcgtccatgacattggactgcccaaggctatggggagaagagtctctatttgaccaattgggtaacaaggaggtgcagggaggctctttagtaacctaaaggacaaattgaaagacaccctcaaagacacatcttcataagaagtgatacaatctgtgaccagctacacaaagggagatttagacttcacttaatgttaccctccagaattattgtgaatgtcctttccatcttggacaaatgttgacataggattcaggaatcaggttgatgacattcgaagcgttgttggattccagacatcttgaccacgtacacagtatacaagtctgtcacctaagtcttatcgaacatgccaagtatcacagcacggggtctcagaatgcagatggaccattaggcaggctcccagtatgcacgagc

SEQ ID NO: 595648 - DNA, 225 bp, Homo sapiens
aaaaaaaaaaaggaagaaaaaatccttaattctgggttttcccggtagcttccacagatccaaaagggtcaggttaatttccagtagccaaatattctggccatctgggactggaaatatctcctaaggtggaggtaataatagagggtagtaacctgaattctttcttcctttttctctcttccccttttcctcctttggcctcccttcctcttttcttcctct

SEQ ID NO: 595649 - DNA, 222 bp, Homo sapiens
tgctctagaggatacctcacgccatgtcacaaaaaacacaaaaattagccagtcgtggcggcatgcgcctccaattccagccactcaggaggccgaggcaggagaaccgcccgaacccgggaggcagaggttgcagtgagccgagatgcgccactgcactccagcccgggcaacagaccgagacaccgccccataatggtaaggaggctgagtacaaagctg

SEQ ID NO: 595650 - DNA, 140 bp, Homo sapiens
agaagacgacagaagggaagagagagacagtcagagaaagacagagacggagagagagaaacagaaagagagagagagacagagacagagagaaaaaaaagtcgtatcgatgtcgagcgatcatgatgatgatgtcgacc

SEQ ID NO: 595651 - DNA, 1498 bp, Homo sapiens
  misc_feature (283)..(283): n is a, c, g, or t
  misc_feature (533)..(533): n is a, c, g, or t
  misc_feature (548)..(548): n is a, c, g, or t
  misc_feature (592)..(592): n is a, c, g, or t
  misc_feature (631)..(631): n is a, c, g, or t
  misc_feature (874)..(874): n is a, c, g, or t
ggcctcattgtagcccattctgagattcgcgatgggcattcctgaatagcttgaccgaaacgatgtatactaggctatatacaagtacgcaaaggtccccaaacgttgtaggccccgtacggggtattacatagtcctttcgggtgagcgccaatactagactcttcgatcgcacataggagccgcctagaaacaccggcggcagtctatcctattctacgcgcgtgcgtacactcaaccgtacgccggatgctatagactgcgtcacacaatcgatgctatnctaccatacttgacaccctcgctggtccctcacgagtaccacgcaagctccactcctgcggtgcgaaatgcatgcaaagcgcgtgagggcctcgttcgcctcagttgtcatttgctttatgtcgcaaccccttcctaaagcaacctgacgtcgcgttgtgtgaacgtacgaacgtgccccttcgttggacctcgacgagcgctggaggacgaggttcgacaaagcggtcaaaatcgtaagctgccttgcntgcattcctgtgacngtcgacgttgtagatgccacccgatacgggcgcacacatcaaantgcttcacatagtgagaagggtcgagctcgctttgaggncgctacatcgacattcttacaactaatcggaacattttaacatagagatagacggctcgagggtctcgtctatataacactacataccatcctccttctaatgcatgaaagagggagaaggaaaacagaactcttgcatgttgacctacccctgtgaacgccagtccgactagcatcgcacatctgggcgcgccattaagaacttattctcgagtctatcaatgcgtggcgccaaccttagcnttatgccaatgcactgtagcgcaaaaacctcggggagaacccaacgcaacatttactggaattccttgtcccttccggaataggtggggggaggtgtccccaggatttacctaaaggttcttcccaatggggcatatccgcaacccactcccggacgaactgaacgcgcgcgcagtctatgggccccccttgttgcgccactcctcagtttgcctcctccgattgaagccccggaaaaatgaagggccaaaagaggccactctaattgttcagttaaatgtaatatagtcacccccttgcaatcgcgaagtgtaagacgaaattcccttttgccctttaaaggggaataagacataaccaattgagtttgaacctggcgagcttctttcacccgcgttgtaggaacttcttgaaccagcgaaagggaggtgaatattctggtgcaagcgcaaaggaaacctccttatcttttcttaaacccctttgcctcttgttttgcgtatcattagaaactgtgccggaaacacaggtaattaacccgcgcccgaattttcccctggcttcaacgaagcaaaagttctattaaacactcttccctaatagaagagaaagggtttcccaaac

SEQ ID NO: 595652 - DNA, 103 bp, Homo sapiens
ctgtaggtctgacgtagattcacactgcggtgcatgctccctgaacaagtccgtcgacacgtgagcaatgtgctgacctccaaatatcgtaaagctggagcct

SEQ ID NO: 595653 - DNA, 84 bp, Homo sapiens
ctagaagattcagcaaagtacttttgtgctcttggggggcctgggacttcctacctgcctgtactgggggatacgcaactcttc

SEQ ID NO: 595654 - DNA, 1765 bp, Homo sapiens
  misc_feature (405)..(405): n is a, c, g, or t
  misc_feature (1761)..(1761): n is a, c, g, or t
gggccttgaggtgcgacaaatctttcagcttcttggtgttcttctctggctatttatccggtgcagactagcggatctgacactcactcacacgcttcggattagagcgagtcgctcgtggtcctggcgggacaagcgtgttgagataggaccgtccgtagtctacaactggaataagtcatctcccctggtcatactcacgtcgatactactgatgcgtggtggatggcttcttcagcccttcatgttgccggtgactcatacagttgcgtatccgtccctggcaggcgggtcgcacgtccgcatcgtaccgagcggagcagagggcccatgcgttccagccgaggacctcatggaagcgaaggttcttcgccagggacagtcttatcaggccaaggcaggaanccgttaccgagcgagcagacatgcgtgtgcaagtctggactagccctcgaaaggtagaccccttgcgcagggggcaaattgagctacacctgccgtgcatcctgtcattctgcgccccacgtacaaggcccttatcgtccctgcgtcgctggccttgtacttcggagactgtcgacctttgttcaccgcctgggggaataggcgctttcaattgatcgagtgtgcggtcgtggttgtgattgccgccccaaggacagcagaaagccctgtgcgcatgtgcgattagtgccttgtggtcacagatagggaatttacactctcccatatcccttactccgttaaaaggtcggaaacacaagacgtactttccgcctgtggaaagcggggcaatgggcggacccatggcggagatttatgttatatatcctccgcctcctttcgttgaatttgtgtaccccatatatagaaaacatagcgagaaaggcattccttcggtgtaatacacgttgtacatttcccttcggtgattgggaatcgccggtccgcgggagaaacgcgcgaatgtgcttttattatcggtcacttccacgtggggcacatcgcgacgttcgcgccgagacgcttgcgaaagaggtttacctgcctcttttacgggatccctctgggttgccacccagcgtacatagaacaaacaccccgcgaccaatcaaggtattgggcgaactcaaccaaagggctatagatacacgctgggggcatccacttcccccaatgtcttagggaacgcgttttacttggccccacggggtctccgtggggaccttgtaaggtccacaccaaccgcctagagatgggctagagagcccgaaaacattggggctttctttagaaacaacagagcccacagtgagcatttaccatggccattgggatgtggagaataaaagaccggcatcacaccaagggtcatgctcggagcagagaaatcttgtggtcccccaagaggccaacccgaagaggacccacacgatgctccaagagaaagagagtggctgtgcccacgaacaatttacaggaccatcaaagagggagccgaacaagagaggtcgcgtgatcaacgaactccctgcccacgacatgagtgacaaaggaagtgaacgcatattacaccgacgcaacgccgagggaaggcaccaccacgacaccccgacaggcaactacaactcgagtcgaggtagcgatgagcgcgagcgaaggaaaggcacccacacacagcaagatgaaattcgatcggagtgcattctaggacctgatccactgccgactcaatcacagcagatagatgaggagtcgtgnggta

SEQ ID NO: 595655 - DNA, 285 bp, Homo sapiens
tcactgtaatctgatttactacttgtgagggcccccgaaaggcctcctcacctccaatttaaattaaaaatttttaaacttagcccaagttcccaacggggagggcgcttttttcgcctccgaataccccggtttttcccccccccccaaagttgtggggggggcccccccccccctttttggcccccggggccccccccccaaggggagggggggggcccccccccccttaaaagattttttccccccgggggtgccccctttttaacacccccccccgggggg

SEQ ID NO: 595656 - DNA, 98 bp, Homo sapiens
acccctgcgccatcgccgcgcagctcgacgctgctcatcagttcgcactcgtccttatcgcggcaataggcgcgcgtgagctcgatgcgcgccgtttc

SEQ ID NO: 595657 - DNA, 116 bp, Homo sapiens
  misc_feature (18)..(18): n is a, c, g, or t
ggctcggatcctcggggnttggcaacttttcctgtaaatggacagatagtaacattttattattttatttattttttgagatagagtcttgctctgtcgcccaggctggagtgcaa

SEQ ID NO: 595658 - DNA, 1757 bp, Homo sapiens
agggtgaaacgccatctcaaaaaataaaaattaaaaaataaaaaaagaacctggcatctcaagtttaatttttcatagttcttgtcaatgaacatggacttgcaggcaagcctaacgatcatagactagcacaatacagactaattccacagacacactctctacgcaaactttagacctacttcactattcctctagaccatattcctataccacactgataactacttgacccatactaccatagcgcagcttcgcactactatgctctttcactaccatgcatgctggctcttcgaactgatatccacgtcccaaacacatcactgctctgacgcaccatctaactccacctaacctgataggacaactacctgcacacacggctgcgcgcgccctcttgcagcaactgctgcaatctgcgcactccgctacaagcgccaatgctgccccctctccactctcacctgcgcgctttacacctgcgacctctacacctgcgcgctactactcaaacaacgggcacacctgcgcgcacccgtgcgactgacgcccgtccataactacaccgcacacgcacgcgcacaaccccgcacggaaaccctggcacgcccctaccaccaacttggaccccccaagcacccccagccaccgcacgccatcgcccacacttcccaacccctacgcaacaggttgcacctcgaccactcaaacgacatgacgcacacacactgcactgcaacgcgcctcgccacccgccccctgacccccaaccaggaaacggggaggacacccccccccacaagcaccaaaacgagggaaaaacaacactggctcacacacaacagcccctaggactacacacttaacccgcactggcggaaacccttcccacaacacgcggacccccaaccccaacacgagcaaaacgcaacgccaacacgacctggaccccccaaaccggcaacatgaggagcacacagcacccaggcaccctatgcacagcggagcaaggaccacccacgcagggcacacacccccacatgggacaaaacacaccagaacacacaacgaaaccaccagcaaggcgaggcaaaacaccacgcgcccccgcaaggcgccgaaacaacgcaccgttgggccactgggccgcgaccacaagcacacctcctcacaaacagcgtattcatgggagcagacacacaaacaagcaaccccaaaccacttgggcacccagaaccagccaccgagaggcagcacacacacacaatgcacactcacacatgcggcagacgacggccacaagacacaaacacacagtcacacaacacattagcatataccacaccagcacagggcaccagcaagatccaaccccagatacagagcacccagccacgacttagtggcgcagcacacaagaaaaccacccaccacccacagacatgtgacatcacccgccacgaaagcgcgcccccgtcagagtgcgcgaccccacaccaaccagagcatccaacagaccgactggcgcccctattgcgagcgcccacaaccacacgaccgcgacaaaacgcgacccacccgatcaccaacacacaggtcccactacacccaaaaccacaacaacgcgacagcacaaccaaaaaccaggcgagagcatcggagacaccgccctaatttaaacacaccccacacagttcgggacaaaaagcaggcagaccaacccccccacagactcgacacgacaccacgaagca

SEQ ID NO: 595659 - DNA, 162 bp, Homo sapiens
gtgctatggagcaataccatactgaggagctgacgcagtgcgcagatgcacactatgtactgcaaagagtgtctcatcagatatgcccaagaggcagatcttaggatctggaaagttggagctcagctgcatggaaggcagctgcacgtgttcgttccattt

SEQ ID NO: 595660 - DNA, 715 bp, Homo sapiens
  misc_feature (14)..(15): n is a, c, g, or t
ctgtctgaggatcnncaataattgttggtcattgatagctaaaaaatttaaaaaatggattactaatgaagtttgccagagattagaaaaactggttcttataatcctgcaacaatacctaactttgaagatccatataaagccgctattgcttgggcgtctgaatacaaagcgaaacggattgcacaagaacaattagccattgcagcgccaaaagccgaagcgttagattgaatagcagactgtgaaaataatctaggcatacgtgaatctgctaaggtcctaaagattaatcaaaaaactttagtgcagtatcttatggatcataaggttgtgtatcgtgatcaattcaagaagatacaaggctatcaaaagtcagttgatcaaaagttgattcaagtaactgtaagtggtccgcgagaaaccgagaatggagaaaaggttttctcacaagtgaaactaaccccaaaattaattactcgaattgccacatggattgaaaacggcatgccgccaaaagccattaagaaataaaaaagagggctaatgccctctattcttttaatgatgttttctgcattgtttggtagagctatttagcatttaaactcatcttatttcatatttccatagttcttgatgataaaccaagattgactcagcataggaagttatgcatttatcaatatcaatgccaacaattattagggtcctt

SEQ ID NO: 595661 - DNA, 373 bp, Homo sapiens
atccgaagccgagaagaagattccaaggggagatatagagatatccagaggccacttttagacgatctggggtcagtagagaggtgagccctctccttacaattcatcacctgaacaaagacactcgaccttctgcagagggtcagtgctatcccctgtgtggcgacctttgcacagctcagtgcgggacctgagagctggctaaaatctcagggaaaggagcatagccctaggccccaggccccaaccctattctcaggaggttatctcagagactctgcttgtccacagagctaagtccagaagtagcaaagcctcaaatcaaagccagcaagaccacagtcacaggagataaggactctgtgaacctgac

SEQ ID NO: 595662 - DNA, 373 bp, Homo sapiens
  misc_feature (49)..(49): n is a, c, g, or t
  misc_feature (280)..(280): n is a, c, g, or t
  misc_feature (288)..(288): n is a, c, g, or t
  misc_feature (294)..(294): n is a, c, g, or t
  misc_feature (307)..(307): n is a, c, g, or t
  misc_feature (360)..(360): n is a, c, g, or t
ggcacgaggggaggagggggaaggtcagagagaccttgaggcttcttcngttcagtacggacaagtgccatattttgggatatctgcttctgagccccaacactgttattaagaggccatattttattgtaagcctactatatacaaggcacaggttaggttttgtgaaaaataagccaaagcttcttgaatggaattcaagccctatttatgttataatgtgcaggagtttagcaggttaacactggggaagcagagacttggtagcatccacattttngcttgttntctttnagaaccatatatnttatttaaataaattttttattaaaacaatgttgttaactggtagattacccntcaacacagggaa

SEQ ID NO: 595663 - DNA, 422 bp, Homo sapiens
  misc_feature (1)..(1): n is a, c, g, or t
ntgcacgaggcgacccgcatcactttgcggtgttgatcggcttcggcgcctcggcggtgtatccgttcctggcttacgaagtactcggcgacctgatccgtaccggtgaagtgctgggcgacctctacgaggtgttcaagaactaccgtaagggcatcaccaagggcctgctgaagatcctgtcgaagatgggcatctccaccgtcacgtcctaccgcggcgcgcaattgttcgaagccatcggcctgtcggaagaagtttgcgagatgagcttccgtggcgtgccaagccgcatcaagggcgcacgtttcgtcgacatcgaagccgagcagaaagccctggccgccgaagcctggagcgcgcgcaagccgatccagcaaggtggcctgctgaagttcgtgcacggtggcgaataccacgcc

SEQ ID NO: 595664 - DNA, 268 bp, Homo sapiens
ctgccggatccatggtacttcccccaacccacataaacttgtactgcccctatgcgtggcatattcatccctgtgaccttctctgtcccagggtgaatgttagaccggaccagtcctgactgtggatgacaggggtctgaccatctccatctcaccatcacaggccttactcctgggaaagacgccacaaacacttgctgcacacacagaagggtcgggccttgccattggaggtgattgggtttacaattttgttctgcatccgcta

SEQ ID NO: 595665 - DNA, 630 bp, Homo sapiens
aagggattatactatccctgttcatttatactactctcattaccctctacaccccctccctcttaggcatattgggcctattgcccatactagtctttccccctgcgaagcaccggtgggcctagccctactagtctccatcgcccacacatatggccttgactacgtacattaccttaacctactcccatgcttaaactatatcgtccccagccattatattactagcccctgacactgactttcccagaaagcacataattgtgaatccacacccacccccccccgccttattattagcatcatccctctactattttttaacccaatccacacaccacctatttagctgttcccccaccgtgtcctccgacccccttaccacccccctccttatactaactacctgactcctacccctcaccatcatggcaagcccacgccacttatcccgtgaaccactatcacggaaaaaactctacctctctatactaatctccctaccaatctctcttaattataacattcacagccaccaggactaatcatattttatatctttttcgagaaccacacttatcccccccttggctatcatcacccgatgaggccaccagcccggacgcctga

SEQ ID NO: 595666 - DNA, 1425 bp, Homo sapiens
gctaggtgcgagcgtcggtgagatcggcacgagggacaaggtgaacccgcagccggacttctgctgcactggggctccgaatgacccagaatctggggagtgagatggcctcaatcttgcgaagccctcaggctctccagctcactctagccctgatcaagcctgacgcagtcgcccatccactgattctggaggctgttcatcagcagattctaagcaacaagttcctgattgtacgaatgagagaactactgtggagaaaggaagattgccagaggttttaccgagagcatgaagggcgttttttctatcagaggctggtggagttcatggccagcgggccaatccgagcctacatccttgcccacaaggatgccatccagctctggaggacgctcatgggacccaccagagtgttccgagcacgccatgtggccccagattctatccgtgggagtttcggcctcactgacacccgcaacaccacccatggttcggactctgtggtttcagccagcagagagattgcagccttcttccctgacttcagtgaacagcgctggtatgaggaggaagagccccagttgcgctgtggccctgtgtgctatagcccagagggaggtgtccactatgtagctggaacaggaggcctaggaccagcctgatgcaggtctatgaagaccagtggtagtgcccagacttctcctagacatctagtctaaaacattctcctaggaccagggaagcctggcttacagtgccatttctgctgggcaccaccacctgcctgagggcctagctcaccacagcacatcctccaggatctagccttctatctacctcttctctggaatgtttatggtggttcagaagaatgatgactcctctttgctgagaactgttcatccttcttcaagaagaagcttgccaggccgggcacggtggctcacgcctataatcccagcactttgggaggccgaggcaggcggatcacaaggtcaggaattcgagaccagcctgaccaacatggtgaaaccccatctctactaaaaatacaacaattagccaggcatggtggtgcatgcctgtaatcccagctactcagaggctgaggcaggagaattgcttgaacctgggaggcagagggtgcagtgagccgagatcgtgccattgcactccagcctgggcgacattctgtctcaaaaaaaaaaattacaacaacaaaattgtttgggcggcgctgccccagaaaagtttcaacaactctgtggaggggccagtagataacacggtcaagggttccagacaagggcagaagggtgttcccacaaaagccgggccgcggctcaacaccaggggggcagggataaggcggcctatcgccggggaagaccgagaaagacaagctcacatcgcgcgcagcac

SEQ ID NO: 595667 - DNA, 1646 bp, Homo sapiens
gctaggtgcgagcgtcggtgagatcggcacgagggacaaggtgaacccgcagccggacttctgctgcactggggctccgaatgacccagaatctggggtgggcttaggccccgggccgcgtgttcttgccacgagaacccctagcagcctggccttggaatggctggatgaggtgcattcgttggttcattcagatactgttaagagccagctgtgtgctaggtactgcttacaccttctggtggtgaagacggaactgaagggaacttgcaaggagctgtgagaaagtgtaacgggaagtgagctaagatcactaaggagtgagatggcctcaatcttgcgaagccctcaggctctccagctcactctagccctgatcaagcctgacgcagtcgcccatccactgattctggaggctgttcatcagcagattctaagcaacaagttcctgattgtacgaatgagagaactactgtggagaaaggaagattgccagaggttttaccgagagcatgaagggcgttttttctatcagaggctggtggagttcatggccagcgggccaatccgagcctacatccttgcccacaaggatgccatccagctctggaggacgctcatgggacccaccagagtgttccgagcacgccatgtggccccagattctatccgtgggagtttcggcctcactgacacccgcaacaccacccatggttcggactctgtggtttcagccagcagagagattgcagccttcttccctgacttcagtgaacagcgctggtatgaggaggaagagccccagttgcgctgtggccctgtgtgctatagcccagagggaggtgtccactatgtagctggaacaggaggcctaggaccagcctgatgcaggtctatgaagaccagtggtagtgcccagacttctcctagacatctagtctaaaacattctcctaggaccagggaagcctggcttacagtgccatttctgctgggcaccaccacctgcctgagggcctagctcaccacagcacatcctccaggatctagccttctatctacctcttctctggaatgtttatggtggttcagaagaatgatgactcctctttgctgagaactgttcatccttcttcaagaagaagcttgccaggccgggcacggtggctcacgcctataatcccagcactttgggaggccgaggcaggcggatcacaaggtcaggaattcgagaccagcctgaccaacatggtgaaaccccatctctactaaaaatacaacaattagccaggcatggtggtgcatgcctgtaatcccagctactcagaggctgaggcaggagaattgcttgaacctgggaggcagagggtgcagtgagccgagatcgtgccattgcactccagcctgggcgacattctgtctcaaaaaaaaaaattacaacaacaaaattgtttgggcggcgctgccccagaaaagtttcaacaactctgtggaggggccagtagataacacggtcaagggttccagacaagggcagaagggtgttcccacaaaagccgggccgcggctcaacaccaggggggcagggataaggcggcctatcgccggggaagaccgagaaagacaagctcacatcgcgcgcagcac

SEQ ID NO: 595668 - DNA, 792 bp, Homo sapiens
gggtgagcagttgtcctacgccacgcgactgtgccagcttcttctcccccggcatctggatggggctgctcacctccctgttcatgctcttcatcttcacctatggcctgcacatgatcctcagcctcaagaccatggatcgctttgatgaccacaagggccccactatttctttgacccagattgtgtgaccctgtgccagtgggggggttgagggtgggacggtgtccgtgttgttgctttcccaccctgcagcgcactggactgaagagcttccctcttcctactgcagcatgaactgcaagctcccctcagcccatcttgctccctcttcagcccgctgaggagctttcttgggctgcccccatctctcccaacaaggtgtacatattctgcgtagatgctagaccaaccagcttcccagggctcgtcgctgtgaggcgtaagggacatgaattctagggtctcctttctccttatttattcttggggctacatcatccctggctgtggatagtgcttttgggtagcaaatgcttccttcttaaggtatagggctccctgagtttgggaatggggaaggactacttaactggctggcctgcttggctggcggtatccgttttgggggtggtgggctacaatagaagacccgggtttatttttgtggcctggaaggaaggacctccccacaggtggctggggccaaccccgctttttggctttttcccccgagggcccgccagaaaaggggggctggttgtttcttcccactaaaaaaccccggggccc

SEQ ID NO: 595669 - DNA, 236 bp, Homo sapiens
  misc_feature (189)..(189): n is a, c, g, or t
cacgattactcccaacgctttacccgccttcgtgtgtgtgtgtgtgtgtgtgtgtgtgtgtgtgtgtgtacaggtccacttctggacatgtctgtcatcatttcttggctcactctgtctgtacaggtgtcagtactacgacctattataaactccctggtactgtactgtactggcacgcggtaacanacgcgttgggtacccgacgactcgacactgtcgataactcagtggat

SEQ ID NO: 595670 - DNA, 1550 bp, Homo sapiens
gctaggtgcgagcgtcggtgagatcggcacgagggacaaggtgaacccgcagccggacttctgctgcactggggctccgaatgacccagaatctggggtgggcttaggccccgggccgcgtgttcttgccacgagaacccctagcagcctggccttggaatggctggatgaggtgcattcgttggttcattcagatactgttaagagccagctgtgtgctaggagtgagatggcctcaatcttgcgaagccctcaggctctccagctcactctagccctgatcaagcctgacgcagtcgcccatccactgattctggaggctgttcatcagcagattctaagcaacaagttcctgattgtacgaatgagagaactactgtggagaaaggaagattgccagaggttttaccgagagcatgaagggcgttttttctatcagaggctggtggagttcatggccagcgggccaatccgagcctacatccttgcccacaaggatgccatccagctctggaggacgctcatgggacccaccagagtgttccgagcacgccatgtggccccagattctatccgtgggagtttcggcctcactgacacccgcaacaccacccatggttcggactctgtggtttcagccagcagagagattgcagccttcttccctgacttcagtgaacagcgctggtatgaggaggaagagccccagttgcgctgtggccctgtgtgctatagcccagagggaggtgtccactatgtagctggaacaggaggcctaggaccagcctgatgcaggtctatgaagaccagtggtagtgcccagacttctcctagacatctagtctaaaacattctcctaggaccagggaagcctggcttacagtgccatttctgctgggcaccaccacctgcctgagggcctagctcaccacagcacatcctccaggatctagccttctatctacctcttctctggaatgtttatggtggttcagaagaatgatgactcctctttgctgagaactgttcatccttcttcaagaagaagcttgccaggccgggcacggtggctcacgcctataatcccagcactttgggaggccgaggcaggcggatcacaaggtcaggaattcgagaccagcctgaccaacatggtgaaaccccatctctactaaaaatacaacaattagccaggcatggtggtgcatgcctgtaatcccagctactcagaggctgaggcaggagaattgcttgaacctgggaggcagagggtgcagtgagccgagatcgtgccattgcactccagcctgggcgacattctgtctcaaaaaaaaaaattacaacaacaaaattgtttgggcggcgctgccccagaaaagtttcaacaactctgtggaggggccagtagataacacggtcaagggttccagacaagggcagaagggtgttcccacaaaagccgggccgcggctcaacaccaggggggcagggataaggcggcctatcgccggggaagaccgagaaagacaagctcacatcgcgcgcagcac

SEQ ID NO: 595671 - DNA, 475 bp, Homo sapiens
gccggttccaggtccatcgcagactccgaggcgacctcctgtggctcgtatgacggccacaagtccaggattctacggacgatgcgacgatagtcggatgcgatgcccaaccagatgatgcagcagcggcgccaaagaaggctcctgcaaagcgcaaaccacgaaaagtcaaaacaccagctcgcgtcaacgaggaggagccagcggaaggccaaaaaggcgagcaaccatctacaaaagctaagaaacctcgcaagccacgtcaaaaggctgcagcgaagcctcgagctaagaaggcaactcctgaaggcgatgctgaagtcgaggtccaaaatgagacgaatgcggacgaagaggagccagagtcagatccagagctccacgagatcgacccggaagctctctccatgtacactatcaccaagcagaaacgctacgggaagacttctgagcgtgagaagaaaatggccgagat

SEQ ID NO: 595672 - DNA, 1454 bp, Homo sapiens
gctaggtgcgagcgtcggtgagatcggcacgagggacaaggtgaacccgcagccggacttctgctgcactggggctccgaatgacccagaatctggggtgggcttaggccccgggtacgaggggaggagtgagatggcctcaatcttgcgaagccctcaggctctccagctcactctagccctgatcaagcctgacgcagtcgcccatccactgattctggaggctgttcatcagcagattctaagcaacaagttcctgattgtacgaatgagagaactactgtggagaaaggaagattgccagaggttttaccgagagcatgaagggcgttttttctatcagaggctggtggagttcatggccagcgggccaatccgagcctacatccttgcccacaaggatgccatccagctctggaggacgctcatgggacccaccagagtgttccgagcacgccatgtggccccagattctatccgtgggagtttcggcctcactgacacccgcaacaccacccatggttcggactctgtggtttcagccagcagagagattgcagccttcttccctgacttcagtgaacagcgctggtatgaggaggaagagccccagttgcgctgtggccctgtgtgctatagcccagagggaggtgtccactatgtagctggaacaggaggcctaggaccagcctgatgcaggtctatgaagaccagtggtagtgcccagacttctcctagacatctagtctaaaacattctcctaggaccagggaagcctggcttacagtgccatttctgctgggcaccaccacctgcctgagggcctagctcaccacagcacatcctccaggatctagccttctatctacctcttctctggaatgtttatggtggttcagaagaatgatgactcctctttgctgagaactgttcatccttcttcaagaagaagcttgccaggccgggcacggtggctcacgcctataatcccagcactttgggaggccgaggcaggcggatcacaaggtcaggaattcgagaccagcctgaccaacatggtgaaaccccatctctactaaaaatacaacaattagccaggcatggtggtgcatgcctgtaatcccagctactcagaggctgaggcaggagaattgcttgaacctgggaggcagagggtgcagtgagccgagatcgtgccattgcactccagcctgggcgacattctgtctcaaaaaaaaaaattacaacaacaaaattgtttgggcggcgctgccccagaaaagtttcaacaactctgtggaggggccagtagataacacggtcaagggttccagacaagggcagaagggtgttcccacaaaagccgggccgcggctcaacaccaggggggcagggataaggcggcctatcgccggggaagaccgagaaagacaagctcacatcgcgcgcagcac

SEQ ID NO: 595673 - DNA, 467 bp, Homo sapiens
accacctccacccagacgtattctgacatgaccattcggcctagtccacctccggatgagagtgacatgccagaagggaggtcagagcctccagggatgtgtgagcaaagccttactgggaagcccacagaccccaactggaatccaagaaacttaaaatccctaggcctcggccctgttccagcctcaactttagcatctctggcgtcttgcgggcagccacatcgttctgagcccgcagggcatgtttcctcctgatactccttgcagtacatctggtcatggatggccttgcagagccggcacttgacgtggcaacacacagggcaggtgaaactcatttgacatcatcctcaaagaagcaccatcccttgcaatctggggtcttgcaatggtagctgaaggcactgcggtttacagcaatggagatgcccaggtctagaaatcggtggtaatcctcaggggtc

SEQ ID NO: 595674 - DNA, 803 bp, Homo sapiens
tcagttactcttctggcagatatattaaacgatatagttcatcatgaacgtttaccttattctgtcaggcacagatttgatagccaagcaataggagttggaaatcactcgaatgcccattagtgagaaatggataatcagatagatgtgaatatatgcaatgctacgtggagtaccatgcagtaggttagaagtaatagaactatcattgtaagtagcatctagcgattaagtaaagtactcaagaaatatgactgatacagtaaaagaagttgagaagaagaaatgtacgcagaaatgggcaagtgatgttaaaaacgacaagagtgagtacctgcgatgtaatgttaaataatactaccaaatataaggatatccatgagagcaatcctgcatcactgataagtattctacttataagctgattgtctgtcacaagttgagttcttatttgcctctctgatgtcacttagattctggtgtaagctcctttgaaaatactctcaataacagttagagtctttctgctgcacggcaagtcctgcgtgtactctttgtcaaactccattccttaggaacatggggcctattgtgaactgggtatcctttgggacaatccttgtgcccaggaaaccccgcgggcaataatattgggggtatacttgataacagagtaagaagcacccattgggtgaacctctggcctatttctggaaaggactcactaccatagagttctggagggggatttagctcgattcatcaacagtagccacatggtaaatcatagaaatactgtgcgg

SEQ ID NO: 595675 - DNA, 1914 bp, Homo sapiens
gctaggtgcgagcgtcggtgagatcggcacgagggacaaggtgaacccgcagccggacttctgctgcactggggctccgaatgacccagaatctggggtgggcttaggccccgggtacgaggggattctcgacttgtcagttgttgtaaaccaagagtcaagacagccacaacttagctgcgttagtaaaggaaccatgtcctccctacaggtgggcttaggccccgggccgcgtgttcttgccacgagaacccctagcagcctggccttggaatggctggatgaggtgcattcgttggttcattcagatactgttaagagccagctgtgtgctaggtactgcttacaccttctggtggtgaagacggaactgaagggaacttgcaaggagctgtgagaaagtgtaacgggaagtgagctaagatcactaaggtgggcaggaggcaaccagagaaagcacattcaggactgcgaaaactactcacacaaaggctgtcaagccagaaattctttcaaaactgaaaggcccatgaggttggagctagagaaacttaaggagtgtggggttccagatgaggctagagaggagtgagatggcctcaatcttgcgaagccctcaggctctccagctcactctagccctgatcaagcctgacgcagtcgcccatccactgattctggaggctgttcatcagcagattctaagcaacaagttcctgattgtacgaatgagagaactactgtggagaaaggaagattgccagaggttttaccgagagcatgaagggcgttttttctatcagaggctggtggagttcatggccagcgggccaatccgagcctacatccttgcccacaaggatgccatccagctctggaggacgctcatgggacccaccagagtgttccgagcacgccatgtggccccagattctatccgtgggagtttcggcctcactgacacccgcaacaccacccatggttcggactctgtggtttcagccagcagagagattgcagccttcttccctgacttcagtgaacagcgctggtatgaggaggaagagccccagttgcgctgtggccctgtgtgctatagcccagagggaggtgtccactatgtagctggaacaggaggcctaggaccagcctgatgcaggtctatgaagaccagtggtagtgcccagacttctcctagacatctagtctaaaacattctcctaggaccagggaagcctggcttacagtgccatttctgctgggcaccaccacctgcctgagggcctagctcaccacagcacatcctccaggatctagccttctatctacctcttctctggaatgtttatggtggttcagaagaatgatgactcctctttgctgagaactgttcatccttcttcaagaagaagcttgccaggccgggcacggtggctcacgcctataatcccagcactttgggaggccgaggcaggcggatcacaaggtcaggaattcgagaccagcctgaccaacatggtgaaaccccatctctactaaaaatacaacaattagccaggcatggtggtgcatgcctgtaatcccagctactcagaggctgaggcaggagaattgcttgaacctgggaggcagagggtgcagtgagccgagatcgtgccattgcactccagcctgggcgacattctgtctcaaaaaaaaaaattacaacaacaaaattgtttgggcggcgctgccccagaaaagtttcaacaactctgtggaggggccagtagataacacggtcaagggttccagacaagggcagaagggtgttcccacaaaagccgggccgcggctcaacaccaggggggcagggataaggcggcctatcgccggggaagaccgagaaagacaagctcacatcgcgcgcagcac

SEQ ID NO: 595676 - DNA, 136 bp, Homo sapiens
cccatcctatcatgcaggcagtgtctaaacattctccaagtattatcccacttaattcttacaaacactgatgacacatggtactatcattaccccctcatttgcggataaaaagagcaaggctcagagagcttaa

SEQ ID NO: 595677 - DNA, 428 bp, Homo sapiens
agcgcctgtaatcccagcactttgggaggccgaggcaggtggatcatctgaggtcaggagttcgagaccagcctggccaacatggtgaaaccccgtctctactaaaaatgcaaaaattagccaggcatggtggcgcgcccctgtaatcccagttactaggaagactgaggtgggagaattgcttgaacccgggaggcggaggctgcagagagcagagatggcgccattttactccagcctgggcaacaagagtggaactttgtctcaaaaaataaagaaaggaaggaaggaaggaaggaagaaagacaacaacaaaaaaaccttgaatcaggatgaagggatttagggtgatctttttcattctctagtttcaaacttcacgtaatgtggtattacttttaaattttttattaaaattgtttaaaaac

SEQ ID NO: 595678 - DNA, 1579 bp, Homo sapiens
aagtgtgtatagtcgatccggtttatttcagtacgaggccagagtgtcttttctcatctgtccgtccgcgtgtcaatgcatgcgcctggaaaacccgccaccctccaggacaactcacagcctcacctcacgccgcggcgcaaccggactaggaccccgagcagggctgcccaggagcgcctgaaggaccctgcgagggccgcaggctatccaggtggcgcctggtggccgggccctgtgccggaggacaggagtgagatggcctcaatcttgcgaagccctcaggctctccagctcactctagccctgatcaagcctgacgcagtcgcccatccactgattctggaggctgttcatcagcagattctaagcaacaagttcctgattgtacgaatgagagaactactgtggagaaaggaagattgccagaggttttaccgagagcatgaagggcgttttttctatcagaggctggtggagttcatggccagcgggccaatccgagcctacatccttgcccacaaggatgccatccagctctggaggacgctcatgggacccaccagagtgttccgagcacgccatgtggccccagattctatccgtgggagtttcggcctcactgacacccgcaacaccacccatggttcggactctgtggtttcagccagcagagagattgcagccttcttccctgacttcagtgaacagcgctggtatgaggaggaagagccccagttgcgctgtggccctgtgtgctatagcccagagggaggtgtccactatgtagctggaacaggaggcctaggaccagcctgatgcaggtctatgaagaccagtggtagtgcccagacttctcctagacatctagtctaaaacattctcctaggaccagggaagcctggcttacagtgccatttctgctgggcaccaccacctgcctgagggcctagctcaccacagcacatcctccaggatctagccttctatctacctcttctctggaatgtttatggtggttcagaagaatgatgactcctctttgctgagaactgttcatccttcttcaagaagaagcttgccaggccgggcacggtggctcacgcctataatcccagcactttgggaggccgaggcaggcggatcacaaggtcaggaattcgagaccagcctgaccaacatggtgaaaccccatctctactaaaaatacaacaattagccaggcatggtggtgcatgcctgtaatcccagctactcagaggctgaggcaggagaattgcttgaacctgggaggcagagggtgcagtgagccgagatcgtgccattgcactccagcctgggcgacattctgtctcaaaaaaaaaaattacaacaacaaaattgtttgggcggcgctgccccagaaaagtttcaacaactctgtggaggggccagtagataacacggtcaagggttccagacaagggcagaagggtgttcccacaaaagccgggccgcggctcaacaccaggggggcagggataaggcggcctatcgccggggaagaccgagaaagacaagctcacatcgcgcgcagcac

SEQ ID NO: 595679 - DNA, 1483 bp, Homo sapiens
aagtgtgtatagtcgatccggtttatttcagtacgaggccagagtgtcttttctcatctgtccgtccgcgtgtcaatgcatgcgcctggaaaacccgccaccctccaggacaactcacagcctcacctcacgccgcggcgcaaccggactaggaccccgagcagggctgcccaggagcgcctgaaggaccctgcgagggccgcaggctatccaggtggcgcctggtggccgggccctgtgccggaggacaaggctgttcatcagcagattctaagcaacaagttcctgattgtacgaatgagagaactactgtggagaaaggaagattgccagaggttttaccgagagcatgaagggcgttttttctatcagaggctggtggagttcatggccagcgggccaatccgagcctacatccttgcccacaaggatgccatccagctctggaggacgctcatgggacccaccagagtgttccgagcacgccatgtggccccagattctatccgtgggagtttcggcctcactgacacccgcaacaccacccatggttcggactctgtggtttcagccagcagagagattgcagccttcttccctgacttcagtgaacagcgctggtatgaggaggaagagccccagttgcgctgtggccctgtgtgctatagcccagagggaggtgtccactatgtagctggaacaggaggcctaggaccagcctgatgcaggtctatgaagaccagtggtagtgcccagacttctcctagacatctagtctaaaacattctcctaggaccagggaagcctggcttacagtgccatttctgctgggcaccaccacctgcctgagggcctagctcaccacagcacatcctccaggatctagccttctatctacctcttctctggaatgtttatggtggttcagaagaatgatgactcctctttgctgagaactgttcatccttcttcaagaagaagcttgccaggccgggcacggtggctcacgcctataatcccagcactttgggaggccgaggcaggcggatcacaaggtcaggaattcgagaccagcctgaccaacatggtgaaaccccatctctactaaaaatacaacaattagccaggcatggtggtgcatgcctgtaatcccagctactcagaggctgaggcaggagaattgcttgaacctgggaggcagagggtgcagtgagccgagatcgtgccattgcactccagcctgggcgacattctgtctcaaaaaaaaaaattacaacaacaaaattgtttgggcggcgctgccccagaaaagtttcaacaactctgtggaggggccagtagataacacggtcaagggttccagacaagggcagaagggtgttcccacaaaagccgggccgcggctcaacaccaggggggcagggataaggcggcctatcgccggggaagaccgagaaagacaagctcacatcgcgcgcagcac

SEQ ID NO: 595680 - DNA, 631 bp, Homo sapiens
tggggggggcccccccccccaaaaaggggtttttttaaaaaaaaaattatataaaggggccgtccttcttctttttttattactatctttctcttctggggaggagagagagaaaaaccgggtgtacagagagaccactttttatataaaaaaaaaattatttttctccctcacaaacatcttattaataaggaaggagggggttgttgtgccgcgcggaacacgagcgggtctatattattgtgtgtgtcgtcacccgaccgcgctgggtcctctctccgcgcgtgtgtgtgtgtcgtctctctcttgtttgtgggagggcttctctctctctctctctctctctctctctctctctctctctctctctctcgcgcgcgcggggtgtggcgtccctcccggagcacccggcggcggagggaggtggttatatattgtaggggggagaagaaaaaatagattatctttaagaagaaagaacaacacaaaaaagagagagcggggagagaaaacaacgcgccgccaggcgagcccccccgcgcgcggcggggactcttctttgtccccaaagccgggagggggcgccaccaaaccgccgggcggagggcgcgtggactacccggagagaaat

SEQ ID NO: 595681 - DNA, 1385 bp, Homo sapiens
gctaggtgcgagcgtcggtgagatcggcacgagggacaaggtgaacccgcagccggacttctgctgcactggggctccgaatgacccagaatctggggagtgagatggcctcaatcttgcgaagccctcaggctctccagctcactctagccctgatcaagcctgacgcagtcgcccatccactgattctggaggctgttcatcagcagattctaagcaacaagttcctgattgtacgaatgagagaactactgtggagaaaggaagattgccagaggttttaccgagagcatgaagcgggccaatccgagcctacatccttgcccacaaggatgccatccagctctggaggacgctcatgggacccaccagagtgttccgagcacgccatgtggccccagattctatccgtgggagtttcggcctcactgacacccgcaacaccacccatggttcggactctgtggtttcagccagcagagagattgcagccttcttccctgacttcagtgaacagcgctggtatgaggaggaagagccccagttgcgctgtggccctgtgtgctatagcccagagggaggtgtccactatgtagctggaacaggaggcctaggaccagcctgatgcaggtctatgaagaccagtggtagtgcccagacttctcctagacatctagtctaaaacattctcctaggaccagggaagcctggcttacagtgccatttctgctgggcaccaccacctgcctgagggcctagctcaccacagcacatcctccaggatctagccttctatctacctcttctctggaatgtttatggtggttcagaagaatgatgactcctctttgctgagaactgttcatccttcttcaagaagaagcttgccaggccgggcacggtggctcacgcctataatcccagcactttgggaggccgaggcaggcggatcacaaggtcaggaattcgagaccagcctgaccaacatggtgaaaccccatctctactaaaaatacaacaattagccaggcatggtggtgcatgcctgtaatcccagctactcagaggctgaggcaggagaattgcttgaacctgggaggcagagggtgcagtgagccgagatcgtgccattgcactccagcctgggcgacattctgtctcaaaaaaaaaaattacaacaacaaaattgtttgggcggcgctgccccagaaaagtttcaacaactctgtggaggggccagtagataacacggtcaagggttccagacaagggcagaagggtgttcccacaaaagccgggccgcggctcaacaccaggggggcagggataaggcggcctatcgccggggaagaccgagaaagacaagctcacatcgcgcgcagcac

SEQ ID NO: 595682 - DNA, 241 bp, Homo sapiens
gcaaattgtgcaatggaataaaatccacactttgctagtgtatttcctgggtagtgtggtgctgaataaataggagtagggtggtggggtgggtgggttaggggtttagattagccagaagcaggaaattcactagcaaatttttcaattgaataaaattcacactttagattcttgcaactgtatcatatgaatagatcactttttctacattttgggcaaataaatttttacataaact

SEQ ID NO: 595683 - DNA, 258 bp, Homo sapiens
ccttttggggggtgggggaagggagcccgtttggatgatggatgcccttccttttggccagttaaatgttcccccatccttttaactaaaaactcagacttagaaggcagatggttcatggcccagcctttaggttggtccacaggtggtttttcagcttcctttggccagggggaaaacatgattttctgggttggccagcccaaaatgttatatttgatatttaaaacttaatggtggtttgaagagatagctgga

SEQ ID NO: 595684 - DNA, 1539 bp, Homo sapiens
aagtgtgtatagtcgatccggtttatttcagtacgaggccagagtgtcttttctcatctgtccgtccgcgtgtcaatgcatgcgcctggaaaacccgccaccctccaggacaactcacagcctcacctcacgccgcggcgcaaccggactaggaccccgagcagggctgcccaggagcgcctgaaggaccctgcgagggccgcaggctatccaggtggcgcctggtggccgggccctgtgccggaggacaggagtgagatggcctcaatcttgcgaagccctcaggctctccagctcactctagccctgatcaagcctgacgcagtcgcccatccactgattctggaggctgttcatcagcagattctaagcaacaagttcctgattgtacgaatgagagaactactgtggagaaaggaagattgccagaggttttaccgagagcatgaagcgggccaatccgagcctacatccttgcccacaaggatgccatccagctctggaggacgctcatgggacccaccagagtgttccgagcacgccatgtggccccagattctatccgtgggagtttcggcctcactgacacccgcaacaccacccatggttcggactctgtggtttcagccagcagagagattgcagccttcttccctgacttcagtgaacagcgctggtatgaggaggaagagccccagttgcgctgtggccctgtgtgctatagcccagagggaggtgtccactatgtagctggaacaggaggcctaggaccagcctgatgcaggtctatgaagaccagtggtagtgcccagacttctcctagacatctagtctaaaacattctcctaggaccagggaagcctggcttacagtgccatttctgctgggcaccaccacctgcctgagggcctagctcaccacagcacatcctccaggatctagccttctatctacctcttctctggaatgtttatggtggttcagaagaatgatgactcctctttgctgagaactgttcatccttcttcaagaagaagcttgccaggccgggcacggtggctcacgcctataatcccagcactttgggaggccgaggcaggcggatcacaaggtcaggaattcgagaccagcctgaccaacatggtgaaaccccatctctactaaaaatacaacaattagccaggcatggtggtgcatgcctgtaatcccagctactcagaggctgaggcaggagaattgcttgaacctgggaggcagagggtgcagtgagccgagatcgtgccattgcactccagcctgggcgacattctgtctcaaaaaaaaaaattacaacaacaaaattgtttgggcggcgctgccccagaaaagtttcaacaactctgtggaggggccagtagataacacggtcaagggttccagacaagggcagaagggtgttcccacaaaagccgggccgcggctcaacaccaggggggcagggataaggcggcctatcgccggggaagaccgagaaagacaagctcacatcgcgcgcagcac

SEQ ID NO: 595685 - DNA, 598 bp, Homo sapiens
tgaaccgccattttgaaaatcttgtgattctggggagccgagcgcgcggcgcgagcgtccgccagacagggcccgcgcgccttctcctcggcgtcggccggcgcgcattcccagaatctcctcgtgccttcgtgtgccaggcccgaggccggcacgacaatccgcggttcacacagattgtccgcctgggccctggtttgtgagaggtgggaagggaaaccccccaaccaaagcccggggtcggagaaaagaaccgcgaaaatgcccggtcccccagagaggcaaagcgatggagcgatgaaggaccgaggaacgaccgatgcgaaggacgggatcgtgatgtgagacaaaacaggaagaaggagtctcatccgtgagcacgcgcaaggaggtgaacaaatacataccattgtccgcagaggtctggacaatctgcaacgtcttcctccttaacagaggagacccttttaccattttggccacaagggacgtggggcaaacatctttgtgacacttggcgaggaatacatttttcctaggtacaaagaaaaccggttgagttagaagtctacacagagggtttaacacagccaggccg

SEQ ID NO: 595686 - DNA, 978 bp, Homo sapiens
gctaggtgcgagcgtcggtgagatcggcacgagggacaaggtgaacccgcagccggacttctgctgcactggggctccgaatgacccagaatctggggtgggcttaggccccgggtacgaggggattctcgacttgtcagttgttgtaaaccaagagtcaagacagccacaacttagctgcgttagtaaaggaaccatgtcctccctacaggtgggcttaggccccgggccgcgtgttcttgccacgagaacccctagcagcctggccttggaatggctggatgaggtgcattcgttggttcattcagatactgttaagagccagctgtgtgctaggtactgcttacaccttctggtggtgaagacggaactgaagggaacttgcaaggagctgtgagaaagtgtaacgggaagtgagctaagatcactaaggtgggcaggaggcaaccagagaaagcacattcaggactgcgaaaactactcacacaaaggctgtcaagccagaaattctttcaaaactgaaaggcccatgaggttggagctagagaaacttaaggagtgtggggttccagatgaggctagagaggagtgagatggcctcaatcttgcgaagccctcaggctctccagctcactctagccctgatcaagcctgacgcagtcgcccatccactgattctggaggctgttcatcagcagattctaagcaacaagttcctgattgtacgaatgagagaactactgtggagaaaggaagattgccagaggttttaccgagagcatgaaggtaaggaggtagaagtacagaaagttgccttgggcaccaggatgaaggtatcttgatgaaggtcctctctctttgcagggccagtagctaaggagtgtgcagacttgtggccccggattgcatccactgctggcagccttgcatgattctcccgatatttgtaacaaatgaaaaaaactaaccctattaggt

SEQ ID NO: 595687 - DNA, 1498 bp, Homo sapiens
  misc_feature (1498)..(1498): n is a, c, g, or t
gcctggaacgtccttgccctggggcgctggggctgcgcctgcgtggttcttgtcctcacgtgggcggtcaagccctctagtgccttagattccagcgagctacgcaagcaatcctggcccagccgagcttgcttccccaaatcccgtaatccttgaccttattcccccaaagaagcggcctccctgggaaggagctgccctgtgctggagaagactcgaactggctcccacagccgggcgttgggggaaagtgtgggctggtcttgtgtctgtgcgaggtcgtgggagggagtggtcctcctgctctccattgctgtgagcttctgtcctgggaccacctggtgggacctggactgccgtgtgccgctgaatgcttgcctgccttggggctttgcgagaggatgtgacgagcaaacataagctcggaatgggcacttacgtgtggccgtgtgtcaagtgggtctgtcacccggtgggtattgggcggaacattgaccgaaagtgtggtccccagggcaccagtcggttgattacacttggtgctgagtgtttaccacgccctaaaggatgccccaccgcatgcccattggcggggaaacacccatgtaggtgacctttctagacaggcctgatgtttcccctgaatatgaaccatgtctcttgagcaaacgatgtattccgagagagtgggccctttaaggaacgcgcatgggtcggaggtggtcccccaccttttatctaaagcggcaatttggtgtgtgaacacatgcccggttcataaccggtactcatggcaacaacacgccgaggtttcttccaaacggtttggtaccggtgtccctattaggcggaaactttggttgctttgtacgcttaataatcaccgtcgcaatcattgccacactgagccactgtgtacagaaactctgctacgccagcggatgtgatcatggcacgtcttagcacgaaagtgttaacgacgatgtgttagccccggagtgatcaggattacataatcgctacccatctagcagggatattacacccttagtaaagggatctacgcgacaggtttctccgaggataaccatagcccctgagtcgccaccagaaccgcgtatcgtggttcaagaaatacccccctagttactactgtactcgttacaacagcagtgtaactctcatagatatatcagtggtcctggcgccgctacgtatgagtttgcgacagagcgcagtccgcgtatattaaacttccccagagctataactatattagcgatagggcgtcttgcaatagggttaatagggacagcaatggtcgcgattgagtatctctcagaaggcgagtgagcgagtcaggagttggagacggttgggctagcaggggtgagagctagatgcacgaccgtagatcacattatccagagtcactgggcattgtacagagacacttcttcagtaacttcgtttgtcacaggaagcgatagcaagaggn

SEQ ID NO: 595688 - DNA, 447 bp, Homo sapiens
  misc_feature (7)..(7): n is a, c, g, or t
caccagnggtgctgaggtgagaggatcgcttgagcccaggagacggaggctgcagtgagccgtgatcatgccactgcactccaacctgggcaacagagtgagaacaaaaaatcctgggcaacagagaacaaaataaaaatgtggtacgtatacaccatggaatatgcggctataaaaaataacaaaatcatgtcctttgcagcaacatggatgcagttggatgccattatactagaagagaatttaattccggaacagaattaacatctaaacctatatgaagttcttacttgtaagtgggagctaaacattggtacacagggacataaaggtgggaacaatagatactgatagacagtagagagaaagaagagggaaaaggctgaaaaactacctgttggatactatggtcactacctgggtgacggaatcatttgtacgccacat

SEQ ID NO: 595689 - DNA, 1046 bp, Homo sapiens
  misc_feature (62)..(62): n is a, c, g, or t
  misc_feature (82)..(82): n is a, c, g, or t
  misc_feature (87)..(87): n is a, c, g, or t
  misc_feature (90)..(90): n is a, c, g, or t
  misc_feature (109)..(109): n is a, c, g, or t
  misc_feature (328)..(328): n is a, c, g, or t
  misc_feature (330)..(330): n is a, c, g, or t
  misc_feature (342)..(342): n is a, c, g, or t
  misc_feature (466)..(466): n is a, c, g, or t
  misc_feature (469)..(469): n is a, c, g, or t
  misc_feature (474)..(474): n is a, c, g, or t
  misc_feature (480)..(480): n is a, c, g, or t
  misc_feature (494)..(494): n is a, c, g, or t
aaacttatggctaggtacgaggctgggtgttggtgtcgacacgttcaacccgttctgctggntcgagaacgaagtaggccgnctcgntcngggtctccaggcccgcgancgtccgccagtcgtcccgaggcatgaagaactcttgactgacagaaacggagggtgtgtccaaagttttgaggacggccgagcggcgctccaaaacccgtcctcacagcctcgccccgttcgcctcagctacaacaaatcatcgtcaacctgttccaccttctccagtctggtagcaaaaaggggtgtctcagaatctccggcctgtgaaactgtgagngngattcggccaangacgttccttctttcaccttcttagccttcaccaacaccagaggccaactctcttctcaacctctccaaccaagtgacgccgtggcactatccgaagacgccgtggaacaatccgaggttgtgnagngagcntgagcngacgctagataggngcctgagctcctccctctgctccagcagtgccaagtggtcaggctggacgactgtggcctcacggaagcacggtgcaaggacatcagctctgcacttcgagtcaaccctgcactggcagagctcaacctgcgcagcaaacgaagctgggcgatgtcggcgtgcattgcgtgctccagggcctgcagaccccctcctgcaagatccagaagctgagcctccagaactgctgctgacgggggccggctgcggggtcctgtccagcacactaggcaaccctgcccaccgctgcaggagctgcacctcagcgacaacctcttgggggatgcgggctgcaagctggatctggaagggactcctggaccccaggtgccgcctgacagaggctgcagctggagtattgcagcctctcggttgccagttgagaacccatggtctccgtgcttaggggccaaggcggactgtaaggagctcacggttagcaaccaagcgacttcaatgacgctgcgtccggtgctgtgcccagggctgaaggatccccctgcagtggaggc

SEQ ID NO: 595690 - DNA, 155 bp, Homo sapiens
attgcatacatggatcaggccagtggaaatgtaaaggagggccctaaggctgatggggtcaaatagagggtgattcagggctgagggaattagcaattcacctacacagttctggaggatggttccacgaaacacactggggattggagcaaaac

SEQ ID NO: 595691 - DNA, 759 bp, Homo sapiens
  misc_feature (62)..(62): n is a, c, g, or t
  misc_feature (82)..(82): n is a, c, g, or t
  misc_feature (87)..(87): n is a, c, g, or t
  misc_feature (90)..(90): n is a, c, g, or t
  misc_feature (109)..(109): n is a, c, g, or t
  misc_feature (179)..(179): n is a, c, g, or t
  misc_feature (182)..(182): n is a, c, g, or t
  misc_feature (187)..(187): n is a, c, g, or t
  misc_feature (193)..(193): n is a, c, g, or t
  misc_feature (207)..(207): n is a, c, g, or t
aaacttatggctaggtacgaggctgggtgttggtgtcgacacgttcaacccgttctgctggntcgagaacgaagtaggccgnctcgntcngggtctccaggcccgcgancgtccgccagtcgtcccgaggtccactcgttcagcctaccaccatgagtcctggatcatccatgctgtgnagngagcntgagcngacgctagataggngcctgagctcctccctctgctccagcagtgccaagtggtcaggctggacgactgtggcctcacggaagcacggtgcaaggacatcagctctgcacttcgagtcaaccctgcactggcagagctcaacctgcgcagcaaacgaagctgggcgatgtcggcgtgcattgcgtgctccagggcctgcagaccccctcctgcaagatccagaagctgagcctccagaactgctgctgacgggggccggctgcggggtcctgtccagcacactaggcaaccctgcccaccgctgcaggagctgcacctcagcgacaacctcttgggggatgcgggctgcaagctggatctggaagggactcctggaccccaggtgccgcctgacagaggctgcagctggagtattgcagcctctcggttgccagttgagaacccatggtctccgtgcttaggggccaaggcggactgtaaggagctcacggttagcaaccaagcgacttcaatgacgctgcgtccggtgctgtgcccagggctgaaggatccccctgcagtggaggc

SEQ ID NO: 595692 - DNA, 1290 bp, Homo sapiens
ggcgcagggcagcgcaagtttcaggcgcacaaacccgcaatggagtaagacggtagctggcagcactctgtaaatggtaatctgggggcccgaaggaaaacggcggatcgatgattatcgcatcccaagcaaggcgcgcgatcgtgcagcagcgaaggtctcatggaagtatactctagaagtcggcaatccggatacgtaatgatcgcagagcagtgcacgtgagtgatgacatagccagtgagtcagcctgtgccgataaagcttgtgcacatgcgtgagagtgctccgcagccatagaaagataaggggcaggtgccgacaacttcctccaaaggaacaccgttcctgtagggacgtctgtgtcccccaagttgcagagccataaaatcctaaagcctccttagcatcacactagtgtgcatcccttgtgaagatcaattactcacagggactgtcttgttgtcaggcgaaacgaagggatcccgtggtcctcctcaagctacatgagtgcgttcgaccattagaaactctcaggtatgggtgagccatagtgggttgcttgaatgatactccaatgctaactgaaccagggaaaagattgccaagttcacgtacaactatcgattcatagtcaccgcggtggacgctctatttccctaagggatcgctttgtccttccggaccatgggtttataaaacccaagtaaagcagaatataagccatgggtttttggtccagctcggtctaatggaatccttaaagaaatggcacaggatagagtaaagacaaaattatggtaactgatatggaacatattttagagattaagaaagatttacgtaggcgaatttttgccaagaaacattccgaagaagaacaggagaacagaaagagaaagatgagcgaaatagaagaagagcggagaaagagagacgagaaggaagagaggaaagagagtgaaggagaaaaaaaaaagaaagagaaagggagatagaaggcgggtcagaaacaaagaatactcaagcaaggagagggcagacaacgagcagacaaggacggaccggagaaaaaaaagagagaaaaagaaagagagaacggcgccagcgagagaaacgagagaagacaaagagaagagagaacgagagaagagaaagaagaaaaaaaaagaggaacgaagcgaagcgaaaaagaagaagagaagcagacaaaaagaagaaggataggagaaagaacaacaagaaagcaaggagagcgagagagaagatagaagagagaccaaccaacat

SEQ ID NO: 595693 - DNA, 1134 bp, Homo sapiens
  misc_feature (451)..(451): n is a, c, g, or t
  misc_feature (453)..(453): n is a, c, g, or t
  misc_feature (465)..(465): n is a, c, g, or t
  misc_feature (554)..(554): n is a, c, g, or t
  misc_feature (557)..(557): n is a, c, g, or t
  misc_feature (562)..(562): n is a, c, g, or t
  misc_feature (568)..(568): n is a, c, g, or t
  misc_feature (582)..(582): n is a, c, g, or t
gcctggaacgtccttgccctggggcgctggggctgcgcctgcgtggttcttgtcctcacgtgggcggtcaagccctctagtgccttagattccagcgagctacgcaagcaatcctggcccagccgagcttgcttccccaaatcccgtaatccttgaccttattcccccaaagaagcggcctccctgggaaggagctgccctgtgctggagaagactcgaactggctcccacagccgggcgttgggggaaagtgcatgaagaactcttgactgacagaaacggagggtgtgtccaaagttttgaggacggccgagcggcgctccaaaacccgtcctcacagcctcgccccgttcgcctcagctacaacaaatcatcgtcaacctgttccaccttctccagtctggtagcaaaaaggggtgtctcagaatctccggcctgtgaaactgtgagngngattcggccaangacgtcctcttccctctgcctcccacccagtgccactcttcacctccaccatgagcctggacatccagagccttggacatccagtgtgnagngagcntgagcngacgctagataggngcctgagctcctccctctgctccagcagtgccaagtggtcaggctggacgactgtggcctcacggaagcacggtgcaaggacatcagctctgcacttcgagtcaaccctgcactggcagagctcaacctgcgcagcaaacgaagctgggcgatgtcggcgtgcattgcgtgctccagggcctgcagaccccctcctgcaagatccagaagctgagcctccagaactgctgctgacgggggccggctgcggggtcctgtccagcacactaggcaaccctgcccaccgctgcaggagctgcacctcagcgacaacctcttgggggatgcgggctgcaagctggatctggaagggactcctggaccccaggtgccgcctgacagaggctgcagctggagtattgcagcctctcggttgccagttgagaacccatggtctccgtgcttaggggccaaggcggactgtaaggagctcacggttagcaaccaagcgacttcaatgacgctgcgtccggtgctgtgcccagggctgaaggatccccctgcagtggaggc

SEQ ID NO: 595694 - DNA, 283 bp, Homo sapiens
atcactcccaggttcaggtggtcggcttgtcgtcgtctgtgaagcgggactcgctgctgtagctgcccctgggccagcgtacccttgggtgcctcctccacgggggtcaggacctcgtactcctcgtcccgcggcccgcggtgcgttgtcccaccacgctccgtccccatcataggcaggcttacaagcattgctcttggccaaaatttagccccatgaggccttaccacgatgaaatgtgttctatgctccatattgtattatctggcctgggcacacctcc

SEQ ID NO: 595695 - DNA, 759 bp, Homo sapiens
  misc_feature (547)..(547): n is a, c, g, or t
tgcgtgccgccgttgatccggtgctgcagtgaggaggtggttcttgcccgtgttgtgtgtgtgtgtgagtgagagagcgagtgagtgagtgagtgagtgtgtgtgtgggggggactcggcttgttgttgtcggtgacttccccctccccttcacccttcccctccccgccgcgctgcagtggccgctccctgggccgtaggaaatgagcgataacgatgacatcgaggtggagagcgacgaagagcaagcgaggtttcaatctgcggctgacaaacgggctcatcataatgcactggaacgaaaacgtagggaccacatcaaagacagctttcacagtttgcgggactcagtcccatcactccaaggagagaaggcatcccgggcccaaatcctagacaaagccacagaatatatccagtatatgcgaaggaaaaaccaacacacaccagcaagatattgacgacctcaagcggcagaatgctcttctggagcagcaagtccgtgcactggacgaaggcgaggtcaagtgcccaactggagaccaantaccaccatcctcagacaagagcctctacaccaacgccaagggcagcaccatctctgccttcgatgtggtggctcggactccagctcggaagtctgagcctgaagagccccaaagcagggaagaagctccggattggattgccagaataagccacctcggggcaagggccagcaataacagactgtactgtctcacatcgtcatcatcatcc

SEQ ID NO: 595696 - DNA, 728 bp, Homo sapiens
tgcgtgccgccgttgatccggtgctgcagtgaggaggtggttcttgcccgtgttgtgtgtgtgtgtgagtgagagagcgagtgagtgagtgagtgagtgtgtgtgtgggggggactcggcttgttgttgtcggtgacttccccctccccttcacccttcccctccccgccgcgctgcagtggccgctccctgggccgtaggaaatgagcgataacgatgacatcgaggtggagagcgacgaagagcaagcgaggtttcaatctgcggctgacaaacgggctcatcataatgcactggaacgaaaacgtagggaccacatcaaagacagctttcacagtttgcgggactcagtcccatcactccaaggagagaagctctatttcctctttgggaaattgtgtgctcctgtccttcatcgtcaaagttgatgcgagataatgccacaggcatgacattttcaagctacccaaggtgcagcaagagaagagagatgctaagatttaaagacattgctggttcgggaccccttacacaaatgtcttagctcctggctttactataacgctgcttgagggctgatagactctgcttcccaccatggtaatcagcagaaggtcctgtaggctggggaggcccctgggcagcaggaagcacttccaaggagccaatgggtctgtgcgggactctgcccttagaaacattcagcctcatttgctggcattgatggg

SEQ ID NO: 595697 - DNA, 731 bp, Homo sapiens
  misc_feature (519)..(519): n is a, c, g, or t
tgcgtgccgccgttgatccggtgctgcagtgaggaggtggttcttgcccgtgttgtgtgtgtgtgtgagtgagagagcgagtgagtgagtgagtgagtgtgtgtgtgggggggactcggcttgttgttgtcggtgacttccccctccccttcacccttcccctccccgccgcgctgcagtggccgctccctgggccgtaggaaatgagcgataacgatgacatcgaggtggagagcgggctgacaaacgggctcatcataatgcactggaacgaaaacgtagggaccacatcaaagacagctttcacagtttgcgggactcagtcccatcactccaaggagagaaggcatcccgggcccaaatcctagacaaagccacagaatatatccagtatatgcgaaggaaaaaccaacacacaccagcaagatattgacgacctcaagcggcagaatgctcttctggagcagcaagtccgtgcactggacgaaggcgaggtcaagtgcccaactggagaccaantaccaccatcctcagacaagagcctctacaccaacgccaagggcagcaccatctctgccttcgatgtggtggctcggactccagctcggaagtctgagcctgaagagccccaaagcagggaagaagctccggattggattgccagaataagccacctcggggcaagggccagcaataacagactgtactgtctcacatcgtcatcatcatcc

SEQ ID NO: 595698 - DNA, 225 bp, Homo sapiens
aagctaatacctcggctgtctggtctccaggtttgatattagcatgtagactatcagatgttcatcgagtcctggaaacttcatagcccttcgttgagcctgtaatataagaaccggtcctactattttgagtcggtttggggtcagataatcagcatcgaaagacacgagtactagttagtactgtaataccccaaaatgcagggacacttagtgatcacttaa

SEQ ID NO: 595699 - DNA, 151 bp, Homo sapiens
gatccccccagttaaggcgggaccgactggttttctgttttacactttgatgctcagtcctggggataacctccctgctgtgttattttattctaaacaaggggtgacatcttactatttctgggtcgtctgcaaaggcctgggcgccttc

SEQ ID NO: 595700 - DNA, 921 bp, Homo sapiens
tgagtaatcacagccagtagggcctacatcacgctgaagggagggggcccagcagagatcatgctcaaaagcgagcaggaaaaagctaggtggagcatgctgaaagtgccgagggtgtgacctgaagagtgaggggtggtgctcgctcaaagtcaagaatctggggggttcatacaatgcgtggggatagcaaaacagtagttagtggcaaatcactctgggtgttagtgcaagagcattcgttgacgttgcgagtttcttgtgggcttcagacatgtgagtggaaagactccaagactttgaagtgtggttgtggtgaacccatgtgggggcattctggaaatgggcatggagatgcatctggtatgaaatggcgaagtaaaggtaagcagctggagggtatcaggagggcaagacagcctgggtggacattgcgccggcagggcgcatgaatccatgggccgggaccgaaaaactagccccggtacgagaagcgcagcaaccgtgcggtgggaccacgagagcgttttgtaaatattatctctgtggttttgtcctgcggaattgttcacaaatacacgtctgatcttggtccgtgtgaaaagaattctgatgaaaatctacgaaagagaggtatgagaaggaggtctgggttccatgaaagggtggtatgaggagagatttgggcgatacttaacagaggttacttgcagaagtaagaagtatgccggggggggggggcggttgggggtttttcccaaaacaggaggtctgtggggggggggcccaagggggaaaggtgaaaaatttggggttcagagcaaatgttgggttttggaattggaaataggtgggggaaaaaaaacccggggggagatttggggaaaggggacgggggggccgtgaggtggcgaaaaggtt

SEQ ID NO: 595701 - DNA, 106 bp, Homo sapiens
ggtaccgcttatgtgctgtacatcacttcatcaccacgtcatcatcacatcaccaccaccatcatcaccatcacaagcgtcactgtcatcaccactgccatcatca

SEQ ID NO: 595702 - DNA, 1075 bp, Homo sapiens
gcaggctgtacgcctcgtgataacgggatctgcgctcctgctggctggacgcgctgaggagtgagcagcacccggccggcctggggctgacagtcggcaaagtttggcccgaagaggaagtggtctcaaaccccggcaggtggcgaccaggccagaccagtggcgctcgcatgcctgcgggcgggctgtaaggcgagtggctctgccccagtgccgagaccctggggcttcattgagcctggcccctgggagagaagagtgcagtgcggcggactggagaaaacaatctccaaatgttggctgaaagtgcacctgcccgtactccctgggctttcctgcctgcttaccgccgcccccgcagcgcctgggaataccaaggagtaacgcggctcggagcccctgggaaccaattggaagcgccccacgctaggatgaatgggcgtgacaacgcgaagtggaaggacactttgtgagcgccccaggggcgtaccgggcgctgcggaagacacccaagtaccgcggtaagagacaacgaaggaacagagcgttcccggaggaggatcgcccgttatcgcggtggaccaactcaatcgtatgtgaaccaaagggcgcccagggcggagttgccgtttgatatggggtcgcatgccgccgttcctcattcgcgtacccgatacgcatacccgttttgcgggaggggtgaggcgatacgttggggcgcgccaagttccccgaaggaagccgctggggacgtctacgttttatatagtcaccccagaaagagttccaatgatggccattagtgatagaacgggaagacacgcccacggacataagacgaaaggagttggcgttactttatagggaaacagtgaatgggccgaacgagggagcgcagcgcccctgttaatagcgcagagtaagtaggtgctgcgcacatagttagtggtatcccggtggggggaattcgtagctgcccgtgcagaagcgtccatatcccgcgtctgttagtaccgaaaagagtatagagcgaagcgctatgggagcggcttccaattttcacgtttgtggggca

SEQ ID NO: 595703 - DNA, 517 bp, Homo sapiens
actaactcccgagatttttgcgtttgccaaggggaccacccaaacggttggggaggagggcggtcgggttattgagcagtcgctgcaccggactgcgtcattgggagcgcagttgatcctgaacaagcttgcaaccagccggtcttccactgtaatccaatgctataactgggtatatcctgacaagctcctactcggtaagcgtcgcgagaccggcctatcttcgtttcagctgatgtcctcatgaaaacaggtcattgtcgaggcgtcctgacgccaccaaaatctgcctacacacgatcgcgggtgccccacctgcgaaaccttgatctaaaccggcgttcaattacttaccagtaagaccaagggtcatccactcctcctgaatatggtccgcttaaacaccggctatctagctccggcacgactccagcggctccataaaggaaccccgcgctctatcgccgaggtcagatatatgacaatcgctaaggcggacgttttaatgctaggggcc

SEQ ID NO: 595704 - DNA, 501 bp, Homo sapiens
gctggtacggtctggtttaggtgcacagcatggccctttagtctcccgccccgcaaggggcaccaatgccacgtttccggtgccacctcctgtctactcattgttgcatgagccctgtctgccagcccaccccaggactgggggcagcaccaggtcccgggtagagggattgagccaagaggtgagggtgcacgtcttccctcctggtcccagctccccaagcctggcgtagagcaccctctcacagttatacactcaagcgcggtcgtacctgctcgtgccttctggagcacatgccgcgagcttgtgtgtacattaatcacctgatgcttgcgccctagagggcagagcagcgatggaccatgtagtgcatgggcagtgtgcgacatcctgctctctcacataccgtatcgatagcgcaaccttctcacactacaaattggcgatctgctcctcacaaatgacacacgaaatgaacaaacagcacacaaccataaacca

SEQ ID NO: 595705 - DNA, 488 bp, Homo sapiens
cacagaagataaaaaacagtgttcttttccatattcaggtgtgcacccagggccaggcgctgaccatggttgggagtgcatgcccactgcactctggtcccacgccaagtctcacactgtcacccccaggctcaatgcggaaccgtgtgcaaggctagcccttatccaaagcacaactcccagcctgggtagcacagggagaccccgtctctacaaattattttaaaacactggctcagtgtggtggcatacacttgttgtcctagctactcaggaggctgaggcgggaggactgccttaccctcagagtctgaggctgcagtgagctgagaccgcaccactgcatcccgggctggggccacagagcaagacctaacctcaaaacaaacaaacaaacaaaaaaaacagaataaccccacacagcacaactgtaccaccaccgctcctcctgaggcgagagtgcccctacccgtcggtggagcctcggg

SEQ ID NO: 595706 - DNA, 151 bp, Homo sapiens
aactcagtcagcagcccagttttcaacactgccagcacacatcggcagtggcatgggttctcgcttcaacatcgggcaggcatcgccacagccggagcacaggcacacacattcccttttgtcccacaccgtgtcatccacatttttcacc

SEQ ID NO: 595707 - DNA, 103 bp, Homo sapiens
cggggtgatagcatatgatcgaagtataaaggaactggaagcgatagaaggactcggggatatcataaggagcgaagagctgatcagtgacttcggagtagaa

SEQ ID NO: 595708 - DNA, 139 bp, Homo sapiens
taagctaatagggatgtgcgtgtgtatgtaggagatcgagtatgtgggaataaatgtgctagtgggacttattacgtagtggtaggtagtgaggtcagggctgtagaagtctaggacggcatgagagattgggtacgag

SEQ ID NO: 595709 - DNA, 178 bp, Homo sapiens
ggttccattgaaacaaaggggatacgtcattttcagaggggacaaagcaggacagtccaagatttcatcatgctataagaccagcacacaattaaaacctggttaatttctgggaaatttccatttaatattttctggacgggggtggagcggtggcagtcacaaccggccggggggg

SEQ ID NO: 595710 - DNA, 599 bp, Homo sapiens
  misc_feature (55)..(56): n is a, c, g, or t
  misc_feature (62)..(62): n is a, c, g, or t
  misc_feature (67)..(68): n is a, c, g, or t
  misc_feature (73)..(73): n is a, c, g, or t
  misc_feature (87)..(87): n is a, c, g, or t
  misc_feature (265)..(265): n is a, c, g, or t
  misc_feature (307)..(307): n is a, c, g, or t
  misc_feature (565)..(565): n is a, c, g, or t
ctttcaatcgccaccctcgagaccacctcccacagtactcccagcttcacttctnngatcanaccanngagancacctcacacagtnctccaagcttcacttcttcaatcaacaccaccaagaccaccttcacatagtactccaagtttcacttctttgatcaccatcatcgagaccacctcacacagtttccagcttcacttcctcgatcgccaccactgagaccacctcacacagtactcccagcatcacttctttgattgtnaccaagactacctcacacagtacccccagtttcacttctatngccaccacagagaccacctcacacagtactaccagcttcacttcttcaactgccaccacagagaccacctcacgtagtactcccagcttcacttcattgatcaacaccaccgagaccacctcacacagtactcccagcttcatttctttgatcaccaccactgagaccgcatcctatagtacttctagcttcagttctttgatcaccacgaccaggaccacatctcagagtactcccagcttgacttcttctcaccancacagctgaggaccatcgttggggtaccgagctc

SEQ ID NO: 595711 - DNA, 928 bp, Homo sapiens
tggaaatggattccccctttttcccccaggttggtgtgcggggcccaatctcggctcactgtgcaaacctccgccctcccgggtttcaccccatttcccgcggccctcagttcctcccgagttagcgtgggactacgggcaccttgccaccagcgcccgcggcataattttttgtgtatttctcaccgtggaaggacggggtttcacacgtgttgtttagcccacgagtgttcctcccattctcgctgaaacctccgtttatattcttgccccactcttgggggccccccccaaagggttggctggggatataaccgagggtctttgaaccccaacgcgtcgccctgtggccaaagatgccgagaactattttattattcaaagcggggggtagtaagggcaggcgccacaaggtctaaagagctctttatggagaaacctcgaggtgtgtaactgcagaccttttgggcgcattttgggtgtgtaactctagagcgccacccgagcaaagggagaacgcggtgtaaaatctgcgcacagatttgggcacattgttcgcccccccaaggggaaagaaacggcgcccggacaaccatttgggtgagcccctcttgaaaataagcgggaacgtgagagacgagtgtcatatctgggacaaaaggttgttttggggcgccaagtctgcccacacaagacttcagctttcaccatgtggcgcacttaaccgacaaattattttttggggggccgaaaaaacactacgaagggggggcacaccctttctgcgggggcacaccccggacatgtcaaccagatgggcccaggtgtaacagagaaacgacactccttgtaacactactgtgcgagcaaaaacacccccaagggttttaaacaagtgttgtttgggaattaccggggtataagacac

SEQ ID NO: 595712 - DNA, 934 bp, Homo sapiens
agcgtgggttcctgggtggggccaacaagatcaaatgaggcagtttattgatcttggtggtaccagctgatccgtcaagtacagggtctgcaaaatatctcaagcatggatcttaggagcagtttagggggagggtcagaatcttgtagtctccagttgcatgactcgactcctaaaccgtaatttctaatcttgtggctaattggttagtccaacaaaggtagtctagcccccaggcaagaaggtggtttgttttgggaaaggactgttatcatctttgttttaaactataagctaagttcctcccaaagttagttcaccctatgcccaagaatggacaagaacagcttggaggttagaagcaagatggagttggttaggtcagatctctttcactgtctcagttataattttgcaatggggatttcagctacttgggaggctgaggccatgagaatcacttggacccaggaggtggaggttgcagtgaaccaagatcacgccactgcactacagattgggtgacagagtgagactctgtctcaaacaaagaacaccacaatctacaaaaactctgtagcctaatggggaaactagatgctttccccactaagaacaggatccagagcaggagaagattcatgcgacagatggcagaatattggtcctccctagaggataccttcgaaagggacccttttacatactcatggattaatcccgcgaccgaattcgggagcaagctaacctaaagatatttttatggaaaccccgaattttgccctgtgcatgattcccttacactttctcacattccgattttaccaaagggcctcaactctcaactacctgctggcgtcgaacaagcggcaactgttgatgcggcttttccccaagatgctctcagaaaaacggcacgcacttcatcgggaat

SEQ ID NO: 595713 - DNA, 796 bp, Homo sapiens
tgaggcccagaagaaacgcgtggcatcctgcaccctggaaggtaccccgattgagctagtggcatcgtcatccgaactgggacgagatggagaagatctggcaccatagacttctacaaatagcaactgcggaccgtggccccggaggagcactccagtgacttggtagtacctgatggagcgctcctctgtaatccaccaaaggtccaacagaagagaacgatgatctccagattcatgtttcgagaccttacaacacccccgagtcatgtacgtggacatccaggccgtgcttgtccctctatcgcctctgggcagcaacaaatcggccattgtcatgtggactgctcgagacggggagttcgaccctagtacgagttgcgcactattctcacagatgtgcgttaacggcccttccctcgcgaaacggcctatcctagccgtttctgtggaacctgagtctggggcccgggtgaaccttcgaactcagtactgagccttcaattgaaaggtatccttgcaactcgaacggcgtacgggttcctccaatgactttgcgttccagcccgacgggcctctgcaagaccgggcgacaattccgctacgctgccgaaacaatccacaaggggaggaaaggctttggtgccttcacctgtcctggcccctggggactttcagacgccaagggtaacgattgtgcccgacccgcacgctcatttccttccctacctgttcttccttgggcagcacagaagcataacggatggatcgccccggaatgggcccagggtccgac

SEQ ID NO: 595714 - DNA, 845 bp, Homo sapiens
  misc_feature (40)..(40): n is a, c, g, or t
  misc_feature (225)..(225): n is a, c, g, or t
  misc_feature (325)..(325): n is a, c, g, or t
  misc_feature (388)..(388): n is a, c, g, or t
  misc_feature (502)..(503): n is a, c, g, or t
  misc_feature (528)..(528): n is a, c, g, or t
  misc_feature (558)..(558): n is a, c, g, or t
  misc_feature (568)..(568): n is a, c, g, or t
  misc_feature (573)..(573): n is a, c, g, or t
  misc_feature (590)..(591): n is a, c, g, or t
  misc_feature (604)..(604): n is a, c, g, or t
  misc_feature (606)..(606): n is a, c, g, or t
  misc_feature (619)..(619): n is a, c, g, or t
  misc_feature (628)..(628): n is a, c, g, or t
  misc_feature (632)..(632): n is a, c, g, or t
  misc_feature (636)..(636): n is a, c, g, or t
  misc_feature (647)..(647): n is a, c, g, or t
  misc_feature (658)..(658): n is a, c, g, or t
  misc_feature (683)..(683): n is a, c, g, or t
  misc_feature (685)..(685): n is a, c, g, or t
  misc_feature (740)..(740): n is a, c, g, or t
  misc_feature (749)..(749): n is a, c, g, or t
  misc_feature (760)..(760): n is a, c, g, or t
  misc_feature (777)..(777): n is a, c, g, or t
  misc_feature (785)..(785): n is a, c, g, or t
  misc_feature (810)..(810): n is a, c, g, or t
tttattttcataattatcttcctatagaaacaataatctngtatttccataacaacacatttaatattctactcatcagagttgggaaaaataggaataaagcagattccatacagaaataccgtactctgcatatgtacaaataaattcaatatattaaatctattttgtagctggacttcacttacaatgtaacagaacattgaatattagattctgagcatnttcatgcaaacttccactttggtgaaagtgatgacagtggagttctggaagacaattttccttgtaaacaccaagttttgcactttggactatgctctcnagatagaaacttacgtgagtggaaaaagaaaatgtataaatgtgaaacaaatattccttaccncacagaataaccctggcaacaaacgatatcccccagtcctggttattcaatcctccccgtgggcggggggggtggggggggctgcacctggacacagccttttgtgtggtttanngcgtagctgcgctgctgctacggantgcgcttcatcgtccccttttttgaaaggngttttccgtnctttngacgagtaacattcccnncttttttcccccngnctttaatgggtantatggtctntctnttcntaaatggtctncagtatctttnacgtattgccccctctgtttccccngnttactaattagctcaaatgagcattaatgtaagactccagaagtttccgattggntctaaaggntacaagctgcnatgatggggtctttganacactgcnatgtccttaaatgcaaatgtctacntatagcttgttcatagtttatcccaatatcattaa

SEQ ID NO: 595715 - DNA, 408 bp, Homo sapiens
ggtttgcagagagccaagataacgccactgcataccaacctgttcgacggagcaagtactacgtctcagtcaagacataacagcaaataaacatgatgtctaccaagtacaactccagagatgttcaaacaatagcttcgctgacagacaattaattatgccttctgacaatcctaatgtcacttcaaagacagtaaggagatgctaatctgtgtgttatagagaaagtggtggttaaagttgcagtatgcaggaatgatgttggtttgaaaggtaaaaggagctgagttcacagtttaattgtgtttgtgtgttaataccagaagatgcataattagcacttggaggttcagttaccagtaccaaactgagactttcttttgcaccaacaggacaaatgttgcgcct

SEQ ID NO: 595716 - DNA, 1175 bp, Homo sapiens
tgatcatccatttcagtaacactggctcgtcatcttgcataaggcgcgagagcgtctaggaaactctatgcgccatagaatgggaccgagaccgtaagatatcctgagtgcttgtcagggaccagatggtctgctgtaccgaggctattcagcatatgccgatttcagtgcacgacagagaccgtcaaagtacgtgcgtaaatgggcaatgctgtgttctaatagaactattataggccatggcatggttgctcacacttgtaattacagcacttagggaggccagggcaggaggagcacttgaagccgggaattcaagactagactgggcaacattagcaacgacaccgtactccacaaaaacttattaaattagaccgggtgatggtggcacacctgtagtcatagctactcaggaggctaaggcaggaggattgcttgagcccaggagattaaggctgcagtgagctatgattatgtcacttcactccagtctgggtgacagacgggagacccattactcaaaaaacaaaatagtcacttaaaaagcaggtggtgggccatataggaccatacaccgtagttagccggcccttatctacgccatccagagtgtcgagccagtgtcgaaatgggaaagagaaactggctagagtacattctcctaggacagaccttcacaaatgtattaaatcctaacattaaatactagattgtactcaatacataactggcttccaaatacctaattatacccaagaagattccaaaagaggagatcccctaacggccatgggaacattgacaattctctgacggctataaatggcatggaataagggagctacgcactggccataaaggcgcttaaacgcagacagaacgacgcacgagacccacagcgcagcgccgagatcacaccaggacaaggaaacacccacaaaaaaaaagcccgcaccaaaacacaaaaggaaaaagcgaacgaaaagagcggacacaagaaccaaacacaaaggcaccacacacagagagcagaaaagagcagaggaaacacacaagacacagcacacaaaccacagagccaaagccacacgcagaacgcagcggaaagagcagcaggaccccaacaaaacacagacaaaacatacgaagagagaacgtaagcgatacaagac

SEQ ID NO: 595717 - DNA, 491 bp, Homo sapiens
ctgccttgaactcccaaagtgctgggattccaggtgagagctactgcacccagcctatctcatcattcttactggacctatatatgtgtgggattttgaattctcctttgaactgattgtaacttcttgctagttctctcattaattaatgaattcaatgaaatctttgacacatactttttttttttttttttggtaagacacttgctgttttgcccaggctggagtgcagtgacacaatctcgcctcactgtcacctccacctcctgggttcaaacgattctcctgcctcaggctctcaagtagctggaattataggcgcccaccagcaggcctgactaatttttgtgtttttagtagggacagggttttaccatgttggccacactggtctcaaactcctgacctcaggtgactcacccaccacggcctcccaaagtgttaggattacaggcatgagccactacgcccaacctacttcgtggttttga

SEQ ID NO: 595718 - DNA, 156 bp, Homo sapiens
gtacaacaggatccctaagctgaaaatgcagatgaccacattcaaggaagaacctatctgtcccagacatttgcagaatgaaaagctttcctgcttggcagatattcttccacaagagagggctttctctggctctgctcctgtaggctggcgaca

SEQ ID NO: 595719 - DNA, 189 bp, Homo sapiens
  misc_feature (156)..(156): n is a, c, g, or t
tcattactggcattgggctgattctttcactgtttccacatagcttgtctcatgtgctcggtgaaaactttggttcttgcaactacaaaataacattcaacatgccccgctttgatggaaaggaagcaaccatttgataaaacatcaataacactnacattttggtagtaggctgaggtgacagggtgt

SEQ ID NO: 595720 - DNA, 615 bp, Homo sapiens
ctcccccccggttggaggcaccttcgggcacacctcaatactcgggctcccttcggctttttcgcccgagatccctaagaaggctggtgcggacgacccaagggttaaaaccgggccaggaaccagagagcccttcctcccttaggtccttgtcatttgatcctacaggatgcgtcaccatagccatccatgccaaacctgggtcccaaccaaatgctgtaaccgctctgctattcccttcctccaccattggaggagactccggagggcgtttcagaccggggtctctcactttgtcaccccggctggagccccgcggcaccacctcgggtcactgccgccttgacttccctggctcaaaccatcctcccacctcagcctcccaagttgctggaactacaaggtgcatgccacccacaccccggctaattttcgtattttttgaagagacgggatctcgccactgttgcctaggctggaagtcttgggcttcggtgatcctcctgccttggcttccccaagtgctgggattacaggcaatgagcccctgtgcctggcccgaattatttttcttactttattaacttcccataaaaggtttgggaccaaaaaatc

SEQ ID NO: 595721 - DNA, 105 bp, Homo sapiens
tccgacggcttgccctggtgcagtaccacggacaactacgacaccgacgaccggtttggcttctgccccagcgagagactctacacccaggacggcaatgctgat

SEQ ID NO: 595722 - DNA, 140 bp, Homo sapiens
gactagaggacctgatcagagcatacccctgaacttcagggcatatgtttatttctgtgctgaagttgttccattgttcaggtacagggattgaaacatatgtgcctgaagttcagggggaggcatatccaacagttagt

SEQ ID NO: 595723 - DNA, 180 bp, Homo sapiens
gtgtatcagtgatcctcggaacaacctatggtttaagggtgatagctggtcccatttcatagacccagtgagactttaagaaccaaatggcagggctggcgaaaaacaaaccacggaaaggtttcaggaaggttcccaaacttccccaaggggtttccttaccggcctttaaccttgggc

SEQ ID NO: 595724 - DNA, 345 bp, Homo sapiens
ctcgggtcccctgatcttccgtgccccatagttaatcttaacatcagctcaggagcagcgcagatgtggggatgactgcactctgggaaaccccttgcagccagtccttgctggtgtgcctaacatgctcctctaatatatactacgtatttctgaagacaaacaagttatcagcatatcatcatcaaactgcaatggtctctccatgaaaactcaaagcaagaatgttgatgtgaatgaaaactctgtgaaggcatatgctgcctggtttattttccacaggagaagcctcacatgtagggtccttgaagcctgtgttcaaattaattgtgggacggaagatca

SEQ ID NO: 595725 - DNA, 905 bp, Homo sapiens
  misc_feature (199)..(199): n is a, c, g, or t
  misc_feature (266)..(267): n is a, c, g, or t
  misc_feature (269)..(269): n is a, c, g, or t
  misc_feature (271)..(272): n is a, c, g, or t
gaccgaccctcgacttcggagaggcagcgcggttcctctgggtgcttccgcctccccttctcctgcttctccagcctcttcggcctcctcgcccgccgcgggaacccgagaccccagtgtatgccccacccctgaccccgctcgggacatgtccaccccggctcggcggcgcctcatgcgggacttcaagaggttgcanggaggatcctccagccggagtcagcggggctccgtccgagaacaacataatggtgtggaacgcggannantnntcgggcctgaagggaccccgtttgaggatggaacattaaacttacaatagaaatgcgactgaagaatatccacgattaaaccactacagttcgattgtctctaagatgtcccatccaaatgtctattgcgcgatggtagtatatgtctggaacactacttcagcaaccgaggagtccaaccctatgatgtgtcttccattctaacatccatacagctctgttggatgaacccaatcccaatagtcagcataccgccaaggctgctcagacgtaccaggacgcaccaccggggagtatgaacagcgtgttaacagcatagtagcacaaagccggcgtgactggtagaacgccgggtaatggtccacagcaagctgactctcgacaacgagtttttggctggttgagacagcctcccacttcctgtagtaaccttccgatagtcaccctcagaacacggtgtctgcgttcacctcacggtcagatcctaacctgtacttctctctacctccatacactgtttacgtaatgtagtccggtgcggccaaacacacagattatcatagccaagatgaggcaggaaataatgcgaacaaggggcacgggcgtcatcagtaagaccatagttcgtgacag

SEQ ID NO: 595726 - DNA, 143 bp, Homo sapiens
gcgtttactaacgttgtatcttgacacactggtgttcgtcagctagcagcttatgttattcgccccatgccacgttagtgtcacaaatattatggtttctctcctgcaatcagactcaacatactttccgacgggtaccgagc

SEQ ID NO: 595727 - DNA, 113 bp, Homo sapiens
tgtatatttattgaacaactagcagcaaaaagtatctaaaatctgttgtgtgcaaatagtttttagatactttttgctgctagttgtgtaatatttattgaacaactagcagc

SEQ ID NO: 595728 - DNA, 1980 bp, Homo sapiens
gtgaaggccctgtgtgcaccctgtgggcatgactgacaaatgaaaagggccaggtctgtgaccaagacagcactccatgaagcagatggaagagctgatctgacggagcctgtgcctcactgtgctgcatcttgcagtggagggatacaacgttccagcccacaaagtgtcctgtggcatttataccttcacaggaagctgggtagccttgcgcaggagcatgtgagaataacgccccggaaacagcagggctacagcaccgtgtcccacttcaacattgtgcactacagacttgccatactggcttgcctgtcaggtttggtgctcgaggccgggaagagtgggagagttgcctgccctgcagaatggcaacaccaaagtgcaacgggactccttcctggtcttggggacctcatgtccctgaatcagctcatatgccacttgcttggccaagacacaacacttacctccaggactgtacagtgccagcgggagcccacgtatcagctcaacatccatgacatccacactgcttcttcctgcgcttcgcatggagcagctcgttcagctgcagacactgtacgtgggcgtgccgggagagcaacaatcccaactgatcccgtacatcattcacactgttgctttacgtcctgaagaaaacccgaagacacattaccgagaagcagaagaacacccaaggcttcttggacaagccaggaaaatggtgaacactcctccgtaattgacggccctaacacaacacagactgagccctcaatctgccccatagcagtagaccaccacgttcaacatttgtagatgttcaacccaacgcgacaaatatcagcttccaccgcaaaaaaacaagcaatcaacaacacaacaacgagcaagtcacatacatagtacaacaagatacaacaaacccccacaccttgcctctctaccactcccaccacatcacacacacaccaatacaacacccacaaaaaaaaaaaacaccaccaacaccacaccacaccaacactcacacaccacaaccactaacaccaccacagcacatccagcgagcacccgcccatcctagccgaagcgagccacagagaccagaagagagcaaggaacagcgagagcagcgggacagagagagagcggtcaaccgagctgaccgaagcgagaagagagtgaaggcggagagcggagagggctggagcgacaggacaccgagagagacagtgagtgaagaggcgcggagggaagcgaaaacgccagctggcagaagagcggagtcgaggagcgcaggcgaggcagcaaagcagaaggaggaacggacaggatacgagggatccattccatacacatcattactcacaccacacacatcatcaagacataacacacatccaagcaaacacaaccaccagacaatacaatacacgatgaaagaacgaacaactaacaatacaacattaagccatcacacctagctacgaagcgccgagccaatacgacttatactaaccacacaatctccaatcactacatcgattaaacctatccaattaccactcacatcacacacacactcgcacctcaccacaaaccacacccccaccacacacaacccaccacaccgacaggaccgcagagtaggacaagagcacactaaagccaccgaagattcagatataaggatatgaagcagagggcagcacacgattggacagcacacacagccaggagcacaaaactaagtgacacatggcaaagtacagacgcaagaggaaccaccagcaacgagacagctacgcacgaaacgccgactgcacgtacacgcacacgcagacaagaaaagagacacaagagacaagcgaagcaaacactagccgacacacagagcaccacgagcaagaggcaggaagagaagagcacagcacacaccgcacagccagaccgccgcaccagcagagacacagaaaa

SEQ ID NO: 595729 - DNA, 118 bp, Homo sapiens
ttcgattcacaatacgaaaacctggcatgacatgtgaagtcaggagtggctcatgagtcagctaaaggacgtttagcgatggggcgcactgccctttttcagtactgaaacctgtcgc

SEQ ID NO: 595730 - DNA, 302 bp, Homo sapiens
  misc_feature (2)..(2): n is a, c, g, or t
tntgctggaactcatgctcttctccacagagtttggacagagcagacagcagagaccatggagtctccctcgtgccctccccacagatggtgcatcccctggcagaggctcctgctcacagcctcacttctaaccttactggaaccctgcccaccagctgccaatgctcactacttgaatccacgcctgttcacatgtcgcagagtgtggaatggcggtgcttctacattgtccacaactctgccccagcaatcttttatggctacatgctggtacaacaggtgaacagagtggattggcaa

SEQ ID NO: 595731 - DNA, 676 bp, Homo sapiens
agaatatttattactttttgggctgcaggtatttccttcccaacctaccactgctaagactgtttcataagatgcactccaccacactcagctaatgaggtgtttcaatcagaagaagatctttggatgaagagccgaaatttgtataaagccttttattcaccttgggtgggtatttgggaacatcttgagctgaaagcgttgcatggaaactgctgtgtgaaatttgatcaggaccaaggtattcagttctatgcctcaaagactgatttattttttcccccttgtacttaacatttaacaggtggtggagttcctgggggacacatctaaattggggcgaatttccaggattgaggcaaccccgctcccttttagcccttctactaaaaacactggagctaggctggcgggcatttgacccttataagtataacagggattgaaggggcgcttgggttgaaccagacccaaagaacccccccctagcatatttgcccttggacggctggaaggaaccccttggtctgttcataaaagccaaccgggttggcttcttgtgtgcaagccttggccccccaggaaaaaaaggcagggcttttggggccccccctcaaaaaaatttttttccccggctttggggggggggcaaaggtcctttcccttctttgtgaaa

SEQ ID NO: 595732 - DNA, 1024 bp, Homo sapiens
ggtccagccaaacggcctcggcgggaactagaggagcaaaggcctcaatggagtgggggtggggggcctggaggctggacctgtggacctgtgctcagtcctggttccctgatgctgtgatgaatacggtaggtcccacatgaatgaaggaagcattggggaacgtcaatgtgaaaacagttccccatgtgcgaccatgtagtgatgctgctcacttcatgctcctgatccacctatgaccttgaggctgccatagtcagcatgattaatcacagagggcaatcaacgctgagtatttacccctagacaagcgtaattgcacatgagggaagaatgctactcatatcatgacaagctcagctcttgaatacccgtataatgaaaataccattgtccagggtgtccctggtgcaaactgggcttttagcatggccttagtgtgtggccccatggtcctcacattgagcccagatgtggggaacccacacttatgaggcttcgggcggtatcccatgtagcccctacggaggccccaaaggggtggtcccaaccggagtccgggcaaaaaagctggtcaccgggctcgaagttatccttatcattgaaacctcctttgaccgaggattggacagggacggcgccatggaaactaagccaaaccggaactagcccggtcaccagggcccataaggataccgcccccgaagggggtgcgcgggaaactccttggtgtaattcttgggcaggtgaccccaattggggtgccccctttcattaggcggtacttaaaccccgggtggaatagcctaagtccatatggtcatttccccaatccgatggaaacaacctaaggaagggcgcctttccaactatggaactagcggggggatttcggaaccgcgggaggtttgggcaacgcggacatctgacggtgagacacctacagctagtaagtgtaggcaccatccgtcgacgcttagggtgcggacatatagcactggactgtaagatgggcagtcccgcc

SEQ ID NO: 595733 - DNA, 160 bp, Homo sapiens
tcttgagcggactagctttcgctttgacttgtgtgtgcacgcaatccaaccggcacttaccgttcaatggcgtcccgcagcgacttaagttatctggaagttgtgaagctttcaggctcaaacgaatagcattcattccgcagccaagaccgctcttacc

SEQ ID NO: 595734 - DNA, 164 bp, Homo sapiens
tgccgccgcagccaggctcggctgccgggacagcgtctggaaaatctgcatgtcgcgatagcggtccatcaggccggccgcggcatcgacgggttaagcgcagcatcctgccccagccggctgaccaaaaaatccacgaacgtgttgacctgggtaccgagctc

SEQ ID NO: 595735 - DNA, 448 bp, Homo sapiens
gacgagtgttgccagcacctttgatatggggaacggatgcattattagctcagatctttgggtgtggtgactcatgcctgtaatcccagcactttgggaggcagaggtgagcagatcacctgaggtcaggagttcgagaccagcctggacaacatagtgaaaccctgtctctactaaaaatacaaaaattagggccaggcgcagtggctcacgtctgtaatcccagcactttgggaggctgaggtgggtggatcacctgaggtcaggagtttgagaccagcctgaccaacatggagaaaccccgtttctactaaaaatacaaaaaagttagctgggcatggtggcacatgcctgtaatatcagctactcaggagactgaggcaggagaattgcttgaacccgggaggcagaggttgcagtgagccaagatcacgtcattgcattccag

SEQ ID NO: 595736 - DNA, 507 bp, Homo sapiens
ggggtaaacatccaaagtggcttctgccacagtccaccacatggagaaaatgaagctaacagggaggaaagcagcctctagagagagggaaaaagaggaagagagacggagtcctgatgatgttttagctcctggatacagctatgcctgaagccctcacgctttcatctatgttagtcaataaatcctgcccgtctccctgcttttttcttcttgagccagtttgggttacgttcatgtcactgcagttcagagtcctttcatagaaatatcaaatgcagtgagatgcactataagcattgctttttgttttaggttttttgtttgtttgttttgcagcagagagactaaaatgttcttcctcagaggtagcaagtctccttagagcagatgtgttttggaggaaaataatcaatgattctttggtttgccaaatgcaaggcaaatactaacccagagttctggaaaggccttgaataaaagagttattcatcctaaaaaaaaaaa

SEQ ID NO: 595737 - DNA, 934 bp, Homo sapiens
ggttgagaagctaagcagacatcaggactaccagctgcagagaggagctacccactgtgggcttcgtctctgctgagagctgaacactcactgggacgccctgcctatggaaaccagctgttcactctgggtctcctctgagctgttctgtcgctcagtaaaggtcttcttctgcttactcgccctccattgtctgccttacctcattcatcctggacacaggacaagaacttgggacttgccggtatggtggagctaaaatagctgtaacacaaacaggattgaaacatgccccttgctcgccacatgtggatgacaagagggagggaagaaaggagagaagatctgcgaccttcggcaaacccagacttaggagatcggagagccaagactgtgacaccctttctggggctctgtggttcctggcgtctccaagcttctgggcacctcggctttccccggtgccagtcgtggaagctgcttgtgcagagtcttgctttgtcacccaggctggagtacagtggcgtgatcacagcttactgaaacgtctgcgtctcaggttcaagcgatttttctgctcagcctctggtgtagctggaatacagtgttagcagtcactgatgctcaaacatgagaagactgggacatccatcagatagaaacgctgcccaagtgttagactattaagtgacaggggtggcaatggaaccaacaatcaaccttccggaaaaggaggtttaacatagattatgtaatcttatcagaaaaacgcaatgtcgggcggtgggtaagcctggatccagcctttggaggccagggggggtctgaggcgggaaggaaccccgtggacaggggaccggctgtaaaaaaaaaccggggggggggggcccacaggggggagaagcacccccgggggggaaccccccggggagga

SEQ ID NO: 595738 - DNA, 119 bp, Homo sapiens
  misc_feature (41)..(41): n is a, c, g, or t
  misc_feature (44)..(44): n is a, c, g, or t
cctggctgcccttcctccctggctgtgtaaatagtctcccntancccactgagggggttttgatggcccttggagatcctacagtaaataaaccagatcctgccgcccaaaaaaaaaaa

SEQ ID NO: 595739 - DNA, 218 bp, Homo sapiens
gcggggctggtccacattcccaggccccaacagccttcaaagatgggtaaaggagctgccctccctgggccccccaccttggtgatcgccacacccagcctgtcccgtgccaccaccgtcctagatggtggacgtagtgaactgacttgtaccgtgtgaccctcaattacatataacagtgtgatcaccgccgagcacaaaaaaaaatagatacaacg

SEQ ID NO: 595740 - DNA, 158 bp, Homo sapiens
attaagcatgccgcagttatgccagagcatagtaaataaaggtcaagtagcatttatgatagaggaagtattgttagcccgagcatgagtgtaatggtgaggtgagaaacgttgtcttgtcattataagaataaaaaagggaacgtttatgagggaaa

SEQ ID NO: 595741 - DNA, 326 bp, Homo sapiens
tgggtggagggggggggggattttgggattggcagagcctgcctaccgaggcgggacgcggtggcataattgtgcgcgatgcgtgccctgcctaattatcactctggaaggtaatcttcgaagattatggcagctgtcaggggtaacaagccagtgattctacgccacattactggagaaccatgggttctccttctgtctcagcgacagtggctgtctcttcttgttcaatacacacatgcacatggacgtgcacacacacgtctacgcacaggcgtgggcccgcacacagatatacacacacagatacacacacacgtcgacgc

SEQ ID NO: 595742 - DNA, 1070 bp, Homo sapiens
ggcggcgcagattaaaggtccagcagaggcactgtggccctgcgtcggctctgctaggaactggctgacccaggaattttagcgcccctgcgttttactcttctgattcttctcttctcccaagcccgtgtccctcacgcgtggcctctctccttgccgggagggccgcgatggaggtcccgcccaggctttcccatgtgccgccgcattgttcccctccgctcccgctactttagcctcccgcagcctctcccattggcggccgaggccgccgcgggcagctagccccgctcctcccttcgctcgctcccagatccgtccggcagggggcgcgccgagcccagtgccaggtcaccgtccagcagtcctcccgattgtgcgggcgggccggctataagagggagggcgcaggcggcgccggatctcttacgccgcattttaatccagctccatacaagcggctccgcctgcctgctgctgcgccgagaacccggaagtgagcgcaagcacacccctcttgccgagcagtctcccgtcactcatgggaggcatattgaaccgaagtaccagcaatataagaggaacaattcgcaggagcggattcaagatcactcgcgagcatagaatcagcaggatgactgtaaaatgtttatatggaccgctgagctgccattcaagccacagaacgatctgacagaagtacttggcctcgactaggggaagattgacaactgccaactacaccacatccccgtaccgtgggcagactaagaacgcattcggattgcgaccatcaaagatgctgggaagattgatacagctttggcactcgacaagaaaccactgattgaatggtaaacccaacaggccaacctataggaacaactccaaacgtttgtgtggccgtcctgacacttacaacaaaacaaatcgcacggcgaacagcatcatctcgtcatcacaacgagcgcgctacatatgcaacacatgtagcaatcatgaacaatcgtacagtctccatctaaaccataagactcaccatcacacacatacatatatttctgcgtgcc

SEQ ID NO: 595743 - DNA, 894 bp, Homo sapiens
ggtgacgtggtcttgggcggctctcgagtggttgagcacgggttacggacacccattgcaagacgtgcagtgactgcacttgtcttagacagttctcgctgacctgcgctagctgcgtgcttctacgctccgagcactctgagtatcatcagcaaacgccctgggctgtctgtcctcaccatgcctagcctttgggaccgcttctcgtcgtcagtccacctcctcttcgccctcgtccttgccccgaactcccaccccagatctgggctgcctgcgctcagcctgtggggtctggcagaccctgggaggaggggttatgacctgctccacgagcctggagagatctgggaattgcagagtaccctggacagcagcaacagtggcattcgggccgtgacgcgacaagacaactggagttaccatgggatggtggtgtcagtactggcctgacatacagagcttgcctcatgtgaccctgatggactgaaccaattttgtgtgcacaaacacttgatgcaagctgcctatgcagaggagacgccactggtggaccaaggcgctgaatgggaatctcgaacagccactgcagccgcctggcttgattgcctaagacacagtatgtgtaaagaacagtgtttgttgccacaagaaaattaaactgcgacccttctgactaccatgcagtagatccgttgatggggaccttgctgtgggaatgaagcactgaagaaaacgaactggccgagcactcgcatggaacagaacttgacaccaagcgtggagaccaaatagaatcgaacccccaccatggtcgccaactcacgatgaacactctgaggcactggccacatacttgaccagaacaggcatgaagaacgacaaacaccaaactgc

SEQ ID NO: 595744 - DNA, 123 bp, Homo sapiens
aaaaaaaaaaaaacctttaagcaaggttgttcccttaaagccctctccttcagaaatctctcttttggcaaattgttgattcttccctttttaaaccaattgacaaccattgaattcgttgtt

SEQ ID NO: 595745 - DNA, 118 bp, Homo sapiens
ccccccccccccccttggggtttttttttttggggggtttaaacccgggggtaaatttttttggtttccccgggggggggtttttttaaaaaattttttcgggggcccccccccaaga

SEQ ID NO: 595746 - DNA, 130 bp, Homo sapiens
  misc_feature (12)..(12): n is a, c, g, or t
ggcaccgaatgnaagagaaagaaggaaggaaagaaagagaaagaaggaaggaagaatgaattatggagacagcgatggtcaggtttttaattcagtaaaaaccacaaaaaacctttatttctctttcttt

SEQ ID NO: 595747 - DNA, 160 bp, Homo sapiens
  misc_feature (34)..(34): n is a, c, g, or t
  misc_feature (72)..(72): n is a, c, g, or t
  misc_feature (132)..(132): n is a, c, g, or t
  misc_feature (156)..(156): n is a, c, g, or t
tttaaagacaaaattttctttccttgattttttnaacataagctaaatcatattagtattatactcccatanaaacttgacatgtgcttctctgaaagaattatttccttctgaaatgtgcccccaagcctncctaaataaaaaaagacaaattcnaaaa

SEQ ID NO: 595748 - DNA, 847 bp, Homo sapiens
tcggactaagagagagaagatactagcacaactgcaatgcgagccagtgcaaacgcttacgcgccgatacgtcaagacgactgggcaatcgcacgggtatctgtctggaccccacccaaggtgcctggcccagggcaccacctctgggcaggcggctacccacgggcttccaatcctgcgcctacccccggcagcaccccagggctattcctggacaggcacctccaggcgcctaccatggagcacctggagcttatcccgggcacctgcacctggagtcctaccccgggccaacccagcggccctggggcctacccatcttctggacaacccagtgcccccggagcctaccctgccacctggcccctatggcgcccctgctgggccacctgattgtgccttataacctgcctttgcctgggggaagtggtgcctcgcatgctgataacacattctgggcaccggtgaagccccaatgcacaacagaattgctttagatttcccaagagggaatgatgttgccttccacctgttaacccaccgcttcacatgaggaccaccacggagagtcacttgtttgcaataccaagctggagtaataactggggaaagggagagaaagaccacgtcggttttcccactttgaaaagtgggagaagccacattccaaaataaccagtactggttgaacctgaccacttcaaggttgcagtgaatgatgctcacttgttgcagtaccatcatcgggttaaaaaactccatgaaatcagccaactgggaatttctggtgacatagacctcacccgtgcttcatataccctgatataatctgaaaggggccagatta

SEQ ID NO: 595749 - DNA, 700 bp, Homo sapiens
cgatggttgaaccgtgactgataagatttcacaagggagcaacattgcccagaatacggtaagctttaattagccctcagtaaggggtcggaaagcgggagccccccccggtggcggcccctttaggctagttggatccccagggctccaggaattccggcacaaaccaaaactagtctccaagttcattttttttcttttttaagatgaattcttcctgtgtcaaggctgaagggacacaatctcagctcagtgcaacctccacgtcccaggttcaagagattttcctgcctcagcctcccaagtagctgggactccaggtgtgtgccaccacacccagctattgtttgtatttttagtagagacggggttccaccatgttggccaggatggtatttatctcttgacctcgtggtccacctgcctcagccccacaaagtgctgggattacaggcatgagccaccatgcccgaccagaaaacttttttttttacagcagcaaaacaccagccctgggttacagtagcaagaccccgtgtctacaaaaaaaatgtaaaaatttgtctggcgtgatggtgagcacctgtaggcccagctactcataggctgagctgggaggattgtttgagcctggcaggtggaggctgcagtgagccatggtcacaccactgcaccccaacatgggccacctagcaagatc

SEQ ID NO: 595750 - DNA, 113 bp, Homo sapiens
gcgggtatgataggggtgtagagttgccttgtggtagaatgtagggctagggcatttttaatacttagagcgaaagcctataatcactgcgcccgatcataaggggataggca

SEQ ID NO: 595751 - DNA, 854 bp, Homo sapiens
tgagtgctgtctgagtgggctggactggaggctggctgtgtgtgcggtgtgtgggagcgggagcgggctgggagagtggtgtgagctggggccgggagtgtgagcagcctgccgcggtgggactggaccgagcctcgccggcgcgccctgcccgcatgcgccctgcggagcgcgcagcgcggcctgagcgcgagacctgccgagcttggtggactgaggcggcggtgtggtgcgcgtcaaggccgcgacgatggcggctgagacaaattttacatgtattggagaccagaccagaagcccttctgaattaagatctcacattcttgaagtggtggcattgaagagcactaagatcggaagatgaggtgagcttgacccagttacggcagtgatggcctgatgcaagcttaagaaccagattcgagacgccaggaaatgcattgtgcagattgcaactctctctcagatcacaaacaacgatctgacccagttgggaagaatccaaatgcgcactgatgggaggaccactgcgtgggtgcaccttgtgccaagatctaccgccattgcactgaggaaacagaactccaaggcttctcggtcaagttgcctcgcaaagtgatggtaaacgttatcatctgggaacagatacaacaccaaaaaggttccacggccattccctctgacgctccctccttgtggtcaatgaccttgtgcattattcccctttcttgggaaactatgtgggccttgcgggtggccttgaaataccatttggctccaatatacaatctgaaaactcgtgagggtgaaaagtgctgctttaaatcaggagctgggaggaaacacaagtactg

SEQ ID NO: 595752 - DNA, 467 bp, Homo sapiens
tagtcagcggatcccgttgggtcgatcactgtactctgatgatagtttcattttgcgtgcagaaagtctttatctttaattagatcccatttgtcaattttggcttttgcttcaattgcttttggtatttttgtcatgaagtcttttcccatacctatgtgctgaatggtattgtctgggttttcctctagggtttttatgggtttgggttttacatttaagtcttcaatagatctcgagttaatttttatataaggtataaagaagggttccagtttcagttttctgcatatggctagcctgttttaccactaccatttattaaataggagatccttttcccattgcttgtttttgtcagatttgttgaagattaaatggtttaggtgtgtggtgttgtttctgaggtccctgttctgttccattggtctatatgtctgttctggtaccagtacagtgatcgacca

SEQ ID NO: 595753 - DNA, 559 bp, Homo sapiens
  misc_feature (15)..(15): n is a, c, g, or t
  misc_feature (53)..(53): n is a, c, g, or t
  misc_feature (69)..(69): n is a, c, g, or t
  misc_feature (92)..(92): n is a, c, g, or t
  misc_feature (94)..(95): n is a, c, g, or t
  misc_feature (100)..(101): n is a, c, g, or t
  misc_feature (104)..(104): n is a, c, g, or t
  misc_feature (108)..(108): n is a, c, g, or t
  misc_feature (244)..(244): n is a, c, g, or t
cgatcctccaaagtnacacagagtgcctgcttcctggtcccctcagctctgcntctgcagcccactgcntgcccagtgccatcaggttgagnanncccgnncangcanaatgacagagagaggcagatttcagggaagccctgactgtgtggagctaaggacacagtatagattctctggcactctgaggtctctgtggcaggcctggtcaggctctccaggtggtcagagggcccagtggtgncccagcatcggtggtgcccaagccaaccctgtgactgacatgtacgattcactcctttgagtctttggatgccaactcagcccccgtgaccgtggatggcatgccggccataggccgtctatggtatagatgccccccacgtgcatgacattgaccctgtgtagacttgctggcttatggatagtagatttgtacgggtcttgagacctcgggtggggcattcagatgagcgggttatttttaccggctcgagtttccccttttattaatacattcacccagataatcattaaaattaacatgtgccaggtctta

SEQ ID NO: 595754 - DNA, 194 bp, Homo sapiens
caataatcacaaagtataacaatgaaagataaaaagagaaaaataatttgtgtgtgtgtgtgtgtgttgtttgcatgttaacgtctatatgagataactctatcaattttcaaagaggatatcactatattttgacataacagtttcagggatgtcctatgtcttccgtggtaaagttgtaaccagttataggt

SEQ ID NO: 595755 - DNA, 994 bp, Homo sapiens
  misc_feature (67)..(67): n is a, c, g, or t
  misc_feature (340)..(340): n is a, c, g, or t
  misc_feature (410)..(410): n is a, c, g, or t
  misc_feature (629)..(629): n is a, c, g, or t
  misc_feature (696)..(696): n is a, c, g, or t
cgtctctgtgtccgtgcgttatgcaagcagactagctcaggcatcacgcgctactacaaagcatganagcgagacaaggaagaacattacaatagcgacgcacgccgcctcgcgggaccaccgcgtggtagcagcgctgcaagcacaattttctctaaagagctacccgctaaactagtcgttggtcagagtgtgcgcgatgttacacatttaatatcccttaagttagacaaattcaccttagatggtctccctgggagagaaagataaggttttcttacacaccgcggctgtaaggtatctttctcttccgcgagtacaaaatgctttctaaaacaantttgtggacaccggctccggcgccgccgctttaactccccaaatagctgcacttcttttctatgtacgangcaatggggacgcctcacacgcgtcaagcgtcattgttaaaacgggtcgggggataaacaaactttcacgcggtgtttttaaaagcagcgggttcaccgcccaggggggtttcaaagccccgtggtattcccatagctcccggggggagtgggtgctccttcaaggccattgtgacggccgtttcttaacgcgccgcgcctaactgggaaagaatcttntatgtggagatgcgtagcgagtggacccctttggacgaaaaattgaaacttttgaagtggcaaacangcgtaaacacacatcacgtgatagcacacataagcataagacaaaactacaggcactatgtagaagtcaacactactttctcaaagaatcaaaagactattttaaccccgcaaattaggaaccccaaaggcgatagcccaagtatggcgacccacaagatcaagggcccaaatgccccaactctcagagcaaatctgggaagatatgaacccaaattatcaaaaatcaacaatgtcttcccccaatttccaaaaagaaagacccagttaaaccaattttgggacaaacaacaaaaaca

SEQ ID NO: 595756 - DNA, 156 bp, Homo sapiens
cggacgtggagctcggacgtgggtgggcaggttagtctgtttagattattgtgccgttacagagaaactactagaggctgcatgagaaaagacgcctgtctcgtacttctcccattgtcgtatccagtgaatgaaaggctccgtatatgctctctg

SEQ ID NO: 595757 - DNA, 724 bp, Homo sapiens
  misc_feature (525)..(525): n is a, c, g, or t
  misc_feature (620)..(620): n is a, c, g, or t
  misc_feature (663)..(663): n is a, c, g, or t
  misc_feature (678)..(678): n is a, c, g, or t
atcccccgggctgcaggatgctttggggtaccctcgtgggagagactagcactcaggagtgggagccaaggaatccacagccccccaccccccgttaaggtgcagggcgtgccgaaaaggcactggcctccgggggaggactccagcctcctctttggccttgccgctttaattccctagcctgcctcaacgtccccctgaaaggttgcaaggctggcgtcctgtcccggtcaggcggggggagttcttcccgcttttgggtgggccccacacaccctgaggtgccagaaactctacagccccccagggtcccgcacagggcctggcaataaggcactggcctccgagggaggaccccaacctcctctttggccttgccccttgttttccctggcccgtctcaatgcttccctggcttgcaagcctggagtcctgtccccatcacccagggggacttcttgccactatgggttgccttccacgcaccctggggtgggagccagggactccacgcaccccccggcncccagtccagcacaggtcctaccaggaaggcactggcatccaggggaggaccccagccttcttttcagtctcgccactatttttccgaggcctgnctcaatgttttcctgcaagcctgcaagcctggcgtcctgtccncatcactccaggggntttttgccgccaggggtgccccacgcagcacagacacgcttctggg

SEQ ID NO: 595758 - DNA, 885 bp, Homo sapiens
  misc_feature (885)..(885): n is a, c, g, or t
attgaaagaaggaaagaagttgaaagcatcttgaagaaaaactcagatggatatgggatggtcaagtcggccggaaaatattccccccaagggagttcctctttaaacacccgaagcgcacggcaccctcagcatgaggaacacgagcgtcatgaagaaagggggcatattctctgcagaatttctgaaagttttccttccatctctgctgctctctcatttgctggccatcggatggggatctatatggaaggcgtctgacaacctccaccagcacctttgatgaagaactggagtctgacttggttcgttagtggattacttctgagcttgcaacatagctcactgaagagctgttagatcctggggtggccacgtcacttgtgtttatttggttctgtaaatgctgcgttcctaatttagtaaaataaaagaatagacacctaaaatcatgttgatctataattacacctatgggatcaataagcatgtcagactgattaatgtctactgtgaaaaatttggtagtacattttcattctgatattagatataatatctgatatcaatcattttaatatactagtcatgatgtgtgtcgtctttcaaacattcatctgcaccctaattcagctgaagtactgctatttcaccacgacatgctacctggtattaaatcgcccttagggggttggccccataaattggggtctattcaccatgggacaagttcccaacgcggggggggccacaaaaaagattatccggcgggtcacagcaccacagacgccagccggggcaaaactcttgtgagaaaacctcaagcacgacaggggccagaccatcggagacacgcggggtacatattaaacaacgaacaacgcn

SEQ ID NO: 595759 - DNA, 136 bp, Homo sapiens
tgttgcaacctcaacctgcaggagccgtgtaggaggggtcgggagaaatcaggctctcgaagctcattaaattcaacgtgaggatgcatgtacaagaacgcccgaagcacagtggacggtcatgaaggagcggagg

SEQ ID NO: 595760 - DNA, 152 bp, Homo sapiens
cctttgccttggatccctgtagcccagcaacctgccctccccagcatccagctgggcagagagagccgagtgtgccaacaaggactggggcctgcctggctgcccgcctcagtgatgggcacctcatgcctgtctcgccacctcctgtgcca

SEQ ID NO: 595761 - DNA, 399 bp, Homo sapiens
gctcgacatccgtattactcgcatcaggagtatctatcgactgaggctcacatagtcttattggaaaccaccggaaccaaataattcaaggcctggtttattacaattttatggggtcttttttttaccctcctacaggcctcggagtacttcgagtctcccttcaccatttcggacggcatctacggctcaacattttttgtagccacaggcttccacggacttcacgtcattattggctcaactttctcactatctgcttcattcggcacactaaattttcattttacatccaaacatcactttggcttcgagccgccgcctgatactggcattttgtagatgtggtttgactatttctgtatgtctccatctattgatgagggtcttaaaaaaaaa

SEQ ID NO: 595762 - DNA, 375 bp, Homo sapiens
gtgattcccatgcctgaacttgttgagtatctggattacaggtgtgcgccactacacccagctaattggtgtatttatagttcagacggggtttcatcatgttggccaggctgatctcaaactcctgacctcaaatgattcaccagcctcggtcttccaaagtgctgggattacatgtgtgaatcaccatgccatggctgtatttatgtaattaaataattcacacttactagaatacgttattcctattctgtgatatattttttaccttctgtattaatatgcaactgtcatccagtgtgcacttttgaggtcccttccttctctattcttacttgacatgtctgtcattatcatgcatgtttctataccttt

SEQ ID NO: 595763 - DNA, 469 bp, Homo sapiens
tacctccagcctcctcccctcaaacatccggggagggggtatggtgcaatagtaagagcatgagctctgaagaccagggtccgaagacattaattctgggataaatatcactggacagctgtgtgacatggggcaagaacctagttcttttatatgtcagttaaaggactgtaaatgacaagggcagggtctgcctcatatggctgtcccagggggtatgagtttgccatggtggcttaaacaaatcaccacaaatggagtagcttaaaaggactcagacatataatcttacagttctgtacgttagaagtctgtcacaggtctcacggggctaaaaatcaaggtgtcagcatgtctgtgttcctggctagagactctgcgggagaatcggtgccttggccttttccagcttctagaggccacccacatacctgggctagcggcccccttcaggtagagagccgggcaa

SEQ ID NO: 595764 - DNA, 946 bp, Homo sapiens
cgcccgatatgagaattaagaaagaaaggggaacacgtaccatagtcgggtgtgccttgcacctgctcacaccgtggtcttctttgtgcagcgcagtgtccaactcactcttcatgggttgtctcttccaggtcaattagttcccagttttcgctaatttctgcgtttctgttcctacccgcgacttgggaacactccgtcagccatacgaacgttctttcagaggtcccagaaacatcgggttctggccttcggcaaatcattgccttcgtcacacgttcccgggtagtatccccaaaccccgttgcacagcttctttcaaaacttgcgtggtcatactccacgacgggcttctcaagaacccgagggtctttacccgcccacttgttcacccgtcgcagcagcggttgcaactcatctgcacccactctgttgacagctccaccgcaaaaaaatatgtgctgaagtctgattgagcgcaaccccctgtgtgcgtaggggggacatccccacccaccaggtgtggatcccacgcaagcttaatcatgtgtattctagaaatattgctggggggctgtcaaatctacatgaatgaagcacccgtcgacctctaagagcaagaacacacgtaatatggacacacctccggggcgcggagaggcgggagaatcaccccaatggtccaggatgatacaagacgacacccgcgcacgacactcaggggaatccccctctcttcctgtacaaaaaccccaactgaatcaccggcacgacgtgggtcacacgccccggcaacccacccctcctcttcaggcgggctgagaggacacagaaggactcggtcataaacccgggagacgaggtaggatgagagccgtgaccaagacggttcgccctccccccccacctggcacaccaaagggggaaacccccgttccacaaaaca

SEQ ID NO: 595765 - DNA, 106 bp, Homo sapiens
taactcacaagagtagagggagtgagtatatttttttcccacatggaccactatttttgtaggaccctagaaaaacttgataaggctactgtgactgaagaatctg

SEQ ID NO: 595766 - DNA, 418 bp, Homo sapiens
gtgtcctgagcttcaggtgatgcgcctgccttagcttcccaaagttgggattacaggcgtgagccactgcacctggcccacatttgtattaaagtattgttttagaaaagatttgtgtgctgtgtattgtcttttaatgacctggttaaaatacttaattgatagttatctgtacgtgtttaatctttctcaaagatcagtgacccataggtgaagagtgcaaagtttgatttacaattgggttattcgtttattcatattacagatacttcatgaaggaacagcagtagcaacaaaaaccccggactcattcttctgaattaaatgggtgcagattggtctggagactcttctgctgccctctagtgtttatatcatgagtagccattgaaagttggaagctgcacattgctgtgcc

SEQ ID NO: 595767 - DNA, 944 bp, Homo sapiens
tatagcatagggaagacaaaccagttcttaataatgtcaaagttggacccaatagagacatgctaagcgagtacatcatgctaggaagaacagctatcactcagctgcctatacttcagccattctatctttcacaccaagaacaaaagtggctagagattgttttaaaaaaatacaagaattgccagtacctttggcagagactttgttcacttagattaggcccgcaaccgcaaggtaatgggtcatctagttgtgagaccatatggagatcgctgagtagctccacatacaaggtgaggtacactgttgccaactttgagggcagaaagcaatcagagtaaacgtagtacgactgcagatgaacacgctatcgatatcaaaaggccaaaaaaaaaaacctaagttccagggacattagaccttggtgaacactgccaagtgaagaactggtgcttgccaaaggtagtctcttagcatataaggaatacgtgaaacatcagctggcgatctgctcatattcggttcacgtgtctgacgacacgactacacaagggacacgtccaaagtacttaaacgagaccaaatttgaaccttaagccacttgagagagtaaccaattccccctgaaaatgtaagtacgtgtcatatcctggggactaggggggaaggtccaagcaatatgtaactggcgaagaatggctgggaataggttggtgccagaagtaacgggtttacgttgcaacgttctacacctggtttgtacaacacacacagggcagcgaaacacaagaaaaataaagccagcacacaccgcaagaacataacaggagacaacaccaaagagcacacaacaaaaaaaaaaacggtggcgcggaacaacaagaggcaggcgcaatgaatactacagcgcggggtaaaaaaagcgggaaatgatatataac

SEQ ID NO: 595768 - DNA, 730 bp, Homo sapiens
tgcgacgctgagtgcgcggagagtacggcggccggcgacgtgagcctgtggcggggcggcggccatcgaaggagcgcgcgggcggtctggccccgcccctccccgccgccttccctggtgaccttcagtggcccgggtggctggggcagtgcccctggggggggggatgtcgtgcaggaggagaagatcttcgcgggcaaggtgctgcggctgcacatctgctgcgtccgactggcgccgagtggcttggaggaggccaccgaggacacctcggtggagaagctcaaggagcgctgcctcaatgcactgtgctcattgggagcttagaagatcccaaaagtataacccatcataaattaatccacgctgctcagagagggtgctgaggtgatgccaggacacatcctggaagagaacatccaggacccaagatgtcctattattcgataaaaaagcgtgctccatcaccactttcccaagatggctgtgtctcagcagaagaacgtgacaaaacaagaccagaaaggctccgaagataaagaggccatacttgtgggccagcggcaaactgccctctagaaatgaccgggcgtggtcgagaccaacatgagagacttcagacagaatccggaggatagtggtgtctctcaatcgggtgggcagaagtgtacggtgacccagatggggtggaattgttaggaggggaatgatgtgagagagagatagtttc

SEQ ID NO: 595769 - DNA, 92 bp, Homo sapiens
gattagagaagaatctttctcataggcttggtgaatcccagaccttgctggcagcagcagttgagagagaacggtcagctacagaggactct

SEQ ID NO: 595770 - DNA, 113 bp, Homo sapiens
cgttatacgcgcacgtgctcagcctgccaggcggtacgtcccagcgccttccaggtcttgtccagccgggctctgtacgcctgtagccagtcagcccagtggccctggttcct

SEQ ID NO: 595771 - DNA, 535 bp, Homo sapiens
cacgagggcgattctccggcgactgagcattacgcgcatgagtcaccatggcgccgatctgcacctgaccgtcagtgactttgatttgcgcaagggactcgatgcgccccaagtcaaccagcagagtgggtgacgcgaggcgcaacgccagcaacggcagcaagctctgtccgcccgccagtggacggctgtcctcagtgtcagacagcgcttgcacagcctcgccgaccgtgctgggagcggtatacgagaatgcgggaaatttcatgccacacctctgctttagcttgctacccggccgcccggcttcgccagtcctcgaatagcgaggccactgtccgcagtgaagatcgatccggtgatgtgcccggcctcccgctccgacgccagaaatgcatagagcccgccatacgcgtccgcgctcggaatggcctgtagtggcacattacgctctgtgcccggcagaaccgcctcctttggagtttgattgagctcccggacaccgctcagcgtcgtgggcgctacaccgggtgca

SEQ ID NO: 595772 - DNA, 339 bp, Homo sapiens
tgcgaaagtttggggataggagatgcctacatggtatttcatgtattctcttaggtgttgggggctagaccgaggaaccatgctgctcactcactcacgtacgtcctcagctgcatgcaaggattgagctgggttaaaaccaggcagaatcagtgaccctcacgtcgcggcgttaattaagcatcagggtcctagctttgtcctgaaggaggggaggcaaggtctaggtgagagacgttcgtggaaccagccagtggggtggtaggtcgggaggtagatgtcacatgtcagggtcacttggcctgaatggttttttggatccagttcgtgtatctgcag

SEQ ID NO: 595773 - DNA, 469 bp, Homo sapiens
  misc_feature (297)..(297): n is a, c, g, or t
taccttgataactggattaaagtgatgttctgcactgtaaagtgactgttgttctgctttttaattttacttgatagaacctagaaatgagtcaccaagtcatatcccatattctgggggaagggaattaagctcccaacccctgaagggaggagtatcaaagaatttgtgggcatgttaaaattcctaaagtaattagttaatatttttggggaagataactctgaggttatacagaatctgatttctccttaaaaatttcctctacttattttagcattcattagtgaatcctcntgcggcagcggttgattatattattctgttggttttctatttttctaattctttctacttttatgatttggaatccttttgtaaggaagatttatgcctcccccatttatttattaaatcatttatgtcaacatggacccatgaatatttttttctttgcttataatccagt

SEQ ID NO: 595774 - DNA, 275 bp, Homo sapiens
cgtgatctgcgagtcaccatgctgcttttaactctggtaaagtggatatagtatgccatcaatgaccccttcattgacctcacctacatggtttacatgtaaccaaatatgatatccacaccatggacaaatatccatggacaccgatcaaggactagacgaacgaggaagctatgtcaatcacatggaaatcccatacaccatacttccacggagcgcagatcccatccaagaatcaatgtggggcgatagctggcgactgaagtacgtacgtg

SEQ ID NO: 595775 - DNA, 351 bp, Homo sapiens
gaacatggttgggacacgcacatagttgcccttgcttgaggtaggggctcagaaacactgtgcgggtgtcaatatagtgggaagtcccagcacgctgctggagtagaggtggaggaggcggaatttgcggttcatctccaccttgaagagctcaaagccaatgatgtaattgtcaggtcttcccattcggcggtaagagcgcagatccttctgctgcagtgacataatgaccttgtgcccatcctcaggcacagtgaagatgtactggggattctgcaggaaggtatcacggttgttatagcagcctcctgagcggttcatcaggggatcatcatccacagtccagcattc

SEQ ID NO: 595776 - DNA, 600 bp, Homo sapiens
gcgggcgtcgtcgaagataacaatagttggccggcgagcgctagtgtgtctcccgccgcggattcggcgggctgcgtgggaccggcgggattccggcagccggcatggcggggctgtactcgctgggatgacgtcttctccgaccagggcggaggaagtacatggaggacgtactcaaatcgttgtggagcccgaacgacggctgaagaaaagccctcgccgcggggtcgctgtctcagccgttgcctccgcggccgtcgcggcgcccttcccggggcgaagtctcggggaaaggcccagcggtggcagccgagaggtcggaaccctctaccggacgccggggctcgacgtgcacctaggccgctgatgacgacgcacgttcctccgatggcactttttcgccgtgtgccgatgggcacggcgggcgggaggcggcacagatttgaccgggaggcaactttggagtatccatcacagaacgcagacgggtttccactcagtcacgagccggctaaggtttgccgctgccatccgcaaaaggcttcctcaattgtcacacttgccactgtggaaagacacctgggggactgcgcaagacta

SEQ ID NO: 595777 - DNA, 190 bp, Homo sapiens
ctggactttatcgttgaacaaactaacctttaatagcggctgcaccatcgggtatgtcctgatccactatcgaggtcgtaaccctattgttgatatcgactctagaataggattgcgctgttatcccttgggtcacttgtcccgttggtcacgttattgcatcaattagtgatcgtggggttgtaaagga

SEQ ID NO: 595778 - DNA, 388 bp, Homo sapiens
aggatctcaaaaaacaaaatcttcatctccccagtaagaaaatacatggacaaaatcccaaagaagagagtattctcataaaaactgttgcaatattatagccactttatgcataatcataaaactggagacaatgtccactgttggcatggtgatggtaaacaattgtgggcattcagacaatcaagtaaccctcagctagaaaaggaacagactactgatacatgcgacaacgtgggtgatctccaaatcattatgctaaataacagaagccagacacaaaatcatacgaactgtatggttctattagtataacattctggaaaaagtaggagtaaaaatcatgagaaaaccgattagaggttgccaggggtggggataccacggg

SEQ ID NO: 595779 - DNA, 1209 bp, Homo sapiens
cgttcagacttgtggggtgccttcgtcgtcagcagcttgcgtcggaccggcccgtgcaggccagggggcagatgccccgaagctgacgccgccgccgccgccgactcgtgccgtgtggcggtgtgggaggtgggcgaccatgcccggggccgctgagtgtgacggacgcaactgggggcgccgtggggctccgcacggaccatgtattttctgagcggctggcccaagaggctgctgtgccctctgtgggagccctggcctgaggcgcctttccacgttcagtccgacccgcagagggctttcttcgccgtgctggccgaggaccgcctcagcatctggtacagccgaactagtgtgttaatttgtaacctacaaggagcctgcaaaatcatctactcagtctggatcctaccaagcaagctgaatggaggccagatagtaccatgatagctgtatcaaccggcaaatgggataccatcttggtacgctccatattacatctacacgaggggacaagtaccttgatgaaccagtggtatcccaaaaggcaagtcaccaaatgaaggggggacaccccattctcaccgcgaagaaccagtgttgctccacgcacttcaactccgggagatgaggcaccatacctggactttccaaggcaccccatccatgagtatggccaggcctgcggtggcaagatcgtcccatgcgtcgctccaacgtcctgacagggacctacccgccacacactcattcaacgtggggcacaagggcactgccccaccctgggcagagaaacgccgacacaccaccttggcggcagcgcgacccgccccatccgcagagacacaccgcggacaaccacacaacacaaggggcacaccaccagcggagcccacaacgcacggcacaacacacgagaacaacgtgcaacaaccggatcccacccacatggccggggcaagcgaccgcaggaccccaacagcaaggcgacaacagcagacgcacacaccggcgccacgcacagaacaccaagtgccgacgagcggcccaccggcaccgcgggcaccaagaaggcacgccaacacgcgcaccgacggcaccccagagacccacgacaaaagaacgaacgagagcagccacgcaaacgcacagagcccacccagagcgcacacagcaccaaagcacacgaccgaacgcacacacaagaaa

SEQ ID NO: 595780 - DNA, 108 bp, Homo sapiens
cggagtccgacaggtcaaaaaggccactcaaaacaatctatgatctgcctggatgcagtcttaccagaagcagctggcacagaggcaagttggcgtctagccgcaaga

SEQ ID NO: 595781 - DNA, 1560 bp, Homo sapiens
gatatcacgtcggtgtactcatgtgtcgcctcccgcggcggctcctgttttgtgagtcggacgctgccctgtgcattgttgacttgtggacgagtggtgttgacccgtctcgcttgtggtggtcccccctcggtgggggtgtgaaaccccacccgccagtgtgcggggtggatggacccttttcgccggagacggttgtccgtgtgatttgtgtgtcccgtccccatcttccacgatggaataggtttttttgtggtgtttcccccccggtggtagagctctttgctacgttacaataaaggggtgggggacaaccccacccacgagaccatcttttaaaaatggtgggtgtacacaatgagacccttgtgtggtggctagttaccactgcacagactacattattaccggatgatgtttttttggaagggggacctctgccaaccccctgttgattgtgtcctgacaaatggagaggaacaaccacaagggtgcccccttgtgtcgacggccagaccaagatgttttggtggtgtgggcgacacaaagtgggacaataaaacatggggtctgatctcaaaaatcgaatccgaatggtggccacatagtgggggtagaacacctgtggtgctcgactcctacgaggtccgtcaatatgtgggggtgctttttcagctgccgccccctctacaaaaatgtttatagagagcggggtttttgtcctttgccacagaatatcacgcgcgtctgtttggttaaatggagaccaccgtgtcgcggtggatcactatatatgccaccggctttcccccacgcttgtggggttggcttttttggcacacacctcgtggggatatactttttgggggggggccccctctcgagagacgtcgtgggctcgcaccaactgagaggtttgtgtggtcacacagcggatatatctcgtggtgtagtctgtcgcacatatttgtaccacacatatagaggtcccacacgtttcttgcgccttttctgtcacacactatacttggggtgtcacacacacattgggggagacctttgtgtgagaagagggcgcacaccccgctggggcacaagcacgccacgcttgattttgtgggagagagagggacacacgagagttctcagacacacactgtgtacacacttgtgggcccacagagattggaacctcggccctctttctgctcccacagaactcttggggtctcaaagtatagggaaccacctccctctttatgggcgatgtcctgagctttcccttccacttgggtggggtgggaatgtgggtgtgggggacactttccacgaagcctttataggtatgccccgcttgttgtttgcccacttcccccacgtgtttgtttaacccctgagtatgccccctatggcctatgtggtgatccccgtgctttactgggggatgtagagaaaggcacttttatagccctgggcatatagtgaaatcacccacgagcctttgggtggaatgtgtatagaaggccacttccaaaagcattaacctgttacaatgtttta

SEQ ID NO: 595782 - DNA, 294 bp, Homo sapiens
gcggcagcatctctggtcctcagattaaaaaatgaggttgaggcgggtccgtgctcacgctaatatcctagcactttgggaggcaaggtgggtggatcacctgaggtcaggagtttgagaccagcgtggccaacatagtgaaagcccatctccactaaaaatacaaaaatcagagctgggcgcagaggctcacacctgtaatcccagcacttttggaggccgaggagggcaaatcacctgaggtcgggaagttcaagacgagcctgaccaacatggtgagaccccgtctccaca

SEQ ID NO: 595783 - DNA, 492 bp, Homo sapiens
ataattctatttggtatatataataaattgagtggctgttttcatgaagagctctgtgttgtttcccgagagtggaatataaaagacatagctagaaagtgaaactgcaagaaaaattataatagaaaagctgttttctggacctttatcttgtggaggttctttgggatgggaagtgtctactcatagcctaacaaactccctggcagaggagttgttaaggggcctccagccttggacaggctgtgggaataagtggcctttcatctctgccaggggaaaccagaccattgcagagtccctctggcacagggttgccagatttagcaaataaaaatacaggattcccggttacatttgaattgtttctaattgcctatgcatgtgtgattcagataaaagaaaaatactgcatgagatatagttatgctaaaaaataccctgaaataaaataaaaatatgctgaaataaagaataaatacctaaattaaa

SEQ ID NO: 595784 - DNA, 228 bp, Homo sapiens
cggtctcaccctcccaaagtgctgagattacaggttgtgagccaccacacccagcatatcgagaagttttttccatgttaggggtttggggggaagtattaggtggaataagggtaaaaatggtgtcggtcacaatataggtccaggtttggagacaggatctcggtggcccaggcttggtcacctctctacttagtgatcagtgggcttctctgtggcccaggcttg

SEQ ID NO: 595785 - DNA, 951 bp, Homo sapiens
ggttttcaattccggttgatttttgtccctctgcgcttgctccccgtcccctccccccggtcggccaccagcccggctcgtctcctcctctcacggaaaggtcgcggcctgtggccctgggacgtgccgaatgaaccccagtgccccagtacccatggcacgcactacgtgggggacctccaccccgacgtgaccgaggcgatgctctacgagaagttcatgcccggccgggcccatcctctccatccgggtctgccagggacatgatcacccgccgctccttgggctacgcgtatgtgaacttccagcagacggcggacgacggaggcggttgcctttggacagcatgaatcttgatgttataagagggcaagccagtacgcatccatgtggtctcaggcgtgatccatcactatcgtcaaaatgtggagattagggcaaacatattcactcaaaaatctggacaacatccagttgataataacaggcactgtatgacacaatttcctgctaaggtaacatacctttcgaagtacacgtggtacgtgatgaaaagtgtttccaaaggctactgcatacgacaggtagagagacgcaaacacgccaagatgaaatgcagaccctctgaaaaagagtggcagtgggcactgtaccaaacgtgacgacaaacgaatgggacggcaggattaacagtctacatacaagaagcgagacgtcataccccaagacacaaagggtgaaacgaagtcacccaatgataggacacagaagttctcgccgaaaacaagggcctggtgacagcggacagcgaattccacaagtgcgaccgacatagtcgtccactatgacataaacaccggcagaccacacacccgcactgatcctataccatgcacaaaccaaccccgcggattcaaaaggggggccctaacacgaataagagacaacatg

SEQ ID NO: 595786 - DNA, 170 bp, Homo sapiens
gaggagagagtgcatctatacaccattggaagattgagggagggagagtgtgatatgaaaaatagcaaacccaaggagttcctgttgtggcacagtggaaacaaatctgactggtatccacgaggatgcagggttgatccctggcctcactaaatgggtcagagatccgg

SEQ ID NO: 595787 - DNA, 141 bp, Homo sapiens
gccagtcaagcgaatacatatgaacgaatctctataaagaacatttacttgaatatataagagtcataactgatagtaaatagagtttaacttaaaaaagactttgtcctaccacaggcagcgatagacgtgtttatggca

SEQ ID NO: 595788 - DNA, 2012 bp, Homo sapiens
  misc_feature (990)..(990): n is a, c, g, or t
atggcttgtgatgtgagtggcgttcgtgagtgatggttgattgtcaatctagttgattgcgcgtgtgtggtctatgagtaggtcctgtcatgtgacgtatgttgaatgcaggtctgcgtgtggtggtggctcgcgtgttgatgaccctgtcagttgttgttgactacgattgttgtgcgcggcggtagaacagctttgttctcccgcggtggtggtagttggttgcgggcggttgtcttgttgttgcagcttgtaggtgcgtggtgcgtctgtgatatggggggagagtgaggtgctacctgcgttgtatactcaccgcgtggttgttcaaggtgcagcaatgtgtggtgtgagtcagttggggtgtggcggtggatggtgtgaggggtgatggtgcaccagtgagcgtgagtggtgtgtcgcgcaccagtagtgtggtggaaaacaacactatatgtgtgtggtcctcacactacgtgtgtggtgcgtgcgcttgtttgtatcgggtggtggataagtctgcgggtggcgctggttggttgttgttcgctgcctagtgctgactggcggcggttgttgttgggtggccaatatatgggtggtgtgtttggttgttgtgtgagggtgtgctcacctccgcatgcatgtgtcgcttactggggcctgtgggtgatgtctgttgttgtccaaccaccgcttggctgtgtgtgtgtggccttgtggttaggtaagtcaaggtgggggggccccacccactagtagtgtttggtggtgcacgcagaaaggtgtgttagtgtgtggtgtcgaccccaccccggtggtggggttgtgcgacaccctttgggggggcgtcagcaataataatgggtggttggtattgtctcgcctgctacgctggtggacgaccaccacaaagtatggtgggctggtgtggaggtttgtcggccgttccctcgtggagtgagcgaattgtgtgtctttattaggcgntggttcctcattctgccgttcaatgtgtcctcccgtcgttgcggggtgagtatagtttgggtcggggttcctgccacaattatgttgggggtccgcgactgatatttctcgtttgtgtattattgttgagtgtgtggtaacgtacaccgcgcacatgtgtggtttcgcgtcttggggtgtgtttcgatgtgattcgtcagtggagccggggcgggtgtgtacgtcttatgttgtggggagtttcctcttgttcccccccccccgttggtgtgtagagacccccccgcgcgtggcacacacacgtagtgatagtgacacacatgagacaccccctgagtagagtgagtgaccacagacacacacacacacgacgcagcgttgtgagaggggtgagcacacacaccagagagagaagagactgcgcgagcacagagagagtcccaccaccacacagcgtggtgggacaccacacacaatatacacacgcgcggctgtgtgtgcgagatacacgccgcgggcgccacccggcgaacatagtagaacacgcgtgtccctcacacgagtgtataccgagagagacctgcgcgcggtggcgcagaaagtgtcgctccaccgcagcaggagaagaatacactgcgggacgacaccaccaccacacgcgagagggtgtcacacagcgagagagtagtgtgtgtgccacacaaatgtgtgtgtgaatagagtgcgaggtgtggtgggcctcaatagtgggaggtggcccacgaatccctctgtcctcccaaagacgggtgcgccctgccccgagaacgggacccggagggccccctgggccctgcggccctgctcacacccccccccctgtgcctctgccaccccctgtgtgtgtggtgtgctgtcactgtctcccccacccccccccctctcccccgggcaccccctacccccctccacacgccaggccccccccccccacatgagagtgaaaaaaaacaccacaggacaccttttttaaaacacactga

SEQ ID NO: 595789 - DNA, 207 bp, Homo sapiens
  misc_feature (61)..(61): n is a, c, g, or t
  misc_feature (66)..(66): n is a, c, g, or t
ttacaagcacaattgtagtaataactgaataactgaataattaacaaagacaaaacaattnaaaanaaaatggaagatttaacattccattaattactgagaccttcttcatagcagtggattctgggagcatatatatgggacataattatctttgagctgccttttgttccccttttgctacccctggggatagttacttcatat

SEQ ID NO: 595790 - DNA, 469 bp, Homo sapiens
tagatgaactggaagaaagtacattctttgccgggcgcggtggttcatgcctgtaatcccagcactttgggaggctgaggcgggcagatcacgaggtcaggagatcgagaccatccttgctaacacggtgaaaccccgtctctactaaaaaaaaaaaaaaaaaaaaaaaaaaaaaattttgtgggcgcgcccgggccccggaaaaagttttttaaaccttttggttggggggcccgggcgcccaagttatgtgtacggtaaacatgtgggtcaatagcttggtccccaagaggaaactacgggcgccagtagactacacgtgggggggttctttccccaaattaaaaaaccgccggggggaacccggacgcggtcttggaacaactcccagagagggtcggggggcaataacggggttctctcaccgggacgccaggcgaacccgatattaatttaccccacgcggggt

SEQ ID NO: 595791 - DNA, 569 bp, Homo sapiens
  misc_feature (260)..(260): n is a, c, g, or t
  misc_feature (293)..(293): n is a, c, g, or t
  misc_feature (432)..(433): n is a, c, g, or t
  misc_feature (438)..(438): n is a, c, g, or t
  misc_feature (455)..(455): n is a, c, g, or t
atctcaactaaaaatactgagtcaggagaattacttgaatctaggaggtggaggttgcagtgagccgagatcacgccactgcactccagcctggaaaggaggggaaagggaaaggaaaggggcaggggaacggtaaaggggattgtccttgggggtgggcacggcagaacactacgggggtgccagtattttggtcgttcggcagagttatttaaagtgagttcagttggcccaggccaaggtggccgcgccttgttcangcccgcccccagtaaccccgtcatttcggggangcctattcatccgtatcccacacaccccagggcccgcctgagatgaggtgaccctgcaaaggggagggccttctcctcttcggatgagaggcgcagcccccccctccccgggccccggccctctggctcgaacgcatcnnagggnggaccccggctcgaagngttttccaccgccaccttcaatccacccctcaatcccccgcagacccaccaaatctaacccgccggggcccgtggttgctggcctctctacaccactccccactctccttccat

SEQ ID NO: 595792 - DNA, 258 bp, Homo sapiens
cagttaacttgggatagtggttttgatgggtcgtaggttgtgacatgtgggaatctctgttcatcgatacatgcgctgtcattagttagatgacgagacattgggctagcttaagagagtcatagttactcccggcgtgaacccgtgcaacattgaatatcttcacttggagattcagagcactgggcagaaatcacatcgcgtcaacacccgccgcgggccttcgcgatgctttgttgtaatagttacggattaacg

SEQ ID NO: 595793 - DNA, 199 bp, Homo sapiens
ctgggataacagggtgttcactcacgattgcctggctctttttatattttagtagagatcgtgtttcactatgttggtccaggctgcttttgatctcctgacctcaagtgacccaccctcctcggccttccaaagtgctcgcggattatcaggcgtgagccaccatcgcctgcgcgtctcttgagatacgtacttttaa

SEQ ID NO: 595794 - DNA, 438 bp, Homo sapiens
aacaaagaccaacctgcctggcagaccggggtgagggctgcctggagggaaggtgaccccacctcagggaggccactgtgaccacatcctcttgcacagtgggtctttgcctcagcaactgtgggggaggaaaagcaccaacatcccctctcggccgaggggaccaggctctagaaagctcacagcggcgctatggaaaaacctggagacagccctggagacggcccagtggatgaataggaaaatgcatggtgttatggccaaacaccggaacactcttcagctacccaaatgcactgcagccgcacagaacattacggggcatctcagcgctatgaggctagagagaaagtaaagtctccaaagatgaagttcagcacagtacgctttctagaaggctaaaaagaactgtaaataaaatgttctttttgagagtga

SEQ ID NO: 595795 - DNA, 906 bp, Homo sapiens
catagtccaggaatttatgtgctttttataatatacatcacgagagtaagtgttgttttccacgaacactatggcgaccgcactgtgttgcaagaaacgatttttcggggcgtggattgggggtatcataaaaaagggtggtccgctctatatttttcggggaaggggggcgcttattagaggcgctgaaaaaacccgaattttttgctcaagactcacggcgagactagtgaagagattgccggttgagtgcattgtatgcaggcatgcccgggacacatagtggcgtgggaaaagtttggaccgtgtgggtgaacacgagagcggtatctccgggagtggactgaattagagaagcgcctctgtgcacactgcgggtttacccaccgtcgcctacatggtagtccctgggaaatgtacacgggaaactggggagaattctttttagaaggatgttaatttgcacaacgtattgtgaagagtttgagcctggtaaaccacatgataaacaccatgggaacaccactgtccggtatttgcgtcctcgctgattagcattcctgcctgctgtccgattgctgggacggaagtgctattaactactttatgtaacaagtaccaggaccagctagaggtcctggggttaagagaggaaaaaatagccacgtcgcctaccaatgtgaagccttcattattacacggtccagttgtgtctcgcagtgtaggcataagcgtaatgggttattttcagaaagctgcctgaaacagttgctttgtattcttttaggaagaactttaattcctcctgagggactctactttttgagcccaactgctaattttttgcggaactgtttagaagatcattcaagagacccgcagtgtgcactttttcgttaaagttta

SEQ ID NO: 595796 - DNA, 414 bp, Homo sapiens
ctccccccttctgcacgccccctgttccacgggtacctctgccggtcctactagcactatgcagccttttgtttcaacgcttcctgagccacgtcccccttgagtaacggcgccctgatcgcgcctactttctgtgcgggattcttgccttcaggacaggcggagttcccctggtacacaagggtccttctgtgtggagctgtccgccaatcggtgatgtcatttctgcttcgtggccaaagcaatgggaccagctcaaagtattgttgactgatctgtccgttacccgattgtccaaagccaaggagattggggctgatttagtcctccagatctccaaggagagccctcaggaaatcgccaggaaagtagaaggtcagctggggtgcaagccggaagtcaccatcgagtgca

SEQ ID NO: 595797 - DNA, 431 bp, Homo sapiens
aggccggggctcacaaccataatcccaacagtttaggaggtcaaagcaggagaaatgcttgaggccagaagttcaggaccagcctgggaaacacagtgagacccacccccctcaattaaacaacaaaaagaaataagagaaaattagctgggcgtggtggtatgcatctgtagtttcagctacttgagaggctgtggtgaaaggattgctttagccccagagttcaagaccagcctcggcaatataacaagatcccatctctacaaaaaaatacaaaaatcagctgggcatggatggtgtgcacctgtagtcccagatgcttggaaggctgaggcgggagaattgcttgagcccaggtggttgaggctgcagttagctacgactgcatcattgcactccagattgggtcaaacagagactctgtgttcaaa

SEQ ID NO: 595798 - DNA, 913 bp, Homo sapiens
aacgctcgctcatactaggcctactaaccaacacgctaaccatataccaagtgatggcgcgatgtgaacacgagaaagcacattaccacaggccaccacacaccacctgtccaagaaggccttcgatacggggataatcctgatttatatacctcgagaaggttgcctatatctgtcgcatggattattgcatgagccgtgttaccaacgtccaagcggctagcccgaatgcctccagatcaggcatgggcactgcgatcgcacaaaaaggaatctactgcgattaactcccctagaaggtccaacgccttaacatgcatgcgggtttacgccgaaatcaaagggggagaaatggcgtggggcacgcgcatattggaagtataaaacgacgaatctaataactcacgcatgcacatgatcatatcaccgctagggataggtgacctgctacactttgcgcttatatcgagcctgcaaggtaactatgagtcccccgtacaccaattcctcgagggagttgacagcccccggggagtgcctcccggaggggacacagggacttgaagtgattatgggatcacgttcttcacttatatgcgaatccgcaccaactatttgccacaatccaacagaccattgggggtgctagcggacgctgaaaggcgttagtccatgtggggacaggctgtgggtcaacagcggagacggcctcacagaatgactgacgagcatactgtgagcacgcgcccaaaggctacggcatttgtggggccagcgggattaaggagattcccaatagggtggaaagggtctccaaaacggcgagcgagcaaaggagcggcagatggacaggaaacgggggagaaagaggaccgaggagcacacgaagaaccgtatctataccaagcagtaa

SEQ ID NO: 595799 - DNA, 496 bp, Homo sapiens
cctttgattcccagtctgtcctcgtcctcctctgcctgtgggctgctgcggtggcggctgatgtgagggatggcgtctgacacgctggtgccagtgctcctccgggcccctcaccagccccagtgtcttttcccagagatgcctggagggaacaggctgagtgagggtggttggtgtggaaaccctggttcccccagtccccggagacttaaatacatggaagaaaaagtgcaggacagaattacaatgtgccggcccagggtgggcagcggcccctgcctcctacacttgcgcctcatgaccagcttgttgaagagatccgacatcaagtgcacaccttggatcgtggctctcactgcaacgggaaagtcacagactggggtgaagagttcagtcacatgcgaccggtggctccctgtacccaaccccatgacactccccagcactccaaggccactgtgttctccagttagctcagagcctcagtcgatccctg

SEQ ID NO: 595800 - DNA, 103 bp, Homo sapiens
tacgacccagaacagtgtttgctcagatcgacatttacaactcagagctggttggtggccacactgtggtgccttgaaataccatattctgtatcttctcagt

SEQ ID NO: 595801 - DNA, 301 bp, Homo sapiens
tctgcatactgaggtctagcacatcctgcacacaaaccttttgtcagatacacaatttgcaattattttctcggggtctgtgacttgtcaatggggacctgacagcatgacagtgttttctttaaacaaaccaggctgtctttagaatcctgccattccaatcaaggagaggggcatagaatctttaaacttcatggcagaaaaagatcacgctcagcagctgtgtagtccacaggacctctgaagaggaaggggccttcccgcacatggaatgggcccctcatgccatgctaaacgattt

SEQ ID NO: 595802 - DNA, 143 bp, Homo sapiens
ggggggggggggccctttcccccaaaattttttacccccccggggggggggggggcctttttttcccctttttttttcccccccccttttttttcgggggggggggccccggggggggtttttttccccttttttttttttta

SEQ ID NO: 595803 - DNA, 431 bp, Homo sapiens
cagtccttcttctgtgctctgagcctctgagtctctgtcagtgagatggggctgtaaacatcctaggaccttccgcagtgaggtgccaccctgccaggttctcgccctgtagccgagccctgtcaccttcatatgtagttggctcagtcgtggtgccgatcagcctcacctgggcccggtccatctttacctgctgtttccgcagttgttagatggcttcgtcccggttcttgttgcggcgtagtcgatgtgcgcctccaggtccttctgttccttctcctaccttagacccgttgctttactctgtcttgccaggtctcagagtctcatactgcacccagtatgctcctcctagccaggtctgttacaatcgttgtggagggtcctgcctgttctcaagggacaagcttgcccttctctctcctgaacca

SEQ ID NO: 595804 - DNA, 864 bp, Homo sapiens
  misc_feature (280)..(280): n is a, c, g, or t
cgaatttcacattaattcctttccccaaaatccgattgcccctccgggtctttaagcccccacgattttccaagacccccggttttggaccccacaaaattttctctcttctcaaaaaaaagcgctatcccccccctttataaatctccacagccgtctaaacaattcgtacccccaaagttttgaacagaagttactagccttaaaattgtcaacaagaaacattgcaccttcaaagacgctgctctcttggaacgcgaacagataaaagctttttgtncaccaagccgccggctaaatagaagcctttctcccacgaggttaaaagtgttctttaagcccaatttggtagacaaggcatgtcccagtcgcccggcttttatccccctagtagagggccaacgccgtttgtagatgctgctaaatccgtagggtgaacaataaccgcgtaaagacattacttgttacaaacattgataggtgtctttataatacattcaatctgtcacggccaagtgtttttttgaaaagacgggtattacacccccacggcggtccattaacaactccctgtaagtcctcaccctcctgcgtgagcaattctccccattctaaggcccatttatcccccagttctttaatcgccccgccatattactgaacaacctatttgtgcggatagttataggaatggtacccctttttgatacaaacaaatacaaattcttatgagatgtggaaaaccttagtaaaccacataatctctccgggatgccgccatgacacaaaacacagacaatacaagaaaaaacacacattggccaacaattatcaacaacaaaaaaacaacccctttcacaaaca

SEQ ID NO: 595805 - DNA, 277 bp, Homo sapiens
aaggatcggtggaatgtgaggggaggtggactattttactaaacttgtaaccttggaaatgaccagcccacaactcaagcctccccagttctactgacctttttccttaggtttgaggctcagggttcctcggaaaaaaaatcttcatactcaggtgttgaccagagtgttcattgaatggtgtaattttgacctctctgtgtcctgcgaaatactggccctgcctggagacatattactcaatttctctcaagtcacaaataggatggggcgtctg

SEQ ID NO: 595806 - DNA, 997 bp, Homo sapiens
  misc_feature (995)..(995): n is a, c, g, or t
  misc_feature (997)..(997): n is a, c, g, or t
ccgtctatgtagcaaaatagtgggaagattgataggtagaggaagataatagcgtagcgagccatggtgatagctggttggccaaagaatagaatcttagttcaatcttgaaaatgtgcgccacgagtaagcctctaaatcctgcttgtaaatttaactgttgagtccaaagaggaacagctctttggagactagagagaaaaccttggtagtagagagtaaaaaattaaacatcccgatagtaggcactaacaagcagcgcaccaattaagaaagcgttcaagctcaaggacccactacctaaaaaagtcccagacatataactgaactcctcacagccaattggaccaatctatcgagcctatagaagaactagatgttagtataatgtagacatgaaagacattctcctcggcataagcctgcgtcagattagaacactgaagtgacaattaacagcctcaagtatctacaaatcaaccaacaaggcattattaccctcactgtcaaggcctaaatgacaggcatgctcataaggaaaggttaaaaaagttaaaggaagctcggcaatgttaccccgcctgtatagtcaaagaaacatcaactctagtgtcagcagtattagaggcaccgcctgccagtgacacatgtataacggccgcggtacctaaacgtgcaaggtagcataatcacttgttccttaattagggagctgtatgaatggctccacgaggggttcagctgtctcttacttttaaccagtgaatgactgccgtgaaaggcgggatgaacagcagagaagaagaccatgagctaattataaagcaacagtgctaaaacccagggctatacaagctgtaaaatttcgggggcccgggaaccaccggaatgtaattccggaagagaccttctggcaatgcagagaacagaaacataatataaaggcagaaaagcgagtatagaatagagagtccaatcctacttaaataatcctntn

SEQ ID NO: 595807 - DNA, 258 bp, Homo sapiens
  misc_feature (6)..(6): n is a, c, g, or t
caagtnattaacaaattcggtgaccaagtgaccctggctgttctccagaaccggcaccagcccaaggggattcttctcaaagaaccactcgggcttattcttcaggttgatattgatgacttcgtgccggattcccttggccttcaggaccatcagcgtcctctgagcgaaggggcagaacctcatgctgtagacgcggattctggctccgggaccgggccggggggcgcgcttcccttccccaggctcctggaggat

SEQ ID NO: 595808 - DNA, 117 bp, Homo sapiens
aaactggagcatatatgatagtgggaatgtaaatggtgcagccactttgggaaaacagttgggcaattcctcaaaaggttaaatacagaggtatcatgtgatacagcaatccaattc

SEQ ID NO: 595809 - DNA, 457 bp, Homo sapiens
gcagcgcccttgtttgcagtgtggaaacacccactctggggctggcactatctgtcgagaatttaaaagtgatcataaatctgtatgaaagctgatgtgcttttcgttattaccatgcaccagcaattccagtcagtgtcggccatacatcatctgtcgtctgtgttctgaataatggttactgttgagttttaataacataaatgtaagcttcagattcacacattcttattacttaccctttcgtaaacattgtgttttatgtggaaactaatttggggaacccccagtcaatggccctcacgtgccaacttggctgcatacccctgttccaagaccacgtgcacagcttggcattgctggagggcgctgggcacaccttgtgtctcccgcctctgtggcgctgtgggctcctggatggaagcaggagatgggaaataaacatggatcgctgaaa

SEQ ID NO: 595810 - DNA, 164 bp, Homo sapiens
caactacatatataccattttttgaatgcgtactggagaggatactctcagttcttttgagctacacattagaatcaacatctctccggagatctacagggtggggcagagtggactccctagtttcaatcagtcgctgaagagcgcccgcgcgagttagcgga

SEQ ID NO: 595811 - DNA, 133 bp, Homo sapiens
ttagcggaccgtacaactccaagaatatatacagtgctgactagagtacaggtgacctgattattaaagttcagtgagttaaaaaatgtgaataaaatctgatgttctgaagtacaattaaatgccgactaag

SEQ ID NO: 595812 - DNA, 958 bp, Homo sapiens
gcttctctcgccaggcgtcctcgtggaagtgacatcgtctttagaccctgcgtgtgaatccctgacgcaccgccgtgatgcccagggaagacagggcgacctggaagtccaactagcttccttaagatcatccacctattggatgattatccgacatgtgtcatcgtgggagcagacaatgtgggctccaagcagatgcagcagatccggatgtcccttcgcgggaagggctgtggtgctgatgggcggagaacatgcatgcatgcgctaaggccatccgagggcaacctggaaaacaacccagctgctggagaaactgctgcctcatatccgggcgcttggtgggcttggtgtgcacctgggggaggccctccactgagaatccgggccctctgtttgctaggtgcaatcaaggtgccagcttgctggccgtgcgtggtgccatttgccccatgtgaggtcactggtgccagctccggatctttggctctcgggcccgtttgcagatctcctttgtcctggctctggtatcagccagtaaatatctctaggggctgccattgcatatcctgagtgatgtgttagctgggtctagacatggtgtctatgtggccgccggcagtgaggccggcgcgtgttggatgatgttcagcttattccccttctacttgggtgtggtcctgccagaagtgttcgacggtgggttgctcttgacccctgggtgttgatatcccgggggaactctggatctttgctgccgaagtgttgcgaattgtgcctgctgttgggttgggaccactttgatcggcgccgtttcaacgaaggaacaggcgtcggctgggggggcgggacctcccgcgggggcggcggagatgcctgggggcctccgggccctctggtggcctggagaaacgccaggttttgtcccccttggctcactccacgcggcgtcggcgcg

SEQ ID NO: 595813 - DNA, 118 bp, Homo sapiens
  misc_feature (1)..(1): n is a, c, g, or t
ntgtcgaccgatggtcgcgctcactgttgcaggtgctggacttcgacggattgttgacgacgacctcgccgcctgccgcaagttccgcagcgcgcgcaaacaatgcgcaaagacaaag

SEQ ID NO: 595814 - DNA, 576 bp, Homo sapiens
tccaagggactcagctcttctgtttctacagatggaacagctccatagggacagctgtataattaccttcagaggccaacgacagaatccggcaggaacagacattatcttgccagttagaagtacttctgtctcacttatgtccaaagagtggctatagatcttggccttcttccctgtatgcttttttttttggggcccccaagaaagtccctttaatagcactttagcacgggcaaggctacaggaacaaagtttcaatggctggcggagagtgaaagaagggaggaaagtcggccactctacccggagcgggcagtagggcacggagtaccctaggaagaagtcagagcaagggatacaaatgacctggctctgggattggcggagcatgatccctattctgatgtcagagataaggtttaatgggaatagagctatccatgggtcctaactctctagggagacaatcttccaaaacagtttggggggggtcttctaaagctttcaattgggaagtaactttatccaactagagtggattaaaagaggggaaaattatctcacagagctgga

SEQ ID NO: 595815 - DNA, 360 bp, Homo sapiens
gctgatctagaggaccccagcgctgagcaatatagcaagtagggaaatcccacatcaatgggagccatcacacagatgcctttctgggaaccccaaccttctatgatccccaaaaaggtgcttgggggctttagcatattcaataaaggggaagagggaaaatacggaaaggggccactattgagtgggtgaaagattgaagctgtagaggtcccacccagcctagggccaaaaaagaaatgtatgatctgcacagagcaggcaggcctctgactgctgagagtatggcattcaggcgccaaccggttgagagttctcagcgagcactgtcgggtatggctcagcgctgggtaccgtgct

SEQ ID NO: 595816 - DNA, 80 bp, Homo sapiens
gcggccgcctactactactactgctcgaattcaagcttctaacgatgtacggggacatgttaagcagttttccttccttc

SEQ ID NO: 595817 - DNA, 208 bp, Homo sapiens
acatacattatcgcccatgaatgtacatcctcactactattctgggcgtggcgaactctatactacgaacgcactcacaggcgcatcataatcctctctcaaggacattcaaactctactcccactaatagctttttgatgacttctagccagcctcgctaacctcgcctattgtacaccaaccccataccacgttgctataacggga

SEQ ID NO: 595818 - DNA, 151 bp, Homo sapiens
ctagcaaagtagtcaggacatacttctggtgggcactgtgcaggaaacttgagagatgaaatcagtgagcagcatgcactatgaaaggcatggacatgtctcctcacttgaagtgcaaggtccatacgaccaaagaccctgtatcagatca

SEQ ID NO: 595819 - DNA, 331 bp, Homo sapiens
  misc_feature (303)..(303): n is a, c, g, or t
  misc_feature (306)..(306): n is a, c, g, or t
ataagagtaagaaaaacggcagggcacagattagctggcagtaatcattattcgcagccggacaaatgattttgcccggcctgaattaattaaacccggctaccccacaaatcgtactcatcggcgtgctcgactttcacacgcaggatatcacccggcttaacgttgtttcaccattgagataaaccgcgccgtcgatttccggtgcatctgccatgctgcgaccaatcgcgccttcttcgtccacttcgtcgataatcaccagaatttcacggcccactttctcttgcaggcgctcggcgnaantctgctgctgcagctgcatgaaacg

SEQ ID NO: 595820 - DNA, 284 bp, Homo sapiens
attctgctctagacatctccccatgagaaatgagcactgagcctcccgaaaggtcttttgggaggccaaggggagcggatcacttgaggtcaggagttcgagaccagcctgggcaacatattgaaaccccgtctctactaaaaatacgaaaattagccaggcctggtggtgggtgcctatagtcccagctactcgggaggctgaggcaggagaatcgcttgaaaccgggaggtgaaggctgcattgagccaagactgcgccattgcactccagccttggccaca

SEQ ID NO: 595821 - DNA, 183 bp, Homo sapiens
ggaacgtatgacgggtggcgtgtgaacccaggagagatgttagatcggtgtcgtgcaagaatcggaggtggagtgcggctagtgggtggaataatgaatgggtacgatgaatgtgaaaggtaaagaatcgtgtgagggtgggactgtctactgagtagcctcctcagattcattgaactaggt

SEQ ID NO: 595822 - DNA, 427 bp, Homo sapiens
ccaggcacaggtttggcttccggtcagtgtcccgcccctgtgcgggaggtgacaacaaagcaaagcagcgcaggggtcagggaggttcagacactgttgaaatcacactacccccccctcaggtgaagccccccgttccccaaacttggggtcatagattgtccagtcactggctccctccctgtcagcccagcccaaaggaaggggctaactgaattttttaccccttttggcctggctccagaactttgttttaaattccttaaaagtcgggagctgatgtcaaactcaattgagcagtagctttgatcccttggtttgggggtcgaaggaaaatggcgctgttatcagcggggaaatgtactatttaaaatcagctttgttgtaaaaccctttgttttaaaataaaactcaattggaaacgtga

SEQ ID NO: 595823 - DNA, 297 bp, Homo sapiens
tatgaagttgattaagtggtttacagcatctagtgaagtaatcatatggtgtgggttctagagttatattaagtgtgatatatcacattgatggattagcatatgttgaaccatcctggatccctggagtgaatcccacttgatcatggtgaatgatcttgggaatgtgtggtggaattcagtttggtagtgtttcattgagaattttggcacctatgctcatcagtgatgttggtctgtagttttcttttgattttgtatcctagtctagtttaggtatcgcagagaatgccgcgt

SEQ ID NO: 595824 - DNA, 1286 bp, Homo sapiens
aactataatagctagcattctaccactcctcacgttctagcgcaagtacctaagtatactccgctcacaccctcactactcctccctacctatgccctagcaacggaactaactacctactcgcttggctccactctagtacgcatacttcctcactacacccgtccaacaccctacatccccatcctatagccccaactactctgctgcccttactgcgcccactcacctcagctccatctctgcacccgcccatagccgcaacgcgcaggaccgagcatgcgcgaccctacgcccccgtaccgtacgcgtaccatcaacatcaatctcaagccaccagctcactggcgaccctacggagcttagcagctacacactacaacgcgttacacaccgcctaccatcgcacactcgcctaccaaagcttacacatcgattacccaaacccaacctatcactactctacgtacccaacgtgcacccactgaacctctctcccacacacaaatccacatctacactgttagaactccacatcaacacaacccaaccacatcagcccacctaacacctctacctcacgccactccactcacccctacataccatagctctctctctctacacccacacactccaaacatatcacacccatcactctctagacccatgatcatcccacaaacaccagtcttactcctaccgaacgcccctctacaccaacttcgcccactttccctacactacctaaaacctcaccccttgcacctcccctactaccctcttcaaccaaacctccataggccacccgcccacaacagcccacctatctcaccagctgcaaaccccacttcactcactccgcccctaccccaccctctcacccatcctcctaattctctaaatccttcccctctacacagatcttcttccgcattcaagtttactataactaacatatctacacgccacacagagtaaacctacacttcacatcactccatcactacctcctccctcatatacgacaacaatccacatcacctctaactatcacccacgccctttatgcacccacttcatatcccctcccccgactcaaccgtccataatccaccccacacgaaactctgccctcgcacacctacgtggccacactaactaccctacataatacacacaccgctatcatcatcacgcacactccctgccccctaactcacatagtgcacctccctcacacacattacatcaaccactctatacgcccactacacccatactcc

SEQ ID NO: 595825 - DNA, 179 bp, Homo sapiens
catctctcgagcgtgctctcccacaatcataattgtttcagtaaaatggttacttggtttttccaaaaaaaaactcgtttttactcattttgggcctgtttgtttatttagaaactaatctggattcaccccctctggttgatacccactcaaaaaggacgatgcagaaaaggatttag

SEQ ID NO: 595826 - DNA, 159 bp, Homo sapiens
tattgaattctctacgaaccacaaagacataggaacactctacaatattattctgtcgcattggctggagtcctaggcacagctctaagcctccttattcgagccgagctgggccagccaggctaccttctaggttacgaccacatctacaacgttatc

SEQ ID NO: 595827 - DNA, 129 bp, Homo sapiens
ccattggaccagcggatgaggggtctgttgtcaccagtgatgcatgcagcacattgttcctgttggctgctcattctgctcggagtaattagcatccacatgggcttcagcagcttttctcttcaggat

SEQ ID NO: 595828 - DNA, 1614 bp, Homo sapiens
accgtgttatagttattaaacattacccgtcgtagctctcatacgcgcgatctatcatcgagctgcgcgtatcgactacggagtatcgcggccatcacaggatccgggagcgacgcgcacgagcgcgccagcatcgcgcattagcgcgtgcgcgcgatgcgagcggtgccgtacgcgcgcatcgagttatgcggcgagcgcgcgtatacgtactcgcgcgatcgatacgtacgagcggattttattcgggcgctataaatcggcgtatatcgggcgcggcgatgtacacactgggatcgatgctagcgatccgcggcggactgatcggatgcggcgcgattacgcgacggcgcgatctgcacgatacggcgcggatttcgagtatcatgcgcgatcggcggcgattatggcggcgatcgtagcgcgctatatgcgcacgcatcgggcattatatattcggcgcggataggtagcgagcgcgacgctacgatcggcgccgatcatcgaggcgctacgactatcggatcgggtatcatcgatcatagatgcgctactatataataataataatagtcacatagccaacttacacccacgaatatctagcgatcatcacgaggacgacgatcgagcgcgcatgtcgcgatattatagcgcgcgcattatagcgcgcagcggtagcgatcgggggcgggcatatatacgggcgcattatatcggcgatacggcgatcgcggtttttacggaggcgtttacgggattcgggatgcgcggttagcgtatcgcggcgtattagcgcgcgcgcattaattagcgcggtatattcgcgattacgggcgcgatgatcggcgatcggcggcggcgattatcgatctagcgcgggcattacgctatcgatctgtacatctagcgcgcgcgcgtatatatatatccggcgccgttatagcgcgggctataatcggcggattctaggcgatcgtattcatattatcggcgcggattccccggggatttaggcggcatttacggcattaggctatgggcgcggtatcttatcggattacgcgcattctatcgtatgcgcattatgcggcgcggattattaaaggacgaccgaacaagcttacgtgtatataattaatttaaggagagacgagagctaagttcatctatcaggcattctacgcatccatcgatcgatcgcgcctagcgatcgagcgattatacgagatattacgcgcgatattggcggcttatatgcgagtatcggtcgatggcgattcgcgccgcggctagcgcgatatcggacgacattatcggttcggatcagcgcgatcgcgccgctcgcactgcgatgcacatgcgtcgagcattcggtaggatcggtgcatgcgtatcatgcctttcggcgttccactagcgaggatcggtatgggcttaggtcgtgcatcggtatcggcgcgattcggatgagtcgcggcttagtctatagaccagacggcatcagcgctttttagggcccaaggtcttctctcttagcacacccttctgctctatggactacgtatcgacacatcgatgtcgatgcggaattttaattttctgactgaccgc

SEQ ID NO: 595829 - DNA, 587 bp, Homo sapiens
  misc_feature (20)..(20): n is a, c, g, or t
  misc_feature (69)..(69): n is a, c, g, or t
  misc_feature (71)..(71): n is a, c, g, or t
  misc_feature (122)..(122): n is a, c, g, or t
  misc_feature (142)..(142): n is a, c, g, or t
  misc_feature (149)..(149): n is a, c, g, or t
  misc_feature (165)..(165): n is a, c, g, or t
  misc_feature (167)..(167): n is a, c, g, or t
  misc_feature (169)..(169): n is a, c, g, or t
  misc_feature (182)..(182): n is a, c, g, or t
  misc_feature (188)..(188): n is a, c, g, or t
  misc_feature (194)..(194): n is a, c, g, or t
  misc_feature (198)..(198): n is a, c, g, or t
  misc_feature (200)..(200): n is a, c, g, or t
  misc_feature (206)..(206): n is a, c, g, or t
  misc_feature (213)..(213): n is a, c, g, or t
  misc_feature (217)..(217): n is a, c, g, or t
  misc_feature (230)..(230): n is a, c, g, or t
  misc_feature (232)..(232): n is a, c, g, or t
  misc_feature (243)..(243): n is a, c, g, or t
  misc_feature (245)..(245): n is a, c, g, or t
  misc_feature (263)..(263): n is a, c, g, or t
  misc_feature (268)..(268): n is a, c, g, or t
  misc_feature (270)..(270): n is a, c, g, or t
  misc_feature (272)..(274): n is a, c, g, or t
  misc_feature (280)..(280): n is a, c, g, or t
  misc_feature (284)..(284): n is a, c, g, or t
  misc_feature (294)..(294): n is a, c, g, or t
  misc_feature (296)..(296): n is a, c, g, or t
  misc_feature (303)..(303): n is a, c, g, or t
  misc_feature (310)..(310): n is a, c, g, or t
  misc_feature (316)..(316): n is a, c, g, or t
  misc_feature (326)..(326): n is a, c, g, or t
  misc_feature (333)..(333): n is a, c, g, or t
  misc_feature (335)..(335): n is a, c, g, or t
  misc_feature (339)..(339): n is a, c, g, or t
  misc_feature (421)..(421): n is a, c, g, or t
  misc_feature (452)..(452): n is a, c, g, or t
  misc_feature (501)..(501): n is a, c, g, or t
  misc_feature (520)..(520): n is a, c, g, or t
  misc_feature (522)..(522): n is a, c, g, or t
  misc_feature (538)..(538): n is a, c, g, or t
ttaaaaaataaatttaactntaaaatatgatgagtatacatttctggatacaattatacaatttgctantnttttaactttctcttagaatgttcatactctgaaaaataaaatcaaatgangctcacctgctttacaatanacatttntctaagcacacttganananatgtaaatatgtntcagangctatncatntntatgcngtaatanccanaaaactctggaangnaaaattaaaancngatgttattaacactaanaaaanantnnnccaganagtntctatttcantntctcaangtcgtcncacttncttggaactngatttcntncttnttacactgtattatttctcaaaaagtttcatctcaactaagctacacttcttcatggagaagggaagtctttattctgagcnggaaggagaagagatattagaataaactgantaactcaagagaataatatatgaaatcttcataaggtatgtcacaatgngatacaaatagcaatctgnangaaatattctggtgtnactaaagccaaatataaatgtaatatcttaagatcagacagatgatttg

SEQ ID NO: 595830 - DNA, 971 bp, Homo sapiens
  misc_feature (30)..(30): n is a, c, g, or t
  misc_feature (81)..(81): n is a, c, g, or t
  misc_feature (106)..(106): n is a, c, g, or t
  misc_feature (122)..(123): n is a, c, g, or t
  misc_feature (164)..(164): n is a, c, g, or t
  misc_feature (177)..(177): n is a, c, g, or t
  misc_feature (196)..(196): n is a, c, g, or t
  misc_feature (203)..(203): n is a, c, g, or t
  misc_feature (218)..(218): n is a, c, g, or t
  misc_feature (228)..(228): n is a, c, g, or t
  misc_feature (235)..(235): n is a, c, g, or t
  misc_feature (256)..(256): n is a, c, g, or t
  misc_feature (258)..(258): n is a, c, g, or t
  misc_feature (266)..(267): n is a, c, g, or t
  misc_feature (283)..(283): n is a, c, g, or t
  misc_feature (287)..(287): n is a, c, g, or t
  misc_feature (289)..(289): n is a, c, g, or t
  misc_feature (300)..(301): n is a, c, g, or t
  misc_feature (307)..(308): n is a, c, g, or t
  misc_feature (324)..(324): n is a, c, g, or t
  misc_feature (328)..(328): n is a, c, g, or t
  misc_feature (338)..(339): n is a, c, g, or t
  misc_feature (341)..(341): n is a, c, g, or t
  misc_feature (343)..(343): n is a, c, g, or t
  misc_feature (349)..(349): n is a, c, g, or t
  misc_feature (351)..(351): n is a, c, g, or t
  misc_feature (353)..(354): n is a, c, g, or t
  misc_feature (357)..(358): n is a, c, g, or t
  misc_feature (362)..(362): n is a, c, g, or t
  misc_feature (365)..(365): n is a, c, g, or t
  misc_feature (375)..(375): n is a, c, g, or t
  misc_feature (385)..(385): n is a, c, g, or t
  misc_feature (391)..(391): n is a, c, g, or t
  misc_feature (413)..(413): n is a, c, g, or t
  misc_feature (415)..(416): n is a, c, g, or t
  misc_feature (421)..(422): n is a, c, g, or t
  misc_feature (437)..(437): n is a, c, g, or t
  misc_feature (440)..(440): n is a, c, g, or t
  misc_feature (462)..(462): n is a, c, g, or t
  misc_feature (465)..(465): n is a, c, g, or t
  misc_feature (474)..(474): n is a, c, g, or t
  misc_feature (507)..(507): n is a, c, g, or t
  misc_feature (514)..(514): n is a, c, g, or t
  misc_feature (520)..(520): n is a, c, g, or t
  misc_feature (545)..(545): n is a, c, g, or t
  misc_feature (559)..(559): n is a, c, g, or t
  misc_feature (642)..(642): n is a, c, g, or t
  misc_feature (736)..(737): n is a, c, g, or t
  misc_feature (741)..(741): n is a, c, g, or t
  misc_feature (743)..(743): n is a, c, g, or t
  misc_feature (748)..(748): n is a, c, g, or t
  misc_feature (767)..(768): n is a, c, g, or t
  misc_feature (881)..(881): n is a, c, g, or t
  misc_feature (919)..(919): n is a, c, g, or t
gcagcagagtatcttacttttatataattntataaaaacttatttttatattgttacattgtgaatcacattacaatttantctccttttcaatagaaagattttntaaggacatgatttgnngccgtccacatttatcagatgccttttcattaattttttcnatttttgcaattnttgatccaaactgcatggnccgtttnggcagaagagcagangctgtaagancaagttncacagctgcaaggtgtaaaantnattttttnncaattcctcggggtanagtnangtttgcttttnnccaaannggcagagaatttaganaggngacaacattnngntncagggnangnnatnntgcntcntttccatgancaccaataantctgtnatcacgaccaagacttccagangnnatgcnncccagtcccatcatnatntccttattcaatccttccagcncangggactganagcggagacgatgacgagaataacctggaagtngctcatntgcacnaattccagtgagaactacctttgcnttgctctgataggntttcactccttcctgggccactaaccaaccaattcctctagaagcaaaccagactgcacagccaatgctatcatccaaaactntatccaatggccgaattaagtgacatattcgagttcttcttaatttctgcagttcttccatagaaacattaatttcaacaaaattccaaattgnnaaangnataanaacttgtaattcctttaannccgcccttcctgtgattcgatctggtacactgacatgtttattaggactgtcagcagcagcagcagcaacatctttagagaattcttctgaaggtatttcacatttatttttntgtttattcccttctctgttaaaggtagttggcatggncttttcttcagctatgaaagctacattaagaagatcaattggttatctaaag

SEQ ID NO: 595831 - DNA, 351 bp, Homo sapiens
aggtttactacgatgagacagcccaggagattgtggacgagtttgccatgcgctacggcgtcgagtccatctaccaagccatgacccactttgcctgcctcccctccaagtatatgtgcccagggtgctgcgtcatgagcaccctgctcgccaacatcaatgcctactacgcacacaccaccgcctccaccaacgtgtctgcctccgaccgcttcgccgcctccaactttgggaaagagcgcttcgtgaaactcctggaccagctgcataactccctgcggattgacctctccatgtaccggaaacttcccagccagcagcccggagagactccagaaccccatgatggct

SEQ ID NO: 595832 - DNA, 299 bp, Homo sapiens
  misc_feature (119)..(119): n is a, c, g, or t
  misc_feature (142)..(142): n is a, c, g, or t
gttctttatgtgttctggataacccttatcagatgtatgatttcacaaatattttctttcattctgggagctttactctgttgatagtgtcctttggtgtactaaagtctttaattttnatgaagtccagtttatctatttngttcctgtggttttggtgtcatatttaagaaaccattgggctaggcatggtggctcatgcctctaatcccagcactttgggaggccgaggcaggtggatcacctgaggtcaggagtttgagaccagtctggccaacgtggtgaaccctgtctctact

SEQ ID NO: 595833 - DNA, 443 bp, Homo sapiens
gcaacagaggggggccccgtgtttgaacatttgcatttgggaattggtgttggggcctgtttgaaccccgggagagcccattccagggtgtgtccactcttgtggtttccccattacaaggagttcattcgagcccagggttttgcccaaaaccaggtagtttatttggaggtccccacccatggccaaggtggttgaactcaaaggtcacacatcgggggtcttgattttgcccatgagcccaaatggggccacagtggaatccgcagcagcaaatgagaccctgaggttatggggctgttttgagttggaccctgggcgggggggggagcgggaaaaggccagtgcagccaaaacagcttcatccaccaaggcatccggtgaagaccaacccatcccctcagttgttttttatttttttaataaagtcatgtttcccttca

SEQ ID NO: 595834 - DNA, 1034 bp, Homo sapiens
ggcactctggttcttccgaccggctccgccgtagcgttatctctgctcggatcagccatgagtaaagaggatgatcgccgcgctggtcattgacaatgagctccggtcgtgtgcgaagatggtttcgttggggacgacgtctccccgaaccgtgttccttccatcgtcgggcgccccatacaccaggacgtcatggtgggcgatgggccatgaaagactccttacgtgggcgacgaggcctcagagcaagcagtggaatatccttgactcctgtaagtagcccctagttgagcatgcgtttgtctgttaacctaacatgggactgacgatggcagaagatctggcaccgacaaccttctacgagaatgatgcctgcagcgttggccgccgtgagtgatctaacgcagttgtgtagctgagcgaggggccccctgaaccccttaaggtcaggctggagagaatatgcattcatattatgttagagacttcaagaccccgggccatgtactgtgtgccatccaggccgtgctgtccctctacgtcctctgggcgcaccactggcattgtcatggactctggagacggggtcacccacacaggtgcccatctacgagggctacgccctcccccagccatcctgcgtctggacctggctggccgggactgatcgactacctcatgaagatctcatgagcgaggttaagcttcaccaccacgggcgagcgggaacatcgtgcgcgacattaaggagaagctgtgctaccgtcgccctgattcgagcaggagatggcaccgcgatctcctttctctggaaaaagtagagtgccgatgcaggcatcccaatgaatggcggtcagagtcgaaagctgtcagctcctctgggtggactgcggtccgacccttagcccctaggtgctgggccgcacctgtgcccagggttggcacctcggttgcgaaaaggaccgcccgaagaaacccaagaagggggtgctcccgtgtggagggccctacatggtatctccacttctgtttca

SEQ ID NO: 595835 - DNA, 344 bp, Homo sapiens
gtttgttccctgatgatatctactgacaatactggttgataggactggtccagtagtgccttcgtggactgggttcacccccaggtctgcggctgttgtcacactcttctagcccctgtgtgaaatccaaagcatgtgcaggagcaaatggcaccgagatattccttctgccactgttctcctacgtggtatgtcttcccatcatcataacacgttgcctcatgagggtcacacttgaattctccttttccgttcccaagacatgtgcagctcatcatctggccattttctccctgacggtcccacttctctccaatcttgtagttcacaccattgtcatggca

SEQ ID NO: 595836 - DNA, 439 bp, Homo sapiens
ggggctataagaggaagacacggcattaagggctgaggatttttggtccgaacgcttctgctcctgactaactgctgttcgatctagactaggaacaagaatggccatgaagcagtgtacacagcagtcatggcttttaaggaaacctgaaaaacacccgtgaagccggacatggcaattcaacggattcggatcaccctaacaagcagcaactgtcaaatacttggaaaaggtgagtgctgacttgataagaggcgaatacgaaaagaatctcatagtgaaaggaccagttctgcctaccaagacttagagaatcactacacgactccttgaggtgaatgatctacgacttgggatcgctaccagagtagaatttacaagcgactcattgacttgcacagttcttatgagatcgttaagcacattagttacatcgttg

SEQ ID NO: 595837 - DNA, 131 bp, Homo sapiens
  misc_feature (33)..(33): n is a, c, g, or t
  misc_feature (58)..(58): n is a, c, g, or t
  misc_feature (130)..(130): n is a, c, g, or t
tgtagtgtagctacagttgtgcgtttgagaaanggcttagcactccaaaggacggagnggaacctggacatggtcccgggcatctgaatgatctgtaggggagggagttcaaataaagctttattttgtnc

SEQ ID NO: 595838 - DNA, 410 bp, Homo sapiens
  misc_feature (7)..(7): n is a, c, g, or t
  misc_feature (145)..(145): n is a, c, g, or t
  misc_feature (195)..(195): n is a, c, g, or t
aaggttnctgtataatacaatgtatccttccagagcttcaacggctctaagacctcaatttgaggcagacttcagttgagacccatatctgaagccagacgccagttgagatcatggcctttcttccctctaccacagttagctncccttaaccccatcgccttataaggcacttcttgtaacaattcacaattnccgatatgtatctgagaaacccaaactaacatcacagtaatagagacagtttaagatacattaatgaattttgaggaaaataactttatataggatgaagattagagagtaaagagtcatggatgaaactatgttgctgcttcagctgcaggatactgagaagatggaacagagagaagataagcctgctttgccagctgaagaggcctcaccac

SEQ ID NO: 595839 - DNA, 870 bp, Homo sapiens
  misc_feature (7)..(7): n is a, c, g, or t
  misc_feature (11)..(11): n is a, c, g, or t
  misc_feature (321)..(321): n is a, c, g, or t
  misc_feature (324)..(324): n is a, c, g, or t
  misc_feature (336)..(337): n is a, c, g, or t
  misc_feature (347)..(347): n is a, c, g, or t
  misc_feature (388)..(388): n is a, c, g, or t
  misc_feature (398)..(398): n is a, c, g, or t
  misc_feature (400)..(400): n is a, c, g, or t
  misc_feature (413)..(413): n is a, c, g, or t
  misc_feature (424)..(424): n is a, c, g, or t
  misc_feature (430)..(431): n is a, c, g, or t
  misc_feature (434)..(434): n is a, c, g, or t
  misc_feature (441)..(441): n is a, c, g, or t
agcgggngcgnctcttagtcgcgggccgactggtgtttatccgtcactcgccgaggttccttgggtcatggtgccagcctgactgagaagaggacgctcccgggagacgaatgaggaaccacctcctcctactgttcaagtacaggggcctggtccgcaaagggaagaaaagcaaaagacgaaaatggctagaattcgtgatccgcccagccactgccgccgactgcagtgacatactgcgggtgatcaaggagctggctagaatatggatactatggaagaacaagtaatcttaactgaaaaagatctgctagaagaggnttntggagagcaccnncttttaccantgctggttgcagaagtgccgaaagagcaaggacacagcatntgttggtttngncatgtactatttnacctatgaccngtgatnngcnagttatngtatcttgaggattcttcgtgatgagtgatatagaggctgggcataggatcagaaatttgaagaatctaagccaggtggcaatgaaggtgtcggtgcagcacagaatgaatttcttggatagcagaatggattgacattccatcaagtttctataaaagacggggtggttcttgatcttgtccagtgaagaggttggcgactgtccaagatcgacaaggactattgtaaaaatggaacagaggtgtgaggcgtgttggttggtgatgaaactccatttaatttagaaaaatccacatttctggttctatgtgggtgtgtgaaaagatgggccctttcacgttacacagggtgtgtgtgaaagagtgtaaagggaccacacaggggagaatcttctatttgacaaaaggggggtattagaaaaacggttt

SEQ ID NO: 595840 - DNA, 998 bp, Homo sapiens
  misc_feature (7)..(7): n is a, c, g, or t
  misc_feature (11)..(11): n is a, c, g, or t
  misc_feature (321)..(321): n is a, c, g, or t
  misc_feature (324)..(324): n is a, c, g, or t
  misc_feature (336)..(337): n is a, c, g, or t
  misc_feature (347)..(347): n is a, c, g, or t
  misc_feature (516)..(516): n is a, c, g, or t
  misc_feature (526)..(526): n is a, c, g, or t
  misc_feature (528)..(528): n is a, c, g, or t
  misc_feature (541)..(541): n is a, c, g, or t
  misc_feature (552)..(552): n is a, c, g, or t
  misc_feature (558)..(559): n is a, c, g, or t
  misc_feature (562)..(562): n is a, c, g, or t
  misc_feature (569)..(569): n is a, c, g, or t
agcgggngcgnctcttagtcgcgggccgactggtgtttatccgtcactcgccgaggttccttgggtcatggtgccagcctgactgagaagaggacgctcccgggagacgaatgaggaaccacctcctcctactgttcaagtacaggggcctggtccgcaaagggaagaaaagcaaaagacgaaaatggctagaattcgtgatccgcccagccactgccgccgactgcagtgacatactgcgggtgatcaaggagctggctagaatatggatactatggaagaacaagtaatcttaactgaaaaagatctgctagaagaggnttntggagagcaccnncttttaccantgctggttgcagaagtgccgaaagagcagctggactccggaaggttacagtctctagctgcgccatgtacatggccttccgtgtacaggtggatgggcggggaggtaagctaagagagatcctttacagcaatgaagtagatgatcatgataaatgaggacacagcatntgttggtttngncatgtactatttnacctatgaccngtgatnngcnagttatngtatcttgaggattcttcgtgatgagtgatatagaggctgggcataggatcagaaatttgaagaatctaagccaggtggcaatgaaggtgtcggtgcagcacagaatgaatttcttggatagcagaatggattgacattccatcaagtttctataaaagacggggtggttcttgatcttgtccagtgaagaggttggcgactgtccaagatcgacaaggactattgtaaaaatggaacagaggtgtgaggcgtgttggttggtgatgaaactccatttaatttagaaaaatccacatttctggttctatgtgggtgtgtgaaaagatgggccctttcacgttacacagggtgtgtgtgaaagagtgtaaagggaccacacaggggagaatcttctatttgacaaaaggggggtattagaaaaacggttt

SEQ ID NO: 595841 - DNA, 336 bp, Homo sapiens
ctcaacattgttacttttttattgacaaacattcgctagagcctttcatctggaatggatcataaaccatatagcgcaatctttgtgcttcctttttgcagcaaaaccggactaatgtctctcttctccacagacattgaacgtccaaagtgatttacaaatcccgcacaacttaaaatgtccacaggacaaagtgcatctgccctgtggcatcgtcatgattgccatgaatactcaacactggaattgaactgctgaggttcccatcttgctcgttcacccatcgaaacttactcaaccccaagtcgactgactcaccactgcagaatctcaaac

SEQ ID NO: 595842 - DNA, 1007 bp, Homo sapiens
  misc_feature (635)..(635): n is a, c, g, or t
gacatggaacactatacctattattcggcgcatgagctggagtcctaggcacagctctaagcctccttgattcgagccgagctgggccagccaggcaaccttctaggtaacgaccacatctacaacgttatcgtgcacagcccatgcatttgtaataatcttcgttcatagctaatacccatcataatcggaggctgtggcaactgactagttcccctaaataatcggtgcccccgtatgatgtgcgtttcccacgcaataaacatacgataagcttcgtgactcgttacctccctctctcctactcctgctcgcatctgctatagtggaggccggagcaggaacaggttgaacagtctatcctcacttagcagggaactattcccatcctggagcctccgtagacctaaccatcttctccttacacgctatgcaggtgtctcctctcatcttatggggccatcgaatgtatcatctacaacagattatcaatataaagacctccactgccataactcataataccaaagcccctcttcgtcgtgatccgtcctaatgcacagcatggtcctacttctcctatctctcccagtcgttagtctgctggcatcactatagctactaacagacccgtnctctaaaccacttcttcgaacgcgcggaggaggagactccattctatacaacatctattctgattttaacggtcaccctggaagttatatgtattatcctatcagggttcgagaattatctccgattgtaactaggatccggaaaaaggaccattgggtacataggctggtctgagcatgaatcaagggtcccaggttatcggggagccccactattcagtgataaacgtgaccccgagaatttactccaggcaaaatgcgtcccggggagataaggatgccaccggaaaaaagtgtgggtggccgaaacatacaggcgggggtaaacaccaccgcggagtcacaagcagggggtcccacagatccacacac

SEQ ID NO: 595843 - DNA, 166 bp, Homo sapiens
gggagtgcgagagaaggaagaagaaggtgatggtgaggaagaggatggagatgaagatgaggaaggaagcactacacgaaatcccagccaggatgtgactgtgccctgcccagttccctcaactccacctagcccttctctctccactcccccttctctctccact

SEQ ID NO: 595844 - DNA, 212 bp, Homo sapiens
  misc_feature (179)..(179): n is a, c, g, or t
gcagatatagagctgggaggatggaatttggagccactgaggggcatccttgccactaagaaaggggagcccacctcggggtgaggctgggagaagccagccagaagaaagcagagttgagagatggcaagagaaaaattgctaatgtcatgagtcaagttcctggatccaaccatacntgaagctgtaatattgcacttgtcaatgagcct

SEQ ID NO: 595845 - DNA, 311 bp, Homo sapiens
tagaagcacattaaccatttctatagcatgatttcttcaagtaaaggcaaaagatataaattttaaccaaggcttaaagtactcaagtcaattataaaatttatatcttttgccttttacttgagtactttaagccttgtttaaaacatttcttacttaacttttgcaaattaaacccattgtagcttacctgtaatatacatagtagtttacctttaaaagttgtaaaaatattgctttaaccaacactgtaaatatttcagataaacattatattcttgtatataaactttacatcctgttttacctaa

SEQ ID NO: 595846 - DNA, 478 bp, Homo sapiens
  misc_feature (272)..(272): n is a, c, g, or t
tctaagaccttttgctggtcagagggtcccatcgctacagccttactgcgccagacgtgctcagatatgtggggaaacgggcagcccccacaaagtcacatggggcaggcctgtgaagctgtaggatgtgggacctacaacatgggtttggtaggtcctcccacatagtgatgaaactcagccccagtgagcagcagctctgcttgtcggatgctcagccagcaagtcagaaagtcctgtgtgatcacagaatggcacttctgggctccggntgccaagagccatttttgcaccgtgtggagggtcagtggggatggcctcaccagatcagccacattctctagggtcaggtattttccgtattgaggagagctgggatctgacacagcctgcaccagctccgagagtctttccacattctgctgtctcagggcaaaaggtgaagactcagctcttcctcagggtccgcaagcaaaaa

SEQ ID NO: 595847 - DNA, 214 bp, Homo sapiens
cgaatcatgaaaggaaggaagaaaagatgaaggaagaaaacaagggaggaagtaaactcatgttattctttgaagagtatactttatcagctttaatgaaaattgtaaattaagagtgatcttgacaaaattttactcactggttatgcttagttaaaattaagcattgagtaaaggcagttcctaaaatcacagccaaaatcctttcatcgat

SEQ ID NO: 595848 - DNA, 362 bp, Homo sapiens
  misc_feature (301)..(301): n is a, c, g, or t
  misc_feature (313)..(313): n is a, c, g, or t
  misc_feature (317)..(317): n is a, c, g, or t
  misc_feature (336)..(336): n is a, c, g, or t
taaaaaaaatgaagaaagacttgctcaaaagtagaatcagagtatacatatttttaaaaattagttttgcccacataaccataaatatttcttcattttgtaagctctttgaaaacatcaaaacagaggaatgtttggatcttgatgtgattaggaattgaataaacgatgtttctcctgaaatgttagagcgataataatgaaactgttgggtcttctgccttcacataaagggacttcaaaaatcttctaaagccccaaaatgtatcttcattaaacatggaaactgagtttactgttncagtttcagttncccnttctgggggtggggggttnggggcaggggggggaccgggttgggg

SEQ ID NO: 595849 - DNA, 309 bp, Homo sapiens
gtgagtgctgggattacaggcatgtgccacatgcccagctaattgtgtatttgtttttatggtagagacagagtttctccatgttggtcagtgctggtctcgaactcctgacctgaggtgatccatctgcctcgacctcccaatgtgctgggattataggtgtgatccactatgcccagcttttattttttttctcttttagaaacagggtcatcgaatctgtcacccaggcttgaattgcaggggcaccatctcgtgatcacagaaacctctgccaccgtgggtccaagcaatatcacgtcgcctcag

SEQ ID NO: 595850 - DNA, 675 bp, Homo sapiens
  misc_feature (497)..(497): n is a, c, g, or t
ggcaaaaaagaaaaaaaaaaaagagaaagaaagaggaggagacagtgattgcagcctctcccggcgcaggtggcagagccttgcggctttggagagaggtggagccttggtgaggttgggaggactgcctaactgcgatctttttctccattcttcctcctgggaacttctccgccctgaaagggtagcgtgagcttcatgccttcggccggccgtgttatactcgttagacccaattcaccatgaatcctttgaaagactagtggagagtgagaagggggtttcaaagtcactggagtaaaggaattctccaagcaccacctcatgattaattcttggaaaagcctgtttgcgcggcccttagaatcattttgacttcttgtctaatggtgaagtttttctctgtaatccttctactctgttttctaaaaccagaactaaaaacctaaaaaattgtaaaacttcatggtgtaattaaaaccccttcaccatttttnttatgtcccttttttgagtatactaattttaaatacttactatctcttatatatattgatttttatcacagaattctcagggtgaaattaaaccaattataggactttttcttgggatgatttctagtcttaaggtatggggacattataaacttgagtacatatgtagtacaaagtt

SEQ ID NO: 595851 - DNA, 1235 bp, Homo sapiens
agcgggcgccgcagcccgctcggcccgagggcccgcctaatccgcgccgcccgtgcccgatcctcctcggaccgcgcccgtgatcgcgggggctcgtcggcgctggtgtactcggcggccaccggtgatcggggctgatgctggtctagttcccgtccccctgtgccgccgacgccgatttccggtacgagctgccggcttggccgtatgctgccgcgtctggcccccgggtccccgccgctgtgtgcggcgcgggcgcagcgggtcaggggggtttgcctggggctgcctgctcgcctcggtgcgccttgtgagttccactagtcctctggggccccgtgctgcgcacggaggacgacagttgggtagcgagaacggtaaccttgccccgaagcttgattggccgcgaagacacgcgattcccctggtaccctcattcctttccactgccacgctcctgggcgtccctgtgttgagaccccacagaacaattacgtcaccgccacggtttttcacacacacacgggcagtaacgggccaaagggactttgcaccacgcaaccacaagttaaccattccggaatgatgggttgcatttcactaaaggcacccattgacaggcttgtggtaccacggcaccaacgttgcttccacattccccacggtttcagaacacaaggattcccccataaaacggtttacaacaccatttttggtgcgcggacacaacacttcattgggcgcgtttcccacagtgttgggcaaatgtttcttcattggaaacagcgggttttatacacaacaggaaactgaaacaacgcttttgaagcgattaacagttggttccacattccttttgcgcgcaaacggcggtatcccatttggaaagagagacacccaaagtggagccaaaaggtgaaacagaaacggaaccgtatgcacgcgggcaacaaaggttggtgaaagcaaaaaagcgaaaaagattgcatattaccaaatgtcttcaaagtggaagtgtaatttcttccccaatgtgtttcatttgcaattgtggaaaaggtgtgttttgagaccgcccacgactggtggcaggaaaaagctttaaatggtccgcgagggagaattgtgggtgaaacgagttggacatttatggtggacaagggaagagattcgagaaaagagatttcagcatacaattgccgcttggaagatatatttaagtggaagtgagaaga

SEQ ID NO: 595852 - DNA, 120 bp, Homo sapiens
tcagctcggtccatatcgatagaaattgaaactggcgcaatagatatagtacgcaagggaaagatgaaaaattataaccaagcattatatagcaaggactaacccctataccaagctgca

SEQ ID NO: 595853 - DNA, 265 bp, Homo sapiens
  misc_feature (14)..(14): n is a, c, g, or t
  misc_feature (39)..(39): n is a, c, g, or t
cccccccccccccncccccacaccacaccgcccacgccnccgaaaaacaaacagaaaataaatcaagagttgaaaaaggaagttatggatggtttaaaaatatgaaaaagaaagtaggagagaaagatattgtgaaagaaaaaatagtaggatatgggataaataatgtatttaaaaataaaaatgttttagtaatagtttatttagaaataagaaaatggaacgatataaaaaaaagataatagcattagagtgcttgggaata

SEQ ID NO: 595854 - DNA, 1158 bp, Homo sapiens
agatggtgcgctgtcacgttcccgactccacgtctcctcgccacctgtctcggctgatcagacgtgcaagatctggaggacgtccaacttctccctgatgacggagctgagcatcaagagcggtaaccccggggagtcctcccgcggctggatgtggggctgcgccttctcgggggactcccagtacatcgtcactgcttcctcgggaccaaacttgggcccggttctggtcgtgtggagagctgggcagagatcaggagaaagtatgggcgagcaccagaacggctggggtctggctgggccttcaatgacagtgtgctgggctagcctgtgacccctcgggcactgcctggtgccggtggtggcagcttggcgggacccatgcagacccaggtcacgagcagaccctcccctgccgggcctgcgccagtttggacctgatgggcccctgtgagcagccttgacctgctgggccaggctgccttgggactctcagccccagttgcttatccagatgtgacagaggctcgaccaatgccaggctgcacactcctgagactgggctagtcttgcacttgcttgggcacagtcggcgaagggcccaatagcttgctcgacggagtcacagaggctggtggacaatcccacaaggataagtggagacacactggaccctccttcccggagatactacagggaccctcggcgaccaaatgagagaaaacacaaccaaccaatgtgccacggctgaacacgcgcctaactaagaccccgtgccacaagcgcgttacacccctgcttccagtgtggccctggcaccaaccaacagacgatgggacacgacccacgctgagcacaaccacagagcactcacacagtgagcggataaaataacgcaccctaccgacccgccccaacacaaccacggcggcgccgctctatcatcacatcctagggtaccattctctactgcgcaacgccgtcttaactcatgctgcaccaagacactatataatacgactgggaggccctagtaatactgtggcagggacacatcaagacacaagctagcgacctcttcttcagtccattattgacccagccatgaagtaccctgccacatatgtcctgcacactaacagatccatagtctagctt

SEQ ID NO: 595855 - DNA, 1038 bp, Homo sapiens
ctcatggcggtccgagcttcgtatcgagaacaactgtgagatcggctgcttagccaagctcaccaacacctactgtctaggtagcgatacggaggctcagagaacttctacagatgtgtatcgagggctgagctctaccgataccatccccgtggtagcacgcgtactatcgccgtgctgccgcatcatacgggcgcatagtgtgtaggggaacaggcacggtctcctggtacccaacaagtaccaccgaccaggagactgcaacacattcgcaacagcctcccagacacagtgcagattacgcgggtggaggagcggctctcagaccttgggacaagagtcaccacctgcaatgactacgtggcctatggtcacaaccagacattggacagggcagacagaagaaatatctggcagatgtgctcaaggtgtgcacagtctatccacacagacagtggccgaaccagcgtgctagtcaggacagctactggtgtcatatcagcactccagggcagggctgggtgcatccccaagacattcaactctgaagcaccaggatgcaagctgtccttcctctattcattcaagatccccccttgtgcgccgatagactggtgaacccagaggacagtgagcgcagcactgcttgcactgtggacatggctgggatcgcactgacctggctggtgtcctatctggttcacccatggcaacaacacccaggcacacgtgcctgtccagtgcgtgcactaactggtcctaccaaagcctgacatgaaagccaaggccatagcacccgatgagccaacaaacaagtcagcaaatcccccccacagaacaggccacacccaagaagacccaccgctccaaagcgctaggccccaaaagaggaaccacgcagggggactatgagacaacaggaggccaaacaccacctacccacaacatcccaccccacaaaccggcaccaagaagagaaatgaaaacggcaagaagcacaagacacgccaccagggcagcagtagaggagaaagacac

SEQ ID NO: 595856 - DNA, 99 bp, Homo sapiens
gccagcaccaaccagacatctatgtacctctgtgccagcagacttgaccgggcctcctcctacgagcagtacttcgggccgggcaccaggctcacggtc

SEQ ID NO: 595857 - DNA, 297 bp, Homo sapiens
atgtcggacctctaccgaacgtggtggatacagtgctaccatgtacacccgtatcacagcacgctcggatgtaatctccctagactggccgtctctttccataccggaggacattgatatggcccttctgactatcaagcctctagtcaattggcactaagtggttccgggtcgagtcgtacgtctcgagctcatcgctgatccttgatcttatatcgaagggaaaagtttagggtaatcgggagctaaggtaggtaaataaacaggcaactcaattgctatgttaacaagcagcag

SEQ ID NO: 595858 - DNA, 183 bp, Homo sapiens
actacaggtaacagtattagagacgggattcatcatgttggacaggatgatcacgaactactgactcagtgatccggcaccacattggcctcccaaagtactggctgggattgcaggagtgagccaccgtgcccagccttgccctgctttctaggagatggagttcactgaatttttctgtat

SEQ ID NO: 595859 - DNA, 702 bp, Homo sapiens
  misc_feature (7)..(7): n is a, c, g, or t
  misc_feature (18)..(18): n is a, c, g, or t
  misc_feature (57)..(57): n is a, c, g, or t
  misc_feature (185)..(185): n is a, c, g, or t
gtcaacnctgccatgtanacggcgaagtgaggaaaattaaatcaaccaaccaagacncttctattccaaaaagggaagccaggcaggcagcagcagccctagatatacccattaggaatcctgattagcgagtattgagaagcttcctacactgggagtgggaaattccttaaatagcctctaantctaatctctgggaggaaccttcttttccattattatttgtggtggctccatcctctggaaagttcttttccattattatttgtggtggctccatcctctggaaagttcttccttatttcttattccctggctgtcacctctgaagtggctgttaagaagtgtgctcttcttgcggatctttggcttcataactcattctgcaagagtaaagacggaaactaatgggtgttttaggtttaaggtctgtcatttgcggactctggggctgtgggagaaaaaataaatcgtttggttcatgcacacaatgtgacagcttggcataagtaaaagacatgaacaaaaggattaatgaagaagtgaaagaaagaaggcgtatacattaggcacaacatcacctaaaaaaaaaaaactggaatgcattaaacttgttcattcaaaaagtgttggctgagtgcctactaagtgtcaagcactgaaccagatgtggaggattcagtggcaacacacggaaaagtt

SEQ ID NO: 595860 - DNA, 3529 bp, Homo sapiens
  misc_feature (301)..(301): n is a, c, g, or t
  misc_feature (307)..(308): n is a, c, g, or t
  misc_feature (329)..(330): n is a, c, g, or t
  misc_feature (333)..(335): n is a, c, g, or t
  misc_feature (337)..(337): n is a, c, g, or t
  misc_feature (343)..(343): n is a, c, g, or t
aagaaaatggcgacaagaagattgtccccaagaagaagaagcccctgaagttggggcccatcaagaagaaggacctgaagaagcttgtgctgtacctgaagaatggggctgactgtccctgccaccagctggacaacctcagccaccacttcctcatcatgggccgcaagtgaagagccagtacttgctgacggccatccacaagtgggacaagaaaaacaaggagttcaaaaacttcatgaagaaaatgaaaaaccatgagtgccccacctttcagtccgtgtttaagtgattctcccantcgcanntggggagggagcctcgggtgnngtnnnancggtgnggacagtgccccgggaacccggtgggtcacacacacgcactgcgcctgtcagtagtggacattgtaatccagtcggcttgttcttgcagcattcccgctcccttccctccatagccacgctccaaaccccagggtagccatggccgggtaaagcaagggccatttagattaggaaggtttttaagatccgcaatgtggagcagcagccactgcacaggaggaggtgacaaaccatttccaacagcaacacagccactaaaacacaaaaagggggattgggcggaaagtgagagccagcagcaaaaactacattttgcaacttgttggtgtggatctattggctgatctatgcctttcaactagaaaattctaatgattggcaagtcacgttgttttcaggtccagagtagtttctttctgtctgctttaaatggaaacagactcataccacacttacaattaaggtcaagcccagaaagtgataagtgcagggaggaaaagtgcaagtccattatgtaatagtgacagcaaagggaccaggggagaggcattgccttctctgcccacagtctttccgtgtgattgtctttgaatctgaatcagccagtctcagatgccccaaagtttcggttcctatgagcccggggcatgatctgatccccaagacatgtggaggggcagcctgtgcctgcctttgtgtcagaaaaaggaaaccacagtgagcctgagagagacggcgattttcgggctgagaaggcagtagttttcaaaacacatagttaaaaaagaaacaaatgaaaaaaattttagaacagtccagcaaattgctagtcagggtgaattgtgaaattgggtgaagagcttaggattctaatctcatgttttttccttttcacatttttaaaagaacaatgacaaacacccacttatttttcaaggttttaaaacagtctacattgagcatttgaaaggtgtgctagaacaaggtctcctgatccgtccgaggctgcttcccagaggagcagctctccccaggcatttgccaagggaggcggatttccctggtagtgtagctgtgtggctttccttcctgaagagtccgtggttgccctagaacctaacaccccctagcaaaactcacagagctttccgtttttttctttcctgtaaagaaacatttcctttgaacttgattgcctatggatcaaagaaattcagaacagcctgcctgtccccccgcactttttacatatatttgtttcatttctgcagatggaaagttgacatgggtggggtgtccccatccagcgagagagtttcaaaagcaaaacatctctgcagtttttcccaagtaccctgagatacttcccaaagcccttatgtttaatcagcgatgtatataagccagttcacttagacaactttacccttcttgtccaatgtacaggaagtagttctaaaaaaaatgcatattaatttcttcccccaaagccggattcttaattctctgcaacactttgaggacatttatgattgtccctctgggccaatgcttatacccagtgaggatgctgcagtgaggctgtaaagtggccccctgcggccctagcctgacccggaggaaaggatggtagattctgttaactcttgaagactccagtatgaaaatcagcatgcccgcctagttacctaccggagagttatcctgataaattaacctctcacagttagtgatcctgtccttttaacaccttttttgtggggttctctctgacctttcatcgtaaagtgctggggaccttaagtgatttgcctgtaattttggatgattaaaaaatgtgtatatatattagctaattagaaatattctacttctctgttgtcaaactgaaattcagagcaagttcctgagtgcgtggatctgggtcttagttctggttgattcactcaagagttcagtgctcatacgtatctgctcattttgacaaagtgcctcatgcaaccgggccctctctctgcggcagagtccttagtggaggggtttacctggaacattagtagttaccacagaatacggaagagcaggtgactgtgctgtgcagctctctaaatgggaattctcaggtaggaagcaacagcttcagaaagagctcaaaataaattggaaatgtgaatcgcagctgtgggttttaccaccgtctgtctcagagtcccaggaccttgagtgtcattagttactttattgaaggttttagacccatagcagctttgtctctgtcacatcagcaatttcagaaccaaaagggaggctctctgtaggcacagagctgcactatcacgagcctttgtttttctccacaaagtatctaacaaaaccaatgtgcagactgattggcctggtcattggtctccgagagaggaggtttgcctgtgatttcctaattatcgctagggccaaggtgggatttgtaaagctttacaataatcattctggatagagtcctgggaggtccttggcagaactcagttaaatctttgaagaatatttgtagttatcttagaagatagcatgggaggtgaggattccaaaaacattttatttttaaaatatcctgtgtaacacttggctcttggtacctgtgggttagcatcaagttctccccagggtagaattcaatcagagctccagtttgcatttggatgtgtaaattacagtaatcccatttcccaaacctaaaatctgtttttctcatcagactctgagtaactggttgctgtgtcataacttcatagatgcaggaggctcaggtgatctgtttgaggagagcaccctaggcagcctgcagggaataacatactggccgttctgacctgttgccagcagatacacaggacatggatgaaattcccgtttcctctagtttcttcctgtagtactcctcttttagatcctaagtctcttacaaaagctttgaatactgtgaaaatgttttacattccatttcatttgtgttgtttttttaactgcattttaccagatgttttgatgttatcgcttatgttaatagtaattcccgtacgtgttcattttattttcatgctttttcagccatgtatcaatattcacttgactaaaatcactcaattaatcaaaaaaaaaaacacacacaacaaccccacaaacaa

SEQ ID NO: 595861 - DNA, 909 bp, Homo sapiens
tttttgttagtattctgccttgatgatctgtctaatgctgtcagtggagtgttgagagtctcccactattattgtgtggtattttaagtcttttcataggccaagaataacgtgttttattaatctgggccctccagtgttgcatatgtatatatttaggatagttaagtcttcttgttgggttgtaccccctattattatgtaatgccctcctttgtccgtcttaatttttactggtttaaaatctattttatctgatataagaatagtgactcctgttgtttcttgtttgtgtttgtatggtagatcttactctatcactttacttttagcctgtgggtgtcatcacttgtgagatggatctgttgaagacagcagatggttggatattctttttatccagcttgccattatatgactcttaagtggggcatttagccaatttatattaaggattggtattgatatgtgagatttcgatcctatcatcatgtcgttagctagttattatgtagacttgattatatgatccggctttcatagcgcctatgagctgtgtgactaagcatgtttgtggtaactgcctgtcacctccggcttccatgtctagcattccctaaaggactggtaaggctggccctagcttgaggatgaattccctcagtagtttggcttgtctgagcaaggactcttatctcctccttccctttatcagcctcaaggttgtcgccacgactatgacgattctttgggttggcaattgctctgcctctcaccctctccttgccaatcggcccccatgtctggctctctccgcgttcagctccgcggcctgcccaatacccctgtggggttcctccttccttcttgcactggcaccttctctctactgcccctcccgctcttccc

SEQ ID NO: 595862 - DNA, 161 bp, Homo sapiens
aaaaaaaggaattcttttgtgtatatataaaaacctgcatgatatactgtagtcaatgttcggttcctccaaaggtcttgctgctgtcaggtgttatgccctccatccctcataactgtatgaaacccctttcatatgtaaataaacgtggggcctttgga

SEQ ID NO: 595863 - DNA, 811 bp, Homo sapiens
  misc_feature (614)..(614): n is a, c, g, or t
ggtgcagaggaggcaaaaggataggaatgaaccagtgaacaaaaaaatgaaaaactttggaacccctggaaaaacccccgcaagtaccagattgaaccaggggagcccccaggcgggggaaaccggccaggggcatttttaatcttttaagagactccgtgtccagaggggaaacgactggtggcacaggaacacaagttaaaaaaattacctggtaaaaggttagagaactgatctattaagaagaaattcaaggctgggaagggacagatgaaataattgggactttaagagaaacaactctaatataatgcgaagaaaacacaatttgaaagaaaccaaatattcgggaaggtagcgaatccaaataccaaagtgggggaagccatgccagaaaaaccaatcctgaataaaaaaggaaaggagtggagacgggaaaacaggggaaattggaaaaaaggtgttaatgggttaaaagaagggaaagggttttcaagagggaaaaataaggtaagggttgatgttccaaaaaaaataacccctaaatttaaaggaatcaacccccaaaaaaaaaggcccaagccctgggttaacaccaaaaggggtattaaatnttttggggggggaaaaaagggggtctggttccaaacaaaataacttcaaaaaggccccaaaggtgagggggaattctttaaaatcttttaaagagggacacccttcgggcagggaggggtgctgtggggtattaacaagggatgggtaactcttggggtcacaagcctcccgccacccgggggataccatcccggcg

SEQ ID NO: 595864 - DNA, 108 bp, Homo sapiens
ttgtggcgagatactgccttagccttggcttcccactgtcctttccagctttgcctccagccatgttctcggcgccgactccgcctccgctcggccgcgcgcccacta

SEQ ID NO: 595865 - DNA, 3491 bp, Homo sapiens
  misc_feature (301)..(301): n is a, c, g, or t
  misc_feature (307)..(308): n is a, c, g, or t
  misc_feature (329)..(330): n is a, c, g, or t
  misc_feature (333)..(335): n is a, c, g, or t
  misc_feature (337)..(337): n is a, c, g, or t
  misc_feature (343)..(343): n is a, c, g, or t
aagaaaatggcgacaagaagattgtccccaagaagaagaagcccctgaagttggggcccatcaagaagaaggacctgaagaagcttgtgctgtacctgaagaatggggctgactgtccctgccaccagctggacaacctcagccaccacttcctcatcatgggccgcaagtgaagagccagtacttgctgacggccatccacaagtgggacaagaaaaacaaggagttcaaaaacttcatgaagaaaatgaaaaaccatgagtgccccacctttcagtccgtgtttaagtgattctcccantcgcanntggggagggagcctcgggtgnngtnnnancggtgnggacagtgccccgggaacccggtgggtcacacacacgcactgcgcctgtcagtagtggacattgtaatccagtcggcttgttcttgcagcattcccgctcccttccctccatagccacgctccaaaccccagggtagccatggccgggtaaagcaagggccatttagattaggaaggtttttaagatccgcaatgtggagcagcagccactgcacaggaggaggtgacaaaccatttccaacagcaacacagccactaaaacacaaaaagggggattgggcggaaagtgagagccagcagcaaaaactacattttgcaacttgttggtgtggatctattggctgatctatgcctttcaactagaaaattctaatgattggcaagtcacgttgttttcaggtccagagtagtttctttctgtctgctttaaatggaaacagactcataccacacttacaattaaggtcaagcccagaaagtgataagtgcagggaggaaaagtgcaagtccattatgtaatagtgacagcaaagggaccaggggagaggcattgccttctctgcccacagtctttccgtgtgattgtctttgaatctgaatcagccagtctcagatgccccaaagtttcggttcctatgagcccggggcatgatctgatccccaagacatgtggaggggcagcctgtgcctgcctttgtgtcagaaaaaggaaaccacagtgagcctgagagagacggcgattttcgggctgagaaggcagtagttttcaaaacacatagttaaaaaagaaacaaatgaaaaaaattttagaacagtccagcaaattgctagtcagggtgaattgtgaaattgggtgaagagcttaggattctaatctcatgttttttccttttcacatttttaaaagaacaatgacaaacacccacttatttttcaaggttttaaaacagtctacattgagcatttgaaaggtgtgctagaacaaggtctcctgatccgtccgaggctgcttcccagaggagcagctctccccaggcatttgccaagggaggcggatttccctggtagtgtagctgtgtggctttccttcctgaagagtccgtggttgccctagaacctaacaccccctagcaaaactcacagagctttccgtttttttctttcctgtaaagaaacatttcctttgaacttgattgcctatggatcaaagaaattcagaacagcctgcctgtccccccgcactttttacatatatttgtttcatttctgcagatggaaagttgacatgggtggggtgtccccatccagcgagagagtttcaaaagcaaaacatctctgcagtttttcccaagtaccctgagatacttcccaaagcccttatgtttaatcagcgatgtatataagccagttcacttagacaactttacccttcttgtccaatgtacaggaagtagttctaaaaaaaatgcatattaatttcttcccccaaagccggattcttaattctctgcaacactttgaggacatttatgattgtccctctgggccaatgcttatacccagtgaggatgctgcagtgaggctgtaaagtggccccctgcggccctagcctgacccggaggaaaggatggtagattctgttaactcttgaagactccagtatgaaaatcagcatgcccgcctagttacctaccggagagttatcctgataaattaacctctcacagttagtgatcctgtccttttaacaccttttttgtggggttctctctgacctttcatcgtaaagtgctggggaccttaagtgatttgcctgtaattttggatgattaaaaaatgtgtatatatattagctaattagaaatattctacttctctgttgtcaaactgaaattcagagcaagttcctgagtgcgtggatctgggtcttagttctggttgattcactcaagagttcagtgctcatacgtatctgctcattttgacaaagtgcctcatgcaaccgggccctctctctgcggcagagtccttagtggaggggtttacctggaacattagtagttaccacagaatacggaagagcaggtgactgtgctgtgcagctctctaaatgggaattctcaggtaggaagcaacagcttcagaaagagctcaaaataaattggaaatgtgaatcgcagctgtgggttttaccaccgtctgtctcagagtcccaggaccttgagtgtcattagttactttattgaaggttttagacccatagcagctttgtctctgtcacatcagcaatttcagaaccaaaagggaggctctctgtaggcacagagctgcactatcacgagcctttgtttttctccacaaagtatctaacaaaaccaatgtgcagactgattggcctggtcattggtctccgagagaggaggtttgcctgtgatttcctaattatcgctagggccaaggtgggatttgtaaagctttacaataatcattctggatagagtcctgggaggtccttggcagaactcagttaaatctttgaagaatatttgtagttatcttagaagatagcatgggaggtgaggattccaaaaacattttatttttaaaatatcctgtgtaacacttggctcttggtacctgtgggttagcatcaagttctccccagggtagaattcaatcagagctccagtttgcatttggatgtgtaaattacagtaatcccatttcccaaacctaaaatctgtttttctcatcagactctgagtaactggttgctgtgtcataacttcatagatgcaggaggctcaggtgatctgtttgaggagagcaccctaggcagcctgcagggaataacatactggccgttctgacctgttgccagcagatacacaggacatggatgaaattcccgtttcctctagtttcttcctgtagtactcctcttttagatcctaagtctcttacaaaagctttgaatactgtgaaaatgttttacattccatttcatttgtgttgtttttttaactgcattttaccagatgttttgatgttatcgcttatgttaatagtaattcccgtacgtgttcattttattttcatgctttttcagccatgtatcaatattcacttgactaaaatcactcaatta

SEQ ID NO: 595866 - DNA, 2300 bp, Homo sapiens
  misc_feature (23)..(24): n is a, c, g, or t
ccgggtggtacgaggcgccgtannttgatcaaagagccacgggatctctcacggtttaaaacagtctacattgagcatttgaaaggtgtgctagaacaaggtctcctgatccgtccgaggctgcttcccagaggagcagctctccccaggcatttgccaagggaggcggatttccctggtagtgtagctgtgtggctttccttcctgaagagtccgtggttgccctagaacctaacaccccctagcaaaactcacagagctttccgtttttttctttcctgtaaagaaacatttcctttgaacttgattgcctatggatcaaagaaattcagaacagcctgcctgtccccccgcactttttacatatatttgtttcatttctgcagatggaaagttgacatgggtggggtgtccccatccagcgagagagtttcaaaagcaaaacatctctgcagtttttcccaagtaccctgagatacttcccaaagcccttatgtttaatcagcgatgtatataagccagttcacttagacaactttacccttcttgtccaatgtacaggaagtagttctaaaaaaaatgcatattaatttcttcccccaaagccggattcttaattctctgcaacactttgaggacatttatgattgtccctctgggccaatgcttatacccagtgaggatgctgcagtgaggctgtaaagtggccccctgcggccctagcctgacccggaggaaaggatggtagattctgttaactcttgaagactccagtatgaaaatcagcatgcccgcctagttacctaccggagagttatcctgataaattaacctctcacagttagtgatcctgtccttttaacaccttttttgtggggttctctctgacctttcatcgtaaagtgctggggaccttaagtgatttgcctgtaattttggatgattaaaaaatgtgtatatatattagctaattagaaatattctacttctctgttgtcaaactgaaattcagagcaagttcctgagtgcgtggatctgggtcttagttctggttgattcactcaagagttcagtgctcatacgtatctgctcattttgacaaagtgcctcatgcaaccgggccctctctctgcggcagagtccttagtggaggggtttacctggaacattagtagttaccacagaatacggaagagcaggtgactgtgctgtgcagctctctaaatgggaattctcaggtaggaagcaacagcttcagaaagagctcaaaataaattggaaatgtgaatcgcagctgtgggttttaccaccgtctgtctcagagtcccaggaccttgagtgtcattagttactttattgaaggttttagacccatagcagctttgtctctgtcacatcagcaatttcagaaccaaaagggaggctctctgtaggcacagagctgcactatcacgagcctttgtttttctccacaaagtatctaacaaaaccaatgtgcagactgattggcctggtcattggtctccgagagaggaggtttgcctgtgatttcctaattatcgctagggccaaggtgggatttgtaaagctttacaataatcattctggatagagtcctgggaggtccttggcagaactcagttaaatctttgaagaatatttgtagttatcttagaagatagcatgggaggtgaggattccaaaaacattttatttttaaaatatcctgtgtaacacttggctcttggtacctgtgggttagcatcaagttctccccagggtagaattcaatcagagctccagtttgcatttggatgtgtaaattacagtaatcccatttcccaaacctaaaatctgtttttctcatcagactctgagtaactggttgctgtgtcataacttcatagatgcaggaggctcaggtgatctgtttgaggagagcaccctaggcagcctgcagggaataacatactggccgttctgacctgttgccagcagatacacaggacatggatgaaattcccgtttcctctagtttcttcctgtagtactcctcttttagatcctaagtctcttacaaaagctttgaatactgtgaaaatgttttacattccatttcatttgtgttgtttttttaactgcattttaccagatgttttgatgttatcgcttatgttaatagtaattcccgtacgtgttcattttattttcatgctttttcagccatgtatcaatattcacttgactaaaatcactcaattaatcaaaaaaaaaaacacacacaacaaccccacaaacaa

SEQ ID NO: 595867 - DNA, 188 bp, Homo sapiens
tcggtactagaagcatctggactctaggtctcagtcatggagtgtctcacccattggccccatgcagtgacgctacggttccctccccacccgtgatcacgacactggaatcgtgtgctgatgattggcatctgcaatgcgcccatttactagagcctaccctggacatctacaggcaggatgcggct

SEQ ID NO: 595868 - DNA, 1560 bp, Homo sapiens
  misc_feature (301)..(301): n is a, c, g, or t
  misc_feature (307)..(308): n is a, c, g, or t
  misc_feature (329)..(330): n is a, c, g, or t
  misc_feature (333)..(335): n is a, c, g, or t
  misc_feature (337)..(337): n is a, c, g, or t
  misc_feature (343)..(343): n is a, c, g, or t
aagaaaatggcgacaagaagattgtccccaagaagaagaagcccctgaagttggggcccatcaagaagaaggacctgaagaagcttgtgctgtacctgaagaatggggctgactgtccctgccaccagctggacaacctcagccaccacttcctcatcatgggccgcaagtgaagagccagtacttgctgacggccatccacaagtgggacaagaaaaacaaggagttcaaaaacttcatgaagaaaatgaaaaaccatgagtgccccacctttcagtccgtgtttaagtgattctcccantcgcanntggggagggagcctcgggtgnngtnnnancggtgnggacagtgccccgggaacccggtgggtcacacacacgcactgcgcctgtcagtagtggacattgtaatccagtcggcttgttcttgcagcattcccgctcccttccctccatagccacgctccaaaccccagggtagccatggccgggtaaagcaagggccatttagattaggaaggtttttaagatccgcaatgtgaatgtgaatcgcagctgtgggttttaccaccgtctgtctcagagtcccaggaccttgagtgtcattagttactttattgaaggttttagacccatagcagctttgtctctgtcacatcagcaatttcagaaccaaaagggaggctctctgtaggcacagagctgcactatcacgagcctttgtttttctccacaaagtatctaacaaaaccaatgtgcagactgattggcctggtcattggtctccgagagaggaggtttgcctgtgatttcctaattatcgctagggccaaggtgggatttgtaaagctttacaataatcattctggatagagtcctgggaggtccttggcagaactcagttaaatctttgaagaatatttgtagttatcttagaagatagcatgggaggtgaggattccaaaaacattttatttttaaaatatcctgtgtaacacttggctcttggtacctgtgggttagcatcaagttctccccagggtagaattcaatcagagctccagtttgcatttggatgtgtaaattacagtaatcccatttcccaaacctaaaatctgtttttctcatcagactctgagtaactggttgctgtgtcataacttcatagatgcaggaggctcaggtgatctgtttgaggagagcaccctaggcagcctgcagggaataacatactggccgttctgacctgttgccagcagatacacaggacatggatgaaattcccgtttcctctagtttcttcctgtagtactcctcttttagatcctaagtctcttacaaaagctttgaatactgtgaaaatgttttacattccatttcatttgtgttgtttttttaactgcattttaccagatgttttgatgttatcgcttatgttaatagtaattcccgtacgtgttcattttattttcatgctttttcagccatgtatcaatattcacttgactaaaatcactcaattaatcaaaaaaaaaaacacacacaacaaccccacaaacaa

SEQ ID NO: 595869 - DNA, 782 bp, Homo sapiens
  misc_feature (567)..(567): n is a, c, g, or t
  misc_feature (576)..(576): n is a, c, g, or t
agcgggggttccgggctgatcaggagacgcctccatcctggcgtggatgacctcaggatcagtcccgtctggcccactcaaaccggagtctggtccccgaaagcgctcagtcagaatccgagagcaagtgtgggcagggcgacccgccgatgtggacgacagggacgtgaagacaagagggaaccgccgaattcgcaacgtgttactacacgccagtcctaggaacaggtgcgccaaggcgtgcgtctgcaccgggttgcacccgacaacctgggagcggggtagatacttgtgagcaagtaaatgaggacgtcgtaccacgagatacgtgctgtggtgcgagcgctcatgaggtacacatccatggcttctctcacatacactgcactgattgagtagtgaagctgcttggtcctcccagagaagtgaatatgaagctgtgatcgtctgtggctcttcacgaggcatgacgcggatggccttccgaggaacccaacaatcacgtcacggactcgaggatcttcagacggctgaatcttcgaagacccgcaaatcggccgcgtgtgnctgaagtgnccaacgggaacgcccagtgtggcgctacagggcgcttcgcagggactgggggaacacgttggtcgcttcacttgatacgccccgttcgcccgtctggttgcgcgtgcacatctgggcatacgcgggtcagagtttgtgcacggggcctgggttcgatcgcgcaggcaaattcaggtcgtagggagacgtaccatatcccttggggg

SEQ ID NO: 595870 - DNA, 268 bp, Homo sapiens
tggcgactgactagattcgcctaatatcgcgtgcccccgatatggcgttccccgctataacaatcattagcttctgactcttacctccctctcatcctactcctgttcgcatctgctatagtggaggccggagcacgaacaggttgaacagtctaccctcccttagcacggaactacttccagcctgtagcctccttcgagctaatcaatcttctccttacacctagcaggtgtctcctctatcttagggggcatccagggtaccgag

SEQ ID NO: 595871 - DNA, 2037 bp, Homo sapiens
  misc_feature (301)..(301): n is a, c, g, or t
  misc_feature (307)..(308): n is a, c, g, or t
  misc_feature (329)..(330): n is a, c, g, or t
  misc_feature (333)..(335): n is a, c, g, or t
  misc_feature (337)..(337): n is a, c, g, or t
  misc_feature (343)..(343): n is a, c, g, or t
  misc_feature (1907)..(1907): n is a, c, g, or t
  misc_feature (1911)..(1911): n is a, c, g, or t
  misc_feature (1923)..(1923): n is a, c, g, or t
  misc_feature (1930)..(1930): n is a, c, g, or t
aagaaaatggcgacaagaagattgtccccaagaagaagaagcccctgaagttggggcccatcaagaagaaggacctgaagaagcttgtgctgtacctgaagaatggggctgactgtccctgccaccagctggacaacctcagccaccacttcctcatcatgggccgcaagtgaagagccagtacttgctgacggccatccacaagtgggacaagaaaaacaaggagttcaaaaacttcatgaagaaaatgaaaaaccatgagtgccccacctttcagtccgtgtttaagtgattctcccantcgcanntggggagggagcctcgggtgnngtnnnancggtgnggacagtgccccgggaacccggtgggtcacacacacgcactgcgcctgtcagtagtggacattgtaatccagtcggcttgttcttgcagcattcccgctcccttccctccatagccacgctccaaaccccagggtagccatggccgggtaaagcaagggccatttagattaggaaggtttttaagatccgcaatgtggagcagcagccactgcacaggaggaggtgacaaaccatttccaacagcaacacagccactaaaacacaaaaagggggattgggcggaaagtgagagccagcagcaaaaactacattttgcaacttgttggtgtggatctattggctgatctatgcctttcaactagaaaattctaatgattggcaagtcacgttgttttcaggtccagagtagtttctttctgtctgctttaaatggaaacagactcataccacacttacaattaaggtcaagcccagaaagtgataagtgcagggaggaaaagtgcaagtccattatgtaatagtgacagcaaagggaccaggggagaggcattgccttctctgcccacagtctttccgtgtgattgtctttgaatctgaatcagccagtctcagatgccccaaagtttcggttcctatgagcccggggcatgatctgatccccaagacatgtggaggggcagcctgtgcctgcctttgtgtcagaaaaaggaaaccacagtgagcctgagagagacggcgattttcgggctgagaaggcagtagttttcaaaacacatagttaaaaaagaaacaaatgaaaaaaattttagaacagtccagcaaattgctagtcagggtgaattgtgaaattgggtgaagagcttaggattctaatctcatgttttttccttttcacatttttaaaagaacaatgacaaacacccacttatttttcaaggttttaaaacagtctacattgagcatttgaaaggtgtgctagaacaaggtctcctgatccgtccgaggctgcttcccagaggagcagctctccccaggcatttgccaagggaggcggatttccctggtagtgtagctgtgtggctttccttcctgaagagtccgtggttgccctagaacctaacaccccctagcaaaactcacagagctttccgtttttttctttcctgtaaagaaacatttcctttgaacttgattgcctatggatcaaagaaattcagaacagcctgcctgtccccccgcactttttacatatatttgtttcatttctgcagatggaaagttgacatgggtggggtgtccccatccagcgagagagtttcaaaagcaaaacatctctgcagtttttcccaagtaccctgagatacttcccaaagcccttatgtttaatcagcgatgtatataagccagttcacttagacaactttacccttcttgtccaatgtacaggaagtagttctaaaaaaaatgcatattaatttcttcccccaaagccggattcttaattctctgcaacactttgaggacatttatgattgtccctctgggccaatgcttataccaggngganctgcggaggtgnaagtggncctgggctattgacgggaagttgaactacctcaaacccctaataatcgcaaacggagaccaaatacaaagggctaccctgggggaaccaaaggggacgcaaagaaca

SEQ ID NO: 595872 - DNA, 182 bp, Homo sapiens
  misc_feature (129)..(129): n is a, c, g, or t
tgtgtgagtacggaatcagtggtcagaggggctcctagttgcctccaaggtgaccatatgtgccagtgcatgagacacaggaagcaggcaggattgggtacgactgttaggagcatcatgttcctactnactcgtcactaagagtatgagccctgcttccctgtgtctcatgcactggcaca

SEQ ID NO: 595873 - DNA, 763 bp, Homo sapiens
  misc_feature (1)..(1): n is a, c, g, or t
nggacaaggcgccagagggccgccgccgtccgcggcccgctcagctgggggcgccccccccccacaaagggggcgcgtgttcccccgagaatatccgctcgcgcaaaaaatgtggtctccacacgaccgctcggtcttttaaaaaagagacggacagatatgctggctcccgcgcccccgcgaaatgggggtgtgaagaaacaaaaccgcgccgcccctcgtcaaattatctacagagacacggtgtgataaagaacgcccccggtgggcgccgcccaccagtagcgccgcccgccgcacgagatgcgatcccaggcgcgtcgcctggtggtgcaacaacgcacccaccacaggtggggctcctccccagcacgcgcagcccacaaacccggcgcggcgcgtgtatatgctgcgtccctacgagaaagagacacgcaccgcggggccccccccaagaacacaatataacaaagaaagagagcgcgcccgccacgaagaatacggtgcaaaacacatattttgcgcccccacagcacgatatacgacaaatggagcgactaaaggaggaacgcgcgccccgggcacgcccattcgcgcgacaagaggaccccagaggttctcgcctactccgacggaggtctttaaacatggtagagtgcttcgaagccccctggccaggagaaacaaagagttgttcttctgagggcgaccacaaaacaacaagaagagtcggagagagtcccgtccaaacaaaaacaaagaa

SEQ ID NO: 595874 - DNA, 150 bp, Homo sapiens
gtctgcgaatgtcttttggttggtgctagtatctaaagtgattctccactgctgaggttattacgtagacatttttttaggctgacagatcataagtgacttctagttcgcttcgatgtctagactagtcagttggcgggggtctagtgg

SEQ ID NO: 595875 - DNA, 338 bp, Homo sapiens
tgtttagaagtggcacttctaggggattaagcggggtaatgcctgttggggcacagtgcccccctagttggggggtagggtctagtctgaagtggtaaaaggctcagaaaattcctgcgtgcacaggtggtgtgtggtgcccttggtatgtgctttctcgtgttacttcgcgccatcattggtatatggttagtgtgttggttagtaggcatagtatgagaagcgtatatgaagtgaaagtgaattccacatggctagcccggagtgtcattaggaggtctgagagggcccctgttagggctcatggtctgggtttcactatatgatacgcatgtgct

SEQ ID NO: 595876 - DNA, 117 bp, Homo sapiens
catatactataagcagaccgcaactcaacaccagcttcttcgaccccgccggaggaggataccccattctataccaacacctattctgattttacggtcaccctgaagtgtcaacgt

SEQ ID NO: 595877 - DNA, 555 bp, Homo sapiens
acgctctctttatccaagctgttatgcattattgagacatgcacttctacacaggaatgcgggtgacagatttattcatttatcaatccctaaattacaacgaagcggcaattacaggcatatgcgaccgtgcccgaatgatttaagtgtttttagtaaatacggctctcactcattttgggaagggtggcctcaagctattgacattaggtgatgcgactgactacggcatccaggatgctggaagtatacgcttgaacctctggccccggctgagctccaagttcttacaacactttattcttggtatctcaatgagaagggcctccagactttaacataagtgatgtagcattcttgacttagttagtgaggggaatctgtgaatgaagtaggttgacattgatacagactgcttatacatgtcaatgaagggggattaaaagactttaacttaaggcttgaagaataaaaaccaggggtttttacttttttatatacacctcgggcttaagattatattgaactggagaaacggccatacttgcccatccg

SEQ ID NO: 595878 - DNA, 204 bp, Homo sapiens
  misc_feature (37)..(37): n is a, c, g, or t
  misc_feature (65)..(65): n is a, c, g, or t
  misc_feature (116)..(116): n is a, c, g, or t
  misc_feature (155)..(155): n is a, c, g, or t
taacattttatatttttgctttattttattttatttnattttttgagacggagttccactctgtngccaggctggagtgaagtggtacaatcttggctcactgcaacctccacctnccgggttcaagcaattctcctggctcagcctcctgagtncttggactacaggcgcgtaccttctttagtagagactggggtttcacca

SEQ ID NO: 595879 - DNA, 353 bp, Homo sapiens
gcggagcttaaacaccgcatctaaaggaaagcagaaagcctcaatattatgggttataactaaatatatggaacaatttaatctatttaagtgagaatttaaaaagtaaaacatttataggagaatgtttctgatagaaatatattttttacaaggaataaaaccagataaataactgaccaaatagctgatatttggccaggcatggtggctcacgcctataatcccagcactttgggaggccgattgagaccagcctggccaacatggtgaaaccccgtctctaccaaaatacaaaaatacctgggtgcagtggcatgcgcctgtagtcctagctatttgggggggctgag

SEQ ID NO: 595880 - DNA, 158 bp, Homo sapiens
ggtcgagaatgaagtgtgaggcgtatataccatagccgcctagttgtcaagagtactgcggcatgtactattgacccagcgatgagagcttcgacatgggcttaagggagtcataagtggagtccgtccagaggtatctttactatactacattgtga

SEQ ID NO: 595881 - DNA, 115 bp, Homo sapiens
cgcaggcagagctgctggagacgagctggggagcacgccagagccgctggagacgagcttaatccttacttctttctctgcaattttcttctgtttatctgtctcttctcttgta

SEQ ID NO: 595882 - DNA, 1555 bp, Homo sapiens
  misc_feature (22)..(22): n is a, c, g, or t
  misc_feature (25)..(25): n is a, c, g, or t
aaagtgtcgccatcatgagcangancgagactatcaggatccggagacggaaatgtccgaaggccgcagtacttgaccctgtattttgggagtcgaacggagaatggaaactgaaagtggaaatcaggaaaaggtaatggaagaagaaagcactgaaaagaaaaaagaagttgaaaaaaagaaacggtcacgagttaaacagatgttgatatatcactacttgtgtcttttaacaaaatgaaaaaattgactactgatgggaagttaattgccagagcattgagaagttcagctgttgtagagcttgatttggaaggcaccagaatccggaggaaaaaacctctgggggaaagaccaaaggatgaggatgaacgcacagtgtatgtggagttacttcccaaaaatgttaatcacagctggattgaaagagtatttgggaaatgtggcaatgttgtttatataagtataccacattataagtctactggagatccaaagggatttgcgtttgtggaatttgaaacaaaagaacaagcagcaaaagcaattgaggtaagtccagatcctaaaaaaaaaaaaagaaagaaaagaaaccaagtattaaaatagtaacttttgcaatcatttcagtttcttaacaacccaccagaagaagcaccaagaaaacctggcatatttcctaaaacagtgaaaaataagcccattccagccttaagagttgtgggtgagtatttttcaatatttaaataggtgtagttgaagtaagatgaactaataatgatggcacttttacagaagagaagaaaaagaaaaagaagaagaaaggccgaatgaaaaaggaagacaatatccaagccaaagaagaaaacatggacacaagcaacaccagcatcagtaaaatgaaaagatccagacccacatctgagggctctgacattgagtccactgaaccccaaaagcagtgctcaaagaaaaagaaaaaacgggacagagttgaagcatctagcttacctgaagtcagaacagggaagaggaagagaagcagctctgaagatgcagaatccctagctccccgatcaaaagtaaagaaaattattcagaaagacatcattaaggaagcatcagaagcttccaaggaaaatagagatatagaaatctctactgaagaggaaaaggatactggagatctaaaagatagctctctcttgaaaacaaaaggaaaccatagaaaaaaccataagagagacataaatgcgagaagaagtataccattaagagtgtatcaagagcgatggtgggtttgacacaagttttagcgtacaaaagctagctgcttcttaaaaaagattcccaattaatccgaggcggattggacgccgtgggtcccaaactgggtgaaatggaaaacgccgggagggtgccccggaatatgtccggccttcgttggtggtgggatataaaagcctctgcggaaacaggtttgcgccacatttgtgtaggaagctcatcactcagggtaaaaacaaactcgcaatgggcggtgccacacatatag

SEQ ID NO: 595883 - DNA, 1129 bp, Homo sapiens
  misc_feature (1129)..(1129): n is a, c, g, or t
cgacaaacggcttgtggaactgttggcaaacagtgttgcctctatataaattattcggaagaaataaagtctaatatacagcgtctccacgaagcatccgagaacctgaagaatgtaccattacttgattggcaaggcatatttgcaaaagtgggagactggttcagatcatggggctatgtgcttttaattgttcttttctgcttattcatctttgttttaatctatgttcgtgtctttcgcaaatctcgcagatcccttaactcccaacctctgaacctagccttatctccacagcaatcagcacagctccttgtcagtgaaacttcatgtcaagtttcaaatagggcaatgaagggactaacaacccatcaatatgacacaagtctactttgagaatatctgaacaaacagcagctgcagacaaaaagccttagctaaactttgatgagtaaagcaggtcttaccgagaattcagctgccaaaaccctcctctgagtgttcctcttataagggcacttagcactaggacctcccaaggtattgtaaataagccttatcagaactttttgtagtttcattctgaagccttaagacacacaccataaagctgatctgtaaacccttaccccttgctgttcagagagctactctttgtagtgttcttgcatgcatatataataaatgttttttctattgatctgttaaaaaaaaaaaaaaaaaaaggaaaaaaaaaaaaaaaagaaaaacaaaaaaaaaatagttgtttggcgccagcctacggagccccgctagaaagaaggttttttgaaagaaccacttgtctgtgtgggaccgcgcggcgaccgcagacgaggaggtaagtcgcaccaagcttggtgggcccacaagcgggtgttacccgaaaagaggaaagaacacggggggcaagaccaacacgaggcgcggtggggatgttctccccaccaaaagttaaaaaaaacgccccccgggggggagaaaccacggacgcgttgtagggacaacactcacagaaagggggaatcgtgaggggcaaacaggggggccaccacaccaagggggctcccaaagagagagccgaaaactaataacccccgcgcgggagggn

SEQ ID NO: 595884 - DNA, 350 bp, Homo sapiens
  misc_feature (63)..(63): n is a, c, g, or t
agaggatccccgaactctggcggccctttctttttttgaaacagtcttgctctgtcacccagngtggagtacggtggcgcgatcttggctcactgcaacctcagcctcctgggtcaagtgattcttctgcctcaccctcccgagttgctgggattccaggtgcgtgccaccaagcctagtttttgtatttttagtagaggtgggatttcaccatgttggccaggatggactcaaactcctgacctcaagtgatctgtctgccttggcctcccagaagtgttgggattacaagtgtgagccactgtacccggcaccactgttgtttctaggcttaattaatttgttgtggc

SEQ ID NO: 595885 - DNA, 217 bp, Homo sapiens
atgaaaatgacgcccagttaagattcagacgctgaatcaggttggtatccgacatttgctggcacagtgctttagatttggtttgaaaccaaaaagaaatgtaattgtcacaaaagacatttaaaacacttttttgtgacatgtttgtgttcttgataacgagtagaaaagaatgcacaacatctacgttatgctaatttggtacacttatcattgt

SEQ ID NO: 595886 - DNA, 1533 bp, Homo sapiens
ggagagaagcagtagtcaataaagagagtgccgtatttcgcagatggagctgagctgtggctgccagaagatagcgaacgaatggaaactgaaagtggaaatcaggaaaaggtaatggaagaagaaagcactgaaaagaaaaaagaagttgaaaaaaagaaacggtcacgagttaaacagatgttgatatatcactacttgtgtcttttaacaaaatgaaaaaattgactactgatgggaagttaattgccagagcattgagaagttcagctgttgtagagcttgatttggaaggcaccagaatccggaggaaaaaacctctgggggaaagaccaaaggatgaggatgaacgcacagtgtatgtggagttacttcccaaaaatgttaatcacagctggattgaaagagtatttgggaaatgtggcaatgttgtttatataagtataccacattataagtctactggagatccaaagggatttgcgtttgtggaatttgaaacaaaagaacaagcagcaaaagcaattgaggtaagtccagatcctaaaaaaaaaaaaagaaagaaaagaaaccaagtattaaaatagtaacttttgcaatcatttcagtttcttaacaacccaccagaagaagcaccaagaaaacctggcatatttcctaaaacagtgaaaaataagcccattccagccttaagagttgtgggtgagtatttttcaatatttaaataggtgtagttgaagtaagatgaactaataatgatggcacttttacagaagagaagaaaaagaaaaagaagaagaaaggccgaatgaaaaaggaagacaatatccaagccaaagaagaaaacatggacacaagcaacaccagcatcagtaaaatgaaaagatccagacccacatctgagggctctgacattgagtccactgaaccccaaaagcagtgctcaaagaaaaagaaaaaacgggacagagttgaagcatctagcttacctgaagtcagaacagggaagaggaagagaagcagctctgaagatgcagaatccctagctccccgatcaaaagtaaagaaaattattcagaaagacatcattaaggaagcatcagaagcttccaaggaaaatagagatatagaaatctctactgaagaggaaaaggatactggagatctaaaagatagctctctcttgaaaacaaaaggaaaccatagaaaaaaccataagagagacataaatgcgagaagaagtataccattaagagtgtatcaagagcgatggtgggtttgacacaagttttagcgtacaaaagctagctgcttcttaaaaaagattcccaattaatccgaggcggattggacgccgtgggtcccaaactgggtgaaatggaaaacgccgggagggtgccccggaatatgtccggccttcgttggtggtgggatataaaagcctctgcggaaacaggtttgcgccacatttgtgtaggaagctcatcactcagggtaaaaacaaactcgcaatgggcggtgccacacatatag

SEQ ID NO: 595887 - DNA, 174 bp, Homo sapiens
gtcggtcccccctgcttctccccaggctcacatcttgccggtgctgggtcagctctgttttttagacaggttctcgctctgtcacccaggctggagtgcagtggtgcaatcacagcttgcgtgctgcctcaacctcctggattcaagtgatcctcctgcctcagcctccggagt

SEQ ID NO: 595888 - DNA, 142 bp, Homo sapiens
tctatgaaacgagtatatgagcgattctgtcgtggactaaaagaagtagaacggctaatcccagaacgaggctgggagtacatgtggaatgagcgcctaggatacatatttgacctgtccttcggaaccttggaacaggact

SEQ ID NO: 595889 - DNA, 900 bp, Homo sapiens
gggtctcatgatcatctcgagcgtcacgggaggttccagaaggtgactatattcatggtcactctctcgtagtcctccgtgggtaaccttagtacactgtatcttcgccggtttcgcaactactgtgcctataataatgacacagacgcacgtctgtctgagcaaggccgaaattgctgtccatacgtattagagctgagagagtattgttgattgacagacaattctacgaggctggacgtgagcagaatgcagagttcccagttactaactacgtcttgtgacttaaccgaattctttttctgacgaaatgactttttactaagcaaatggggtgacttctttaaatggcttttcttaacgttgacaggccacaacagttaaatggctggtattggtgtgctattctggtgtgctgcacatgtttttggataaagctttaagcatgtcctgctactaatttgggcggagagtgtttgccaggtttcaatgtgggctgcagcttttgtgtgctccttctctggtttgcagtgtaatgagtcataagctaaatttccagaacgattcgtttaagattatgcctcttatctacttgagagcacatgtcttttcactcatggattgcacctgacaactcaagtatttcttaatcgaaaacacaaaacagcacacaaacaaaacacttgctggggccacgggccctagaaaaagttctaacacactctggtaggcggcgggccagaggcaagcactggcacgggtccaaggaccctggcggaagcggtgtcccaaaaaaaccgggcacggcgctgaaccaggctaggctagcataagacggacccacagcgcggtaaatacagagcacgaacacacaagacgcagccacgagcgacacagaag

SEQ ID NO: 595890 - DNA, 344 bp, Homo sapiens
gtccggcttaggaggtatacaggcacagaaggttgacacggcagttctcagacagagtctggatttttgtttttgtttttgaggcagaatcttgctctgtgacccaggctagagtgcactggcgcaaccacagctcactgcagcctctacctcccaagttcaagcaatcctcccacctcagcctcccaagtagctaggactataggtgcaaaccaccatgcccagcgtaacttttttttttttccagattttgggaatttttggcatttattttccttatagtgtggcgtgagacatctcccttaatttcgaaaatctccagatattctgaagtgtgacatttc

SEQ ID NO: 595891 - DNA, 952 bp, Homo sapiens
  misc_feature (675)..(675): n is a, c, g, or t
  misc_feature (722)..(722): n is a, c, g, or t
  misc_feature (744)..(744): n is a, c, g, or t
  misc_feature (752)..(752): n is a, c, g, or t
agagaaaacaatgtgtctagagtagttgaaaatgggttatcttgtgtctcattttcaggccagttcttcaaccactaccgtttagggtctgtcttgcctatctatcgtaatgatatgaatatgaaattctttgtctttcatatagggtcaatgcaaccaacttcatggaggcaggagccccagttatgtggaatgggcacagagcaaggctgctggattccagtatccagcgataagggctcctgtccccaggtaatggagcgaagctttcatatgccctcctatgggacacagacccttgaagggggtgtcgagaagccccattctctcctatcagctaacccattatggcaacaaagggccctggacccaccacaccaaatggagctgactcagtgaaaactggaattaaaaggaaagtcaagaagaatgaactatgtcgatgcacagtatcttttctttcaaaagtagagcaaaactataggttttggttccacaatctctacgactaatcacctactcaatgcctggagacagatacgtagttgtgcttttgtttgctcttttaagcagtctcactgcagtcttatttccaagtaagagtactgggagaatcactaggtaacttattagaaacccaaattgggacaacagtgctttgtaaattgtggttgncttcagccagtcaatacaaatagatttttggtttttgttggtcctgnagccccagaagaaattaggggnttaaagcngaccagtcacactggtttcggccttgtcaaagacgaattctctggatccgaacaaaacatctataccgcggtcacagaaacggttggaaaattccacaaaacgggacaaaacaccgtcacgactgtaccctcctcataggccaccgtcattccggataaaccggaaataaagtctggctccaatcgtgagtatgggcttt

SEQ ID NO: 595892 - DNA, 977 bp, Homo sapiens
  misc_feature (28)..(28): n is a, c, g, or t
  misc_feature (32)..(32): n is a, c, g, or t
  misc_feature (53)..(53): n is a, c, g, or t
  misc_feature (579)..(579): n is a, c, g, or t
  misc_feature (626)..(626): n is a, c, g, or t
  misc_feature (648)..(648): n is a, c, g, or t
  misc_feature (656)..(656): n is a, c, g, or t
ggacgaggggccgcaggggagacagttnagtnttggaaagggctggcggggtncatgccaccaacttcatggaggcaggagccccagttatgtggaatgggcacagagcaaggctgctggattccagtatccagcgataagggctcctgtccccaggtaatggagcgaagctttcatatgccctcctatgggacacagacccttgaagggggtgtcgagaagccccattctctcctatcagctaacccattatggcaacaaagggccctggacccaccacaccaaatggagctgactcagtgaaaactggaattaaaaggaaagtcaagaagaatgaactatgtcgatgcacagtatcttttctttcaaaagtagagcaaaactataggttttggttccacaatctctacgactaatcacctactcaatgcctggagacagatacgtagttgtgcttttgtttgctcttttaagcagtctcactgcagtcttatttccaagtaagagtactgggagaatcactaggtaacttattagaaacccaaattgggacaacagtgctttgtaaattgtggttgncttcagccagtcaatacaaatagatttttggtttttgttggtcctgnagccccagaagaaattaggggnttaaagcngaccagtcacactggtttggtgaggtacaaagggctctctttgatctggacaaaaccattttttccacttcactgaaacgactgggatattacaatacccgtgcagaaacagcgtacggacttagactccgcttggcggcggcccaagccgatgatttctgaatatggcccggggacgaacggtggaacaagtaatttgagaccctctccgtttcagaatagaaggggtcattcttacaatattggaacgcgaaccatttctttttccaattacacaggaggtacgaccttgattaagaccaccaacctccacccccccgt

SEQ ID NO: 595893 - DNA, 1497 bp, Homo sapiens
catgccatgcatgcacattgccttccattcagctgctgcattttgttgcaacagtcacaggcatgttatgcaaaaactcatgctgcaggccacaaggatgtcttcctgggccatgttttagtcatgcacatcatgcacagcacaggccatccggcattcactcgtgtcgtggctgctgctgcagcacttgcccaagcaccatcatgcacaacccacgtctcagcagcacagtgctgtgccggcatgccggatcctccatgcaatcgctcatgcgcacacagctgcttcgcatgcacattccacacacctacattgtcggcacagcagccgtccagcaattctcaatccacaaccacaacataggtgcacgctttctacgcagccagactctgcgagcagtcaccgaaatttcccagaaaatagtagctcatctcagtatcggttcaccaccccacatgcacaagtcacccacgaaaagtggtccacaattccctcactacttcttgtcaaacagtgtctaccaacgcaaacaccttcagtgcaacaagttgcggccagccaaaatggttgaggtcacaacaatcccatgcacagcccacaacacggacaaatggcccgtgcatgtcacggacaaggcaccttccatctaagtccgcgactgggaccccctggcacaccccaggagaaatgacaggagccctacaccactgcaagaaacaacagaccgagatcaacgcgaggcatcagcacgaacaaacccacagaatggacatgcacaaccaagcaaagccgcatcttgcgacggaacacacaaggcaccggaagcccccacgcgccactatctaacacagccctacagggggacacagcacagcgaagttgcaacaccccatacccgatacccccacaacgacaagcttacacacggcctgaacagcaccgattcacacacgctcaccacaaggaccaacgcactctacctctagcgacaccaagcccccgacgacaccggcgacaacgaacccaacacaacagacaacaaccacgcacgcgacaacaccagcagagagcgccggaggccgacgcaacaaacgaccccacacagcgaagagacacaccaagcgacctcaggaaccgctagtgcaagaagacagacagaacgagacaaccgcgagagcgaacaacgagcgcaccagggcgagccaaagaggagcgacagcggcacggcaaggacgagcagacagaagccaaggaacgcgccgaacaacgacagcgcaacgcaaacaagcagcagcacaccagacgagcaacgaccgacaacggtaccacgaagagcacaagcgcgcaggcaccagacaacaacgcagagcagcagagagccatgcacgcagcacaaaggagccgacgcagagcagacgaacagtcagcgcgccaacccgcgcacaccaacacaagcccgcaccaagcagcactcacagcagacagcacaaccgcgcg

SEQ ID NO: 595894 - DNA, 1121 bp, Homo sapiens
  misc_feature (675)..(675): n is a, c, g, or t
  misc_feature (883)..(883): n is a, c, g, or t
  misc_feature (898)..(898): n is a, c, g, or t
agagaaaacaatgtgtctagagtagttgaaaatgggttatcttgtgtctcattttcaggccagttcttcaaccactaccgtttagggtctgtcttgcctatctatcgtaatgatatgaatatgaaattctttgtctttcatatagggtcaatgcaaccaacttcatggaggcaggagccccagttatgtggaatgggcacagagcaaggctgctggattccagtatccagcgataagggctcctgtccccaggtaatggagcgaagctttcatatgccctcctatgggacacagacccttgaagggggtgtcgagaagccccattctctcctatcagctaacccattatggcaacaaagggccctggacccaccacaccaaatggagctgactcagtgaaaactggaattaaaaggaaagtcaagaagaatgaactatgtcgatgcacagtatcttttctttcaaaagtagagcaaaactataggttttggttccacaatctctacgactaatcacctactcaatgcctggagacagatacgtagttgtgcttttgtttgctcttttaagcagtctcactgcagtcttatttccaagtaagagtactgggagaatcactaggtaacttattagaaacccaaattgggacaacagtgctttgtaaattgtggttgncttcagccagtcaatacaaatagatttttggttttcgacgtcctgcaggccccaaataaactagcgggtttaagcagaccggacccgcgtgcgttgggccaagtacaagggacatttcttttgtctcggacaaaactctgatgagcagcgtgttaagaaggactgggaaaggataaataccgtctaagagacctggcgcgggcattancgctctcgtgtgcgntggagccatgttgtataacttcgcgaatcagctcggggacaaagcaccggaagagttgtctgtgaaacacgtgatctttataattaacgggccggattcgcgaaaatgttcatagagacacttgattctacaaagaatcgacgtaggggctcatgaggtgtatagcatgaccgtccattccccccacaattaactcgcggcgtgagcggacaaagttaacgag

SEQ ID NO: 595895 - DNA, 329 bp, Homo sapiens
accggcccctgtggattggttcaggaccctgaagataccaaaccaggatgctcaagctccttacataaatggtatagtatttgcagtatacctatgcacatcctccagcatactttatttattttattttattttatttttttttttgagacagaatttcactctgttacccaggctggagtataatggtgtgatctccactcactgcaacctccgcctcccaggttcaagcaattgtcctatctcagcctcctgagtagctgggattacaggtgtgagccactgtgcctagcctataatgatcattttaatgtttcccatgcactcat

SEQ ID NO: 595896 - DNA, 133 bp, Homo sapiens
tcaaactgctgcatcagtgcgccctctcccagaggaggtttgaggcgatccaccatgagctgctgcagtcagagctgaccgagctgagaaccacgcaggtgaagacagcaaaggagtctgaaggcagtctgga

SEQ ID NO: 595897 - DNA, 423 bp, Homo sapiens
tactgtgtccgcgagcagaatgatgtgactaaactatactcgtaatggcagaagtaacgaagtgattgtctgtaagatgaaaagctgtgtgtgcaaaagatgtgtatgtgatccaaagatcctgtgtctcttgcgggtaaaaagctgcgtgaccacatgtaaagagcggaaggaatccagattggcgaaaagaatcagtcattttgatatgataagtgataaagaagcatacccaaagggcaaaaattaccattgatagaagcattgacacttctcaactgatcataaggttttcccagaaacctggactgagtgagaacaatatttgcgggaatacacagttttgaaacaggagagatgtggactactgttcttaaaatattgaagttaggcttgaggaagagatcttcctttttgacgact

SEQ ID NO: 595898 - DNA, 518 bp, Homo sapiens
  misc_feature (465)..(465): n is a, c, g, or t
gatcccctaaactgacgcgatatgatcacccgccgctccctgggttttgctctacgtcaacttccagcagccggccgacgctgagctggctttggacaccatgacctttgatgtgataagtgaaagccaatccgcatcatgtggtctcagagggatccctctttgagaaaatctggtgtgggaaacgtcttcatcaagaacctggataaatctatagataacaaggcactttatgatactttttctgcttttggaaacatactgtcctgcaaggtggtgtgtgatgagaacggctctaagggttatgcctttgtccacttcgagacccaagaggctgccgacaaggccatcgagaagatgaatggcatgctcctcaatgaccgcaaagtatttgtgggcagattcaagtctcgcaaagagcgggaagctgagcttggagccaaagccaaggaattcaccaatgtntatatcaaaaactttggggaagaggaggatgatgagagtctgaaagagctatc

SEQ ID NO: 595899 - DNA, 281 bp, Homo sapiens
cccccacgaaacctaaaacgggatacacacagcaacattcaattaaccatctactgatacactgttcacctactcgcattaaatctcaaaactatcattctaaatgtaaaactatacacaaagtatcgttatgcttctatttatttgaaattccagacaggcaaagcttacctaaagtaaaataaaaaaaaaacttgaacattgtttgtgtcttcaagggatggggaaaggactgacataggaaggagcatgtaactttttgaggtcatagcttttccctg

SEQ ID NO: 595900 - DNA, 960 bp, Homo sapiens
  misc_feature (675)..(675): n is a, c, g, or t
  misc_feature (722)..(722): n is a, c, g, or t
  misc_feature (744)..(744): n is a, c, g, or t
  misc_feature (752)..(752): n is a, c, g, or t
  misc_feature (960)..(960): n is a, c, g, or t
agagaaaacaatgtgtctagagtagttgaaaatgggttatcttgtgtctcattttcaggccagttcttcaaccactaccgtttagggtctgtcttgcctatctatcgtaatgatatgaatatgaaattctttgtctttcatatagggtcaatgcaaccaacttcatggaggcaggagccccagttatgtggaatgggcacagagcaaggctgctggattccagtatccagcgataagggctcctgtccccaggtaatggagcgaagctttcatatgccctcctatgggacacagacccttgaagggggtgtcgagaagccccattctctcctatcagctaacccattatggcaacaaagggccctggacccaccacaccaaatggagctgactcagtgaaaactggaattaaaaggaaagtcaagaagaatgaactatgtcgatgcacagtatcttttctttcaaaagtagagcaaaactataggttttggttccacaatctctacgactaatcacctactcaatgcctggagacagatacgtagttgtgcttttgtttgctcttttaagcagtctcactgcagtcttatttccaagtaagagtactgggagaatcactaggtaacttattagaaacccaaattgggacaacagtgctttgtaaattgtggttgncttcagccagtcaatacaaatagatttttggtttttgttggtcctgnagccccagaagaaattaggggnttaaagcngaccagtcacactggtttggtcaagttacaaagtaaatttctttggatctgaccaaaacactttattttcagtttccatgaaatgattggaatattaccaatacccgttaagaatcaaggggaggccttttacctcctcatggggcgtggcccactcctgatgatttttgcgaaaggaagtggggattgaaaaattggaaaatggaan

SEQ ID NO: 595901 - DNA, 337 bp, Homo sapiens
tcggccaatctgttacacaatctggttaagctgagtaaccttattttaagtctgcagtcttgctgcatgataagcagacgatatcttatcttctaacagcaactgtactggttctgtgaatctttctgagctttacgaaagtgattttgcagtgtatacaggtgctaattttccttccttaaactgcatcatctgttgatcaaaattcttcaacttctcatttaagatctgttttttattttcaagatccgattgagtttgacttacattttgcttcacctgtttaatttgttgttcgctcatcaattacacgttgttggtcttgtgtcaactgatt

SEQ ID NO: 595902 - DNA, 958 bp, Homo sapiens
  misc_feature (675)..(675): n is a, c, g, or t
agagaaaacaatgtgtctagagtagttgaaaatgggttatcttgtgtctcattttcaggccagttcttcaaccactaccgtttagggtctgtcttgcctatctatcgtaatgatatgaatatgaaattctttgtctttcatatagggtcaatgcaaccaacttcatggaggcaggagccccagttatgtggaatgggcacagagcaaggctgctggattccagtatccagcgataagggctcctgtccccaggtaatggagcgaagctttcatatgccctcctatgggacacagacccttgaagggggtgtcgagaagccccattctctcctatcagctaacccattatggcaacaaagggccctggacccaccacaccaaatggagctgactcagtgaaaactggaattaaaaggaaagtcaagaagaatgaactatgtcgatgcacagtatcttttctttcaaaagtagagcaaaactataggttttggttccacaatctctacgactaatcacctactcaatgcctggagacagatacgtagttgtgcttttgtttgctcttttaagcagtctcactgcagtcttatttccaagtaagagtactgggagaatcactaggtaacttattagaaacccaaattgggacaacagtgctttgtaaattgtggttgncttcagccagtcaatacaaatagatttttgggatttggcagctcctccactcccatataaaattttgggttaaatgcacacgttaccacctggtttggccactacaaagtaattttctttagactgggataaacctttatattccattttatgaaataacgtgatattttacaattccgttttccattcagtgctaacttttaacatccctattggctgagttccatgctaataatttcggcaataagaacccgggataatccacaaacgacaggaaattgat

SEQ ID NO: 595903 - DNA, 949 bp, Homo sapiens
  misc_feature (675)..(675): n is a, c, g, or t
  misc_feature (722)..(722): n is a, c, g, or t
  misc_feature (744)..(744): n is a, c, g, or t
  misc_feature (752)..(752): n is a, c, g, or t
agagaaaacaatgtgtctagagtagttgaaaatgggttatcttgtgtctcattttcaggccagttcttcaaccactaccgtttagggtctgtcttgcctatctatcgtaatgatatgaatatgaaattctttgtctttcatatagggtcaatgcaaccaacttcatggaggcaggagccccagttatgtggaatgggcacagagcaaggctgctggattccagtatccagcgataagggctcctgtccccaggtaatggagcgaagctttcatatgccctcctatgggacacagacccttgaagggggtgtcgagaagccccattctctcctatcagctaacccattatggcaacaaagggccctggacccaccacaccaaatggagctgactcagtgaaaactggaattaaaaggaaagtcaagaagaatgaactatgtcgatgcacagtatcttttctttcaaaagtagagcaaaactataggttttggttccacaatctctacgactaatcacctactcaatgcctggagacagatacgtagttgtgcttttgtttgctcttttaagcagtctcactgcagtcttatttccaagtaagagtactgggagaatcactaggtaacttattagaaacccaaattgggacaacagtgctttgtaaattgtggttgncttcagccagtcaatacaaatagatttttggtttttgttggtcctgnagccccagaagaaattaggggnttaaagcngaccagtcacactggttttgggcagatacacaagtaattcttttgtcctggacaaaactttatatgaggttaaagaaagaatagaatattacaatacccgtaagatacaggggaggcatttaactcgcccttgggggggcccatgctgttattttgcaaaaggagtgtgatgagataaggaaaaaggaaatttaaag

SEQ ID NO: 595904 - DNA, 187 bp, Homo sapiens
  misc_feature (40)..(40): n is a, c, g, or t
  misc_feature (109)..(109): n is a, c, g, or t
taccttcccccatttttttttaaagaaccataaagaaagnccaattcccccagataggctatagcttaagaccaatctcccaaatcattttccattaattaaaactttncagaggctatagataataattcttattatcctttttacctgtttgcccaaagagagaagccaaaagctcaactggtta

SEQ ID NO: 595905 - DNA, 345 bp, Homo sapiens
  misc_feature (76)..(76): n is a, c, g, or t
ggcccccccccccgcccgggtgattttttttttttaggaaaaaagggggttcccccgggtgggccgggtgggttcnaaatcccgaccccggggattaaccccccccggccccccccagggttggggtttccggggggagctagcctgcccggcccggggtttaaaaattccaacctgttgggggggcccccatatgccggttattttgggaaacccggcccctttttattaaggggggggggccattttccgggggccaacccggtgggggatctggtctttttttccggcccccttgggaaaggttgcctaataaataaaatttttccggtttttttaaaggga

SEQ ID NO: 595906 - DNA, 99 bp, Homo sapiens
gatgagcgagtcggtgctactggacgctcgggtcggtccggggtggcgcagcgggactgtacctgggtgtccggagcggatgccgtctgccatgggcct

SEQ ID NO: 595907 - DNA, 288 bp, Homo sapiens
  misc_feature (53)..(53): n is a, c, g, or t
aagcaatcctgcctcatcctcccaaagtgctagaatacagggctacttccccntgccctgtgcccagccctcttaaaatgcttttaaaagctgttgtccattttaaaagctctacatatcttttcaatatcaacccaattgtcaatctttgaaaccaggtgtagggtccttggggcaaggcagaacctcaaacctagcctaaactgtttttccttgccacccaacttcaggcatatgtttgcagtatgatactttgagccatggacagtggcatcactgctcattatc

SEQ ID NO: 595908 - DNA, 266 bp, Homo sapiens
tagcgcagtagctcacgtggatccccccaatactttgatggcttcacctgctcatacaggtcacagtgtctcaactgaaatcactacgacataggggtcattcttgtcagctggccacttcgtgcaattccaggtcgtgactgaaacacccttctcgccatagtgtaatgcacactccattgcattcagcccgctctcccagtcctcacagtctggttttcttgatatcctagaaggaagattcggccacctccttatgatacacg

SEQ ID NO: 595909 - DNA, 415 bp, Homo sapiens
ggggctctattagcgtctgaagccctctcagatgttgggctgaatgaaaaagaaggcgctgatgttacatattcacgtcatcgtgcatgaatgtacatgagttaatcatatatcacctgagaaagtcgctagctccagaggatcgtaaagaatggcaaagcagcagcttatatgggaaagaacaacgtgctttcctaaggtatcatggctgatgtacacacccatgatcatactggatgggatctcttgatcaggcgtcacttactacgatcctggatactccagtcaaaccaatgaatgatgagcagtatgaccagcaggtagtgactatgtggtggtaccgggataccttggatgagggttcggaatttcactggaaccatagtagaggtccgaggggtcgtattagctgtgt

SEQ ID NO: 595910 - DNA, 897 bp, Homo sapiens
gaggatcaggtgagtggtgcccgatcgatggtacgaccgaagcgtgtcctggcccgggctccgttggtcccctctgccagcatgttctgtgcggcgaatgcgtttctttgcggtcccccaccgttcttatgtgcccccctgtcttgcggcctcccgttgtcctcgcctcccgtgtggttctgcccctccgcgccgtctatatgggctgtgcccaccttgaccttatcctgtggccggtgtaaccccggtggtacccttacgggcctccgacccacgcgtggccaggccctcctacgggatattcttgtttaactcagaagcttcttctctgcgacgaactgtttgggagcccttattacactattcgagcgctgttctctcccccccctttggggcggctggtcccccacaggaatctcccccgttcggctccccttgtggtccccgccgcttcgtagcccacccgtgccggtgcgtgccccccgggtgttctcacatccccgggcggcgccccaagtgtttattatggcctagcgcccgcgcgtcccccaagtgttcaggccccggctgtcgcaaccatttaccgggtggctttttactcccgcctctacgccgttctcggtgctctggggtgtccccgtacccatttcctgccgatattactgggcgccaacacattgttggtagaccaccaccagcttcccgaggactgcctaagtctttttggggccgcaacctttccctattatcgtgctggtatccgccccgcgatagatgtgttccgccttgagacttaggcccaagaccagctcattgggttgtgcatgagccccccctattggcctttttgaaaggggttatatttttgattcccctttttttgggggcccacataaa

SEQ ID NO: 595911 - DNA, 332 bp, Homo sapiens
gcccagatcatgtctcagcatctcagccaatgggacagtagatgtttgttcattttccaggtcagtgtcaagtggcaaatctagaagctgtatctggagcacttctagtaccagtctgatcttagtaaaaacttcagcatggtgatgcgatattccaaggttagtcagtgatagattcaacaacgaataataactatgttaggcgtggcttactatcacagcatgaagggatgggcacgatgccagcggcctaaggatatacttcagcagcatctgaccaagtgattaagcttgcagtgtagttctccaagaacagaaaatgccaagaggac

SEQ ID NO: 595912 - DNA, 460 bp, Homo sapiens
  misc_feature (85)..(85): n is a, c, g, or t
tgcttaagcctccggagtagttgggattataggcacccaccccccacgcctggctatttttgtatctttagtagagacagggttntgccatgttggtcaggctggtctcaaactcctgacttcaggtaatccgcccaccttggccccccaaagtgctaggattacagccaccgtgcccgccggggataaacatttttaaagctcttcatttcatgtagattatattaagggtctgttatttatgtgaagtttatctctttatggagaatcacaccacctcagaaaatctacactcttttacagaccattatgaaatatgtggtctcatgatagaatattataatcttcatagagtagatggggttgcagagaaatcagacatctgaactcttttccctttattacaatttacttgctctgtggcctaaagcaattcactgaacaattttgttagaaaact

SEQ ID NO: 595913 - DNA, 1581 bp, Homo sapiens
gataccagaggtgccagatgtggcagcggtgccacaatgcagatggctggacgattctgcgctacgagctctatgtgcgggcggggccgatggctcgggccgcatactcgcgagcgcactcagcgtctgtgtttgcagcacctcacgcagggcacttctgctaacacggatggggcttgtgtgtggcttctgttcgtatgcgtcttatgtcgctctggtccggtgcacggggccctgcgtcgtcgggccgtggctgacgacagcgtgtacacatcaagagcagaagggcactgcctgggtagacgtcagctcggacgcggggcctggagacggaccgttacgaccctgatggaaccctggcccgccaaggggacatcctcacagggcgtccgaagcccacggtggcagggcttgggggtcatcgcgcgactgtgggccttgccctcactagggggggtgggccggctcgtggacggtttaccccagggaagctggttgcgctgtgttaggtggcggtgacctctgcttgcccaggtggccttagcgccgggagagtatgcctctcttgcggcactgtgggcgccttgaacgccttatcttgagcgaatggccaaggacgccattgaggacggacagaacaggcgcttggggaggcaccattccgggtagggagacccccgtgatgcaacgggcgctgttcccggcgaccgcaccgttgttcattttgacccctggtttggtcttggcgatgggcatccacttttgcccgaggcataggcgtattggaagcgcctccaacgtgttggtcaagggggggcgaagagaaaatggcactggcaattggcgcaacggcggtggagatctgcggaaccaaccatcccaggacgacaacggctattgcgaaacgtgctgtgggaacaacgcgaaggacattgcgatgaagatgccaccaatgggtgtgggggcacctcaacttcaaaattcgcaacgcgccaagggggaaggtcaccacgcatgatgagaaaggctatgcacagacacgggggggaaccgtggttgggcagcgcgaatacaaacacccggtgaacgcacgcaccaaaggggggccccggtagcctagtaaaaggggtacgaggggggcgcgattggtagcgctgagggcccgcctgagacaaggtccagttgggccgccaccatcgaaggatagacaaggtgagaaacagatacccaaaaaggagtttgcggcacagcgacatggagttagcactcaaagagctacaccggggcagcctcaacacacgcgaacacagcgaataggctcgcacaacaggcgacactgctggggaacactaggaggcaaaggggaaaccccaaaagagagaaacccatgcacacagagggaaatgagccataagaggcacacaaaccacgaggaacccggaacacaccacgagccagacagcagcaccaaaacagacaagacaacagactcaacacacacagaaggaatcaaaccatgacaacaatggtccacgactacatctaacccaccaacgaacagatggagacgcacacaccgaa

SEQ ID NO: 595914 - DNA, 605 bp, Homo sapiens
agagcaaaagctcctatgcagaggaggggtgttctctgactgtgacaaggccacagagccaggttactttagtgactgtcagcggcagtcttcccaaagatgatggaactcttgctggactcagtggccttagaaccattaatgggccaactggtggtgatcttgctgacgccttagactaacaggccggggctcaaggaatcggagcgcatccctgaccggggaggtgacccttgggaccgcgctattctaacgttctgaggctggtactaccgacatcgattccatctatgaaggaattgacttttattcctcaattatcccgaccccgatggggagatcggaacgctgacctgtgcccgggcaccctctgcccatctcagaccgcccttggagatgccattctggtcaggtaacagatccatgatagtgccctgtgtggaggtgctcactgaatccccaagagacacaatctctggcaacactgcgccaatggatgagaacagtgtaggagcatcaaccctgatgaagctgatcgttattgtgcacatgaccaagcacccatcattggtgcagacaggcttgagacttgacaagattatctg

SEQ ID NO: 595915 - DNA, 130 bp, Homo sapiens
tggtattttaagaaaagacttggtttaaccaggtgggccgggcgggtctcaaactcttgacctcgcaatccacttgcgtgggcctcccaaaggggcgggagataacagggggtagagccaccattgccaa

SEQ ID NO: 595916 - DNA, 1039 bp, Homo sapiens
ggtagagtagattcgcatgctgcgctcgaaaatgatgcacctgtctaatataagagcgcgttacgactgaatctcaggaacgcaatgatcagttttagcttcttcttgcgaccactattcgcctctctgacgacacgtctgctgtccattgttccaccatgatcttgcatccgagcacctccttcctggcctctgtgcccgtgaccccggaaggccgggtatgccgctcgcccggtctcaggttcctggggccccatcttctcggcgaggccgcgctgacgtaacgctggagagtgcatctcaggtagcgagatctgggttacgcggcactgacgaggctggtgctcccgaccgaatgctgagttcctcctggtagctgacgcgctcccagagacgtcgtgcgaatgcgaacgtggcaccgaacttgtctcatctcgccacgggaatggatatcgagctatgaccagccgtggcaaacccagaaaaaggcggaatccgcgactagtagacttctgcaacgtgcccccatttgtgccctgagagtgcgatgcagagtctgactggtgtgccgcgttctcaaagcattgtcgcccgaattgaagcaatgtatccaagtcgacttctcatatacctccggcatcgaagggccctgtcttcctggctcgtctgacatttgcccgcaactggctgtcgttgtgggcccctgcgaacccccccaaggtccttcattttttcctctcagtttccattgagctcggagactttacccgctcgaggcgcgttggggacccacattagcccgcctcgggattagtcctgttggacacccggtccgcccattgggtttgtgccctccggtggggctcctgtcgcgggccttcaccgggagggccggcccccacttcttgggggttttaccgtataccgaagcgccctggattttccggcgcccaagagtttctgtggttgcccatctctgtgcttggcacggttccccccgtgactcccttttgtaccaagtgttcgaagagtttttccg

SEQ ID NO: 595917 - DNA, 437 bp, Homo sapiens
  misc_feature (22)..(22): n is a, c, g, or t
tttaaaacccacctttcctagnaaaagccctttggctggtgaaaaaagagccaaagttgaacccttccatattccctcctttttccttaaaatcataaatctctcctctacttccttctcttttgcctttcaaatcagcatttttaaaagccatttcttggccctggcacgatggcttatgtctgtaatcccagcactttgggaagccaaggcgggtggatcacctgaggtcaggagttcgataccatcctggccaacatggcgaaacccccatctctactaaatatacaaaaattagctggtgcggtggtgtatgcctgtagtcccagctactcaggaggctgaggcaggagaattgcttgaacctgggaggcagagattgcagtgagccgagatcgcatcgctgtactccagcctgagcaatagagctacactcc

SEQ ID NO: 595918 - DNA, 899 bp, Homo sapiens
aattccccttaggctagtacgaggctgggtgtttaatcggccgaggcctgccggctgctagtctgggaagtgaggagcgcctcttcctggccgccatcccatctaggaagtgaggagtgtctctgcccggctgcccatcatctgagatgtggggagcacctcagccccgccgccccgtctgggatgtgaggagcgcctctgcccggccgcgacccagtctgggaggtgaggagcgtctctgcccagccgccccgtctgagaagtgatggagcccctccgtctggcagccgccccgtctgagaagtgaggagcccctccgccctggcagccgcccctgtccgggagggaggtggggggtcagccccctcccggcagccgcgccgtccgggagggaggtggggggtcagccccgcccggtcaggccgcgccttccgggagggaggtggggggtcatgtccccgtcccgtgcagtctgcccctgcctgggcacgcgaggtggcgggtgcgcctccgctcggccgctgtcccgtccgggaggtggggggtcgctctgcccggcgccccgtctgggacgcgtgaggacgcccctctgcccggccacatcccgtctgggaggtgtacccaaccagctcacttgacgaacgcgcccactgactgacgatggcggctttgtggcactgcaaccgggcgcgcaccggtggcgcaccagcactccaccacactcagagtagtgcacgcgctctgctgctccacccgcacgctcgcccctgtgcagactcccttccgctccgctactcgcacccttcttctgcccttgcgcctgccgccactcaccgcaccttgccccattccctgtctcctacctatttgcctggcccactccggtctccgggctccgg

SEQ ID NO: 595919 - DNA, 121 bp, Homo sapiens
gctgacctcgtgtctcatccgtaggcgctctctaactctaatattttttgtgctcaccaaagtatagtacctttgaccagattttgtgaactcagatacctgtggaagccaggaaaataat

SEQ ID NO: 595920 - DNA, 412 bp, Homo sapiens
gagacagggccacaccatgtacggtcaggcgggtctcgaactccggacctcacgtgatctgcccacctcggacacccaagagagtagggattacaggcgtgagccaccgcgccaggccataaacaaacttacattggagtatgtactcacatgcagaatgatgaatcttctgtctatgacacctgtgaaaccaagcacctagcatagcagcaacagcactgttagtaggagtcttcaaaatcccttgtgtgttccattgtcaattgctgtatccttccccacgcaggcaactactatcctgacttttccaatgcagagatgagtttggctggtttctatacttcatataaattgaattacactatatacttgttaccgtctggcttcttgagattgacattataagttgatc

SEQ ID NO: 595921 - DNA, 102 bp, Homo sapiens
ccgacgcagtacaaactcgtcagtgacactattggacaacgggtggatccattagatgctagactattcagagatcacaacagatatgagacaagctgccga

SEQ ID NO: 595922 - DNA, 211 bp, Homo sapiens
gatgaagaagagaaggaggcacaacttggaatgaagtctgtggataagaaggttgagagtgccaaggagtccataaaatttgggagaactgatgtggctgaatcagaaaaagaaggacttttgactaaatctgctcatgaaacagtcaagccttcttgatttattttcttcatcatcaaacaagctaagaacagttttggttctaggcttg

SEQ ID NO: 595923 - DNA, 150 bp, Homo sapiens
ggcgcgtgtgtcatctgcattcttctggtcgtgtctagcggattccccttggattgctcaggtctggtaggacatttgggtcatcgttgcacgttatgataaccgctctgggcggtgcggaggaatgttctggatccatgtcctccatgt

SEQ ID NO: 595924 - DNA, 289 bp, Homo sapiens
agtagaagttgttggataagtctttatcttcttccaagcctacatgtgatgtagagacagctctgagaataactactgctagcgttgtcatatagaaagaggtcctgtcctgtccaaatcttccaccaaacctgtgtatggattagcagtaaggctgaagcgttgtactatgactggagtccatatccatacctatctatacctgcttaatgacctcgtcccatggggtgtgagattgggttgaagaaatcagtccaggaactgtcctctgggcttggtgttgtccttc

SEQ ID NO: 595925 - DNA, 157 bp, Homo sapiens
tcagaaaagccagttttttttttattggtaaaggtcggccataaacttctagcgggtgccaatgggtcaccggccacactcgcaccaggtggtccgggtgtagccagcaaacagagtcgggccatcagcagaccaggccagggaggtgctgagggtg

SEQ ID NO: 595926 - DNA, 484 bp, Homo sapiens
  misc_feature (248)..(248): n is a, c, g, or t
ttatccccactgtggtccgtaccactatcaagtgttcatctgcatgacataactgcttacctttattggatttttttttgggagaactccattacacttacacgttgtctcctacaaaagactctgggaaggatgctattgagtggtttcttttccacagcttgtgtatttgattcattggctgctctatgtgcttaatccagaataccagttacatttgctctgtcccaggtggaactacacgaagnttatgtatatcttccttcgctgacattaactgtgacgcccatctacaacttttccatgcttcagacatatacctcacttccacctctttctcaaggcatgtcttgagacaggaatagatgtgagcttgttaccccttccaagatccacagcattgcactgtctacctttgcatcttataattggcccattttgaggcttcttaggggttcgagccccaatacgtaatcctggtcgt

SEQ ID NO: 595927 - DNA, 906 bp, Homo sapiens
atggaccagtgttgcttagtgtcttcactgtattttctttaaaaaaaaaaaaaaaaaaaaaagggcaaaaataaaccactcaaaagaacaacaaaaaaacccagcacaaaaccgacgagggagtttggtttcttggatttctttggccaagggcaaaaagatgagatgccctcagcagtgaggattttggcccccttgtggtggggcccgtggcccccaaccttcaggctggccagatggctccccggacaacaccagggctacagggagccagacgcccaggccttgcccgggcctccttgttcctggcccccacccaccacctggcctgggagaggaacggggtcgggtccgtgtcggaaaagtgacagggtcccagagccaaagccgggcctcaagcatcatcagggaggggtgtagtcagttcgaagggcagtctcccaccggagtttcccgagcctcaaaatccaggagataacgcacagccccacccactctgagatgacagcgggctgacttcccgagcggggctttcccatggtccccctggctccaggtcctcctatggcctctccatggaagtgggtggcggaaggtggaggggccgggcgtccccatggcgttgatgtcgcagtagttgatgtgtagctgtgcgccatgtaatctcggccgatggtgttccccccacagaacagcggggtgccacacgggccggccccgggcctgacagaccagacaatacccgagactccggcggattcacacaaacacagggaactgggggatggaggagagacccaccgactccctaagaacccaaaggggccccgcgcaacgcgtcccccacagacaccggacacagcgggggagcaccactacaaacaccggatcaggggcagaaacccg

SEQ ID NO: 595928 - DNA, 170 bp, Homo sapiens
gcccggattggacaacggggttaacagcacaacgcctgagcttgacaggtgaagaaaccgccaaaagacagatatttcagcggaggtggatgctgtgcctgcgggtagtcccgtacctgagtgcaggtccacgatcagctgcgagccgtggcaggagagggggactggag

SEQ ID NO: 595929 - DNA, 526 bp, Homo sapiens
  misc_feature (195)..(196): n is a, c, g, or t
  misc_feature (202)..(202): n is a, c, g, or t
  misc_feature (210)..(210): n is a, c, g, or t
  misc_feature (219)..(219): n is a, c, g, or t
  misc_feature (300)..(301): n is a, c, g, or t
  misc_feature (327)..(327): n is a, c, g, or t
  misc_feature (342)..(342): n is a, c, g, or t
  misc_feature (357)..(357): n is a, c, g, or t
  misc_feature (428)..(428): n is a, c, g, or t
tttcctaagcccaacagtctcggccgtaacaacgaggaggagcggtctcagaaggaggccgaggccgcccagcgctggcccggggagaaagcccaggccagctccatccccgtgggcagccgctgtgggggcgggcggcggaacaattcctcgccggggcaccgtcatgtatgtaggtctcacagatttcaagcnnggctantggattgntgtccgctntgatgagccactggggaaaaatgatggcagtgtgaatgggaaacgctacttcgaatgccaggcaaagtatggcgccttttnnaagccagcagtcgtgacggggggganctccccgaaggaganctacgggttggacgngatatgacacctaaagaaattcccttgtttcagctcctagctcagccactgactgcccctcctgtgtgtgnccatggcccttttctcctgaccccattttaattttattcattttttcctttgccattgatttttgagactcatgcattaaattcactagaaacccaaa

SEQ ID NO: 595930 - DNA, 657 bp, Homo sapiens
  misc_feature (538)..(539): n is a, c, g, or t
tcagttatccatccagccattcatctcccaattgttgatggctgtcatgatgctcacatataccatttcttccataagcattatcccttttcttcatcaactcttcccttcttctataaagaataatatgacatgtgtattgaaactgggattatgatgttcactgcacatgtgatcttactgacatcacagtcaaatccaaaatttcaaagtattgcacaacagagacttactgtactattactattatgaccaaaacataaaatgtggttaccattaaagataaaggatctgtcttaatattcactgtgcactcactatgttcctaatactgtgtaggatattctagaaagattagaaaaatgttcttgccttaaagaatcttttgcctccctacaataatagtagtaagttattattatattcattagaggaaaaatgagcaccaaaatttaaataatcataacagtaccttaccaactttggcaaagaacaaataacttaagtctccttgagtgtttttacatgcactggtgtnnaaatcttcaaaatggctctggcctagttagccaaataaacagtcctaagtaaaatttagtttgctttgtattaataaaacctgtaactatgactctcagtagaaaagtgatcatgtga

SEQ ID NO: 595931 - DNA, 106 bp, Homo sapiens
ttggtgcaggctgagtagtggtgcatctcgtgtactgcacctcgtctctgagtatgtgatctcccacttagcccccaggtagtggactacaggtgcacatcaccaa

SEQ ID NO: 595932 - DNA, 416 bp, Homo sapiens
  misc_feature (85)..(85): n is a, c, g, or t
  misc_feature (318)..(318): n is a, c, g, or t
ggggggggggggggaaaaaaacacctcctccgcggggggcccttaataatgaaataggtttcacaaaatttcaaaagcggggccngggaaaggggttccgcaattaaaaaacccctgggggaaaaaaaaaaggcaatgtgaaagggggaaaggttatttttgaagccaagccaaaatagggcgcttttgtaaaccaaacattggacagggtggggacttttccggaagaagaataccggttggaacaaaaaataaacctaaagaaattcccttgtttcagctcctagctcagccactgactgcccctcctgtgtgtgnccatggcccttttctcctgaccccattttaattttattcattttttcctttgccattgatttttgagactcatgcattaaattcactagaaacccaaa

SEQ ID NO: 595933 - DNA, 202 bp, Homo sapiens
gggggtcccgtggtggtggtggtgatgggtgtcgtggttgggtgtctgtgtgccggtgggtgttggggttggggtcacctgtagtggtggctggtgatgggtgctcgatgtttggggtcttgtgtgccgtgtgggtgtttggggttgggcgtcaccgtgtgtggtgtgtggtgagtgggtgtcggtggttggggtctgcact

SEQ ID NO: 595934 - DNA, 438 bp, Homo sapiens
gtactactggagtccccgagctgtaggcgtgtggcacacggagaactctggacccacaatttcagatgtgttatgtcgccacgagcgacgatattcgcgtcagacacatctgtctccacgatagcgtatgggtgcgtcgtactgagagatagaaatatgggcacaccacgagatatagagatgctattggcccgctcaaggagaggccggagtgccaaggcactggggcaaggtaacaccgtggttgaccggggtgggagcaatcccggagccgtgggagcccacggaacaagatgccggttggctccacagggcccggactgtgggccgggtgtggaacacgggcaagctttctttctgtgggcggaagacaccatggattcataccgtaaccgcccgggacacgaatggtgggttagcccgcgcgggtttggggcc

SEQ ID NO: 595935 - DNA, 174 bp, Homo sapiens
gttgactctagacgatccgcccgactagccgacaggactgagggccccgagtagcccgacagcaatttagcaccacgctgctaaaaccgtgaagtggcggcagaagaatccctatttcccaggtcctgctggtggctgctgatgccctgcgcccagtcgggcgtagtcgggggg

SEQ ID NO: 595936 - DNA, 794 bp, Homo sapiens
  misc_feature (26)..(26): n is a, c, g, or t
  misc_feature (43)..(43): n is a, c, g, or t
  misc_feature (53)..(53): n is a, c, g, or t
  misc_feature (76)..(76): n is a, c, g, or t
  misc_feature (97)..(97): n is a, c, g, or t
  misc_feature (101)..(101): n is a, c, g, or t
  misc_feature (238)..(238): n is a, c, g, or t
  misc_feature (242)..(242): n is a, c, g, or t
  misc_feature (244)..(244): n is a, c, g, or t
  misc_feature (247)..(247): n is a, c, g, or t
  misc_feature (252)..(252): n is a, c, g, or t
  misc_feature (275)..(275): n is a, c, g, or t
  misc_feature (509)..(509): n is a, c, g, or t
  misc_feature (532)..(532): n is a, c, g, or t
  misc_feature (559)..(560): n is a, c, g, or t
  misc_feature (567)..(568): n is a, c, g, or t
  misc_feature (571)..(571): n is a, c, g, or t
  misc_feature (583)..(583): n is a, c, g, or t
  misc_feature (592)..(592): n is a, c, g, or t
  misc_feature (599)..(600): n is a, c, g, or t
  misc_feature (624)..(624): n is a, c, g, or t
  misc_feature (639)..(639): n is a, c, g, or t
  misc_feature (645)..(645): n is a, c, g, or t
cttggaatccactagaggacacactntgttaaaaattaaacanaaaagaaatngcatcgatgtaatcagaatgaanaccgcatggggtcgggggagntgtnctcacttataactatgagggaagaggatctccagctggttctgtgggctgctgcagtgaaaagcaggaagaagatggccttgactttttaaataatttggaacccaaatttattacattagcagaagcatgcacaangagngnggnggcantgctacaattaggtctttgtcanacattctggaggtttccaaaaataatattgtaaagttcaatttcaacatgtatgtatatgatgatttttttctcaattttgaattatgctactcaccaatttatatttgtaaagcaaggtggtgcttatcttttgcaaaaagggaaaaatggtaaaacagacaactggggaatctcaaactccagcactggaattaagggctctaaagcatctggtcttttttttttttacggntattttagaataaatatgctggntaaatattagtccaacattagctaagnnatgctannatnacattattatgnattcacttnagggganngttaaaaaataaccagaatattgngtatcactatggganaaaggnttggaaagaacatgaagactggtttaatttaaaatgtggcagctaatagggattggaattacccttactggctatacattcttttggcttgggaggcaaatgtgttaaagggcctataaagagcaatttcttaggaattagtgggaatt

SEQ ID NO: 595937 - DNA, 137 bp, Homo sapiens
tcaaactccatggtggggtgttaggacatgagacatgtattgtcattagtcattgagctgttaccacatggatgcaccaactcattatggataactgtacgctgataaatgatccactacatactgagttgactgta

SEQ ID NO: 595938 - DNA, 201 bp, Homo sapiens
actacgaatctgcaggatggagaaggtctgcacgggaatggtgatccgggttctcctcgccctctagcagctacctgtaggtggcgatctcaatggtccagggccagcatgacattgagcaggtcctgtgtactcctgcaagtggtggggcatctcgtccttgaggctctgcccctcttcctccagccgcgccatcgcctc

SEQ ID NO: 595939 - DNA, 928 bp, Homo sapiens
gtaacgtgtcaagatgagctctcaacattctcatacgaacgtctgcgggaacacactttgcattactagcaagtgctgcatgttactctagtgtcccgatagccatggtccttatccacacggtgatgaatcaacatctcccagggtcgagtagagggtcttgtctaacatggactttagctatactcccgtattgacctagctacgaaagcattagcatgtgaggtggtaagtaaaaccacgaacatctcgaagagacaatcgcgtcgtgtgaggatcgatcttcaataagatctacatatgctgcaccaatacggacttacataggcatgtgcaacgaagtctatcagtctgcccactaaccagtacaacggcactgggctccgtacccgtttcacccaaaagagtcgtcgagaaagttgtatcgtggagggcaagggtaggagcatcacggagcataaggggagaggaaattgataggagagcatgggtcgtgttatggtcgatttgtgcagccagaaagaagtagggagtgaaaggggcgggaggagagtcgtatgaatgaacttctcgtaaaatggctgtatgcagtatcgattcggatcaaactagcatgtgagttaggtgggagaaatcatcgtgtatgagtgggcaaagggtggggaagacctgggtcaagtaatgacagtgatctattctaagtccacccaatttgaatgaccgtgccgtcttctggaggttttgcccacatcaaattgcgtctgtggaagtctgcctatgaccttgacagaggactagaacctgagtgcacactcatgcacgggattgctgagagactggatttgtcgaggcataggactatagtacaaaagcgaacatatatgtggagaaaatcagccacctccaatacaaacggccggcaaagcca

SEQ ID NO: 595940 - DNA, 848 bp, Homo sapiens
aaaaaaaaaaaaaaaaaaaaaaaaaaaaaaaaaaaggggggaccgaagaaaaaaaaaaccccaagaggggcccacaaaaaaaacggaacacccaaatccatggaaacggggggccccaatgaatgtgagagtacgtatttatattgcgtatgggagaggtggagcgcgatttctaaagcgatgagacaggtgggaaaacagtggaagagatggtgaaatatatgtgtagagaggaaacacatattatatagtgatggggtgcatatagtgtgggaaaacagttacccatagaggagaatattttaaggcagcgctctatgaggggtgaaacttattacaagatgtatataagcagagtggtattataaaggtgtgtgttacaaccatataggcacggacgaaatagtgataggatgagtggaagtaggaacggacgttattgagtgaataatcaggtggcgtattgtgaaagatgaatatgtaggaaagaagatatataattaattcagcacggtgggtggcacaccatgagcggaaggaaaaaacaggaggaggcataggaaggagagtggaagagacgggagagtaagtaaaaagcacgaggggctagggagaatggtagtgggaatgataggatggaggtagagttagagctagagaagagagaaggtaagtgagtagcagaggtagggttgaaggatggagggagagaagaagaaaggacggcgagtgcgagagagcagtcgtatcggaggagatggggaggcgagagaagtagagaaagggaatactaaaagaaaggagatagagagaagaagatgagaggagaaggacagggcgggacggga

SEQ ID NO: 595941 - DNA, 410 bp, Homo sapiens
atcctttggagcctgggagactccccaaaaaggtatatgctatcgagagtagaactttgtagctgtagattagtgatgtttaacacgcctacttgcaagtctagcttctgtgggaaatccaaatgtatattgtcatgcactcaggatactggtcgtgaagtcgagcaaatatgatagtgcattttagcctaattgatcatatgtacgtagttataaaagtagctgtagatggctagcaattatgtcatttgtattaaacccagatgtatttctgagtatgtggttcagggtgttgtgaaaaatgttttaccttttacctttgtcagtctggaatgagaggatttccttttcccctttgtagttcaaagagtacattatgcatcatttcggactcaataggcatgctcatg

SEQ ID NO: 595942 - DNA, 421 bp, Homo sapiens
ttatttagaaaccacaagacaccacagagagtgaaataacaatcacatcatcactttatctggagaccagacatgatcaagtacaattcccacaggaaatcaactctccagtaatattaggaagacaatatcctaggatgtgacaaaatggaaaagatgagaaggggaaaggcagaaatgatacatctaacaacatggctggcatagctggatcccagccaactggccccatcgatcagatattcacagaacagcaaggaaaaagatgggaagaaggcaagcgtgccagccttacacttggatgctacttggggattcaggcaacagctgcacaccaggtaatgctcccgcgagcagtcagctggggaagcgtcgtgcctcatcctcactaagagctccggctgcagaccagtccatgctc

SEQ ID NO: 595943 - DNA, 115 bp, Homo sapiens
aatgacatgttataggcaatcccaacaagtttaacttattgtagaactgtaattgaacagcccgtatataacgatgtttccacagggcacattcatagttattcttagttgtctt

SEQ ID NO: 595944 - DNA, 128 bp, Homo sapiens
tgatggccacctaccgttggcacatatacatcactgcctcatgcagtagtgttgatctaccttgtgctcccatctctactcaacaatcgtgatagaatcccatcaaagctgtttgaccgacgctggcg

SEQ ID NO: 595945 - DNA, 560 bp, Homo sapiens
tggcatcactgtcagtgtatgtagtgactgtagcagtggagacgtcaacagacgtacctacacttgtgccagtcaccgagttttggcaatccaacgtagccaactgttcaaaccatgttcaagtgaggctgacgccgagctgtaagcaatccggctggttctgtggctcacttctggtttctgtccatcactttccttttttctggtccgtaaatcttcttctaacctgtggctgtgctggagtctctgagccccactccggcttgggcggttgccttattcaggaatcgttcactgctcaattaaactctttcaaatttaattcagctgaagtttttcttttatccaatgaaatttgctcatgacaattcatactttaaaaaagacactaaagaaaaagcataaaacttcacaatcttcagctgaaaagaaaattactacttttgtgcattaactctacttttctatattttctataattcacatattttctatatttattttcatatccttgatttttcactataatctttcattattctagacaaagaggccatagg

SEQ ID NO: 595946 - DNA, 122 bp, Homo sapiens
gatctagagatcccacggttcaatgaactttgccaactattgatacataagggttgagagaaacaagcatctatgcagtttcttttggcgtacaaatgatcttacataaatctcatgcttga

SEQ ID NO: 595947 - DNA, 294 bp, Homo sapiens
ccacaagatcattcatctactaatcagtgtaaatatcagctacagctagaactaaagcaagttatacactaattatcccccacattcacactgatgccgtactaaataattctggttctaccattcccttatgcacttttagcaagtctaattcctgtggaataatgttctgtttgtataactcatagtattcacttatagtgctcatgtcaggaatggcaagtgagttagagcccctaatagtctgctattgttagaacgtaatgcacagataataaaacatgtccacttctt

SEQ ID NO: 595948 - DNA, 238 bp, Homo sapiens
  misc_feature (155)..(155): n is a, c, g, or t
accctctctacaatgtgcagctatttatagaaattctagaacagatatatctatttttattgaaaaggaaaatgatgcggtcacaattcacggttttaaacccagcttatcccaccagattcgcacgaagacctcccagaatctttgaatccagntgtaagaaacagtagcagcattaacataaccattttcagtgacacactggtagcattctgcgcgttgctggcggggaaatcac

SEQ ID NO: 595949 - DNA, 275 bp, Homo sapiens
  misc_feature (238)..(239): n is a, c, g, or t
aaaggagtgtggattcgcgaccgaggatgggcaggtcaggcagaggctgttgccatggttataatgagatggcaccttggggtagtcagaaaagggagcacagtaaaagatctgaaatatgtcggaggcacttgctgatggataccatataaggcgggatgaagaaaaagagaatcaaggataatttctcagcatccaaatttgcaacaaatgcatgagtggtggtcagtgttaagtnnacaatggggcagcaatgcacagcagcaagtcaggtt

SEQ ID NO: 595950 - DNA, 415 bp, Homo sapiens
gtcgactctccaggatctcccatagaatgtataatatacaaagcagtaatgccagcagacatcaggacttactttctaaattaagcccagagctcactttaaaaaggcagacatcctggtccaaatgacacccattccattggcttcgtccacaggtggccattccagaccatctctggttccatgtctttattagcaaccacaaactggccatagatgagattctccaacctacaatgatattaaaaaccagttcatttcctctcaacaaactacaggtgctactattggttctttctcacaggcatcaatgccagccacctacagttctgtggctaagggactgactgcactatagggttcccacagtcactttggagttgagtcttggggaaagaaaaaggaacacatgtat

SEQ ID NO: 595951 - DNA, 99 bp, Homo sapiens
gatacctggggagatccggattctgcctacgatagtaggctgggggaggcctgagaatctacatttctagaaagttcagaggtgaggctgatgctgctg

SEQ ID NO: 595952 - DNA, 945 bp, Homo sapiens
ctccgtactcctcattgtacccattctaatcgcgatggcatccctaatgcttaccgaacgaaaaattctaggctatatacaagctacgcaagaggccccaacgttgtaggcccctacgggctactagaacccttcgctagacgccataaaactcttcaccaaagagcccctaaaacccgccactatctaccatgcaccctctacatgcagcgcgaccccgaccttgagactgcctcaccatcgactgcttctactatgaagccccccttgccccgcgaagtaccctaaccacctctggtcagacttcggagctagtgccctcctatatattctagccgccttctagaccgtagccgtgtgtatgcaatcctgctgatcagggtgagtcatcaaaggcaaacaaacgcgcctgagtcgggcgctggcagaagccaaatgggcctcgagcatcgaatcgcgtgattgacatgtcacccgtaagcccagcgattgcatacttatcaggattactgaagtaagtggctctcctttatcacttgcgtcctacccctgatcagtagatgacaagaacaccgtctgaatgaactaccatgccattcatgaagcgctgtggccctatgaaattactcgatttcatcctgcccaaaacctaggacgcgaaggaacccaaatccgtacggcccccccttgcggagctgggcggaagggggggccccggaactagtactccgggcttaacaatgattcgacagaccgccgcagcaccccttgcgcccaaaagcgttcatagccgcaaggcgcacggctctcctgactgagacccctcgagacaaccgggcgccgaggaacccagatcaggacgcggcccccgaagacgccaaacactttggaccaaaccgagaaaacccccgcctgtaaacaaacaaaaccggcgctcgacaacca

SEQ ID NO: 595953 - DNA, 116 bp, Homo sapiens
atctccttaagttatagcattcagatgccacatgatataatcatatttcatatcttcttcgaaaccacacttatccccaccttgtgctatcatcacccgatgagtgtatcaagctt

SEQ ID NO: 595954 - DNA, 1733 bp, Homo sapiens
ctgaggaaagggaattctccccgagatatcatacaactgtggtcaacttgtgccttacgaaggatgaatccaccaaggtcaaagtataaagagcttctgaaacatccactttattctcgactgtatgaagaacgctgccgcttgtagcgtcgcaatgcgtatgctttgtaaaatcctggatcgaaatgccagactactcccagcatctcgccatgctatgatcgattgcatactcgcttgactacaatcagacttcatagaacaaaatgggctgagcagcgaagcgacagacgctacaagaaatattctcatcccgttatcacagtgctgatttcattgcgtcggcccagcacaccccactggtgcacatacagcagttgtgtagtctgcgttttcccgatcactgtcctgctactagctgcgcgtgttacaccatcagcacacagatgccagtccctatgttacactaactcttgctctctgagtcgaacaacacgcagatgcacgccggcactgagatacacgcgaaccaagcaccccgacaactccgcatgccctccctaaccccgccgcacgacgaaaaccaactcaataccacctggaccaaacgctcgcgaccacgtccacagaaaacggaaacacacgacaggcccggaaccctgctgaagtacaacgactccaaccaagtcctcaaacactcgcccactcccccaccacacaccctgcaaacaccaaccgcctggccaccacctggccaagccgataccccgggcacaacggggagcggcccccccgacaccaagcacaggtcgcgcaaagagtcccctggggcacagggaccaacccagacgacccgcgaaccccgggcacacccaacagggatcacggcaaacccatacagcgaaaaaccacgcgggagcctacgcaagcgtggaacgcaaacgaccgacgcgaggcaacaccagacacccacacaccgacaagcaaaccacccaactctggggcacacttgcactgggcaacggcacaggcgacaagaacacaacaacagccgcacgcgcacacactaccacacctgcacacacgtaccacacccaacacgggtgacacaacacacaacacaccgatcacgcccaagccagtcgcaacaccatcgcaccggcacaccggcacacaatcagatgcaccactaaacacgccactagcacacacgcaccaacgagagcgccacaccacaccagtctgcccacccagccccgaactcgaatacccgggaagtaggcacacaaacactcaacgggcaacacacaaaccaacacagggaccctaaccactatcacccacacaaccccggggagtagtcggtaccaaccgccgggcagacacagccaacgactaggcgctgacagccaacaacgggctacccacaacacgccacaacagcccacagcaccaaaagtaaaccaacacgcacacgcagcacacgaaaccgcagaaggcgacccacagacaagagaccggccacacaacagcaagccagccacaagaccagccaacgaccgcaacccagacccaccacaacgacacagcgccgcacgcacacacgccacgcaaacaacgcgaccaacgcacaccaagaacacacgcacgacagggcagacacacacacgatcgacggagcagccgcacagcacgaccaccgaacccgcccgcgcgccacacccgcacagcag

SEQ ID NO: 595955 - DNA, 288 bp, Homo sapiens
  misc_feature (225)..(225): n is a, c, g, or t
  misc_feature (251)..(251): n is a, c, g, or t
  misc_feature (270)..(270): n is a, c, g, or t
gaagcgtttcgtgctgtctgggggcagtgctaaaatctcggtcacactgtctgcagtctctggaatgttattgtcgggagccagcatgggtcccggaggagggaggccatgttttttctgccaatttagttttctgcgctgacagtctagaagacgcatgcaggaatcaaggtctcagacagcccagtggacccagaccaggcacccacgttcttgggatccacnagcatttgcagccacccttcatgccnctccaagtcacttggctanttattgggcaccaacctc

SEQ ID NO: 595956 - DNA, 81 bp, Homo sapiens
acggccgtgtattactgtgcgaaggcgggccctatggttcggggagtggaagactactggggccagggaaccctggtcacc

SEQ ID NO: 595957 - DNA, 1249 bp, Homo sapiens
  misc_feature (1222)..(1222): n is a, c, g, or t
cttggttccgttggtcttgactttctgacattcatctcttgcttcgtttattccacccatttatcataattcgcgcactgtttacctgggcgcgcttttgcgactaagacagatagtgcgcagtacgttgtaggttcgacgcttgtgtccgtcttcatcgtgccttgtcttccgtgggtattcgtatctgtgtgtgtctcctcttgcgtctctcgtgtctcctatttgttgcacggcgcaaacagggtggccacctgtgggctccccatgtgcgctgcctcttgtaattgtgtgttcttgagtatggtagttccgtttcttacccttcgtggctaactgtggggtgtcaggtcgtatcctgcacacgtgtggatgcatcccgggttccagcggcaccgcattcattgtgtggtccatgctgggcaatagccaatatccccagtaagtcatgcgaatcggattttcatacgttggtgcatatgtctcgtttctccacaggattcggagtccccaggagcctctatctgaattctactgtgcactcgggcttccccagagatatgttcggacggaagcctatcgagccaccatcgcgtccattctggaggaatggaatatcctacgcatcgacgatgctgcgacacgatgatggcgctagtcaggtatacactgttacccccagcaacatcgaagagtgcctaaggcaccttccagagtgctcttgtgtgtgtcggtgacgcatccctggaccgccagcatgcagtgagaaggctcctgacatgagcagctctcgaggaatttcccagctcttggggctcaggtggctcactcaagagccctcaccttggggccccatatacgataatgatcacacaagatacagaaccctctccagcctgttgacccgaaccctaaccaacacaatggtttgtctcaatctagacccaacggcatggaccctccgtaaattcttgacgctcttcccccttcccgaggtcccgctagggagctctagcgcctggctgtcgtcgtgctggccgctcctgacaggcctggccgtagcccgtctcaggacctgcatccactgtttaacactaaacccaaggtcatgagcattcgtgctaagataacagactccagctcctggtaccacccggcatgtcagtcagcactctgcccttcatcacgagatatccgcagccgtggctaggattccacttcntaagctccatggcctcagaaagccatg

SEQ ID NO: 595958 - DNA, 530 bp, Homo sapiens
gtacggaatctggaatctatgaatcctagctattcgacagatagtaccatatgtgggatgctgagttggatgttatatatcgtctcctgaaagacattgtctcaaccctgcaaggtgtggcagaccgagctggcactgtaactagatcttcacaaaggccattccgcctttctatcaagccagtctgcttcggtatgatgagagaacatggtaagccatgagcacggagcccattgctgtacttcacttgctgtgaaatgagtttattcatcaaaagcactgctgtgtggaacacgttggtggtggaattatgcattctgatactccatcgattatagttttggcagagcattatgtgcagggaaagttcaatcctaaatctagactgtctgtctccagtaccaacaaagtgttgccctttcattgatggaaggagtcctatctaacctgccacaaggtggctggtttatcacccctaggtaatgttgctgcaactcattattggtgtctgctgctggcagatcggcata

SEQ ID NO: 595959 - DNA, 473 bp, Homo sapiens
  misc_feature (4)..(4): n is a, c, g, or t
  misc_feature (79)..(79): n is a, c, g, or t
  misc_feature (90)..(90): n is a, c, g, or t
  misc_feature (111)..(111): n is a, c, g, or t
  misc_feature (114)..(114): n is a, c, g, or t
  misc_feature (233)..(233): n is a, c, g, or t
  misc_feature (290)..(290): n is a, c, g, or t
  misc_feature (307)..(307): n is a, c, g, or t
  misc_feature (319)..(319): n is a, c, g, or t
  misc_feature (329)..(330): n is a, c, g, or t
  misc_feature (332)..(332): n is a, c, g, or t
  misc_feature (336)..(336): n is a, c, g, or t
  misc_feature (351)..(351): n is a, c, g, or t
  misc_feature (382)..(382): n is a, c, g, or t
  misc_feature (386)..(387): n is a, c, g, or t
  misc_feature (389)..(389): n is a, c, g, or t
  misc_feature (391)..(391): n is a, c, g, or t
  misc_feature (395)..(396): n is a, c, g, or t
  misc_feature (408)..(408): n is a, c, g, or t
  misc_feature (413)..(413): n is a, c, g, or t
  misc_feature (428)..(428): n is a, c, g, or t
cacntacatatcttgaaataatactcttcctaaaaattaccttcttccattaataggaagacccttttctatgcatgtntttggcttaanctcatctcaggataactgtgntgntgttcacttacaccaacaaatgcagacaacctgatctaattaacaaaaattacaaacagctaaatgaacataatatacagggaaattatcgtcagattaatgcacaagaaatacaaganatttttaatgatgaaatattcagtattcttgttcattaatttagccttgtgtttttncaaaaatagtatctacnctgtatacgggnctatacctcnncntttngttctcccatatagncatcacacatccaaaacatggtaccactgcngtgnntngnaaanncgaaaaacaggnaaaangcaaacatacaaaanacaaaaacaccttagaaaagggagctcatcctaaggtttcttaca

SEQ ID NO: 595960 - DNA, 1125 bp, Homo sapiens
  misc_feature (365)..(365): n is a, c, g, or t
  misc_feature (500)..(500): n is a, c, g, or t
ggttttaaatttgtgggaagaaaatgtagattttcgcggaaagggttcgcccaggagaatttcttttgggggaaaaattttgggtttcgtgggaaacagcccgcggttatggtgtatccggaatgtacccacgagtttccgctcggggagagatattaatctagcgcttgggagcccgttgtggaaatattcgtccgagcgccgccccttggagaaaatggtgggctttaatagagcgccccgagagggagagccctggagaaagttggtgcccctggtgtttctcttctagatatgtggagaaacacccgtcgtgttattggagtaaatgtgtggggttgggcgccttttgtaggagaatgggntttgtttacaacatgcgccacatacacgcgtgtgtgtgtgtggggagaaagtgtgtatatggagattctcacacgcttatagagataatgagaatgtgagaagagatgtagatgtgggagaaaatatatgagacnttctacctccacacggtgagagccacacatgggctcgggggagatgtggcacacaccgtgtgtatagtggagacacacccacattttatatgcgcacgcgtgtggagagagagatatccgagagtgggccacacatgtagaatatttcgtgagaatatcccgcgtggagagaagtgttatataacacctctgagagtgcacacaattagaatgggagagcccctcaatacacacacacagagtgttttccacagtggtgtgtaacacacacaatgttaaagagaccctcttcacaaactaaacacaggggttatagtggagaggtgggaataatattggtgtatagcacgagggtgaacacacttgtgagaatataaagagagggtggggtggggtgaatatagagatggttgctataacacgccacaacaccacaaggcttttgcacataattggcacataactatttaaaacacatggctggagacacaaactttgttggggttatatttggagaaaggagaatgcacaaagaatgaaaggtctgtttttgtgtaacttttaagaactttgggtattttactttttggaaaagaataaacccagaattgattgggcacatcca

SEQ ID NO: 595961 - DNA, 102 bp, Homo sapiens
caaacaatgagtataataaataaaaaataaaagggggaagagttgttaatggtttacctgcaggttcagttctgattaaatcatttgtgtttaaagtgtcaa

SEQ ID NO: 595962 - DNA, 270 bp, Homo sapiens
acctaggagaagtgcagcattgtctatctagtctaaggacactttttttttggttttcctgagacgaggtctcactatgtggcccaagcgggaatgcaggggcaccatcatgagcgcacggcagcctgacctcttcggttcaaccgaacctccggcctcagcctcctcagtagctgggactaaaggcacacatcaccacatcgggctaattttggtatttttggtagagacagggtttttccatgtggcccaggctgggctctaactccg

SEQ ID NO: 595963 - DNA, 175 bp, Homo sapiens
  misc_feature (9)..(9): n is a, c, g, or t
  misc_feature (35)..(35): n is a, c, g, or t
  misc_feature (73)..(73): n is a, c, g, or t
  misc_feature (76)..(76): n is a, c, g, or t
aaggtgacnatacacagagataactctggctgttntgcataggacctacaagtgggctggggttggtggttcnacnctgtaggcccaacactttgggaggctgaggtgggaggatcctttgagcccaggagtttgagaccagcttgggcaacatagtgagaccctgtctctacca

SEQ ID NO: 595964 - DNA, 101 bp, Homo sapiens
atcctataaaactccccagtagagtggctgccacttaagttgagaaccactatttggggtacccttgtgtaatcccattcctcatcttctcttcccaaaga

SEQ ID NO: 595965 - DNA, 198 bp, Homo sapiens
gtgtggggggtgtgccccccccccccccccaaaaaggcttttttttttttcgggggtttttttgtgggggggggggccccccccctcccccgggttttttgggggggggggggggttttgggggggcccccttttttttttttttcgggggccccgggggggtttttggccccccccccccccgggggggccctttta

SEQ ID NO: 595966 - DNA, 570 bp, Homo sapiens
  misc_feature (511)..(511): n is a, c, g, or t
gaggatccctccttgaccaaatagttgtgggtaaacaaaatgaaaatatctcacctctatctggggaaacaccctttagtgtacatttagtgtcctttatttaggaaacaccataataaaaacacttatagtagagggggacatacactataatgatctaagaagctacagatggtcatagtggtttgccggctttacaaaatggctccagatcgggaatgccagttggaccttggtcttctataatatttcctttttttcccctcttggaatctcggtatattggattctgaactaaaatggttctcttaaatattcggaatccgggtaatgaaaggtgggggggtattttctttacctccaaggaaagaactactagctacaaaaaatatttgggaataagcatggtttgggtatagggtacatatgggggtggaagacaccagactgaagtaaacagcggtgcatccaatttattatagtttggtaagtaacaatatgtaatcaaacnttctaggtgacttgagagtggaacctcctatatcattatttagcgccgtttgtgacagt

SEQ ID NO: 595967 - DNA, 602 bp, Homo sapiens
cccccaaaatacaccagcaagcaggtaggcaaggcctttaagtttagcccaaggccccctaccccacccctaccacggagccatctggaccgaggtgtgggagtgatggagcaggtttactgtgcctgcccgtgttgggggccagcctgaaccaacagtgggaggtggggccttagtgcctcaccgggcacacggattaggctgagtgaagattaagggagggtgtgctctgtggtttcctccctgccctctccccactggggaaaaacctgttatttgccaagtccctggaccctggaccaactactgggccttattggttgggggtggtaggcaggttagcgtaaatggggaaggaaatgggtaagaagtttactccaaacctaggtttttatgtcagaccagacctaggtgcttttttaggagggaaacagggaaacctggggtcctgtggataactgagtggggagtttgccaagggagggcaccttcccattgtgccttttgtgtgtattgtgcattaacctcttcctcaccactagggttttgggggtgggtcccacatgcccttaaccctaacaataaagttttttttttttgga

SEQ ID NO: 595968 - DNA, 318 bp, Homo sapiens
tggaacctcgagggctactatacatacaggaggagagacttcagctactgcagaccttcactctgttcggcttgctaccgtacatattcattccatgctgcctggccttcagatggctggactagatgcccctattcacatcagtacagtgaccgtcgccagccaaacataagtgaccaacaggtttctgccttatcatattctgaccagattcagcaacctctaactaaccagaggcggatgccccagaccttccgtgacccagcaactgctcccctgagaaaactttctgttgacttgatcaaaacatacaagcat

SEQ ID NO: 595969 - DNA, 335 bp, Homo sapiens
  misc_feature (2)..(2): n is a, c, g, or t
  misc_feature (84)..(84): n is a, c, g, or t
  misc_feature (86)..(87): n is a, c, g, or t
  misc_feature (90)..(90): n is a, c, g, or t
  misc_feature (93)..(93): n is a, c, g, or t
  misc_feature (106)..(106): n is a, c, g, or t
  misc_feature (108)..(108): n is a, c, g, or t
  misc_feature (115)..(115): n is a, c, g, or t
  misc_feature (117)..(117): n is a, c, g, or t
  misc_feature (120)..(122): n is a, c, g, or t
  misc_feature (124)..(126): n is a, c, g, or t
  misc_feature (130)..(130): n is a, c, g, or t
  misc_feature (136)..(136): n is a, c, g, or t
  misc_feature (141)..(145): n is a, c, g, or t
  misc_feature (148)..(149): n is a, c, g, or t
  misc_feature (152)..(152): n is a, c, g, or t
  misc_feature (154)..(156): n is a, c, g, or t
  misc_feature (162)..(164): n is a, c, g, or t
  misc_feature (170)..(170): n is a, c, g, or t
  misc_feature (183)..(184): n is a, c, g, or t
  misc_feature (186)..(186): n is a, c, g, or t
  misc_feature (190)..(190): n is a, c, g, or t
  misc_feature (193)..(194): n is a, c, g, or t
  misc_feature (199)..(199): n is a, c, g, or t
  misc_feature (201)..(201): n is a, c, g, or t
  misc_feature (203)..(203): n is a, c, g, or t
  misc_feature (205)..(205): n is a, c, g, or t
  misc_feature (207)..(207): n is a, c, g, or t
  misc_feature (209)..(209): n is a, c, g, or t
  misc_feature (211)..(211): n is a, c, g, or t
  misc_feature (214)..(215): n is a, c, g, or t
  misc_feature (217)..(217): n is a, c, g, or t
  misc_feature (221)..(223): n is a, c, g, or t
  misc_feature (228)..(229): n is a, c, g, or t
  misc_feature (231)..(231): n is a, c, g, or t
  misc_feature (234)..(234): n is a, c, g, or t
  misc_feature (240)..(240): n is a, c, g, or t
  misc_feature (242)..(242): n is a, c, g, or t
  misc_feature (246)..(246): n is a, c, g, or t
  misc_feature (249)..(249): n is a, c, g, or t
  misc_feature (251)..(251): n is a, c, g, or t
  misc_feature (259)..(262): n is a, c, g, or t
  misc_feature (320)..(320): n is a, c, g, or t
cnagggagctcgcggcgcgcggcccctgtcctccggcccgagatgaatcctgcggcagaagccgagttcaacatcctcctggcnanngantcntaaaaggttaatnantataaanantannnannnaatnaatacnaaacnnnnngtnngantnnnaattcnnntaaaanaagacagtaaaanncnaaantanngatcntnananangntnttnnantatnnnatttnntnctnttcatncntaanaantncttaaaannnnaagtagtaaccaaagataaaatcctaggaatcctaaagatttctacaaagaactattntctcatagtattcat

SEQ ID NO: 595970 - DNA, 138 bp, Homo sapiens
tgaactctatctccactttcacaaagcaacctatccagatcattcctcaggtcatctagtaaaccctatggctgattccagattgttctcgtaggtttctattttgaccgagtatgcaaccaaactgtccacaacgcg

SEQ ID NO: 595971 - DNA, 844 bp, Homo sapiens
  misc_feature (4)..(4): n is a, c, g, or t
  misc_feature (7)..(7): n is a, c, g, or t
  misc_feature (29)..(29): n is a, c, g, or t
  misc_feature (844)..(844): n is a, c, g, or t
cggnatncggccatagggccggggcgggnaggggtttgcagggggggaaggcccacgaatggacccgccttgacccgatactgacccctagaccaccagacccacaacgcgaggcaacgcatatcgactagtagaaggaccgatgagtctggtgaggcaaaaatgacacgcagcacaaaactagctacaaaagcccaaaaacgagttattgacgggggaacctgcgcctcaactcgcggaagcctgatagacgagggcgcgaaacgggcacgagagatgaaggccgagcataacagatggcacaacaggagatgagaggacgagcgacggaaagaaaccaagtacgccatggggaggtagaaggagacgcgagagcaaactctccccgactaatgacagacataaccaagacggatgaaagtcggaaagtaacgcagacgaaagactacgggacgaatggggaggagatgtacaatagttaacgacataaggaaggaaaccagcgggcgtttaactaaaaaaaagccactataagttgggagaatgccaaaataggtggaggcccgagagcggaggatagttggatgcgcgccaaccgaagtctcccggcgagcggcacgcggccggtataaaaagtggacggcggtcatcccaacgccgtcacacccgggcgggcccggagccgcaacaacagagcgtagagtatatcgcccataggatacaatcggggatagctgagagaagggctcacacaatatactcccgccgctatgggaaggaacaggtggactagtatacatacgggccttactacatggtaagagagaactcgccagcgtgcgan

SEQ ID NO: 595972 - DNA, 580 bp, Homo sapiens
  misc_feature (570)..(571): n is a, c, g, or t
  misc_feature (576)..(576): n is a, c, g, or t
actccaccctccacactcccaaaggcaggcaaagaatttaagccactaaagagaacactcccaacatgaaagggaatggatgctgtaaaaaataagtcaaatgaatattctcagacactatcacttcatttttttcagtcctccagcaaatcaagagccttaaaaatattcaaacttaaatacttagtaatcatacatctaagaagatatacagctttatgcacaaaaatattcctcaatgtcctatttatagcagtgaaagaaagaaagaataaatgtcccaagtgatggtacaatcatgtaatgacacatttatgcaaccattaacaaaatggtatttaccaggcaggtaaatcataacagctataacaataaactgttataacaataaaatgttatatataaccttgattatatatacacaatgttaattttaaaaggctggaaaatgctgacagtggtaatttctctctggacaatgtaaatgcttttctgttttccagcatttaaacaaaaatgttaattactagtttattaacactattggtaataacaataaattcatattcnnattcnaaaa

SEQ ID NO: 595973 - DNA, 232 bp, Homo sapiens
gctgatgtcgatcttgacattgatggctgctgactgcttagggtggtggttgctgaaggttgggtgacagtggtaatttccgtgatttttgttttgttttgtttctttaagagacagggtctcattctgtcactcagggtggagtgcagtggtacgatcatagttcactgcagccttgacttcccgggctcaagcaatccttctgcctcagtctttccagtagctaggaata

SEQ ID NO: 595974 - DNA, 237 bp, Homo sapiens
  misc_feature (9)..(9): n is a, c, g, or t
  misc_feature (50)..(50): n is a, c, g, or t
  misc_feature (67)..(67): n is a, c, g, or t
  misc_feature (90)..(90): n is a, c, g, or t
  misc_feature (93)..(93): n is a, c, g, or t
  misc_feature (101)..(101): n is a, c, g, or t
aatcatgtncctgccccaggctgcaggccttgcattaggctcctgctgtncctgccatgtatgtgtnctagtcatcaaggtgtatatatnttntgtacctnctgccgatgggctgtacatagtgtatgaaagttatttaagaccccatgttgtacatttctgttcctagattggatgtgtgtgttctaagaagttgtcataaataaaacctgaatgccccaatgtcaaaaaaaaaaa

SEQ ID NO: 595975 - DNA, 125 bp, Homo sapiens
taacaacatacccccgattccgcttcgactaactcatactcctactattaaaaaaacttcctactactcactcttcttaacttatatgataatcctctataccctacctgcctatatgcatgctt

SEQ ID NO: 595976 - DNA, 389 bp, Homo sapiens
aaagaatcaaagttgacttataaagccaataaaagcttcttgggaaatttggccccatactttgtctaggcagtccctgcacagggtttctggcctatgaggcctcacccatctgcaatgtcacttcctagatgggatgcaactacaaaactaatctactctcaagaactagacaggattatgactgccttcatgagtattcacagttcttcctgtaacctgttgaatatacacttagccaatctttcatcacaaccagttactattagaaatggggagcatgccttataattaagactaacttctgtgtatacatcccaggcaatttggaaaatgtctcagatagccctgcaagatatgcaccaataaaacaaagctatgccttaaaa

SEQ ID NO: 595977 - DNA, 1023 bp, Homo sapiens
  misc_feature (107)..(107): n is a, c, g, or t
  misc_feature (109)..(109): n is a, c, g, or t
  misc_feature (319)..(319): n is a, c, g, or t
  misc_feature (345)..(345): n is a, c, g, or t
  misc_feature (369)..(369): n is a, c, g, or t
  misc_feature (373)..(373): n is a, c, g, or t
  misc_feature (388)..(388): n is a, c, g, or t
  misc_feature (390)..(390): n is a, c, g, or t
  misc_feature (400)..(400): n is a, c, g, or t
  misc_feature (411)..(411): n is a, c, g, or t
  misc_feature (415)..(415): n is a, c, g, or t
  misc_feature (430)..(430): n is a, c, g, or t
  misc_feature (461)..(462): n is a, c, g, or t
  misc_feature (467)..(467): n is a, c, g, or t
  misc_feature (475)..(475): n is a, c, g, or t
  misc_feature (502)..(502): n is a, c, g, or t
agcggaggggccgccccagcgaaggggcggggcgcagatctgtttccctcagactccatctgcccggggccgctaagggagcgcaaggtcaagttcgccttggcccngnctccagctcaggtactagggggtctagacctgaggctgcccgggccggaggcagccttgagtcccgagaccaaacgtcgtttccctctcggacctcgggcgccgggccgcgcgctgaccgacagcccctgctaggcccagcaggtcccctagtcccccgcagtcccccgagactcgccgagcgccgttgctgagccctgcaaatagcagntacctgcttcagcctagatcctgccntgaagcggactgctgctccctggntccnactctgatctgcttncnactcttgccnttgtctcccanttantaagcagggtggccnactgcaacacggtgtggatgtgcctgaccannatgangagccganctacctgtggtgctcctggcctgtggntcctttaaccccatcagcaacatgcacctgcgcatgtcagaaggtggccagagcatcaccgtacagccaaacaggaatgtaccaggtcatccaggggtatcatctcctcctgtcaacgacacctatgggcacgaccgacctcgccgccttctcatccccgcgtggcccatggcccggctggccctgcccgcacctccgactgcctcctggttcggcccttggcgcccgtgaccccgcccccgtggcctggcccccgctgcacggtgctgccgtctcttccccgtctcctgcctcgcatctccggctcccttcgccgtgccgaccctggcaacgcccctccctcctcaccctgcccctcgtcctacgcgcgcttcctcggcgcccgctcgagcccctgccccgccgtcctgccgcctcccctcccggcccgcggcgcgctgccgccgtctcccctgcctccctctctcctcccggccgcgcccgtctcccctccgcacgcccgcgcccgtccgcccgccccc

SEQ ID NO: 595978 - DNA, 990 bp, Homo sapiens
gcacttctccattcagatgagaaaaggaagtcctgtttacaagctctgtggaggttcaaacaacagtgtcgtttggggaccaccagttttatactgtgatgattaaacaggagacatgctcttacatggtcagaggatgcctatgagttgacttcattggatggccttaatattgccttgcagtcattttctcccaatgatgcagaaattaaacttatggaaggactaggagcatatggtaaatttgtgtttaatgataggcttactggaatccatcttaggtccaccttcctgcagaaggagggcaggagtaaagcagcatctgcgttcatgttttctccagagctgtgcactccgcactaaccgtccactcatcactgtcacacttccaaagcaaacagaaccccacttccaatttgcaaaggttatttgaaaatcaagtgtgattattttagcagaacctaatacaatcaaattactcagttgccttacctcatgaagagttatgttcacagactgaaaaagccaagtagcactttaggttccttggtttcaatttgagtctttttttcatattaatcagaagactagaaagaccctttctgcaaatcacaaagcctggttcgattatgaagctgcttaatcatcttcaggtgtttagagttatggtgtgtgtgtgtgtgtgtgtgtgtgtgtgtagtgtgtgtgtgtgtgtgtgtgtcactttgggcggtgtgtacataaactgggaaagtgcttactatgtaaagatagatgggcattttaatcttagccctttggtggtataaccggttttggaaaaatttggactggagaatggaaggtgccccaccggggtttttagagtgtaaacaacagtggcgggttattagacctattataagatttttgaaaaaaaggggtttttaggggaacacttttaagctagtataaggggaaggaaatgatcgtgagcacaattattatatc

SEQ ID NO: 595979 - DNA, 869 bp, Homo sapiens
agaaccttcaaagtgaagactgagatttttactgtatatatgggttttgtaaagatggtttaacacactatagatgtctatactgtgaagaagtgttgttcaattctgaaaaaaagcatacatcatgattatggcaaagaggagagaaagaaatttattttacattgacattgcattgcttccccttagataccaatttagataacaaacactcatgctttaatggattatacccagaggcactttgaagcaaaggtcagtggggatcgttgaatacattaaagaagagtttctaggggctactgtttatgagacacatccaggagttatgtttaagtaaaaatccttgagaatttattatgtcagatgttttttcattcattatcaggaagttttagttatctgtcatttattgtttttcacatcagttggatcaggaacgtgtataacacatcttagagcaagagtaagttgggtattaaatcctcattagaacaaccaccggtttcactaataccttacccctgatgagtctatctaagcatatgcatttaaagccttcaaattacattatcaacatgagagacatcaccaagaaagacagatgttcaaaataatagtcccatatctgtaatcatatctactgccacgttacgctaatcggaagttttaaaatctatgggcattttacacgatgcatgcacttggaccgctgggcaataacttaatccctcatatccccggtaaaacatttctcagatgtaacggccaataatagaacaagccttatctcgcaaatgcgcgaaaggcgcgcgaatgaataacagcagtttcaaaaatgccactataaaagaggacaacttgcacct

SEQ ID NO: 595980 - DNA, 129 bp, Homo sapiens
cctcctgcctctgcctccagagatgtagggaccacagatgcgtgctaccacgcccagctagtttttgtatttgtattttttggcagagatgggggcgtcactatgttgtccaggctggtctctaactct

SEQ ID NO: 595981 - DNA, 185 bp, Homo sapiens
ggatcccaaattgaggtcgggtgtgggggtcacaggatgtactcgggcactagaagcacagtgccttcacagagcggactgacatgcgcaggaatgtctcgacttgttcctgtgtctttctgtgaagcagtagagcagcccgtagttcttgagcagtggtcatggttgtgcgagtttggtgtcaa

SEQ ID NO: 595982 - DNA, 209 bp, Homo sapiens
tagaccggagcatgattaactatggcatacttagatcaggatcctattaaagtctagaccattggcaatatgatagtaaattatattctcaatttcaatttacaattcatcatttttagatcataacatttttcttttttcttttctttttttttttttttggaaagggattttggcccgcggcccacgcgggagcgagaccccatcat

SEQ ID NO: 595983 - DNA, 143 bp, Homo sapiens
atgctgagattgccctgtgcaattacgcgctccgggacgccatcgaccagcagacggatatcccatgggcgatcaccgcccagtcgaacatcagcgatctccagcagttcgtccatcattcgatggaggtggtttcgattgat

SEQ ID NO: 595984 - DNA, 399 bp, Homo sapiens
tccggttgtaaacgagattcacagcctctccatgtcacgtgggcctgacagaagctcatacatgcctcatgtgaggtgtccaccctctctgagaatcttccttgtccacaacagcaccgacatactctgtgtaaacttttacggtgactttaggcggacggggagtttggaaattgtaaaaggttatagattgttgcctactttcctgctgacagtaaatgtctctaaacacagtatcatatacaagctgacatacaaacttggtttgggggggagatcctttcctaccccacagtcatacaatatcttctttacctgccttgtggaaatttttatagtttatgcctttcaccactttgtcttaacgtctgtcctgatactgctttttgtgcaacttat

SEQ ID NO: 595985 - DNA, 1095 bp, Homo sapiens
gtatgctgtgaactgccagcgtgatcacatggcagaggattatcagccactttgatatttttgcatttggacatttctggcggctgggccatgaaggccttgctgatccgtagttacggtctctgctggacaatcagtattacctgggagctgactagagctcttcttcatgcatctcctccccaatttttgccgagtgctggtgcggatcaagtcattctggacagtcctgtcgtgcacatggcgcgtggcattatggcctgggcactggctcgcttagccggcttcaacagcagatgcaggacttaccactgggcaagcttcaaggacattcataccaccaccgggcaagcatcacgagagctgctctgcagcttcactccatgctagctggcacctactgctcccgactggcttagacccacaaaatccttctctcttccagacgacgctagactggagtgtaccctttctccatgcactcatccttggcaagctagactgacgtcggacattacccctttctctcctctggaaagagccattattctatatgtgcttcacccaagccccagctcattccacttacacggcttcggacgcgctacgcacacttcctcctctctacttggactgcgcacttcacaagcctttcccaccaccagctgcagcacctcaggtacgcttaaccgcctattaccttcacgcacggaccactcccatgattggccaagcgcccgcggcttagagcaacctcccaatgccctcccgctgtgtatctggcgcgatccacttgggagcttctaacccttgcgcaatggtaccaactttgtgtaatggccatctccccaatctctccggcaaccaaagcaccttctcccttcaattctataaaagcaaaaccccacaacacttaaccatgctaactgtgctaggcagccgttaggcgccctacacatcactggcgtctcgttcctacttccaccgcagtgttttagcccgtccctgccgccttgtatccgggccgtgcgcacctcgcgctatcatctcaggtaaaaccaccaacgcgtgttccccgcgtcgcaactacggaca

SEQ ID NO: 595986 - DNA, 842 bp, Homo sapiens
ttacccaggtgtgccgggctacgactgatggggatggagaaccggatgtccagcggagctgcgggctacggatgttgagccagacccaggtccctccagattaccccaggtttgtggagtctgtggatgaatatcagtttgtggagcgccatgtaacacgagacataacaggatcccaggatccccacaaagcatgaacattatcctaccccatagtgagctggaagaccatcaccagaagaaccaccaacaaaccaaaacatgaacattactatatgatacagaacagctcatcgagatgcaacaaaaatccccgatcatacaaaggaacaatcacagcatgaggaaaccggaagatgactgtagatccgagaaagtggaaaggagacatctgggaccctgcagaaagacagtgagaagatatactagagaccgctgcatggagaagacacactgtaaaccagagtcaatgaagtgacaagagtaccctacggatcaaaaggctaaattatgaaccagagacacttaaagacatgagctcataagagacgacaaagggattactgagagaccaagaactaagcagacatgcatatgtaaaaaatagccactgaagaaatcaaagtctaagggagaccacaaagaaaagagagaaagtagaatagtagaaaaacacactgaaaacaaggaaaatacaaaaaaatagaactaaaaagaaataaggagaacaagccatagcatgcataaaagagacaaaaaaaatcaatttacaatatgatagaaaagcctcaagatgaaaacaaaaaagaacaaaaaaataggaaatacaaaaaaaacaaaaa

SEQ ID NO: 595987 - DNA, 811 bp, Homo sapiens
  misc_feature (202)..(202): n is a, c, g, or t
  misc_feature (217)..(217): n is a, c, g, or t
tctcttgtagatcgatgttctgtctgtgcacaactcgtattcgggcgtagtgtgagaatatgactagtggccccccatcttcttctttccgcgtgtagcacgctgtcttgtgcgagaggcagcgtctggtactcagtatccttcgtaggagaaaatattgtgagaatatgaggcgaaggcttttgcggtgtggggagcgccncccccgcgaggagtngcagtaggagcagaagccaataatattctacggcgcacgggttggcgggtagagaatgatgcttcgatgtagactatgtgcgcacgctcgtatgataggaggagatgcgtggcgacggaggtgttaccgaggcgtggcttcgtaagaggctgccctctctgatgtgcaggggggggggtgctttaatgtctgcttgagagagagccaaaggggcagcccgtctctgtagtaaaggaagtgctagtgtatcatgtgtacacaacctctctgtctgtgtcgcaggtagtgttctcccccgcccgcggcatacagatggcctgtgttatgaaaaaaggggtcgtcgcttttggggccggtcgccagcttgtgattttgacagacgagagttgtactcgcccggcctgggatgttcgagtctcccgccggcgtgcgctcccgcggctctctcttgtctgagcatagtctagagtgtagaagccctgttctcggtccgcttcgcgagagaaatgggcttttattaaatggccaccctttcttgctacccggcctccacttgcaggacatccaacatcattctgcccaacaatgtcgaga

SEQ ID NO: 595988 - DNA, 1852 bp, Homo sapiens
ggtggatagaggatgggcggggttgtcgcgttgtggttgggtggagtggttgtggcgtggctgagtgtagatgtggttgtgtgcgttgtggtggttggtgtgatgattgtgtgtgggtggtatgtgtggtggtgcgagatggagtggggcgagggggggaggggtgttagatgtgttggtgtataggtgggaaggtggttgtttggttgaagggtttttggttgggggggtggttggtgggttgttgggttgagtgggatgagatgtggatgagtgatagatccaggggggtgtgtgagggtgtaagatgtgggtgtggtgtgtcgttggagatatgttggaagagtgtgattagctgtgggtggtggaggtaggtgtgatatgcgggtgggtgtggtgtgtagggaggagctttgaggtgtgtgtggagtatgggtgctttgggggtgtgatgagggtggtagggttgtggggtggtggtgagaggtgggaggtggggtcggagtgggtggtgtaggtcgttgcggttgtgggtgggtggagaggggtgtggtcagggcgacagtgggggtggttggataggggtgtggggtggtgttgtataggtgttgtctcgcgggtttgtagatggcgatgggaggtgtgtggttgtgtgtggtgtggtgtgtgcgcagattgttgatggtgcggtttgaggtaggtgagtgtggttgtgtaggtggtatagggggtgtttgtggttgttgtggggacagatgtgtaggatttgggggtggttatgtggcgtagtaggtcctctagactggtagtagttgatatgggtggctggctttcatgagatagtagtgtatggcaaggttgtggtgctaagtggggccgtgtgagttgtgggtgcatagtggatgtggttgtttagtcgtatggtttgttggtgtgtgaggttcggtgtgtgtgtggtggtcaagtgtggggttgttagtggggttgttgataccgtgtggtggtgagtttaatggggtttgtgatggcgcttagtgtgggatgagaagatggtaagtggttgtgtcgtcaatggcgtgtatgagaagttggttaatgtcggttggtatgtctgtcgtcgtagtagtataatggtatgagaggttatgttaggtggcgtgagggcggcgcgtcaagtgtaggtcgtaaggtatgttgtgtgtagtggtgaggtggtgtgttgtgttgggtgagtgaggaggtgtggggaagttgtgtgccgccgtgaagaggtgagtgcgttggtgtcgagtggcggcgtgcaggagatgtgatataagggttggtgagatgtgggagtgtggtgtgtgtagatgagagagagagtgagtagaggggttggtaagtgttgtggcgaagaagagttagtagtaggttgtcagggagttggggagagaaggtgtgcagttgtggtgttgtttgagagaggtggtggcgcggcggagtgtgtgttgtgtcagcgtgtatgttgcgttggagtagagagagtgaggtgggggcgcagtgaggtgtagcgcgcgcgtgttgtcgggcgcgccagtgtactgctctaggtagccgccaggtggagtctgtgggctagagtagaagtagggaagttggtgttcagcgcgctgacggcaacgttagagcagctgttggaagactggcagtaaacctgtcgtcacgcgtggacctgtaagcatacgtggcatctaattcatcagtgctcttttctcacgtccctgagtccaggttccctcgccagaggagccaccagttctcatgggtggcagctcagtctctcgttctcttaagcctgagcggacttttt

SEQ ID NO: 595989 - DNA, 549 bp, Homo sapiens
  misc_feature (433)..(433): n is a, c, g, or t
  misc_feature (451)..(451): n is a, c, g, or t
  misc_feature (473)..(473): n is a, c, g, or t
  misc_feature (522)..(522): n is a, c, g, or t
tatatactgtgactaaataaaaattgccttttgctttcccctaactcttaattcaagtggtatttaatgtttcatctctcgatgtgttaagctgtgtgtggttgcctctatatctattccttaagtatcaccaaccacatttccaagtttttatcagtactctctctttgggaaatgaggaaattgaggttcaaattaattattcaaaatcatattgtgatagtgaagattagaaattcatttaaccccaaaccctagtttttctttgtagtgaagcctacttaagacttacttaatgttgtctttttggtaagattatcattttgaagaaagacccttcaacttacttggtatttaaaatatacttgaattagagccaaggatcttgagcagattaccaaattaagctcgatgcgggtagaaaccaaatggnctttttaatccgagtaanctacctggtttaagtggtggcnggtgatggtaatgaggaaaatgtgtttgggaccttggtcccccggtccngacgtagagcttttaaatcccctggga

SEQ ID NO: 595990 - DNA, 262 bp, Homo sapiens
ggccccttaaaaccccggggggttttttggggcccttttttgggggggggggttgcccccccccttggaaacccctttttttttggcccccccccctgggcaaaagggtttcctttttaggggccccttttgggggggggggtttttcccccctccgggtttggggcccccccccaattcccgcggtttttgccccccccccccccccctttgggcccccttttttttttgggggcccctttttttaccgtttttcccccca

SEQ ID NO: 595991 - DNA, 1223 bp, Homo sapiens
ccacgcgtccgcccacgcgtgcgagcagagccacatccagagtggggtaatagactacaggcggaccgcgatcccagtttctctaaacccacggtactgtccccagtaggtatctccttctcccgttgagtacttgttaattcaccttgtctgcagaggtgtccagagtatctcaagttgtcgaacccttggagcgtcgcgcagctccattcccctaggttgctagactcaatcacgcatggcttagcgcatatgttgactgtcttcaattgccatggcttacagtactaatttgctggcagactcttgtggcccagtcccatgtgctctcagcttgtgagagccactcatgaggggctatcgtgtgcgcatcatgcttctccaggcgccaaggacgcgccttgggccatgctgcatgactggaggggcgaaggggcacgtgaactacacgtttttgccttcgcaccttgcacgtggtggtctgtcaggccactggaattgcatcaggtcgtgctgcagactccgccgcatgatgccaaggcccctctgtccctgtccagctggagtgccctttgacatttaggacggccgagacaggggcctcgagacgcccagggggggactcctaatggggaagcatgcagggaccgcaggctggactgccacggtccgggcgacgaacggaaacgctaggacacgggctttactgggtgtggcgacgcttacctgtaaccaggagtgttcgacggttagcccggaacaagtgggcaaactgaagggctttccctggcccaaatcggctcccttgagaacagcagaaatcagccctgggaagccatgggagcgcatgcatgggcccggcaaggcagggggcggcacgcgggcccctggattgggtagcccggccagggactccatcctccgatatcaagaacccgtcccggaaacggggagagcactgggacaaaatggcgcagaacgtcggacggtgaaccgaaggggcccttctcacgacatagggttaatggggctctatactgccccattgtatcacgagcccattaacctcacttaatgtccccaagccattcgacccgtgacatcatccgcttttccccaagcaaattgtggcgcccatattagggttggcccttagtggccataggcaatgacgataagttcaaagggaaattaggatatgcctttataaagtcaatatacat

SEQ ID NO: 595992 - DNA, 323 bp, Homo sapiens
  misc_feature (23)..(23): n is a, c, g, or t
  misc_feature (46)..(46): n is a, c, g, or t
  misc_feature (57)..(57): n is a, c, g, or t
  misc_feature (126)..(126): n is a, c, g, or t
  misc_feature (144)..(144): n is a, c, g, or t
  misc_feature (198)..(198): n is a, c, g, or t
  misc_feature (226)..(226): n is a, c, g, or t
  misc_feature (235)..(235): n is a, c, g, or t
aaaccagccagcgtgagtggtcntgagctgcccaatgcgggctcgntgacacacacntacacccacatcgagagctgccagtgcagggacaccgtctgcgggcttccccaccggcacctccccgcnggggcccggcgctccccntaggcatctgggggagcgggtgagcggggtggggacagccccctttactgcccntcgacagctttactctcccccggccctntgagcctcntaggtcgggcttctctcctcagatattatggtctgagtctttgttcagtccttgcttttcccaataataactcagggggacatgcaaa

SEQ ID NO: 595993 - DNA, 118 bp, Homo sapiens
tcatctttacgagtatccccactcggatcgcccttttttcgtgccttctcagtgtttaagactcatttcttgctcagccgccatggttcctaacatcatctatcatcacctggaataa

SEQ ID NO: 595994 - DNA, 352 bp, Homo sapiens
cagagtgcaaccttgtctcaaaaaaaaaaaaaaaaaaaaaaaaaaaagaaaaagaaaaaaaaagttggaatgacatcagactctgtgtcacttcgcagtggggatgcaattctgagaaatgcatggttaggtggtttcatcattgtggaacatcatggagtgcacgtacacaaacctagatggtgccgtctactacacacacacttaggctgtatggtctagcctcttggtcttagcctacaaagctatgcaacgtgtgattgggctgcgtactgtaggcagttgtaacagtggtatgtgtatatctcaacatatctaaacatagaaatagtacagtctggttgtcatgtgc

SEQ ID NO: 595995 - DNA, 117 bp, Homo sapiens
tcctgtaggaacctgggtggttattggcttaatggggtttgaacttatggcctcggattgggggacacgactctctgaagcgccagtcaaacatccccaaaacgcaaaaaccacgcg

SEQ ID NO: 595996 - DNA, 397 bp, Homo sapiens
  misc_feature (10)..(11): n is a, c, g, or t
  misc_feature (87)..(87): n is a, c, g, or t
gaaggggggnnccccccccccctttgggagtgtgttaaattcccccccagggcgcaggggcttttggggaaatcccccaagtgggantttcccaagtttttttttccaaaaaaggggggggtggtttaggccttcgggccccctggagggccccctgttttttaaaagggcccccccccctttttttttgtcccccagtttgtgggccccccccagcccccgccccccccctttgggcctttccccgggccttttttggggctgccttcaaaccttttgggtggggggaccccaaaattccgggggccccccccccgggggaggttccctggcctttttgggtttggttggggcccccccccccggtttcctttttgggttttaccccccattttta

SEQ ID NO: 595997 - DNA, 315 bp, Homo sapiens
gtgctcttcacccatcatagaagaactcctacacttgtcacgatcacagcctaaagtaattgtattctttatcggctcttttgttgttatatatcatttcacttatagctaacaacaaaactgacacacactagcacgatggatgccctagaagttgaatcaattttgaatcatcctacccgctattattttaattcttattgcccttccatcattacaaatcctttatataatagacgatattaataacccagctcttaagcgtgaaaaccatagtacatcaatgatactaaagctattaggcggtaaaagctt

SEQ ID NO: 595998 - DNA, 566 bp, Homo sapiens
acgagggtcatgtcagtggttatacctagatgaatggaatacctagctaatataagtactaaaactactgtattggcaatcgttgccaagaacctgatgacggaaaccacgaggtaactggaaattcccaaattgcgcttaagaaaaatactacgagactagagaattttataacgtaacttcctaagtgtaagatgacaaaatatgactttcgggatatactggcgttaattttcccgtccgcctaaatgtgggccaaaattcacagctacgttatattaagcaaatattaacagtgcctattatttgctgggtgctgaaatttgataaaaaacttaaaagttaaaaaaaattgtttagatctttagtgtcacattgacttatctgggacatcgctttttttaatcctcacatgagatttggctaagtttatttttcacaatctgttaatctcacaaaaactaaagctgttaagcacagtttaaacccattctgcagggtaagaaattcatctgtaaggcaatctatttgataggaagtaaaattagggtcacttccatcgcata

SEQ ID NO: 595999 - DNA, 225 bp, Homo sapiens
ccgggttttttttaaccttgccttttgttcttcctttttaaattttttttttttcccattgttgttttacttttttaactgccttttttttaccaaattttttcccattgttttttttttaaataattccttttttcattgggagttgagggaacctttttttaagggtttttggatttttttttgttgattattaactttttttgaattattaattttgttgga

SEQ ID NO: 596000 - DNA, 549 bp, Homo sapiens
gtgtgggtggagtggtcatattgagttaggttattacgaaatcatgaagtgttccctaacaagaaacttgcaaagctgatttggcaggcaagaaaatcattaacttctagtttatttatttttattctcatgctatacgcttaattaccacgtagaatccactgtgcatagccattcaccttatattcatacaggacgaagccagcaatgttctatcatcgtgtcgggagtacaatactacatcagattctttaccactggggaaatagaataatactgaattcccaatacagaaatactaactttcataagtctaatattccttatcttttagctgacgttctttctctcttcagcgatactagtttactatttagttattctcacctttgaacttctggacttcgggggagttttcacctattgccatcctactatcttaagtactcctgtacaatgcaatatcttagcaaggaaacagtttgaaaacttcacaaatatccaatttcattcttaacatatgggggaagcagtgaaatgaaacagcac

SEQ ID NO: 596001 - DNA, 236 bp, Homo sapiens
agggatactgtcagcgagatgttgggtctggaggtgatgagatcgggcacacttgagctgagtcaccagaccctattgcttcaacagtgcttggccccgccaggttgtcccagccactctagctgctggatgtgaatccctgggaaatgtacttccaaagcctctgtcacaaaatataaaaatcaccagggaggtttgccccagtgaaaggtgccttggcccagcacttaaggaac

SEQ ID NO: 596002 - DNA, 260 bp, Homo sapiens
ggcgaccgcacacgagcgtgtaccttccatcgtacgggcgcccagacaccagtgcgtcatggtggtgcatgggccagaaggactcctacgtgggcgacgatggcccagatgcaatgcgtggcatcctgaccctgaagtaccccattgagcatggcatcgtcaccaactggtgacgacaccaccacgacgaaacgacgacgacgaattccggcaccacgacgacgaattccggcacgaccacgacgaattccggcacgacg

SEQ ID NO: 596003 - DNA, 853 bp, Homo sapiens
  misc_feature (195)..(195): n is a, c, g, or t
  misc_feature (550)..(550): n is a, c, g, or t
ggagcagaggtctgattctagcgtgggtgctctatatggtgatgaagcgtggcgctcgggtcctgtcctcgtggaagtcctggcgcaaatgggccacggggccgtggtggtggccccgtgggaccgactgagagcctaccgcgccgtgacctggcgctccctgggcgtggcagctggtggcatccgtcgcgcgcntggacatgggagtctccccaggctcgccggtacttctcgtgcatggctgccagtcctaacgcttgacatgggattcaggtgcgcgcgttcgatagggcgggcacgagaatggtttctgggctatggcgcctctgtgggacctgacggagtggctgtcgtggcccgggcttcccacgtgaagcgtggtagagggctcctgtattatgtgacggcgtggaggtgaggatcgtgcgcacttggaaggaccacggagtcttggccgcgcgaccgtgtagacgcgagggaccagagacgcacgcaggctcgtcctccacgtgtggcgggcttcgagggactggttcacggatctccaagnaggctatgttggttcccctgggaaagctcctcagttcgtgctccgagagtgttttggcaatgggtgtggcttcaggtcatgatgatgtgcaggcatcgagacagagtcttggagctggttggcagttggaaggagttcagtgaccatggtggagcgaggagattctagtagcaagctgaagagagattgagtcggtagtagcgggaagaagcggtgaccctcgttggaggatatgcagaggagagcttgggaagatgagaacaaagggagaagagaaatttgggaacggaaaaggtgtcagcg

SEQ ID NO: 596004 - DNA, 136 bp, Homo sapiens
  misc_feature (8)..(8): n is a, c, g, or t
accgcaantctcaaacaccgcaaatcgaacaccattaattagaatagtggagttctttccccattgcttgtattgtcgactttgtcgaacaatcaaatggctagtaggtgtgtggcttaacgttcttagttctcta

SEQ ID NO: 596005 - DNA, 139 bp, Homo sapiens
tttgccccttccctcaaacagggggtgggtggggaggctttttaggcccaggaaaagcattttaaaaaaaccccccccctcccgcccgcattttaaacccaggggaataatcaatagaataaaaggggccgcctgtcca

SEQ ID NO: 596006 - DNA, 342 bp, Homo sapiens
tgtattggtggtgctcccctgaagtcctggctactagggcgactgaggcaggagactcgctcttgtcacccagactgtagagcagtgtcacgatctgggctcgatgcagcctctgcctcccaggttcaagcaattttcctgcctcggcagggacggggtttcaccatgttggccaggctggtctcgaacccctgacctcaagtgatcagcccacctcagcttcccaaagtgctgggattacaggtgtgatccactgcacccggccggcattatgattttgtgtactcttgaaatggttatctttgtggatgattttttttttaagctgaaacttacctcatg
